United States Patent Application Publication US 2003/0073623 A1 - sequence listing, part 2

SEQ ID NO: 5499 - DNA, 539 bp, Homo sapiens
  misc_feature (1)...(539): n = A,T,C or G
aggattgatgcgtgaccgtccggattcccagtcgacccacgcgtccgctgagttcagaccggagtaatccaggtcggtttctatctacttcaaattcctccctgtacgaaaggacaagagaaataaggcctacttcacaaagcgccttcccccgtaaatgatatcatctcaacttagtattatacccacacccacccaagaacagggtttaaaaaaaaaaaaaaaaaaaaaggggggggccgttttaaaggatccctgggggggccaaagtttacccgggcttgcaaagaaaaacttttttccttatagggggccgaataaaaagctacctgggaatttttggaaagaacccttattttgggggggggacatattgggccaacctccctacagaaattaaaggctttagggaaaaaataaaattttaaagggtataaggggtaaaacaacctgcatatgctggcgggtggaaaaaaaaaattggggnnnnnnnccccccccccccnnnncccccccnnnccccccaccccccccccaac

SEQ ID NO: 5500 - DNA, 431 bp, Homo sapiens
cccacgcgtccgcttaggaaaataagattacctgcaaaataaaaaaagaaatgagttttggaataggaccagttgggggaggagtctgaacctttaacttaaagcttctttactttaaaaagggaaaccaccctctgagttggattccccaaagtttcataaagcccctaagctcatgattttcatcaactctttgcccacatagtcttttacctccacagccgttggttgtcataaaaggggggggggggttgggatttgatttttttcaacttgcacggagaaataggataggggacaaaaccttactggttttcttaaaacaattcagggcttgagcttctctgccagaaatggaatgaaacacgtgaagccaataaaaataattttaggattgggcattgggttttgctgattcttatatgaaaata

SEQ ID NO: 5501 - DNA, 462 bp, Homo sapiens
  misc_feature (1)...(462): n = A,T,C or G
gtggtgtanaacttatgcagtcgacggcnaggcannnngggggaacacgcgaccggctctcgcccgtctgggcagggcccggcgccgaccgtttattaaccacagaacctcttccaccttccgagcggagagaagattccattcctctttctcttactcctcctcttcacacctcctcctcggcctcccgtgctctcccggcccaggacccgtccatggagaaggccctgagcatgttttccgatgactttggcagctatatgcggccccactcggagcccctggccttcccagcccgccccggtggggcaggcaacatcaagaccctatgagacgcctatgagtttgtggtggacgtgagagacttctcacctgaagacatcattgtcaccacctccaacaaccacatcgaggtgcggcctgagaagttggcggctgacggcactgtcatgaacaccttcc

SEQ ID NO: 5502 - DNA, 408 bp, Homo sapiens
tatgggaattgtggttaggagattctggtttgaatgcatggacagcccttatgtaatacattattcatgacctctagtgcggctgccatcatagtctactgaggaactgccaggagaccttgacttctaaaaagcagtacttttgtgtatcagaatgatgttcttacctcgcctggcagggaaattttctccaggactgacagtcttctctgaaaggcagttcataaatagcagatgcagggagggttttgtgatggtggaaactgataaaactggacgtggcccagttgccatcaatgaatctgctctaccaatgttagccacgtagaacattgtgaagttgaaattaaataatgaagaacattaaataatgtatgacagtctgcattgtagttaatataggttgcg

SEQ ID NO: 5503 - DNA, 401 bp, Homo sapiens
  misc_feature (1)...(401): n = A,T,C or G
ccagaatgaaaatatttaaagtgatgactctagataagccatctgtgcctggttaacattgagtttgagtctcttcaatatatattgatcatgtattgattaatctttattttttcatattttggctagacaaattcagatctatataatggaataccccttcttgagtgaactatactactaatctacatgattatatagtaaggaaaaaagaagaaataactgtaataggcatagtgtttgttgttggttgtcttgtcattcatgtgatactactcatttccaaaattcacacaaacttacatgaggtggattatttgttttgttcattatttagttcccatatgttttttctttagaaacagagtctcattctgtcacccaggctggagtccaatggn

SEQ ID NO: 5504 - DNA, 396 bp, Homo sapiens
aacaagatcggcaagccccacactgtcccttgcaaggtgacaggccgctgcggctctgtgctggtacgcctcatccctgcacccaggggcactggcatcgtctccgcacctgtgcctaagaagctgctcatgatggctggtatcgatgactgctacacctcagcccggggctgcactgccaccctgggcaacttcgccaaggccacctttgatgccatttctaagacctacagctacctgacccccgacctctggaaggagactgtattcaccaagtctccctatcaggagttcactgaccacctcgtcaagacccacaccagagtctccgtgcagcggactcaggctccagctgtggctacaacattgggtttttatacaagaaaaataaagtga

SEQ ID NO: 5505 - DNA, 458 bp, Homo sapiens
gctgctgcgccgcgctggcggcctttctgttcgagtactacacgccgcgcatcgtgctcatccgcagccgcaaagtggggctcatgaaccgcgccgtgcaactgctcatcctggcctacgtcatcgggtgggtgtttgtgtgggaaaagggctaccaggaaactgactccgtggtcagctccgttacgaccaaagtcaagggcgtggctgtgaccaacacttctaaacttggattccggatctgggatgtggcggattatgtgataccagctcaggaggaaaactccctcttcgtcatgaccaacgtgatcctcaccatgaaccagacacagggcctgtgccccgagattccagatgcgaccactgtgtgtaaatcagatgccagctgtactgccggctctgccggcacccacagcaacggagtctcaacaggcaggtgcgtagctttcaacgggtct

SEQ ID NO: 5506 - DNA, 444 bp, Homo sapiens
aaaaattcaatgtcaaggtagaaattgagaagctggattaccatcattatctgcctctgttttttgatgggctttgtgaaatgacatttccctatgagttttttgctcggcaaggaatccacgacatgctggaacacggtgggaacaagatcctacctgtccttccacagctcattatcccgataaaaaatgccttgaacctccgaaaccgacaggtcatctgtgtcactctcaaggtcctccagcatctggttgtgtcagctgagatggtgggcaaggccttggtgccttattaccgtcaaatcctccctgtcctgaacatctttaagaatatgaatgggtcttactctttgcccacgctggagtgcagtggcgcgatcatggctcgttgcaacctcgaccacctgggctcaagtgatcctcccacctcagcctctcaagtaa

SEQ ID NO: 5507 - DNA, 418 bp, Homo sapiens
  misc_feature (1)...(418): n = A,T,C or G
cccacgcgtccgcctgttcaagaggagttttagaaatatattctggttttgcctctcattttccttctctttctgtctctggtctccagtctctatagtaggaagcagaggtacagaaaaaataattccttcaaatgcttgtgtggagtgaaagtgaagggaaagttggtcaaccaaaactaagtagttcttttaacaagtaaatgcagggctcactcctttgagctccctgctccagcttggctgcttcctgcctgggacttcccttcatgctgagctggcctcctgggatctgctcagccccactaatactaattgaaattccacttatttttggatcccagatttctcctgaaaccttctctgatagcacacaccgngggtttttttttaatctgcttcaaattcctattaattt

SEQ ID NO: 5508 - DNA, 403 bp, Homo sapiens
  misc_feature (1)...(403): n = A,T,C or G
ctccaagcccttgcaagttgtagtatgacttgttaccagcatagtatatgaagagaccacagagaaagcttcaaagtcctctataccctccacacaacttcaccaactagtatattagcaatactaaaaatttctttaggtagcagacacaacttatcttcataaaatcctctctctctctctctctctctcactcagattttttccttcttttgattgcacttttaatcacataccagcaaagataatctccagcaactacatgttcacaaaatccctatttctatagttacagaaggagaaaaccccagtattaatatcagtcctcacaaaagccagatctctttgtatctcctgtccactactgggcccaccagtatggctcagaggatagtacaatctn

SEQ ID NO: 5509 - DNA, 427 bp, Homo sapiens
  misc_feature (1)...(427): n = A,T,C or G
cttgagagaaagactggaagacctgaaagccacttctgctttctaaccccagttccttaaatattgaaatcttgtacattttgtgaaattccagtatgttttgcttaaggtgttaataaaattagtttgcatcatgtactcattgagtgagggggagatataagccaaggattttaaattgacccttagctatagagaatttgctataagctagtcttgtttgtaataaaaaaaaaaaaatacaaacatgacaaagggggattttactgttttctgaataaaggaattctgaaactgcgtggaagcctttttttttttaaataaaaaaaagccttattggccctgttggagcaaggaatttagctaaaatccttcctttaaaaaaaaaattttttgccctttaccaattccttatctatgtcttttn

SEQ ID NO: 5510 - DNA, 466 bp, Homo sapiens
  misc_feature (1)...(466): n = A,T,C or G
aaaaagatgactaacccattagaaaaaagagcaaaggatatgaacaagcagctcatggaaagatcttcaatctcacttgtaattaaatgtatattaaagaaatacaaatcaaaacacaacatggttgccattttttaatctaccaagttggcaaaaacgaataagtttgctaatacttttgctgctaaaggtgggaagaaatgagcactctcaaaaatgctgtagggtgaggtgccagatggtgcaaccaatcgggaagggtatggcgaagctactacagcatgctaatataaaaatacaaggacagacaacacagcactgtgtgtaccagtaaacagcgaaagaaaagagccatcttcagggtccagcagtaggagagggagtaacttcattaagatacccattactgngactttgtcctaggatggacagatctccaggtcatatttctactgaaaaattcaag

SEQ ID NO: 5511 - DNA, 403 bp, Homo sapiens
aagaggaagagaagcagctctgaagatgcataatccctagctccccgatcaaaagtaaagaaaattattcagaaagacatcattaaggaagcatcagaagcttccaaggaaaatagagccccatgtcttaacggagagcttttttatttatttcaagatatagaaatctctactgaagaggaaaaggatactggagatctaaaagatagctctctcttgaaaacaaaaaggaaacataagaaaaaacataaagagagacataaaatgggagaagaagttataccattaagagtgctatcaaagagcgaatggatggatttgaaaaaagagtatttagcgctacaaaaagctagcatggcttctttaaaaaaaacaatatcccaaataaaatcagagtcagaaa

SEQ ID NO: 5512 - DNA, 406 bp, Homo sapiens
  misc_feature (1)...(406): n = A,T,C or G
agcgggacaaggatcggactcgaaatgtcctggaacggtcagacaagaaggcttatgaagaggctcagaagcgcctcaagatggccgaggaagaccggaaggccatggtccctgagctgcggaagaaatctcgccgagagtacctggctaagcgggagcgagagaagcttgaggacctggaggcggagctggctgatgaggagttcctttttggggacgtggagctgagccggcacgagcggcaggagctcaaatataagcggcgagtgcgggatctcgcccgggagtaccgggcagctggggagcaggagaagctggaggccaccaatcgctaccacatgcccaaggaaacccgaggacagccagcccgagctgtggatctagtggaggaggaatcaggagcccn

SEQ ID NO: 5513 - DNA, 428 bp, Homo sapiens
caacaaccctaattatggtcacaatgctaccaaactgtatatggtagctaatttttctttacctattttctaatgtcatgactcctgtttgcccaatggatcatttgtatgttaaccactgtatgtaaccaacccttatctggcaacataattgcagcacaataatgatttgcatgataccttgaaattggggggagggggcatgccaagttgggcatcactttgtcttatcaattaatgggatattgattactaaaataagttaatattaagcaaggtgccggttgtacaatctctgatcagtgtcttttcagcactttgagcatttacttggctcatttagtcttccttttgtagcgcatggttgggaggaaaaagtgcatgcatcattccttcactcttctctttttcccgcccccccctccctt

SEQ ID NO: 5514 - DNA, 396 bp, Homo sapiens
  misc_feature (1)...(396): n = A,T,C or G
agattttcagctttctcctttaaagagctgtgcctggctggatgatgggttttatacacgtttttatgttattttagaatgtacagatttttttgtaaacatgcaaagggaaggttacaaactccttaaactttaaaaaaccataaatcctttctttgctacttatattctatgccaattataatattccaagacttacctttcttcagaatgcttacatatggaaaggtttatttataaatatttgataggtaaatattccatatgtattttctagcccgtctttctctgtccctccctcaaataacttcattaccctctcctttttaaacgaaatatcttgataataagaaaacaaaatcatttttttgtgaaataatacatatggacaaaaan

SEQ ID NO: 5515 - DNA, 445 bp, Homo sapiens
aggaggctggaaacccaggaaagctgatggtgcaaggtccagtccaaaggtatctgttggaggattctcttgttctgggaagaggacggtctttttttctcttcagaccttcacctgactggatcaagcccactaacatcgaggaggacagtctgcattactcagagttcactgattgatttaaatgtcaatctcatataaaacaccctcacagaaacacctagaataatgtttgaccttataattggaaaatcagagcaaaagttaaatctctaaaaaaaaaaaaaaaaaagtatgacccagtagctaggcccctggggccccgccaagttgacacataaaattaactgtcacagtttcatcttaaaagagaaaaaagcccttttatcctgcagggcccctctaccaccacctactgacaaagaacatggggctatctggcatg

SEQ ID NO: 5516 - DNA, 419 bp, Homo sapiens
aagggcagtgggttcggtggtgtgggaaagaaagacgaatggcaggcttcttccccagattctgcccgggtccacacaccctggcccaccttctccatatccccctcttgcagcagaagccaggaagacttggacaagcaacaagcaacagtggctatcgtatttattcagtgtcttcgctgagccacagcctcagcacaatcaagagggactttcatgaaaggcaggaatgcagataaaacaaagatatcagaaatttgcacctatgtttctaggtacaagagaaggattatttccaacaatctttgcaaaaaaaaaaaaaaggggcggccgttatagagaacccttggggggcccaagtttaccgggggagggaaaggtaaaattttttccctaaaggggggcgaattaaaacccaa

SEQ ID NO: 5517 - DNA, 392 bp, Homo sapiens
ttgctttaatccttgcttgttaacctaataaagcaaaggaaaatatgttgctttaatccttgcttcttttctcttttggtaatagaaaaggtaaataagatgtaatgttgaactgctggtgatgatttctaaaacgactctttaaatactcctttcctatggacttatattaaagatgcattgtacacattgttttagcagatagatcaaagatatactcagtggtcatctgttgcattatcagaaatttgatacatgttacagaagcatgaggaagggaatcctatccacttttgaaaatagagttcacattgcaagcgacatagggcattatcaaaaccaattcagagcctggcacaaaataaacttgagattttttttttttttttttg

SEQ ID NO: 5518 - DNA, 399 bp, Homo sapiens
  misc_feature (1)...(399): n = A,T,C or G
aacccannnnnaacgctttcatgatactgatcattgaggcaacctaaaactgaaatgtccaatcgactacagatctgctggaggacaaatttcttttatgacttggacgcactgtggctattgaaaaatggccggccagtgggctttgcaatcttatcttatgggataggattagaggaaggcgtgtgtcagggtaagattcatttggaactaaatcagggagtagatttactgagttacaatgaacacagcagggtacggggatgtgaaacagaaccacaaaggctgccctcactaattgagtgatggacaccatatacttgcctctttccttccctttaccctttgacaatctatatgttgtacattactatcctattgagaacattatataatgtg

SEQ ID NO: 5519 - DNA, 508 bp, Homo sapiens
  misc_feature (1)...(508): n = A,T,C or G
agcgccccatattgacacctcggcatcgggcacgacccgtaannnctgggacgacccacgcgttcgtccactcatgcgggttaaagccgcgccagtgcccaacatgacaccttcaggagacggacgggagaggcactcgtgggacgcgctgaatcgctggctgggagaacagctgaagcagctggtgcctgcaagcggcctcacagtcatggatttggaagctgatggcacgtgtttgcggttcatccctttgatgaccgcagcagttttaggaactctgggagaggatgtggatcagctcgtatcctgcatagaaagcaaactgccagtgctgtgctgtacgctccagttgcgtgaagagttcaagcaggaagtggaagcatcagctggtctcctatatgttgatgaccctaactggtctggaataggggttgtcgtgtatgaacatgctaatgatgataagagcagtttgaaatcagatcccgaaggggaaaacatccatgctgga

SEQ ID NO: 5520 - DNA, 515 bp, Homo sapiens
  misc_feature (1)...(515): n = A,T,C or G
aggaattgagcaaacaatttgtatgttggatggtgtgtttgcatttgttttactggatactgccaataagaaagtgttcctgggtagagatacatatggagtcagacctttgtttaaagcaatgacagaagatggatttttggctgtatgttcagaagctaaaggtcttgttacattgaagcactccgcgactccctttttaaaagtggagccttttcttcctggacactatgaagttttggatttaaagccaaatggcaaagttgcatccgtggaaatggttaaatatcatcactgtcgggatgaacccctgcacgccctctatgacaatgtggagaaactctttccaggttttgagatagaaactgtgaagaacaacctcaggatcctttntaataatgctgtaaagaaacgtttgatgacagacagaaggattggctgccttttatcangnggcttggactccagcttggttgctgcactctgttgagcagctgaaagaggcccaagtacag

SEQ ID NO: 5521 - DNA, 519 bp, Homo sapiens
cccacgcgtccgtgtgtatattgttcataacaaaactataatatacctctcaagtatgaacaatatacacataatacatggtatacagttcatacttgagaggtatattatagttttgttatgaaagtatgtattttgccctgcccacattgcaggtgttttgtatatatacaatggataaattttaagtgtgtgctaaggcacatggaagaccgattttatttgcacaaggtactgagattttttttcaagaaacagctgtcaaatctcaaggtgaagatctaaatgtgaacagtttactaatgcactactgaagtttaaatctgtggcacaatcaatgtaagcatggggttgtttctctaaattgatttgtaatctgaaattactgaacaactcctattcccatttttgcttaaactcaaattctggggttggtatatatccattccagcttaatgcctctattttaatgccaacaaaattggtggaatcagattaaaaaatatatattttgcccct

SEQ ID NO: 5522 - DNA, 423 bp, Homo sapiens
  misc_feature (1)...(423): n = A,T,C or G
gaagctagggcataaagggacagagacacccatgaggacatacggatattcaggacagacagcttggggctcacagaccatccagcacacacactcacactgatagacatgcagactggagtgtttgcagatccagaatacatacccttgcacatgcacacactgccctccctcatgtttttgatatgctccctttcttacatgtggacagaagttgaggagtcccctaaaattttggggagatgggctagggagctaggggagtagagtgacttctagaatgtaatggatatgggctaaaggctttgatgctctggtgttcttcagtaggaaggattccaggagctgagggtgtcaggagttggggttttaaattcgggtatgaggagggggtggggactcttgagcttccagggtgggtan

SEQ ID NO: 5523 - DNA, 514 bp, Homo sapiens
  misc_feature (1)...(514): n = A,T,C or G
agattcccaaggagtaaccataaaagatttcttttattttgtccatgacctacgagacaggatcattctaagaagagcaggcatgagtttgagtgcaagaagagtcactctgcctgcaataacgccaataattctacagaagagggtgattaaagtatacagtgaagatgaaaccagcagggctttagatgtacccagtgacataacggctcgagatgtttgtcagctgttgatcctgaagaatcattacattgatgaccacagctggaccctttttgagcacctgcctcacataggtgtagaaagaacaatagaagaccacgaactggtgattgaagtgctatccaactgcgggatagaagaagaaaacaaactatactttataaaaaattatgccaaatatgagttctttaaaaacgcaatgtattcttttgcagagcatatggtatcttttgaactgaaaccaatggtganatatccccacacagattttggatatgttctgagttcngcn

SEQ ID NO: 5524 - DNA, 420 bp, Homo sapiens
ggcagggctgagccagcgacgccctccattcactctccgcgcccgttctccggctgtcctcccgttccgctgcccgccctgccaccatgacggaacaggccatctccttcgccaaagacttcttggccggaggcatcgccgccgccatctccaagacggccgtggctccgatcgagcgggtcaagctgctgctgcaggtccagcacgccagcaagcagatcgccgccgacaagcagtacaagggcatcgtggactgcattgtccgcatccccaaggagcagggcgtgctgtccttctggaggggcaaccttgccaacgtcattcgctacttccccactcaagccctcaacttcgccttcaaggataagtacaagcagatcttcctggggggcgtggacaagcacacgcagttctggaggt

SEQ ID NO: 5525 - DNA, 397 bp, Homo sapiens
tgggagtgcagtggaagtgaggagaggcaggtggcaacgtcagtcttttacaaagaatatccccgattgcagtcagagagaggagaagagaaggaatatgaaatctcagtttccagagagagatgcagatgccagaagggacaattagagaactaacaatgagtctcttcatctggaaaaaattggaagtcaaagcaaggagttatttcctactcatcagatcagataccatcagcataatgtcatcaatgcagtggaccagtgtgacatggggaacataaagatggtcacgatttttgcagactccatatgcaaagtattataggcctttccatctatccggagtgacctaccagagacaggacagtttgaccagcaagcttctgatcactcttca

SEQ ID NO: 5526 - DNA, 400 bp, Homo sapiens
  misc_feature (1)...(400): n = A,T,C or G
cccacgcgtgcgcccacgcgtccgcttagttttaagaggatcaatttggttgctctggtgaaaaaagactgcaatgagagttgtttggatgcttttccaagaatccagtggaaaatgtgattataataggatgagaatcatagcactggaggtaaagttatatctagtagaatttgctggctggaagtaggacatgatatagagaatggagtgtagatgttttgtttgttttgtgtgtgtgtttggttttacttgaaaactggaaggacaaagttacatttacaagatcgaaaagacaggactaacacaacaaaataacgacagctcagttttcatcatgtaaagttgaagagacctattaagcattcatgtgaagatgataagtaacaattgggttaan

SEQ ID NO: 5527 - DNA, 421 bp, Homo sapiens
cagtgcgatttggtgaaggaagctaggaagaaggaaggagcgctatcgatttggtggtgaagctaagacaagtattggagaagtatagaagatagaaaaatataaagccaaaaattggataaaatagcactgaaaaaatgaggaaattattggtaaccaatttattttaaaagcccatcaatttaatttctggtggtgcagaagttagaaggtaaagcttgagaagatgagggtgtttacgtagaccacaaccaatttataagaatacttgaagctagaaggggaagttggttaaaaatcacatcaaaaagctactaaaaggactggtgtaatttaaaaaaaactaaggcagaaggcttttggaagagttaaaagaatttggaaggccttagatatagtagcttagtttgaaaaatgtgaa

SEQ ID NO: 5528 - DNA, 476 bp, Homo sapiens
  misc_feature (1)...(476): n = A,T,C or G
cggccccnaaatgagaactgacaggcntcgccaaggaacctcngggnngacccacccgtccgctggagaaggtgcacgaatgagacaccacttggggatctctcttagcaggctctcgtgaatcagctcgtcatcagatggctttggtgcatggcacatatcccactggactcttctggtgccactgtcacccacggctcccgggcctcaagcagtccccacctacgagggcctggcaacctaggccctccttgaagtttacactttgccactgctggaggctcccctgagtcctctgcatgagtactgcaccccaagcccttgccccagcccaatccatcagcagatgttacgatctgagtgaggacatgcaggccaacttttaccctactgcattagcctggacctgatctcgcctgtcctcatggatccacactttctctgctggactggactggagactatcaaggtatctn

SEQ ID NO: 5529 - DNA, 517 bp, Homo sapiens
  misc_feature (1)...(517): n = A,T,C or G
cccacgcgtccgcgacttcctgcgggaaacatggcggcattgagcggagtccgctggctgacccgagcgctggtctccgccgggaaccctggggcatggagaggtctgagtacctcggccgcggcgcacgctgcatcgcggagccaggccgaggacgtgagggtggagggctcctttcccgtgaccatgcttccgggagacggtgtggggcctgagctgatgcacgccgtcaaggaggtgttcaaggctgccgctgtcccagtggagttccaggagcaccacctgagtgaggtgcagaatatggcatctgaggagaagctggagcaggtgctgagttccatgaaggagaacaaagtggccatcattggaaagattcataccccgatggagtataagggggagctagcctcctatgatatgcggctgaggcgtaagttggacttatttgccaacgtagtccatgtgaagtcacttccttgggatatgactcggcacaacaatctagaactggtgatan

SEQ ID NO: 5530 - DNA, 525 bp, Homo sapiens
  misc_feature (1)...(525): n = A,T,C or G
tgagcgnnnntttgangccgtggacatggacgactgccggaccggacccacgcgtccgggagcacggcgagcagctctaaggcacttnccacgctacttcgaacccccatgtcatcattttgtttgcttccagcagagcatcctggccagaacaagccaaggagccaagacgagagggacacacggacaaacaacagacagaagacgtactggccgctggactccgctgcctcccccatctccccgccatctgcgcccggaggatgagcccagccttcagggccatggatgtggagccccgcgccaaaggcgtccttctggagccctttgtccaccaggtcggggggcactcatgcgtgctccgcttcaatgagacaaccctgtgcaagcccctggtcccaagggaacatcagttctacgagaccctccctgctgagatgcgcaaattcactccccagtacaaaggtgtggtatctgtgcgctttgaagaagatgaagacaggaacttgtgtctaatagcatatc

SEQ ID NO: 5531 - DNA, 533 bp, Homo sapiens
  misc_feature (1)...(533): n = A,T,C or G
tggaggccnnnnattgangcccgttgtacctgtgacgacttccggaccggaccgcagacttccggtcgacccacgcgtccgcggacgcgtgggtgaactcaagagaacatgaaaggcaatccagatggagggaaaaggtgtgagtccgcagcccggcccagatgcgaaggtctcatgcgtgtcgtctaaacacttgtcttcaaggccttctctctgacatcttggaagagtcattgagaacagataacctggttcattgatttttgtcttgatttgaatatttaacttattaatagatccactgatttccaggcaccaggcagtagaagagactgggattcaggtgaccatgaaggcacagctgctacttctgggccgggggtgatattttgatcagcgttttgtaggggaggaccatatacccctattcccatggtcgctggctgggttttccatatatctgctggcatttattcgntttccccttanaagcaaaatcaatgtagaaggctatgtttacgttctactcattg

SEQ ID NO: 5532 - DNA, 497 bp, Homo sapiens
  misc_feature (1)...(497): n = A,T,C or G
ttttgatgagcctgcggacatggacggacctcccgggnccacccacgcgtccgaattacatgaatgctgccatggngcacatcaacaggtccctgaaactcattattcgtctctttctggtagaagatctggttgactccttgaagctggctgtcttcatgtggctgatgacctatgttggtgctgtttttaacggaatcacccttctaattcttgctgaactgctcattttcagtgtcccgattgtctatgagaagtacaagacccagattgatcactatgttggcatcgcccgagatcagaccaagtcaattgttgaaaagatccaagcaaaactccctggaatcgccaaaaaaaaggcagaataagtacatggaaaccaganatgcaacagttactaaaacaccatttaatagttataacgtcgttacttgtactatgaaggaaaatactcagtgtcagcttgagcctgcattccaagcttttttttaatttgg

SEQ ID NO: 5533 - DNA, 406 bp, Homo sapiens
tcagcgggtgatgctgtgctagaaatgttgaaggagatgtcctgcagtctttaaactgaggagacaaagataggctagagtaagcaccttgaacagatacttactgatcttggcctcaagaaaaagagaggtgggaagtggactgattgttaattaaagctgctgtctggcctaaacccagctcaatacctcactgtatctgttaatagcagagaaaagactctctggaggaaaataatgctgacttcagtctctacgttcttctatacacaaagtccagtgtaataaaaattacaagccacaggaataacatgaaaatatgactgaaaatcaagaagaaaaatagataatagcagcagacccataagtgattcagatgttgaaatctacagtcaaggacttgaaa

SEQ ID NO: 5534 - DNA, 498 bp, Homo sapiens
  misc_feature (1)...(498): n = A,T,C or G
nttttgataagcctgcggaattnttgacggtcttcccgaancgccccacgcgtccgcccacgcgtccgacatgtgtctggtaccatgaaggattctggtaccatgtttttttgttggggttactaaactgtgtgactcttagggaacagtatgaaggcataatatagctctgcatttgtggcctagtttggatggctgcctaaggcctccaaataaagacttcagggctttgtgatctttatttttagatgaaatagtgcaataatatgtgttttcataaatcaacctgagtaggggacagttttagtgacacactttggtgcttctgagaacagcacaaaattattctcttgtttataatggatattgcattctgctcagtactggtgagggaaatctgttctcaagtcctacagtgcattcatgtgtcctgaagtccagaattctgtatgatagtgttctacgttataagcctggagaagaaattatatttttttg

SEQ ID NO: 5535 - DNA, 402 bp, Homo sapiens
tagcccagcatcgctatggtggacgctttcctgggcacctggaagctagtggacagcaagaatttcgatgactacatgaagtcactcggtgtgggttttgctaccaggcaggtggccagcatgaccaagcccaccacacactgtggaaaaaaaaataaaaaagaaaaaaaaaaaaatacaaaaactgtttgaacatacaagaaaaagaaaataataatatctaaaatgggggcggtcctgtttggggttctgtgggggcctcttagaataccgggcggaaatgaaatataattttttttttttagaggacagcaaataacatgctggcgggggccagactagagacctccccacttggggggggacccatgtagggacccttccccttgcccttgaaatggg

SEQ ID NO: 5536 - DNA, 413 bp, Homo sapiens
  misc_feature (1)...(413): n = A,T,C or G
tagcccagcatcgctatggtggacgctttcctgggcacctggaagctagtggacagcaagaatttcgatgactacatgaagtcactcggtgtgggttttgctaccaggcaggtggccagcatgaccaagcccaccacacactgaannaaaaaaaaaaaaaaaaaaaaagaaaactataatgaaaaaaaaaaaaaaaaaagaaaaaaaaaaaaaaaaaaaaaatacntgagggggctccttgttaaatttgttatgagggggggtggtcatcatgactaaacccaacatattttttttttttttggggggggaaaaaaaaacccctttttgttttttttaaaaaaaaattttttttttgggggaaggaaattaaaaaaccccccccacaaaaaatataaaacttgtaaaaaata

SEQ ID NO: 5537 - DNA, 455 bp, Homo sapiens
  misc_feature (1)...(455): n = A,T,C or G
gagcagaaaaaaacatgatagcctgcgnctgatcttcgtatgaccgggccgacccacgcgtccgcagaagaaaaagcgggtggaccggctgcgccatcacctgctccccatgtacagctatgacccagctgaggaactgcatgaggctgagcaggagctgctctctgacatgggagaccccaaggtggtacatggctggcagagtggctaccagcacaagcggatgccactgctggatgtcaagacgtgacctgacccccttgccccacccttcagagcctggggtcctggactgcctggggccctgccatctgcttcccctgctgtcacctggctccccctgctgggtgctgngtctccatttctccctccacccaccctcagcagcatctgcttnccatgccctcaccatcacctcactgcccccaggccttctgccctttgtgggtgttgag

SEQ ID NO: 5538 - DNA, 379 bp, Homo sapiens
attaataaaattatgtctatggtattttcagtttctggagaaaaatacttatagacagtttaactattacatagatatataagtgatctcagtttcttgtttgctgtgatactaatgtgttgttttaacttattccataaaatgacagttgtgtcctagccacatcagacagctatctaagctctggactacccctttgtgcagctgaatcactgcagggttgaccatgcctggtgccacagccatggtttccatttctagatgaaaggatggcctaggacataggtctcaaagactcttggatcagaatcaggagattatggaaaacaggatggatacctgagcactaacagcagtagacgtagacctctgtccttta

SEQ ID NO: 5539 - DNA, 396 bp, Homo sapiens
  misc_feature (1)...(396): n = A,T,C or G
tccacgcgtccgcccacgcgttcgttgcctagcgctgagattttgagatattctttactaagagatgggttttcttctctggtaagctcttacgtaataatgtgccgattttgtttttcgagtcacttattcacacgtgtaaatattttccctccaatatagaagaggcgagtcactataggcgacactggtctcgatcccattccagcagtactttctgtacaggactcggagacgacaggtcagaaatctccgagatttaccctagcttttcatgctgcagtgaggtaacaagaccgtctgatgaaggaggtatcaaacattcactgcttacaaagaaaatcgattcattttttaagtgtgtcacaagagtgtctttaaaattcttttcacttn

SEQ ID NO: 5540 - DNA, 424 bp, Homo sapiens
  misc_feature (1)...(424): n = A,T,C or G
agaacagaaagaggaagngatgntatcancangctagttttaaataaaacagatcttgctgacaagaggcaagtgtcaattgaggagggagagaggaaagccaaagagctgaatgttatgtttattgaaactagtgcaaaagctggatacaatgtaaagcagctctttcgacgtgtagcagcagctttgccgggaatggaaagcacacaggacagaagcagagaagatatgattgacataaaactggaaaagcctcaggagcaaccagtcagtgaaggaggctgttcctgctaatctcccatgtcatcttcaaccttcttcagaagctcactgctttggcccccttactctttcattgactgcagtgtgaatattggcttgaaccttttcccttcagtaataacgtattgcaattcatcattgg

SEQ ID NO: 5541 - DNA, 422 bp, Homo sapiens
ctatatgcaaacagggtaactaactaaaacaaagccactttcaatcttcaatccttgaaggtatatctaggtttatgacagtaatggtgtttacattttatggtgcctagtattgacaaaatgttatttccctacattaaacatgactccatagaccttttcatttgtgggtttttatttcctatgatgtatactgccactaaccttccaaaaattacttagtattgcaaagtcaggaatcatcaggaacgtttagctgacaaaatacttgtctgttttaaaaacctgttcaagtctaccaacctgttcaagtgtaccaattataagggcaaattggagaaaaagaaaaaatatatactcaagagtggtatcttgcagtatcggcactgtacaaaaaaatcttccaatttagttgttggaga

SEQ ID NO: 5542 - DNA, 394 bp, Homo sapiens
gcccctgcttcccatggctacttccacatgatatgcgcccggtcctctgatcctttgtactctgatgacaagatggctcatcacacactccttctgggctctggtcatgttgcccttcgaaacctgcgaaacccatgcttcctgaatgctgtgctgcctcgacggggccgacctcgacctcttcgggacttgtgtctgagaagggacttccggcaagaggtgcctggaggaggccgatcccaagagctcactgaagcctttgcagatgtgattggtgccctctggcaccctgactcctgcgaagctgtgaatcctactcgattccgagctgtcttccagaaatatgttccctgcttctctggatacagccagcaggatgcccaagagatcctga

SEQ ID NO: 5543 - DNA, 500 bp, Homo sapiens
  misc_feature (1)...(500): n = A,T,C or G
agagtgccnnnnnaggccccccactgaaagccctcggaatagatagccntgaggagccgcgaccgaattgccgggtagacaacgcgttcggttttgaagactaccatcttccctgcaactctgaaggatggacttaaccaccaccatgtcgagcaaaagaacaaagaccaagaccaagaagcgccctcagcgtgcaacatccaatgtgtttgctatgtttgaccagtcacagattcaggagttcaaagaggccttcaacatgattgatcagaacagagatggtttcatcgacaaggaagatttgcatgatatgcttgcttcattggggaagaatccaactgatgagtatctagatgccatgatgaatgaggctccaggccccatcaatttcaccatgttcctcaccatgtttggtgagaagttaaatggcacagatcctgaagatgtcatcagaaatgcctttgcttgctttgatgaagaagcaactggcaccatacagg

SEQ ID NO: 5544 - DNA, 490 bp, Homo sapiens
  misc_feature (1)...(490): n = A,T,C or G
aattgatgcccgtggnaccggtcgagaaccctcgggacgacccacgcgtccgcttcaggtccaggttataaacgatcactttcaaatgaattaattgaagtctttatatctttccctacaggctatacctcccatctatttaatcatctctgccagttctcttcaacatccattatatctttttaacctcatttttttgaatatggtagcaaagaagggcccggtattttaatgcatttcagcctcaagtgcctatagagaagttttcaaacctatccatccctacatctaaatttgcagaggattattcacattgcctttaatgataaaacttaccaaattttgttctttattatggnttctaggagtagaaaaagacaaaaataggatggttgactcagaggagttaaaggaaacacagttattctaaaatgttgaaggagggttgtcaggaaggttagacaggctatattcaaagaaaatggcaaan

SEQ ID NO: 5545 - DNA, 479 bp, Homo sapiens
  misc_feature (1)...(479): n = A,T,C or G
ttttgatgatcgtggaacagttgagtatcctccggaacgacccacgcgnncgaaaaattattaatagctcaggttaaaaacacccatttattttttaacaagagcatgtgntttatgaagcgcctatacaaatagcacatttgtgatatgttgaaaagcatctctcttggcaaccaatctatgtttgaggaagattgggtaatgctgatgtgttccattcatgaaactgtatttgatacataatcctattattaattcgtatgcttagtcaacctaggaaatcaaaataatgttttgaagttcttatttgagcaatatggccttgacttggagggtagttctagttgttttgtttttaagtgactgtggtttaaagcacaaatgccccaaggtggggagacttctctctgtgattattgttgctattaaattctgaactgcatccatattttaaggaaggagctaaaaatggacattct

SEQ ID NO: 5546 - DNA, 435 bp, Homo sapiens
cagaagttggattggtgaatattaagggatatggatctctggaaattcagggttcagacccttcagaatgggaggattgttcttttgacaacagaataaaagccatagaggaatgtaaatctgtaatagagagtaatcgaattagccgtgaaagttcagtggactgcttgaaggagtcaccaaacaagcagcaggagagagcccaaagccagagtggtgtggacttgcaggaagatgtgcttgtaagagagagacccaggtccttggaggatctccatcagaaaaaagtaggccgggctaagagagaaagtaggagaatgagagaactagagcaagctatatttagcttagaattgctgaaagttcgttctcttggtggtatttctccttcagaggatcgcagatggtctacagacttggtgcctgaaggccttc

SEQ ID NO: 5547 - DNA, 431 bp, Homo sapiens
  misc_feature (1)...(431): n = A,T,C or G
cggacgcgtgggcggacgcgtgggcaaacccactccaccttactaccagacaaccttagccaaaccatttacccnnaaaaaaaaaaaaaaaaaaaaaaaggggggggggcgtttaaaaaaaacccttggggggccaaaatttaacgggggagggaaaagaaaaatttttttcttaaaggggggggaaataaaaaccaactggggatttttggaaaaaaaactttttttggggggggaaaaaaatgggaaaaacccccccacaaaaataaaacctttaagggaaaaaaaaaatttttaaggggaaaagggggaaaaaaaaccgaaaaggcttgggggtagaaaatttgggnncnnnnnnnaaaaaccttttatttgggggggggataattgggcaaactccccaaaaaaaaaaaactttaagggataataaa

SEQ ID NO: 5548 - DNA, 416 bp, Homo sapiens
cccactttgcttgtctcatgaaaaatctttgttaaagtttgtacacaggtaacaaaaagttactttaaaagatatataaagggctgtaagctaattgtggtgtctagtaagtagcataatgagatgtgaggagttggaactttgcgtgttttgcgtattttcatctgcattcagcttcttactctgggtttgcactcgagtgttatttctttacaaatgcccttgtaattaccactctgaagtctgctgactgtgtctcttgaacatacttaggatattctgcacattatggaaaaaggtaaattttagaagtttctgctctactaactgtagatatttatgactctgcgagttatctatttttataaccacctgtggtccattgttcattttaattcacatttcttatgaagtat

SEQ ID NO: 5549 - DNA, 505 bp, Homo sapiens
  misc_feature (1)...(505): n = A,T,C or G
tttgattccattttccctgcagccaggtcctgaacaccctgaaactcggtcgaacatgagcctgagctgctccctcgaaaacacttttatctcttgttactttaggtaccatttattaattgaaactgaaattgttcttagtgaagttggatagatagcgttaggagtgtaagatactgttttaccaataaagattgttggatgtaaaaaagaaagtttttcacacttgtttctccataataattcaagtacttctatttgcatttgtgtcaaattacatccctatacatataatactaaaagacttatttatatgtttacagatacacttggcattgtgtcatactattatatttatctcataatttaaatgttaaataatattgtgtcatgtagatatgctntaatttatgaacttaattccctattgtgaactattntagttgtgtccattctgtggctattgaatactgcaaatagtttgttattcagaaatcctcattcg

SEQ ID NO: 5550 - DNA, 419 bp, Homo sapiens
cccacgcgtccgaatgcctagatgtccaggtttagaagtacatatcaagtgacagctcatgaatttctacataagaaggcttttggacagcaatctgattagaagaggggtccaggggacttctctgtatattgcatttatacagcattttagataatattgaaaaagcctcagttattgatattaaataattgggctggaactactgaagaatatcatggggatgagggtgcattagtcttgttaagttgtctgggtgccctcagtgctgacatggttctctaatattcactacaagtgagcttctaattttagatctagtgtatacagatgttacattaaatgcacagcaacctgatgtattagcataatttaatgcatcatctttaaaagaagccagaaaactgactattgtcaaa

SEQ ID NO: 5551 - DNA, 168 bp, Homo sapiens
  misc_feature (1)...(168): n = A,T,C or G
aaagttcgccctgnncnaaaggacaagagaaataaggcctacttcacaaagcgccttcccccgtttataagatttaaagaaataacgaaaaaataaaaggggggggggcgtttaaagggatcctagggggggccctattttcgcttgggagggaaagaattatctttt

SEQ ID NO: 5552 - DNA, 389 bp, Homo sapiens
tggacgaggcccggaaaaacctactgcgaacccacaccacatcagccagcgcccgtgcgctctaccgccttgcccagaagaagcccttcactccggtcaagtacttctccatcgaccgcgtattccggaatgagaccctggacgccacgcacctggctgagttccaccagatcgagggcgtggtggcggatcatggtctcaccttgggccacctcatgggcgttctgcgggagttcttcaccaagctgggtatcacgcaactccgcttcaagccagcctacaacccatacacagagcccagcatggaggtgttcagctaccaccaaggcctggatgccgagccgaggccccctcccacacaggaggctgcgtgacatgggccactctag

SEQ ID NO: 5553 - DNA, 346 bp, Homo sapiens
cgacctacgcacacgagaacatgcctctcgcaaaggatctccttcatccctctccagaagaggagaagaggaaacacaagaagaaacgcctggtgcagagccccaattcctacttcatggatgtgaaatgcccaggatgctataaaatcaccacggtctttagccatgcacaaacggtagttttgtgtgttggctgctccactgtcctctgccagcctacaggaggaaaagcaaggcttacagaaggatgttccttcaggaggaagcagcactaaagcactctgagtcaagatgagtgggaaaccatctcaataaacacattttggataaaaaaaaaaaaaaaaag

SEQ ID NO: 5554 - DNA, 411 bp, Homo sapiens
aaatatttaagcaaatgggggagccatgaagccatttctggagggcgcgctacttatccgggaaaccgagcgtctttgtttcttcgctttttggcttaagagacaagcccttactggattgtcctggaggtcacgggacttcgtggggactggacttgagctcctgggctcaagccataccccaaccttgggctctcaagtaaatgggattataggcatgtgccacagcgcctgacttgagcttcttattctaaaaacttggagcctgaactctgaccaggcccctcacttgagcctttgctttctgctccttgtaaactgccatattgggtgcacttgccctgccacagtaatgctatatatttctgagcattggttttctctagataattttatatttttgagtatacg

SEQ ID NO: 5555 - DNA, 476 bp, Homo sapiens
  misc_feature (1)...(476): n = A,T,C or G
gcgccntnaccttgataactgacggccntcgcgcaggaacccccgggncgacccacgcgtccgcgcgtggcgagcggactcgactcggcaccgctgtgcaccatggcccgggccctgtgccgcctcccgcggcgcggcctctggctgctcctggcccatcacctcttcatgaccactgcctgccaggaggctaactacggtgccctcctccgggagctctgcctcacccagttccaggtagacatggaggccgtcggggagacgctgtggtgtgactggggcaggaccatcaggagctacagggagctggccgactgcacctggcacatggcggagaagctgggctgcttctggcccaatgcagaaggggacaggttcttcctggcagtgcatgggcgctacttcaggaagctgcccatctcaggcagggccgtgcgggacccgccccgcagcatcctctaccccttcatcgtggt

SEQ ID NO: 5556 - DNA, 409 bp, Homo sapiens
attagttgattgacacagtgtctccctctgttgccctggctggggtgcagtggtgcaatcacagctcaccgcaaccttgacctcccagtctcaagcgatcctcccgccttgccctaccaagattctgggattacaggtgcgcaccattatgcaaggcccactccttcaactcaaaccatgaaaagtagcagccccctccggcagttgcctggcttttttctcatgagtatcccgtccttcctgctcacaaacctcccgacagccgtttccagcacagcagagtgatgctgtgaaaatgattccatttctcgcacaaaatctgctagtaactccctactttgctcagaataaaggccaccatcctcaccatgacccatgtgggttcatgccctgccctcctgcggcatct

SEQ ID NO: 5557 - DNA, 490 bp, Homo sapiens
  misc_feature (1)...(490): n = A,T,C or G
acgcgtccgggcagaagtaaggtagatgggcgggtgaacaagaagcgagataacaagcagtgaaccttttgcagccgaaacaaaagagataatgtgagcaaggacctcgtggccggcaagatctggaacaaaccagtttaagaggcagctcttcacagatgggcatgcgtattagagaggaaaagtatccttaacaaaagcccgtatgataatcagctacttaaggttcatgcatatgggctacatatcatgcatatatttaagattataagatagaggcacaagccacagaggacaaagtaagcaacaaacctatcaataaaagggcagatgctggctatagattangcagcactgggaacagaaaacatacacacacgcacgcacacacataaaatgactcaaactacagcaagctgacgctgatctcacctcgcagaggtcagtccgctctctcccgcccccgagagagaatactctgttactaaan

SEQ ID NO: 5558 - DNA, 463 bp, Homo sapiens
  misc_feature (1)...(463): n = A,T,C or G
agctatcaattgtgggatatgcttctcaccttccctactaaaatgtgagctccgaagacgcaacagctacctctcatactctgttgtattttcttcaacatttaatggtggacctagagtaggtctttatttttgttgttgtccaaagaatgagaaaaaataataatatcacgattttaaacatgtgccaatcccgatgataagattaaaaggtaatctcataaattcacttcatctttcacagaagtcaattctgctgccaggaagatagtttatacattcagagattagagacgggccctacttccagacactgttataacatttgggaaatatgagtgagcacaataaagatccttgccctagaggttcttatattctagctgggaaagtgaactatacccaatagcataataactacctaaattatatagtacgataaaaggcataagtgctctgagan

SEQ ID NO: 5559 - DNA, 396 bp, Homo sapiens
cggacgcgtggggttaaaaaggctggcattgaggtccaggaaatcaaagaagccgaggcagttgttgaaaccaaaatggagaacaaacccacctcctcagaattgcagaagatgcaagagaaacagaaactgatcaaagagccaggctcgggagtgcctgttgttctcattacaacccttctggttattccggtggttgtcctgctggccattgccatatttattcggtggaaaaaatcaagggcctttggagcagattctgaacacaaactcgagacgagttcaggaagagtactgggaagatttagaggaaagggaagtggaggcttaaaccttggtaatttctttgcaagccgtaagggctacagtcgaaaagggtttgaccggcttagcact

SEQ ID NO: 5560 - DNA, 386 bp, Homo sapiens
gaccgggaccggtaggggtgctgttgccatcatggctgaccccgacccccggtaccctcgctcctcgatcgaggacgacttcaactatggcagcagcgtggcctccgccaccgtgcacatccgaatggcctttctgagaaaagtctacagcattctttctctgcaggttctcttaactacagtgacttcaacagtttttttatactttgagtctgtacggacatttgtacatgagagtcctgccttaattttgctgtttgccctcggatctctgggtttgatttttgcgttgattttaaacagacataagtatccccttaacctgtacctactttttggatttacgctgttggaagctctgactgtggcagttgttgttactttct

SEQ ID NO: 5561 - DNA, 518 bp, Homo sapiens
  misc_feature (1)...(518): n = A,T,C or G
aacaattggcttcatgaaataaaatggtaccctacacataatgaacactcatcaccatatacaaagaacagttagctcagtgtgatcatcaggtcacagatgactcatgtgaagtctctgtttaaataggaaggactactgacaagcaaacatgctcacagaaaaatagctaagtagcgaaataaataaagggctcagtagtccttcaaacatgtattagaaaacaaattaaaaattggtttcctattcagtactgtaaggcaatgtcatgacagtgttggaaaaccaactccctggtagctggtgtattgcggacatttctgcccttgtctttgggagtgccacgtacacggttacacaacgcataaaggcgagggtcatntctaggacagataattgacattaatactcgctgacattgccgaaggaatgatatgttcacttgacaggggctatgtgcttacatctgctgattggcttgcgacgaaaggccttggtggtaggatgagacccaagcn

SEQ ID NO: 5562 - DNA, 403 bp, Homo sapiens
  misc_feature (1)...(403): n = A,T,C or G
actagttctagatcgcgagcggcctccatgactttttcaaaaaaaaaaaaataaaaaaaaaaaaaaaaaaaaaaaaaaaaaaaaaaaaagggggggccctttaaaaaaaaccttcgggggcccaaaatttcccggggaaccaaaaattttattttttttttataaggagcggtctaaaaaaccttttcggggattttttaaaaaaacccttttttttgggggggaaaaaaaaggcaccccccccccccaaaaaaaaaaccccttggggaaaaaaaaaaatttttgagggggaaggggggaaaaacccccctaatttcttttttaaaaaaaattgngnnnnnnggggaagacccccccttttgggggggccttttttcccccccccccccacaaaaaaaaccca

SEQ ID NO: 5563 - DNA, 441 bp, Homo sapiens
  misc_feature (1)...(441): n = A,T,C or G
agaaaatgatgcgttattgtcaacaggtacagaatttcagttttgcaagatggaaattctggagatggatgatggtgatggttgaacaatgtaaatgtacttaaggctactgaactgtaggcctaacaatgattaagatggtagttttatgttctatatattttaccacaatttttaaatactttttttaaaattacctatttatttgcttgttgtctgtagtatgccaggcactgttataggagcagggtatacgtcataacctcactttatcctcaaaatttaagttgaaaaatttcacatttaatatatataacaagctttggatgccaaaaatgtttagctttaatttccattgagtgcggaatattgtcattggaatggcaaatattattgtctaggatattaaaattgcatatttaaaaaacatatgcgaaagan

SEQ ID NO: 5564 - DNA, 479 bp, Homo sapiens
  misc_feature (1)...(479): n = A,T,C or G
aggaaaaacctggacagccgtcggnaccttgccggaccttccgggncgacccacgcgtccggttcgttagtataaattacttttctaggattattaataatagccacataggtggctagttgtagttttatatggctctgtagagtggtgaaccttctagaggaatatatgatttattcacagttcctcaaggcctggggatgatgatcagttatacctatttttgtgcaattacatcatgttgtacattagaaatggagagtttaatagctctttaactgctgtcctcattaggtaatgataaatatttcccttaaataattgactattttgctgtgttttaaaaatgattgaaatttatcttgccatatctcataatttcatgcacaagttgactgagctaatcttgagaatatattcgtaaaataggagcacatttagttgaggtatacaaggtaggactctagacaaaaccttcn

SEQ ID NO: 5565 - DNA, 475 bp, Homo sapiens
aatattatgcagatgccgttaattttttaccctatgtttacatcttgaggcagcagagtctgtctgcagctatgtggtgagctatgtaaggaaaaaaatctgggctgttagagtgaaaaagtgtgttttatgtcaattgtgaaaggaaaatgttaggagtatggtttttaaacttgggcttcattttaaacttttttttttaaacccagctatttcacttgatttgctagcttcaaagaagagattcgaatctgtgcccagcgctaaaggctcagtgttagcatggcttgtgctgcccggtgtgccatattcttgttggagatgaaccgtaccaccagagcccattcttccttgtcagtcttggcccaaagatgtcaccattcctaggtatttgtcaccacataattggtgttgattggaaaccttttcttgaatgggacagaactggctggttgctttttccatgtaacttaaa

SEQ ID NO: 5566 - DNA, 474 bp, Homo sapiens
  misc_feature (1)...(474): n = A,T,C or G
cgggcccanncctgatcactgagagcntgcggcgcagccccggattgacccacgcgtccggtggatccgccggtgccggagcagcccgaagggagctgcggatctcgaggccagtaccgaccccgcccgcccgcgcgcaccgcccccgcccgccatggcccgggactacgaccacctcttcaagctgctcatcatcggcgacagcggtgtgggcaagagcagtttactgttgcgttttgcagacaacactttctcaggcagctacatcaccacgatcggagtggatttcaagatccggaccgtggagatcaacggggagaaggtgaagctgcagatctgggacacagcggggcaggagcgcttccgcaccatcacctccacgtattatcgggggacccacggtgtcattgtggtttacgacgtcaccagtgccgagtcctttgtcaacgtcaagcggtggcttcacgaaatcaa

SEQ ID NO: 5567 - DNA, 477 bp, Homo sapiens
  misc_feature (1)...(477): n = A,T,C or G
gccccgaatgatacccctgcganaatgatacgcctgcgagacccgacccaagcgtccgggataacacaccccttcacgtgtatccccacacatttgcaagctcaccattgtcccctctcagtccccttccctacaccctgaccggccactgccgcacacccacccagagcacgccacccgccatgggagtgtgctcaggagtcgcgggcagcgtggacatctgtcccagagggggcagaatctccaatagaggactgagcactgaaaaaaaaaaaaaaaaaaaaaaaaaaaaaaaaaaaaaaaatgtaaaaaactaaataaaaaaaaattannnntggggggggttgttttaaaaaaattcgggggggggcccctaacccggggggggaaaaaaatttttttttttttttttatggggggaaaaataaacacctcttttgtttttttagagaacacctttttttggggggggaaaat

SEQ ID NO: 5568 - DNA, 450 bp, Homo sapiens
  misc_feature (1)...(450): n = A,T,C or G
gtgcggcagacccactctgataccttgcggtcttactcccgtttgcacgggcngacccacgcgtncgcaaacgtggaagcggagacagggaggtctgggggttccacgcaagtccttttcctcccgacacgagtgcagtaaagaaaaacggttatgagcgtaaagtgacagcctcggccgatgggaatagggggaagtccgacactgagcaacgaacgcattcccgcgcctccaaaacctaggccgggggcgctggaaacccttaccggcacccggccaccgcggcagacgcttgcttctgccacgccccccccccctcccccggataacgggtctggacttgctttccttggattcccggatgtggttgccaaaacaaaagggatttggtgatggaggctttgttaaaaggaataccaaatcgagggcatggggggggatttttggcat

SEQ ID NO: 5569 - DNA, 464 bp, Homo sapiens
tgtgatgtggagcagaggcagcttctagacctgcaggagggagattgaatacacaggaagagcatcattttggcaacatctgaaagtgaaaacggaagccagaaacacttggccagccctgggggattatttcacttctatgcctctgggggggaatgacatttgctgagtaggcatctttcctctgacaggatttcttggccttgaagagtactgagtttaaaaagacagtatgtgacagtccatggaaatagcctcttctgcgaaatctggccacctgcttcgaagacatgatgctgactcccaaattatccttatgcaccattcacatacgactgacggccaaaggattgcttctaaaccttcgacttccttcacggattaggagaagcactgttgttttccacacagctgaaaagagcaggcaaaagaatcctcgaagcttatgtatccagccacagaca

SEQ ID NO: 5570 - DNA, 423 bp, Homo sapiens
ccgagcgccgctccggctgcaccgcgctcgctccgagtttcaggctcgtgctaagctagcgccgtcgtcgtctcccttcagtcgccatcatgattatctaccgggacctcatcagccacgatgagatgttctccgacatctacaagatccgggagatcgcggacgggttgtgcctggaggtggaggggaagatggtcagtaggacagaaggtaacattgatgactcgctcattggtggaaatgcctccgctgaaggccccgagggcgaaggtaccgaaagcacagtaatcactggtgtcgatattgtcatgaaccatcacctgcaggaaacaagtttcacaaaagaagcctacaagaagtacatcaaagattacatgaaatcaatcaaagggaaacttgaagaacagagaccagaaagagtat

SEQ ID NO: 5571 - DNA, 465 bp, Homo sapiens
gggccattgacgcctcggattgatagcctgccagggccgacccacgcgtccggtctagctgtattgccgaggctagagagcagtggttcaatcacagctcattgctgcttccatctcctgggctcaagtgatcctcccacctcagcctcctgagtagctgggactacaggtgtacaccaccacacccagctaattaaaaaaatttttttttaaatatttatttattttttcaggttgagtctcgccctgtcacccaggctggagtgcagtggcacgatcttggctcactgcaacctccacctcccgggatcaagtggttatcctgcctcagcctcctgagtagctgggattacaggtgcgcaccaccatgcccggctaatttttgtatttttagtagagacagggtttcaccatgttggttaggctgatcttgaactcctgacttcaggtgatccgcctgccttg

SEQ ID NO: 5572 - DNA, 473 bp, Homo sapiens
  misc_feature (1)...(473): n = A,T,C or G
agccattgtgggagacagaataatgtcttccacccccacagatgtccatgtccttatctgaggaactgtgaatatgtaatgttacatggcaaaggggaatgaagtttgccaatcagctgaccttggcttggggagatcctggattatatttgagcccaatctaatcacaaaggtccccataatgaaagaagggggcaggagagtgagtcagagagatgtgaagatgaaatgctgctggctttgaagacagagaaagaggctgccagtcaaggaatgcgggcacctctagaaacggcaaaaggcaaggccatgattctccctagagcctccagaggaatggagccctgccaacactttgattntatcctagtaacagctattttggacttctgacctccagaactgtaagataataaatttgttgtaaaccactaggtttgtggtaatttgctaacagctacaataggaagcan

SEQ ID NO: 5573 - DNA, 419 bp, Homo sapiens
aacctctgcctccctgattcaagtgattctcgtgcttcagcctcccatgtagctgatattacaggcacttgccaccatacccggctaatttttgtatttttagtagagatggggtttcaccatgttgcccaggctggtcttgaactcctaacctcaggtgatccgcccgcctctgccttccaaagtgctgggattacaggcgtgagccactctgcccggcttatttttctttatgtttttgcttcgtaagaggttctgttgagcagtgatttgcaactcttgctgacgttgctggggaagctttaaaaaaaaaaaagatgccccacagagattctgattttaattggcctgatttaatgggctgggagtagaattcaggcattgatatctttaaaaactccccagtgttgagaaacaaa

SEQ ID NO: 5574 - DNA, 506 bp, Homo sapiens
  misc_feature (1)...(506): n = A,T,C or G
cctgtgtgtctcaaaaatacgttttgtgtttattccaactgcctctgtctttgctcacatgtgtaagcctttctgcattatttttccctttgcctgtaaggtccctttcaccttggcctcaatacttggctcaagtagtacccctttgtaaattttacctgaatgtctcagccagaattaggcatttatttcactgtgctctttaagcaactagtagagatttcatttgaggcacttaatttgtaatcatttatttgcatgcctgtcttttaattaaaacatagccattcaggcatagtgttctaaatatgtttatttcctacctcccatattggtacatggtaacatgtttggttttcagttaacaatatgttgagaaattgaataagtgaaaatatttacataaatagtgtttgtataactnaaaaatacgtgtctgatgagttcggggatttcattggggtacacttattccattgcagggtgaggtgaaacttaaaaataan

SEQ ID NO: 5575 - DNA, 292 bp, Homo sapiens
gcgcagtcttcccgcgtccgccgattcctcctccttggtcgccgcgtccttggctggcgttagagacagggtttcaacgtgttggccaggatggtctcggtctccagaccctgtgatccgcccgcctcggcctcccaaagtgttgggattacaggtgtgagccaccgtgcctggccgaggctccttcttttatgaggagcgggaaggcctcctgcaccctggagaccgtgtgggaagacaagcacaagtatgaggaggccgagcggcgcttctacgaacacgaggccacaca

SEQ ID NO: 5576 - DNA, 446 bp, Homo sapiens
  misc_feature (1)...(446): n = A,T,C or G
ttcccatccccaaaaggcgccctccgactccttgcgccgcactgctcgccgggccagtccggaaacgggtcgtggagctccgcaccactcccgctggttcccgaaggcagatcccttctcccgagagttgcgagaaactttcccttgtccccgacgctgcagcggctcgggtaccgtggcagccgcaggtttctgaaccccgggccacgctccccgcgcctcggcttcgcgctcgtgtagatcgttccctctctggttgcacgctggggatcccggacctcgattctgcgggcgagatgcccctgggacacatcatgaggctggacctggagaaaattgccctggagtacatcgtgccctgtctgcacgaggtgggcttctgctacctggacaacttcctgggcgaggtggtgggcgacttgcgcctggagcgcgttaagcagctn

SEQ ID NO: 5577 - DNA, 463 bp, Homo sapiens
  misc_feature (1)...(463): n = A,T,C or G
gatggggcggcgccgagaatggccgttatgaggaccctaagagccatggccatgcagaaaatctttgcccgggaaatcttggactccaggggcaaccccacggtggaggtggacctgcacacggccaagggccgattccgagcagctgtgcccagtggggcttccacgggtatctatgaggctctggaactaagagacggagacaaaggccgctacctggggaaaggagtcctgaaggctgtggagaacatcaacagtactctgggccctgctctgctgcaaaagaaactaagcgttgcggatcaagaaaaagttgacaaatttatgattgagctagatgggaccgagaataagtccaagtttggggccaatgccatccttggcgtgtccttggccgtgtgtaaggcgggagcagctgagaaggtggtccccctgtaccgccacatcgcagatctcgctggan

SEQ ID NO: 5578 - DNA, 427 bp, Homo sapiens
  misc_feature (1)...(427): n = A,T,C or G
ctcacagtttcatttcttcattctaatncnnnnccccgtttctataatgttttctgtagtatttttacagttacagatgcttttacacgtactgtgttgcttaattcgcctaacaaccctgtataagatggccagagtagaggatgttaacatttataggtgagagagctgagagatatagagatttagttactcaagccctcatggccaggaaggagccaatctggggtcataatcaaagnctttnttttttttttttttttttttaaaccacccatttttttggaaaaaaaagggggtttatttttaaaaaccccaggggggggtttaaaattaatttttttaaaaaagcccaaaacccttttttccctttttggcttttcccaaggggccaaaaaccgtgcctttcagaaaatcctccttaaaa

SEQ ID NO: 5579 - DNA, 508 bp, Homo sapiens
  misc_feature (1)...(508): n = A,T,C or G
gtggcggnntnnannancctttacctgctgaagactgagaccctccgaacgaccccgcgtncggaatggtttctggggcagggtgcggtggctcacacctataatcccagcactttgggaggccaaagtgggtgatagcttgaggtcaggagttcatgacgaccagcctgactaacatggtgaaaccccatctctactaaaagtacaaataattagccgggcgtgggggctgtgcacctgtaatcccagctacttgggaggctaaggcaggagaattgcttgaatcccaggaggtggaggttgcaatgagctgacatcgcgccactgcattccagcctgggcgacagagcaagactccatcccaaaagaaaaaaaaaagagagaatggtttctgggttttaagctttaacatctggagtttggtgatgtttactgaaatagggaagattggggaagggggcacaggtgtcagagcancaatcgagatttcattttggaagtgtgaagt

SEQ ID NO: 5580 - DNA, 452 bp, Homo sapiens
  misc_feature (1)...(452): n = A,T,C or G
agcgcggcatgtctatagaaacttttttaataaaaacaagtttgtagaatattatcaatatgtggactttcacaatcaattgggattggaccggaataagttaataaatttggcttatttgcttggaagtgattataccgaaggaataccaactgtgggttgtgtaaccgccatggaaattctcaatgaattccctgggcatggcctggaacctctcctaaaattctcagaatggtggcatgaagctcaaaaaaatccaaagataagacctaatcctcatgacaccaaagtgaaaaaaaaattacggacattgcaactcacccctggctttcctaacccagctgttgccgaggcctacctcaaacccgtggtggatgactcgaagggatcctttctgtgggggaaacctgatctcgacaaaattagagaattttgtcaggcggatttcggcn

SEQ ID NO: 5581 - DNA, 455 bp, Homo sapiens
aaaaggttttaaaactgaattttggagaaaataatatatggctatgtagtttatcaaacatttttatcttgaagtgtttatattcttgtatttaagatactctgcttctttattataatttttaaaaaacagaactttaatttgccctgcttttataggaaaaaatatagcaaatattgaaaacagtggccataaattctggaaatacagggaagtatacacattagtttaatgttacaatacttggtaagattgtagctatcatatgatgtattcagcatgttgtccctcattagcaaagatggctcagtacacaagttcaaattgcaagagcactgcattaatataacagtttcatcaatctctatacatgcttgtatgatttactgtctcagatgatttatgtcaattgtttttactaaatctagggtaaacctggattttggaaataagat

SEQ ID NO: 5582 - DNA, 418 bp, Homo sapiens
gcaaaggggtgctgaaggctgattacgttcgggaaatgctgaccacgcaggcggagaggttttccaaggaggaggttgaccagatgttcgccgccttcccccctgacgtgactggcaacttggactacaagaacctggtgcacatcatcacccacggagaagagaaggactaggagggggctcgctgctgcgccctgggctcgtctttgcagagtgggccctgccctcatctctctcccccgagtaccgcctctgtccctaccttgtctgttagccatgtggctgccccatttatccacctccatcttctttgcagcctgggtggctatgggtacttcgtggccgcacatcctacagttggaaatccatccagaggccatgttccaataaacaggaggtcgtgtaaaaaaaaaaaaaa

SEQ ID NO: 5583 - DNA, 406 bp, Homo sapiens
  misc_feature (1)...(406): n = A,T,C or G
cgccgcctttgacaagcagccgcagagccgcgagcgtggcatcacgctcgatctgggcttctcgtgcttatcggtgccgctgcccgcgcgcctgcggtcgtctttgcccgagttccaggcagcgcccgaggccgagcccgagcccggcgagccactgcttcaggtcacgctggtcgactgccccgggcacgcctccctcattcggaccatcatcggcggagcccagatcattgatctgatgatgctggtcatcgatgtgaccaaggggatgcagacccagtcagcggaatgccttgtgatcggccagattgcctgacagaagctggtcgtggtgctgaacaaaatacacctcttacctgaaggaaagagacaggcagcaattgataaaatgaccaagagaatgcan

SEQ ID NO: 5584 - DNA, 419 bp, Homo sapiens
agaaaatataatccccttggatttattctctgctttcagtctaaaggagaaaaagctccccaggattcctaaataacagagaagtttgtagtgtaggaagaatctagaagttgggatggagagaaatgtgggaaagtcttacttttaaagagacattccctaaagaggggtaagaagttctgaaacagtgacgtaccagtgaccatgaatgtttcagagaaggtcagatttgcagtgtgtgtcttagagaaaggctaaatctcaacccagaggaagcatgtcttctgtctcaagccccctgcatgctgtttgtcttgcagtatctgaacacagtcattccttacgagaagaaagcctctcctccctcagtggaagacctgcagatgctgacaaacattctctttgccatgaaggaggat

SEQ ID NO: 5585 - DNA, 432 bp, Homo sapiens
  misc_feature (1)...(432): n = A,T,C or G
ccttattttagccaaaccagcacaatcctcccattgccatatttttcttttatattttgaagttggcctctcagcacagatttgattcacaccatttaaaaataaatctggcatctgcaaagcagaaaattcaggctgtgttgtcacaggatcagtatttccatttttatgcttggagacaacctaaacttaaaaaaaaaaagccacagttccgaattctatggcaatggaaggctaattttattttaaatatacacatttgttatatttactaaagaaaacaaattactacatttattacatggcacattcaacatttttatgagtgattcaattgcatgagaaataggtatttgtgttacaatgtgataccctatggcaaccactgatttggaggtacatagcttaaacaggaatttggattcaatatcn

SEQ ID NO: 5586 - DNA, 403 bp, Homo sapiens
atcgtgggcaggaggtggtttctggtttgttggggcgtgtgtatgtgtatttggggggactgaagggtacgtggggcgaaacaaaaccggccatggcatcagcggaggaggaggacgggggccccgaagggccaaatcgcgagcggggcggggcgggcgcgaccttcgaatgtaatatatgtttggagactgctcgggaagctgtggtcagtgtgtgtggccacctgtactgttggccatgtcttcatcagtggctggagacacggccagaacggcaagagtgtccagtatgtaaagctgggatcagcacagagaaggttgtcccgctttatgggcgagggagccagaagccccaggatcccagattaaaaactccaccccgcccccagggccagaaaccagg

SEQ ID NO: 5587 - DNA, 417 bp, Homo sapiens
  misc_feature (1)...(417): n = A,T,C or G
gcggttgtgccgcatctagagagtcggggagccgcccccgcacccaggccttctcgcgctgcctggtcgctggtgaagcccgcggcgcgcgcctctcccggaccctgcagggtaaaagaatgtcacatgtcagcatttgtacctgaagtcagcatgcaaagttcagggtacatggatgaatgccaacttttgcatttcccatgtgtatcctgtgaccattctatctgggaacatccttcaaagagttcatgcatcttactgaggacacctgaccttttgaagcttcataattcacatctagatgtcaccggtctttcccatgttaacagntctgaccatgttttattatatatgccttcggcgccgagccaggacagctacaagaggagaaatgatgaacacccatagagctataag

SEQ ID NO: 5588 - DNA, 457 bp, Homo sapiens
  misc_feature (1)...(457): n = A,T,C or G
agctaagacctagaaaggatacactctcagtaagaaaataacataacttttacagagaaattcaactaggaaagatgcctgtctcaatattagctttagatattaggtgagcgcaaagtaattgtggtttttgcattgttgggatttaccatttgatattggaatacattcttagataaatgtggttatgttatacgtcattttaatgggcatttctcattttatgggtttttttttgctaatgacttgttacttgctgngtatgtttattttagactatggaaatgatgttagacaaaaagcaaatttgagtgattttcttattcgagttcaaaatgggttgtaaagcagcggagacaactcgcgacttcagcaacacatttggcccaggaactgctatacaatgtaccagggtagtggtggtcaagagcttttgcaaagaagataaaaccctgag

SEQ ID NO: 5589 - DNA, 483 bp, Homo sapiens
  misc_feature (1)...(483): n = A,T,C or G
cgcgcccctttgagactggcggccntggcgccggaaccccgggtcgacccacgcgtccgttccttaccccaagaaactatggggctgtttgggtgttctcatgacatcgcagctggcttcccgtaagagaagttgatctgagggatctcatagagtaaggcagaagcctctggaagtcacacttaggagtcatttccacaatgtactattggttactaaggtaacccttattcaaaatgggagagaacaacacagagtgtgactaacaagaagtgagaatcactggaggtcatcctggaggtgaccacagaccctaatggcccaaggtcttccaccctgtcccaggctgcctttgtcctggcagtcctctccagatggcctccccaacgaaagcaaatctttcatgagtgtattctgtcagttccctattctttactaaggtaatgctgctgatctgttactgaaattttgctaatgtgctcn

SEQ ID NO: 5590 - DNA, 448 bp, Homo sapiens
cccacgcgtccgggaaagaacaagagaaaattgctgataatgtacaacttgaactagctgaagtaccggacaattataatgaagattacaatgtgcctactgctcctgatcctccaagtcaacatttacgtgggcatgggacaggcttttgctttgattccagctctgatgttcacaagaagtgtcccctctgtgagttaatgttttctcctaactatgatcagagcaaatctgaagaacatgttgatagtcactggaaggtgtgcccgatgtgcagcgagcagttccctcctgactatgaccagcaggtgtttgaaaggcatgtgcagacccattttgatcagaatgttctaaattctgactagttactttttattatgagttaatatagtttagcagtaaagaaaaataaataaaccgcgcctaaaatagaccactgaggagaccg

SEQ ID NO: 5591 - DNA, 390 bp, Homo sapiens
ccgaagaagctcacaagtatacttgtaagatagggaatgtctgtaagaaattgtccagtccttctaactacaagttggagtgtcctgagactgactgtgagaaaggctgggcactcttgaaatttggaggaaagtattatcaaaaggctaaagcggcttttgagaaggctctggaagtggagcctgacaatccagaatttaacatcggctatgctatcacagtgtatcggctggatgattctgatagagaagggtctgtaaagagcttttctctggggcctttgagaaaggctgttaccctgaacccagataacagctatattaaggtttttctggcactgaagcttcaagatgtacatgcagaagctgaaggggaaaagtatattgaaa

SEQ ID NO: 5592 - DNA, 50 bp, Homo sapiens
cggacgcgtgggcggacgcgtgggcggacgcgtggggttctagatcgcga

SEQ ID NO: 5593 - DNA, 415 bp, Homo sapiens
gcttctgaactggcagctctacattcttcccctctctgtgcaacttgtttagatcacagaactggaagggaccccaaaaatcccattctcccacccctccgattagagaggaagaaacagaggcccagactcaacagacttgccaaaacccatggacctggttgggggcccacatctagcactttccccagcctcacagcctgccttgttttatttgttcagcagtttttgtttcgccatggcacagcttgttccgactctggaacatttatgagatgagccaatttttaaaaatcatagaaaataaatggtttgctcttggagctgaagggcggggcagccagggtgggagacaggttccaggccagttctggggcagaattttggcttatcctttgctgtgtttttttattct

SEQ ID NO: 5594 - DNA, 492 bp, Homo sapiens
  misc_feature (1)...(492): n = A,T,C or G
agggtcccngnnaggggnnnaatagatnccntaggaatagaccgcattgccggggcgacccacgcgtccgaccgtaggtggcctgactggcattgtattagcaaactcatcactagacatcgtactacacgacacgtactacgttgtagctcacttccactatgtcctatcaataggagctgtatttgccatcataggaggcttcattcactgatttcccctattctcaggctacaccctagaccaaacctacgccaaaatccatttcactatcatattcatcggcgtaaatctaactttcttcccacaacactttctcggcctatccggaatgccccgacgttactcggactaccccgatgcatacaccacatgaaacatcctatcatctgtaaaaaaaaaaaaaaaaaaaaaaaaaagggggggccgttttaaagaacccctgggggggcccaagtttacgggggcgggcaaggttaaagctttttcctt

SEQ ID NO: 5595 - DNA, 416 bp, Homo sapiens
ttttgaagagatggggtattgctatgttgacagggctggtcttgaactcctgggctcaagtgatcctcccatcttggcctcctgaagtgctgggattacaggtatgagccatcagcctggtgccacactactcttaactgaaattattctatgtccagccagtgaacaggatagcatttttacttctttgttctttttattttttgtgtatgcccaaaaggtaacatttattgtctttaaaaaggcaaatcttacataaataaataacaacaacaacaacaacaaaattcccatttaattctacctcctaagatacaaccaccattaacgatttatattttttcactctttggagccagtctgctagggaccaaattctagctctgccaacagctagcaaccttggacaagaactg

SEQ ID NO: 5596 - DNA, 487 bp, Homo sapiens
  misc_feature (1)...(487): n = A,T,C or G
cgcacacaattgacagctgtgggacagtgattggacctccgggacgacccacgcgtccggngctgagagggagagagaagccaagttttattactctctttttacatacgggatttctgaggcactaaaaaatgagaagattggcccatcggtggaagccactgcaagtaaaatccagatattccgtttcataggtactttgttttctatcccccaaatcacagacctgcattactaaaatggctgaagtatcctgctgaggaatcctccaagatgaaacctcccagtgtgctctaccctccttccgacctctgagcccagcttggatccactgagtagctggattcactgtcctttgcagtaggaagaatctgcttagaaggatatgtatttatatatctttttaccatctcttcttggagatgctcttcatctccttgaaatagttatattaaatggatgtggggctaaagatagacctaatctt

SEQ ID NO: 5597 - DNA, 436 bp, Homo sapiens
  misc_feature (1)...(436): n = A,T,C or G
ctagttctagatcgcgagcggcctccatgactttttcattaaaattaaaaacaaaaaaaaaaaaaaaaaaaaaaaaaaaaaaaaaaaaaaaaaaangggggggggccctttaaaaaaaatcccgggggggccccaaaatccccgggggaaaaaaaaaaatttttttttctttttggggggggtttaaaaaaccccctggggttttttggaaaaaaaccctttttttgggggggggaaatttggcccccccccccccccaaaaaaaaaacccctcaaaaaaaaaaaaaatttttgggggggaaagggggaaaacccccccccctttcccccccccaaaaaaaaatgnnnnnnnnnnnnggaaacacctctctttttgggggggggcggttgggcacaccccccccccaatttgaaattgccccctcccggataattg

SEQ ID NO: 5598 - DNA, 427 bp, Homo sapiens
aacctgaaggcattttttccagagtggtgcagtaccactgaggactgttgctgtattgattaggaaaagagacagagtactttgcagtttgcttgatttatacttttgtttatctacaacccaataacagacatgagggatggccctgtctctctgggacagagcctcaaagatgatgtccatgttttgtgtgaatgaaactcacacactcagaagacagatacctgaaaacgaggcctgactgaccaaatgctttaccggaccggggtggcgcttaataggggatgggaggaggtactgcctgatcgccctctacatggcttttttttctttttttaaaggagttatgctgaacaggactgggttgttttttggaacacaccctttgttggggggttatcattggggaacaaccattctttatttg

SEQ ID NO: 5599 - DNA, 387 bp, Homo sapiens
cagctcggggtccgcgtcgttcgatatgaagacaagccgccacaaggagttcttcagcttgttttcccacattgtgctgggagatgaccccgaagtgcagcatggcaagccagacccagacatcttcctagcttgtgccaagaggttctctccccctcctgctatggagaagtgccttgtctttgaagatgctcccaatggggtggaggcggccctggcagctgggatgcaggtggtcatggttcctgacggaaacttgagccgagatctgacaacaaaggccaccctggtgctgaattccctgcaggacttccagcccgagctgtttggtttgccctcctatgagtgagagggagggcctcagtcttccgcccccagcccactctt

SEQ ID NO: 5600 - DNA, 517 bp, Homo sapiens
  misc_feature (1)...(517): n = A,T,C or G
atgcgagtgccttggctgctcgcccacctgcctttgggcagctggacaggagtgacgactggcgtaggtctgttcaggtctgaccttcccaaaccggagctggcagcctggagccacctgtatctggtgtctccagtggggctgcacagcagtggcctgtttcagcaagcttcagttagttcgttgagactgggctgctcagggtgaggagaaagtgacccaggtcttccttcctctggccgaggtgccctgcctggcacccatgacaggtgtgcctttggtctttgagtgttttaaagatcaggcacttggtgttagcatgttagtagaagtgtntttcaggccctgtctattctctacaggaantgcattgtataatcatagncttatggaattggagagagctataacagcaggctctaaacgcgacccgctgaacgccagcctgaattgagcacttttcacacccttcttctaatttatccttcaacaaccttgggagacagctgttcttctg

SEQ ID NO: 5601 - DNA, 189 bp, Homo sapiens
  misc_feature (1)...(189): n = A,T,C or G
aaagtgnngcctctaccgcagcattttcaggcttgcgaggaaatggcaggcgacatcagggcacatggaagacaccatcaaagaaaagcagtacatactaaatgaagccagaacgctgttcccaaaaaaacaaaaatctcacggacacgagacttatttacagtgtatagatgaatgcacagccaggag

SEQ ID NO: 5602 - DNA, 432 bp, Homo sapiens
  misc_feature (1)...(432): n = A,T,C or G
ctgttgggaaatgtaaaatgagcaggaatataacaaggttaatattttatagatatttgtagcgttctccattgcttcccttcagttctcttttaagaataaatatccttgcttgctaacctctggtgtcccttggtgagcagcatgtcaataatgagttcctgctattggaagcctcacaggccaagttgatataaagaagtatgaagaaagtatggaggggttagcgggttactgagattggaatctgtggctgagcccgtacatgattttggatgattaattaatgggctgtgtcgtaagacagaaaagagatgagggagaagctttggggtgtgaaaccaagaaatctggagcgatactgtctgtgtggagaaaattgtggccaagattttttgctattaaagatgtacttaagccaggcgcagtggn

SEQ ID NO: 5603 - DNA, 419 bp, Homo sapiens
gcgtgacaagaaggcatataggaagaggagtgcgcttatactatataggtggggaagtttttgctgagtgcctaagtgatagtgcaatctttgtgcagagccccaattgtaatcagagatatggctggcaccctgcaacagtgtgtaaaattccaccaggctgtaatctgaagatcttcaacaaccaggaatttgctgctcttctggctcagtctgttaatcagggttttgaagccgtctatcagctaactagaatgtgcaccataagaatgagttttgtgaaagggtggggagcagaataccgaaggcagacggtaacaagtactccttgctggattgaacttcatctgaatggacctctacagtggttggacaaagtattaactcagatgggatccccttcagtgcgttgctcaagg

SEQ ID NO: 5604 - DNA, 415 bp, Homo sapiens
  misc_feature (1)...(415): n = A,T,C or G
ttttggagataaagtactaggttgcagttggccttggatagcctgtacttggaaccaggatcgtgataggatttgggacaataacttccagaccatctgcaacctggtgttttggagataaagtactagaaacaggggaccgggtgaaaatgaagaccttgtctgcctatgccgaacttgtcatttctccaagtgaacgttcagacaagggcatttatacactgaaattagaaaaccgtgtgaaaacaatttctggggaaattgatgtcaatgtaattggtaaggaacaaaacatttatcatctaaggtgatttggcagtattaacaaatattagttcagactattaacagtgactcgtgagtgcattttttttcagctcgcccaagtgcacccaaagaattgaaatttggtgan

SEQ ID NO: 5605 - DNA, 429 bp, Homo sapiens
accagtgccgggcgctccccacccctcccccggctcccccggtgtccgccatggtcaaagcctacgaccacctcttcaagttgctgctgatcggggactcgggggtgggcaagacttgtctgatcattcgctttgcagaggacaacttcaacaacacttacatctccaccatcggaattgatttcaagatccgcactgtggatatagaggggaagaagatcaaactacaagtctgggacacggctggccaagagcggttcaagacaataactactgcctactaccgtggagccatgggcattatcctagtatacgacatcacggatgagaaatctttcgagaatattcagaactggatgaaaagcatcaaggagaatgcctcggctggggtggagcgcctcttgctggggaacaaatgtgacatggagg

SEQ ID NO: 5606 - DNA, 520 bp, Homo sapiens
tttgaagccgcttgacttgatcgccgctcgaccgacccacgcgtccggttgcctgtctgaacctgtgccagtcctggagactggtgccctgtgctccaaccagctttcctcatcctacaccctcaccaccgtaacttctcacccgagcaagaagcagctcccagagagaaagaacgttcccacctgcctagccatgggagaggacgctgcacaggccgaaaagttccagcaccctgggtctgacatgcggcaggaaaagccctcgagccccagcccgatgccttcctccacaccaagccccagcctgaacctagggaacacagaggaggccatccgggacaactcacaggtgaacgcagtcacggtgctcacgctcctggacaagctggtgaacatgctagacgctgtgcaggagaaccagcacatgatggagcagcgacagatcagtttgagggcttcgtgaagggcattcagaatgacctcaccatgctctccaagtaccaggccttcaccagcaacg

SEQ ID NO: 5607 - DNA, 400 bp, Homo sapiens
agctaggctatgcctctcatgatcatgacacgtagtggaaattttcctggcttctatacatcatcatctctgcctgattggtttgccatggctctttgaaacagttactcttgtcctcattgtagagatggcgatactaaggcagaatatggctagcctggacttctttttgtggagactggattccaagattgaaagtagaagctacatgttttctccaagcagggctttcagacttcacttctgcaacattttattgatgaaagcaagtcacaagaccagactgattcaaggggtggagaaatagaccctacttcttgatggagggaggagtagagttacattgcaaagggatctggacaaaaaaaggagtgatttattaggaatcatgtttaacaat

SEQ ID NO: 5608 - DNA, 480 bp, Homo sapiens
  misc_feature (1)...(480): n = A,T,C or G
nagagctggttnctcannnngggaaactttagnanngncntnnactntngggtngannnaagcgtncgaccgagatggggatggttacattgattattatgaatttgtggctgctcttcatcccaacaaggatgcgtgtcgaccaacaaccgatgcagataaaatcgaagatgaggtaagggaaataattatattttgagtacacttctggctgtaggtttgtaatatcctgaatttggttgggttcagtgatcatattagcctttgacttgtctgttgggagataattatttggagttctattttgagatctctttttggatagcatttcaaagagtcccagaggatctctgacatctgagctctagctcaggctagatggattactcaagtgagtcatgtctgtgtggtgctctgaagtttacagagaacctttgcagggcagcatactcatcctggntcactcgtcctgtgtctgta

SEQ ID NO: 5609 - DNA, 486 bp, Homo sapiens
  misc_feature (1)...(486): n = A,T,C or G
nagagcgggtttctcannnnnnaaggcctttgnnanngncntnnncnntngggntaagnnaaccggncgagtttttttattgaacatacagacacgttcaattttctgtatttttaggactacagaggaagacagaggcggggatgactgtgttgtgtctgtctggaccaaacagcggaacaacagctgtgtgaaaagcaaggatgtcttctccaagcctgttaacatattttgggcattagaagaatccgtgcttggggtgaaggcgaggcagccaaagcctttctttgctgccggaaatacatttgagatgacttgcaaagtatcttccaagaatattaagtcgccacgctactctgttctcatcatggctgagaagcctgtcggcgacctctccagtcccaatgaaacgaagtacatcatctctctggaccaagattctgtggtgaagctggagaattggacagatgcatcacgtgtggtttn

SEQ ID NO: 5610 - DNA, 445 bp, Homo sapiens
  misc_feature (1)...(445): n = A,T,C or G
ctgagatagccagagccaatactagccaagtgatttattttcaaggattgccactaactacggttctttaggaccaagatataaaacagtcactaaaaatcattaggctaggtatcagtaatacattcattactaataatgcatttttggagacttttgtgaaagaagttggtctctgccaaaagctggtggaccacattcacaccacgaaagccagtgtcacatgaaccagattaatgactctctttatggggtatgtgggacatcctggaagtgtataatttcaggaatgaccagacaataccatcttgcaaagccccttcaggtgacaatctaaacttgtgggtaggagagtgcataaagtttattgctcaactgctcctccagcctgctgaatttactgagtaaagaaatagcanatatgatagatgttttagatttcatn

SEQ ID NO: 5611 - DNA, 491 bp, Homo sapiens
  misc_feature (1)...(491): n = A,T,C or G
ngggagacgnnccngcnctnnnaaaaggggactttagncgnangcncnggcnctgaanttcagggncgacccacgcgtccgcccacgcgtccggtgtacatgtgtgtaaaatgtaatttgttggatcatagatagcacagttagtttttatttttctttatcaaaaaagccacagattgagaagccataaactattttgacaagtatttttatgagataaaatgtcatatcacattactcatttctgtagtgaaaataatttgataggcaattatagttttcttctgtgtgctcttttggaagatgagaccattgaggttacctgtggatcaatagcactcattatgttgtgagcagccttgtcataatgcaatacctaggaaagtgtcttttggagctaaatttagctttggggaaatagtataagaaagctgggggacttctagccgtgataagagtcgcgagtcgctgagaccaaactttccttcttn

SEQ ID NO: 5612 - DNA, 400 bp, Homo sapiens
atgctatgtatgttttatcacattttataaaaaaatttcagggctgctgtatacaaaatatgtttataaaataactaggaataagaacagacatataaatcctttatggagaagaatatgaaactttattgaaagacattaaagaagatttaaatacatggggaaatgaacgcagttatggaaaggaatggtcagtatgcaaagatgtcacttctctccagaattatctatagatttgatcagttcccatgaaaatcccaacaggattttttgggtggtaaatgacaaactgattctaaaacttaagtggaaagtgcaaagggccgaagatagtgaacacaaccctaaagaagaatgtaggtctggggcacttgcacttcctgaaaagacaggaggaagg

SEQ ID NO: 5613 - DNA, 410 bp, Homo sapiens
atgatccgagccgcgccgccgccgctgttcctgctgctgctgctgctgctgctagtgtcctgggcgtcccgaggcgaggcagcccccgaccaggacgagatccagcgcctccccgggctggccaagcagccgtctttccgccagtactccggctacctcaaaggctccggctccaagcacctccactactggtttgtggagtcccagaaggatcccgagaacagccctgtggtgctttggctcaatgggggtcccggctgcagctcactagatgggctcctcacagagcatggccccttcctgattgccaatgtgttatacctggagtccccagctggggtgggcttctcctactccgatgacaagttttatgcaactaatgacactgaggtcgcccagagcaattttga

SEQ ID NO: 5614 - DNA, 479 bp, Homo sapiens
  misc_feature (1)...(479): n = A,T,C or G
nggagcgccttctcnacccagccagtaccgcaccgctcggaccttngggtagaccacgcgtccggcatcagaccaccagatgttaccgctcggttgaatgtgtccaccgtggagtggtttggtgacgctgtaaccattccacgccagtgacctctgctgggtcacagccactcaggaggggaagggtcaggatgagaggctgcagcctcgacacttggcgcggcctgatactgaaatagcgtctactcgtgcactgaataaaaacagaaacttgatcattttattcctgattagattttatcactctctgctaagacaatatagtctggagtataagtgggaaagcttgatttaaatactgtgaactctaataatgtggaaaatatttttcaactttaattttctgaagtataaattatttatgtaaattcattggttttgcatatttcttangacatgcatctttaagctttatcatt

SEQ ID NO: 5615 - DNA, 461 bp, Homo sapiens
gcttttgctttgattccagctttgatgttcacaagaagagtcccctctgtgagttaatgtttcctcctaactatgatcagagcaaatttgaagaacatgttgaaagtcactggaaggtgtgcccgatgtgcagcgagcagttccctcctgactatgaccagcaggtgtttgaaaggcatgtgcagacccattttgatcagaatgttctaaattttgactagttactttttattatgagttaatatagtttagcagtaaaaaaaaaaaaaaaaaccacccctaaaataaacccctggggaaaccataaagcgggtgctttaatgcaccctttactgcactttttgaccaggagctactttgagttgggggttactaggatcagggccagtctttggctatcaataaaatttaatctctgttaatcttacttgctttaaaaaaaaaggtctttgggggtcgtt

SEQ ID NO: 5616 - DNA, 433 bp, Homo sapiens
cccacgcgtccgcccacgcgtccgcccacgcgtccgggacagccgatccacgccgagctgtcacccgtgacggacttcagagaagcctgctgccgtcagtatgagatgggagaatgcacacgaggcggcttctgcaacttcatgcatttgaagcccatttccagagagctgcggcgggagctgtatggccgccgtcgcaagaagcatagatcaagatcccgatcccgggagcgtcgttctcggtctagagaccgtggtcgtggcggtggcggtggcggtggtggaggtggcggcggacgggagcgtgacaggaggcggtcgagagatcgtgaaagatctgggcgattctgagccatgccatttttaccttatgtctgctagaaagtgttgtagttgattgaccaaaccagttcataaggggaattttttttaa

SEQ ID NO: 5617 - DNA, 442 bp, Homo sapiens
  misc_feature (1)...(442): n = A,T,C or G
ctcgctgttgtcctccccgttcctcaagggattcctggctggctatgtggtggccaaactgagggcatcagcagtattgggctttgctgtgggcacctgcactggcatctatgcggctcaggcatatgctgtgcccaacgtggagaagacattaagggactatttgcagttgctacgcaaggggcccgactagctctaggtgccatggaagaggcaggatgagcagctcagccttcaggtggagacactttatctggattccccagctgtcatccatttgctatctccaactttcctgccaccttcatccttgcctcccttcctgcagattgtggacagtagttcctcagcctgcaccctggattccttcttccccttcctagctccatgggactcgccccaagactgtggcttcaaggaccaccagccccttactcttaan

SEQ ID NO: 5618 - DNA, 467 bp, Homo sapiens
  misc_feature (1)...(467): n = A,T,C or G
aagacagtgtaaatagttaaagaatgttgataaaattgaaacatttggttgtggaattgtgtgtggttttagagggtttctgtttgtgaaatgtatgtattaaaaataataaaattccagaaactaaaaaaaaaaaaaaaaaaaaaaaaaaaaaggggggggccgtttaaaaaaatccttggggggcccaaatttaacccgggattgaaaagaaaaatttttttccttatagggggccaaataaaaacctacctgggaatttttgaaaaaaaactttattttggggggggaaaaaaatggaaaaaaccccctacaaaaattaaaacctttagggaaaaaaaaaaattttaaagggaaaaaggggaaaaacaacctcaatatccttgtggtttaaaaaaaaatggggnnnnnaaaaaaacacaacccaaacnccnccacaaccaaccccccccccccacaaaaaaaac

SEQ ID NO: 5619 - DNA, 394 bp, Homo sapiens
cccacgcgtccggggatattgatttcacggaggatggtggtcaagggacccctatctgaggggggtcatccatggggacgagaagggatttgactgtaatgtgctatgtacggtaaatggctttatgtgctatgtactgttaagggcaggaggagctgaggggctggggctggggtgttgaagttggctttgcatgcccagcgatgcgcctccctgtgggatgtcatcaccctgggaaccgggagtggcccttggctcactgtgttctgcatggtttggatctgaattaattgtcctttcttctaaatcccaaccgaacttcttccaacctccaaactggctgtaaccccaaatccaagccattaactacacctgacagtagcaattgtctgat

SEQ ID NO: 5620 - DNA, 381 bp, Homo sapiens
ctcgcttccctcccgcggcgaccagggcccgagccgagagtagcagttgtagctacccgcccagaaactagacacaatgtgcgacgaagacgagaccaccgccctcgtgtgcgacaatggctccggcctggtgaaagccggcttcgccggggatgacgcccctagggccgtgttcccgtccatcgtgggccgcccccgacaccagggcgtcatggtcggtatgggtcagaaagattcctacgtgggcgacgaagctcagagcaagagaggtatcctgaccctgaagtaccctatcgagcccggcatcatcaccaactgggatgacatggagaagatctggcaccacaccttctacaacgagcttcgcgtggcttccgaggg

SEQ ID NO: 5621 - DNA, 408 bp, Homo sapiens
  misc_feature (1)...(408): n = A,T,C or G
cggacgcgtgggttaatgagaaaataactgtatacttgcattgaatgcctcacaatcactctaaaaccaaagcaggataataacatttaagtggttaacatacacaggaaaaccagatacagagtataatttccaaacacagtattgctgcttttttcccctccacccccaaaaaaaaaaaaaaaaaaaaaaaaaaaaaaaaaaaaaaaaaaaaaannggggggggcccttttaaaaaattcctgggggggcccaattttaccgggggggggaaaaaatttttttttttttttagggggggcgatttaaaagcccgcgggggttttttggaaaaaaactcttttttgggggggggaaattttgggccacccccccccaaaaaatttaggggtgggggggaaaaaaaat

SEQ ID NO: 5622 - DNA, 447 bp, Homo sapiens
  misc_feature (1)...(447): n = A,T,C or G
ggcagcagaaaaacctgatagcctgcggactgacgctcgtatgcacgggccgacccacgcgtncggttacctctcttgtgctgtgatgtctcatgccaggtcattcttctcatatggatgccccctcatcctttttaactcagacatgtcatgctagtccattcttctcacgctctattagaaacgtttcctcattctgcaggctgtaataccctgttctgggccactgtggttttctctccagcatggacacctacctttctcagtctcacgtaatgacttttggactgaatttttaagaagaaatgtggaaaagaaagagccgaagaaattttgaagtgtttaaaaccccataattaactggaccataaaaataattggattgtgaatagaatagctttttttgatgcctaaaaagggagaaacattagttaaattggaattttg

SEQ ID NO: 5623 - DNA, 449 bp, Homo sapiens
  misc_feature (1)...(449): n = A,T,C or G
cccgcccaaaaatttgaaacctngatactgtcgcagcccgnanacnccaccggaanngngggaaganccacgcgtccggttaggttgtttgccggcgttttggccatcgcctgttcccgcccttgatcttcggtgtggcatggcggacgaggggaagtcgttcagcgaacacgatgatgaacgcgttaatttctctttcttcctgaacacaaccttttctagaatctccctaccctgttgttccaggaaaggcatctcccctttccactctaaccagagggtatcttgtacataccctatagatggggttgccttgtgccaagagcctggtgtccatgggttgaggaagccctccctacctgggacttcctactgagatgggccttccctcctttggactgagatggcccctcttgcccttgcgccaagagggacccttttttcaagat

SEQ ID NO: 5624 - DNA, 417 bp, Homo sapiens
  misc_feature (1)...(417): n = A,T,C or G
cccacgcgtccgcccacgcgtccgaaaaaaaataaaaaattaaaaaaaaaaaaaaaaaaaaaaaaaaaaaaaaaaagggggggggcctttttaaaaaatccctgggggggcccaatttttccgggggtgggaaaaaaaaatttttttttttttaggggggctttttaaaacccccttgggattttttgaaaaaaaccttttttttggggggggaaaattttgggcccaccccccccaaaaaatttaaccctttggggaaaaaaaaaattttttaaggggaaagggggaaaaaaaccctttttttgtttgggtgaaaaaaaatgnnnnnnnnnncaaaaaaaccctactttgggggggggggagattgcgcgaaccccccccaatgtttttttgtcgtacagagaccatatatttttt

SEQ ID NO: 5625 - DNA, 449 bp, Homo sapiens
  misc_feature (1)...(449): n = A,T,C or G
gtgcagcnagaaanattttgaangcctgcggncttacggtcatcgcacgggccgacccacgcgtncgtccacatttatcaaatactaaattcctacacacacttggagcggtttctgaatttgntgtttgtttaatttttttatatcctctattccttaaccatgctgttaattattgccattttatcatttgctttactgggtgttaagtttcaatgggggtaaatgttactcttcttttttaaatatttttggctatattttttcatgtattctcgcagataagcttcagttatgttttggtcacattccaaaagaaattctattgccatttttgttggaattgctttaacaatatagactaatttggggagaattaccaactttgggatattaaatttcttattcaggaacttcgcatgggttcacgattctgaagaccatcttcn

SEQ ID NO: 5626 - DNA, 403 bp, Homo sapiens
  misc_feature (1)...(403): n = A,T,C or G
caggtgtccccgtcgtgctcacctgcaccggctgctaggagcagggagctcctcaaagagctcangaacggacaggacatggacacagtggtctttgaagacgtggttgtggatttcacgctggaggagtgggccttgctgaatcctgctcagagaaaactctacagagatgtcatgctggagaccttcaagcacctggcctcagtagataatgaggctcagcttaaagccagtgggtctatttctcagcaggatacttctggagaaaaattatccctcaaacagaaaatagaaaagttcacaagaaagaatatatgggcctcccttttaggaaaaaattgggaagaacatagcgttaaagacaagcacaacaccaaggagagacatttgagatatccaaggg

SEQ ID NO: 5627 - DNA, 403 bp, Homo sapiens
  misc_feature (1)...(403): n = A,T,C or G
atannatgaagattaggaaacagttttaaggagaagacttgaatgaagttggagggacattgaatgatggtcagagggcagacgaatgtgtcgtggggcgaattgggatttgctgcagctgtgaagccatggccgtgtctcgtgtgttgttacagaggtgatgtgcttttcgacgggcgcctcgtggcttggaacctcctctgtatgaataaacagttttcacgtctgtcctcttccccgaaaaaaaaaaaaaaaaaaaaagggggggccgttttaaaggatccttgggggggcccaagtttacgcgggcttgcaaggtaatagctttttccttatagggagccgttttttaacctacctggggatttttggaaaggacccttccttttggggggggacataa

SEQ ID NO: 5628 - DNA, 416 bp, Homo sapiens
gtgacaaggcttctcaacatcaaccccaacattacctcggccagcgggagctgcggcgcccacctggtgactctggagctgcacagcgagggcaccaccgtcctgctcttccagttcgggatgaatgcaagttctagccggtttttcctacaaggaatccagttgaatacaattcttcctgacgccagagaccctgcctttaaagctgccaacggctccctgcgagcgctgcaggccacagtcggcaattcctacaagtgcaacgcggaggagcacgtccgtgtcacgaaggcgttttcagtcaatatattcaaagtgtgggtccaggctttcaaggtggaaggtggccagtttggctctgtggaggagtgtctgctggacgagaacagcatgctgatccccatcgctgtgggtgg

SEQ ID NO: 5629 - DNA, 422 bp, Homo sapiens
aatgatttaaggaaagaaaatgctcacaacagacaaaaattaactgaaacagagcttaaatttgaacttttagaaaaagatccttatgcactcgatgttccaaatacagcatttggcagagagcattccccatatggtccctcaccattgggttggccttcatctgaaacaagagcttttctctctcctccaactttgttggagggtccactcagactctcacctttgcttccagggggaggaggaagaggctcacgaggcccagggaatcctctggaccatcagattaccaatgaaagaggagaatcaagctgtgataggttaaccgatcctcatagggctccctctgacactgggtctctgtcacctccatgggaccaggaccgtaggatgatgtttcctccgccaggacaatcatatcc

SEQ ID NO: 5630 - DNA, 491 bp, Homo sapiens
  misc_feature (1)...(491): n = A,T,C or G
agggnnnnntttgacgctacacctgtcggaatcccggaatgacccacgcgaccgacacatagcgctgtttttgttgtgtgtgcagggagggcagttttctaatggaatggtttgggaatatccatgtacttgtttggaagcaggactttgaggcaagtgtgggccactgtggtggcaatggaggtggggtgtttgggaggctgcgtgccaatcaagaagaaaaaggtttgcattctcacattgccaggatgataagttcctttccttttctttaaagaagttgaagtttacgaatcctttggtgccaactggtgtttgaaagtagggacctcagaggtttacctagagaacaggtggtttttaagggttatcttagatgtttcacaccggaaggtgtttaaacactaaaatatataatttatagttaaggctaaaaagtatatttatttgcagaggatgttcataaggccagtatgatttataaatgcaan

SEQ ID NO: 5631 - DNA, 415 bp, Homo sapiens
  misc_feature (1)...(415): n = A,T,C or G
accagtttgtggcatcctacaaggttgcctacagtaatgacagtgcgaactggactgagtaccaggaccccaggactggcagcagtaagatcttccctggcaactgggacaaccactcccacaagaagaacttgtttgagacgcccatcctggctcgctatgtgcgcatcctgcctgtagcctggcacaaccgcatcgccctgcgcctggagctgctgggctgttagtggccacctgccacccccaggtcttcctgctttccatgggcccgctgcctcttggcttctcagcccctttaaatcaccatagggctggggactggggaaaggggagggntcanaggcaacaccaccacacagtcacccctccctccctctttcccaccctccacctctcacgggccctgccccagccg

SEQ ID NO: 5632 - DNA, 429 bp, Homo sapiens
  misc_feature (1)...(429): n = A,T,C or G
aaaagaaccatttggatacataggtatggtctgagctatgatatcaattggcttcctagggtttatcgtgtgagcacaccatatatttacagtaggaatagacgtagacacacgagcatatttcacctccgctaccataatcatcgctatccccaccggcgtcaaagtatttagctgactcgccacactccacggaagcaatatgaaatgatctgctgcagtgctctgagccctaggattcatctttcttttcaccgtaggtggcctgactggcattgtattagcaaactcatcactagacnnnnnanaaaaaaaaaaaaaaaaaanngggggggggcccttttaaaggtttcttgggggggccaaaattttgcgggggaggaaaataaatattttttcctttgggggggggtattaaacccagcttgg

SEQ ID NO: 5633 - DNA, 483 bp, Homo sapiens
  misc_feature (1)...(483): n = A,T,C or G
cgccccccccgnnnnnnntttttgaantccgtagaacagctncggaanttccgggnagactcacgcgtncgcgcacgcgtgggtgcaaaatatgtctgtattttaattattaaatttaaaaaatatttgcagcacatttggcttgtagtttgggtatatttttccattaaatgtacacaaggaaatagagtaaattaatcttttgaattaaaaaaaattcattttgtttcaaaattgagccccaaaaaagattccagaatctgatttattaaagctttaagggattagatacagttctactcaaaaatcaggggaaaagtaccacagtaatgaaatcaccttgcatgaaataaactatattacataaaattctaccaatgaataagcatcaggaaaaatattacacagtcagtagggtcacaaggctgagggaaataatggtaaattcaaatgttttatagtttgagcttagtcacactggga

SEQ ID NO: 5634 - DNA, 423 bp, Homo sapiens
  misc_feature (1)...(423): n = A,T,C or G
cccacgcgtccgcccacgcgtccggctagttctagatcgcgagcggccgccctttttttttttttttttaacaaacaaaaacccctaattaaaaaaaaattatttggaaaataaaaaaattggaaacaggggggtttttttaccccccttaaaaggaaaaaaaaacctttccccaaaattaaaacttaatactgggaaacaacctaaaggtttttcaaatctagaaaaaaactctcccatgaccaattaaatttccctggaaaggggcaggaaaagggatcaataccaaagccggttatttgcacacaaagggaaaaaggctggcagcccctcccaaaaatacccctactttcctttatttttaacccccagggaaaaaaaaggggcctactttacaaaactgtgaaattttgttaaaaaaan

SEQ ID NO: 5635 - DNA, 493 bp, Homo sapiens
  misc_feature (1)...(493): n = A,T,C or G
ntttgacagccctgcggaattgagcgcccttgccgggnccacccacgcgtccgtccacaagtactcaccagcctcctggtctgcagagattacagaatcaatatgagcacagcaggaaaagtaatcaaatgcaaagcagctgtgctatgggagttaaagaaacccttttccattgaggaggtagaggttgcacctcctaaggctcatgaagttcgcattaagatggtggctgcaggaatctgtcgttcagatgagcatgtggttagtggcaacctggtgaccccccttcctgtgattttaggccatgaggcagccggcatcgtggaaagtgttggagaaggggtgactacagtcaaaccaggtgataaagtcatcccgctctttactcctcagtgtggaaaatgcagaatttgaaaaacccagaagcaactactgcttgaaaaatgatctaggcaatcctcggggaccctgcaggatggaccaagagggtcac

SEQ ID NO: 5636 - DNA, 532 bp, Homo sapiens
  misc_feature (1)...(532): n = A,T,C or G
ctttcgacgccccgtgngttcgacgccggtctgcacgggncgacccacgcgtgcgggagttctacattttctgctccccccaacacatccaatcagttctaccaattgctccttcatgaaccatctgttttgcactggtcctctccctctgtggacccccaactagtcccctaatctaggcctcatcctctcatgcccagatattgcaatgactcttaactaggtgcagggtttttttccccatatttttttctttctatgctctaaaagctatcactatattaagaagtttctctttaagctatccattctgtgtgtattccctgccaaaacttctggaaacacagctaatttcacatccctctcaattaatactaacagctgtgtgtattgagcacttacagtgtacacttcacacanataatctcctttggtcctttcaacagtcctgtgaggtaggttctattatccccactgtatangcagaaaattanaaaataaaaaacatattgaagcacagaaagattagtgg

SEQ ID NO: 5637 - DNA, 411 bp, Homo sapiens
catacgttattccaatagaaagtttcaaaactgattgggcagctgcaatttcattacacctatttgatttcagatttttattatgtacatgtagtgagcctcagaattcttacatggttaaaaaataggattgtcatagattttatcaaatcaagtggtaatttagagctgagcgaaacacaaagtaacaagaatttttatcacaattcaagcatattttataaagtctctccaaacctgcttgttattgatgttgttaatacaatatttagattccattttgaacattccagctggcaaagattactgaatgtcagtctctcccaagaatgagttggttttttttttttttcaaaaattcattgccagagagttaggttcacaactgtaagttaagatgaacttatgtga

SEQ ID NO: 5638 - DNA, 412 bp, Homo sapiens
taaaacatctctgtacctttcattcgattttactgggaaccaaaaacttctctaaaaaaataaagtctattgataaaatatccagtgtaaaatgtgtgggatgcagctaaaggaaagcttaaagaaaatttatagcattaagataaaagaaaggtctcaaatcaatgattcaagctttttacctaagaaactacaaatagaaatataaacccaaaataggcagaagaaaagaaataagagcagaaatcaataaaactgaaaacagaaaaccacacacacaaaaaatcaatgccactaaaggctgtttccttgaaaatattaataactggtaaaactagccagattgactaagaaaaaaggaatagacacaaaatagcattatcaggaatggaagaggggacattattacagt

SEQ ID NO: 5639 - DNA, 439 bp, Homo sapiens
caaacaacaaagcataatatttcgcccactaagccaatcactttattgactcctagccgcagacctcctcattctaacctgaatcggaggacaaccagtaagctacccttttaccatcattggacaagtagcatccgtactatacttcacaacaatcctaatcctaataccaactatctccctaattgaaaacaaaatactcaaatgggcctaaaaaaaaaaaaaaaaaaaaaaaaaaaaaaaaaaaaaaaaaggggggggcccttaaaaaaaaccctggggggggccaatattatcgggggggggaaaataaaaattttttccttttgggggggggaaaaaaaaaccctctgggggtttttgggaaaaaacttttttttgggggggggattattgggcccccccccccaaagatttaaccctgggggaaaaaaaattt

SEQ ID NO: 5640 - DNA, 399 bp, Homo sapiens
  misc_feature (1)...(399): n = A,T,C or G
tagtgctcgaatgtcccaacctgaagttgaagaaaccgccctgactgcacatgcccttgggcatgactgggtctgctctggtggcgggggattacttcctcatcaccggaggaataatttatgatgttattgttgaacctccaagtgtcggttctatgactgatgaacatgggcatcataggccagtagctttcttggcctacagaggaaatggacaatatattatggaaggacttgcatccagcttcctatttacaatgggaggtttaggtttcataatcctggaccgatcgaatgctccaaatatcccaaaactcaatagattccttcttctgttcattggatacgctgtgncctattgagttttttcatggctagagtattcatgagaatgaaact

SEQ ID NO: 5641 - DNA, 464 bp, Homo sapiens
  misc_feature (1)...(464): n = A,T,C or G
gggacccacactgaacgtatgatgcgtcgggaangcgcgcgaatccggggaccacgcgtncggtgtttctcagcctggcctgcacagtttggaggatttacgggactttattaagagcgtgggaatagctatgacctgccagtgaggtgatgtgtttttccttggccacctctccgtctgctcaccactcttttttccctagcacacgaatatctttaacattcaaaaatatatcttaacacttaggatagatcaaaattggcgttcattcagataacattgtcagattctcttagatccacatatttcttttaacaacttaacagtatgttaaaacctcattcacttgctcggagagctgctgtacagttctctaaagagaactttatatgaggttgaatcttccctttcttaatagccaaattctatatatggtgtcttcctttggaacaccttaccatggg

SEQ ID NO: 5642 - DNA, 474 bp, Homo sapiens
cggacgcgtgggggctggtctcgaactcctgggctaagcgatcctcccacccaggcttcccaaggtgctgggattacaggcatgaaccaccatgccccgcctgctctgatcttctctaatatgagatactgcctctcaaagaaaaaaaaaaaagaaaagattcccaacttgtcaggaaattcattaggtatttttctaacactaggattcatatataaatagaatgttatttatttaaataagtttacttaaatttatttagttatagtggattaagaattaaaaagtattagatttatttaattaaatgtaggattttatggctgggcacaatgactcacgcctgtaatactagcattttgggaggccgaggtgggtgaatcgcctgaggttaggagtttgagaccagcctggcaaacatggtgaaaccccatctctactaaaaatacaaaaattagccaggtgtggtggtgg

SEQ ID NO: 5643 - DNA, 430 bp, Homo sapiens
aatagatataccaaagaagggagtagctggacttatgctagactgtgatgctaataccgtaaacctagcaagagagagctctgctgacggagcggacagtgtatcagcacagagtggagcttctgttcagcccctagtgtcttctgtaaggcccctaacatcagtagatggtcagttaacaagccctgcaacaccatcccctgatgcaagcacttctctggaagactcttttgctcatttacaactcagtggagacaacacagctgaaaggagtcataggggagaaggagaagaagatcatgaatcaccatcttcaggcagggtaccagcaccagacacctccattgaagaaactgaatcagatgccagtagtgatagtgaggatgtatctgcagttggtgcacaacacttcttgacccacagagacttt

SEQ ID NO: 5644 - DNA, 402 bp, Homo sapiens
  misc_feature (1)...(402): n = A,T,C or G
atgcaggttncngccaggacttgagtggcttcggacagggcttctcagaccccagccagcagcctccttcctacgggggtccctccgtgccagggtcggggggcccccccgccggcggcagcggctttggacgagggcagaaccacaacgtgcaagggttccacccctaccgacgctagcccgcggcgccgcgacgtctgcacggcccagacccaggattccaaacttgtgaactcgtgacaatcacaaacttggcggcaaagtggcgactcaaccttggggggggggggcggggggagggcccaaggcttttggaccggctgtgggtgtcgcctggactgaggtttttaaatatttttttctctaacccatcagcacaataaaaaaaagtcactggttcac

SEQ ID NO: 5645 - DNA, 464 bp, Homo sapiens
  misc_feature (1)...(464): n = A,T,C or G
cggcccccgcccccccttgatcgcctggtgatagcntgcagaccccccggaattccggtcgacccacgcgtccgcccacgcgtccgctgggtttgagtgttaggggatggacataaaggaaaaagagtgatgagaagagaatggagagaatttgaataaaaggtgggaaaggagagcactgttctttgattgtttatccagtccaacctgatccattagggatcgaggtgctacactggcctccagggataagcctggggctactgttgctgggaacttaggcttaacataaagccgaagaaggtacctagaaatttgaaacttccctaaaaagctcctaatgcccacctgctagatagcttctctgtggcctcctatttagctaagcagcagtgtttttggatactttttttttctgtttgtgaataaggccagcactcaagatgggcagccaagggtgcact

SEQ ID NO: 5646 - DNA, 461 bp, Homo sapiens
  misc_feature (1)...(461): n = A,T,C or G
acaaagcaggcgcgctgtgtgggtttcagttaggcgaataatctggagagtaaagcaaattcttgtgccttctttataggttgtgaaagtgacacagattcggaatttacattcaagatgcaggattataataaagatgatatgtcgtatcgaaagatttccgctgttgagccaaagactgcgttacccttcgatcgttttttacccaacaaaagtagacagccatcctatgtaccagcacctctgagaaagaaaaagccagacaaacatgaggataacagaagaagttgggcaagcccggtttatacagaagcagatggaacattntcaagtcagtttttactgcttcatgccctccaaacatactctgatgacatcttgtcttctgaaacacataccaaaaatggatncccttctggcccaaggctcataaacccgcaggaagaatctctcttatgcac

SEQ ID NO: 5647 - DNA, 398 bp, Homo sapiens
cccacgcgtccgcccacgcgttcgaagaaaaaccctatcaatgtcatcaatgtggaaatgcatttagaaggaaatcatatctcattgatcatcagaggactcacacaggagagaaaccctttgtttgcaatgaatgtggtaagtccttccgcctcaagacagccctcactgatcatcagagaacacacacaggggagaaatcgtatgaatgtctgcaatgtaggaatgccttcagattgaagtcacacctcattcgtcatcagagaactcacacgggagagaaaccatatgagtgtaatgactgtgggaagtccttccgccagaagacaacactctctctacatcagagaatccatacaggtgagaaaccctatatttgtaaagaatgtgggaagtcc

SEQ ID NO: 5648 - DNA, 470 bp, Homo sapiens
  misc_feature (1)...(470): n = A,T,C or G
aggccacctactcatgcacctaattggaagcgccaccctagcaatatcaaccattaaccttccctctacacttatcatcttcacaattctaattctactgactatcctagaaatcgctgtcgccttaatccaagcctacgttttcacacttctagtaagcctctacctgcacgacaacacataanataaaaaaaaaaaaaataaaactaacctatacaataaaaaaaaaaacaatnntnatggggggggcccttttaaaaaaatcctggggggggaccccaaacccacgggtatacaattttataattttttttttttggggggggctttataaaacccggggggaattttggggaagacccctttttttgggggggggaaattttgggccccccccccccccaaaataaaaacccttggggggacaaaaaaatttgggggggggaaggggggaaaaccccccccttcgg

SEQ ID NO: 5649 - DNA, 493 bp, Homo sapiens
  misc_feature (1)...(493): n = A,T,C or G
nattgatacgccctcggnaccatcgaggaacctccgggncgacccacgcgtccgaacacagggagctgcctgggcaatgacattgctcctgagaggaagctcatgctgggtctcatacaccactacccctgtgagtcttaagcagctacagcacaacaccattttgagagtccagcacccaccagactacatcttgccctggcagccaacagtccctgcaattccacatccgtagaactcagtttacatcctccatccacagccactgctgctgctggctatgctgctaaggctgaagcatgagtcactggcagcaaacctgccacctcagcggtgaggccaccacacattcacaagcaccccgaggacaagctcgcccacttacagcctttgccactgctggctgccagcaccagggctgatgtgccaaccactggtagcaaccctgctgcccccagcattggggccaccacaaatttatgagtgccctaan

SEQ ID NO: 5650 - DNA, 497 bp, Homo sapiens
  misc_feature (1)...(497): n = A,T,C or G
attgatcgccctaggactaggttgatctctgaaacgacccacgcgtncgggaatctatccagggtccatggaaacctggagatgggataatcacagagaacttatacacaatgggaggcattccagctaaaagcgcgtaggggagaaaaactacttttatttatgggcattattgacattctgcaatcatataggttaatgaagaagttagaacattcctggaaagctcttgtttatgatggggacactgtttctgttcatagaccaagcttttatgcagacagatttcttaagttcatgaattccagagttttcaagaaaattcaagctttgaaggcttcaccgtctaagaaacggtgcaattcaatcgccgccctaaaggccacttcacaggagattgtgtcctcaattaaccaggaatggaaggatgagaagcgggatttgctgactgaaagacaaaggttttacagccttgatgaatagccctgggatcccag

SEQ ID NO: 5651 - DNA, 429 bp, Homo sapiens
  misc_feature (1)...(429): n = A,T,C or G
cccacgcgtncgcccacgcgtncgaataaaagaaaattgcagcattcacgtcagtggggagcaaggagaactgctgagctttgaaccaaagaaagttaaatttaccattttcttaaagggagccacctctgtttgacatcaaagcatctcctgtaatttctccttgtgaaatgcaccactgttagagagtcatgatagagccccctaatctgtgctgtttctgtttatcaaaaacacacacagagagaaaacccacatgtaccttctcagtgcattgtggtctgctctcaaaccaaatgtaaccacaggtacatagcaaatggggattctatttcgaaagcattctcagtttctcagggatttgtagaactggaatacaacattctttgggagngaatttatcttggactctattggaagctcagatat

SEQ ID NO: 5652 - DNA, 422 bp, Homo sapiens
atcatgggaaatggaaccctccttttactcctctcggaggccctggcccttacccagacctgggcgggctcccactccttgaagtatttccacacttccgtgtcccggcccggccgcggggagccccgcttcatctctgcgggctgcgcggacaacacccagttcgtgcgctacgacaacgacgccgcgagtccgaggatggtgccgcgggcgccgtggatggagcaggaggggtcagagtattgggaccgggagacacggagcgccagggacaccgcacagattttccgagtgaacctgcggacgctgcgcggctactacaatcagagcgaggccgggtctcacaccctgcagtggatgcatgggtgcgagctggtgcccgacaggcgcttcctccgcgggtatgaacagctcgcctacga

SEQ ID NO: 5653 - DNA, 470 bp, Homo sapiens
  misc_feature (1)...(470): n = A,T,C or G
tttattatgagtatttatgatgtgcaaggtgctaggctaattgctggttgtatataaaggtatttggactccagtactattctatttttattttgtagtctgtgtgaatttataaaccactaaatcttacaggtttaatactcaaaactcctcttgtcttcaatatacctaccatagactgtaagggattatttcgagtagtcagttggggtttgatatggtgttaattctttatgcatttacatcattctatcaatttcaagtgtgttcttttattctttttcttttttctttaatttttccaggctgaaatagttatcttttaaagtctgttctacagcagctgctccaccccagtcattgcctttagctttctctagattgccattaggccttcttgaagtcgtgcttattacagatatgtgaggagtgctctttttagggggggaaggggagaaacagatgtaaan

SEQ ID NO: 5654 - DNA, 462 bp, Homo sapiens
atgagctcgtggcggccctgtgcttgatgagggcggtgaggcagcccaagctccttgtgactgccctggcttgtgcaatggggaagggaccaggcagcgcgctcatcctcaaaacaaacaaaaacagtggagacagcacccccggccaaccaggaagcttcagggtgacctccaggggagtcagccaccaacagtacacccacatagagacacagcaggaaagggattgccaaaatctgcatttgcagtctctggtccttaggaagttttgaaaatcagcaccaggagtgagggcctcacttctagaagtagtaaggcaatcagatgaaaaaatggcaagtgctaatttaataaagcaaggcagagaactgactgacatttatatcaatctcttacaaggatcacaaagaaatgctggtagtctactggcagagcctgtcgcctatgtgtacattgtcttca

SEQ ID NO: 5655 - DNA, 494 bp, Homo sapiens
  misc_feature (1)...(494): n = A,T,C or G
catgacngcctcggnnnatgatagcatgcngaccggcccgattcccggtcgacccacgcgtccggagagctgtccccggatctccgttctgctctcgggggcaccttccggggttcctaagccgcggggcccctcgctgcccctcgaggccctttccctgacctaggctttggcctgggctactcgttccggagccgccatgtcgtccgacttcgaaggttacgagcaggacttcgcggtgctcactgcagagatcaccagcaagattgcgagggtcccacgactcccgcctgatgaaaagaaacagatggctgcaaatgtggagaaacagcttgaagaagcgaaagaactgcttgaacagatggatttggaagtccgagagataccaccccaaagtcgagggatgtacagcaacagaatgagaagctacaaacaagatatgggaaaactcgaaacagattttaaaaggtcacggatcgcctacagtgacgaag

SEQ ID NO: 5656 - DNA, 391 bp, Homo sapiens
ctggcggccgggcagcatggcggggctggagctcttgtcggaccagggctaccgggtggacgggcggcgcgccggggagctgcgcaagatccaggcgcggatgggcgtgttcgcgcaggctgacggctcggcctacattgagcagggcaacaccaaggcactggctgtggtctacggcccgcacgagatccggggctcccgggctcgagccctgccggacagggccctagtgaactgtcaatatagttcagcgaccttcagcacaggtgagcgcaagcgacggccacatggggaccgtaagtcctgtgagatgggcctgcagctccgccagactttcgaagcagccatcctcacacagctgcacccacgctcccagattgatatctatgtg

SEQ ID NO: 5657 - DNA, 461 bp, Homo sapiens
ctgtcttgttgtatgtgagctttgtagagatttttaaaaatataagcatcaccttcccattgaagagtggagagagtctactggatgactggccaggaactttctctctgaatcggacatttggatgtcttctttcttccaagaaatggtggttcacattaaagtatcatggccttatgtatgctcaaatggaatcttatgtaactttcttatttaattttggtctgcttatttttagataaaattgaaaggaattgtataaatcaattaacatattagctgagttgtccaacacatggtataaacgaattacaacagtaaactattacacatttccaacttgcctttggggatttatgaggattttttttggtggggggagggggctccaattcatatctctgaaacccttcacacttggtttactaattcaaagttagaagtctagaatttgccctgcc

SEQ ID NO: 5658 - DNA, 419 bp, Homo sapiens
ctggtagtgggtctggcaatagttccagcaatgctactgggaacaccgttgctgccgctaattatgtcgccagcatctttagtaccccaggcatgcagagcctgctgcaacagataactgaaaacccccagctgattcagaatatgctgtcggcgccctacatgagaagcatgatgcagtcgctgagccagaatccagatttggctgcacagatgatgctgaatagcccgctgtttactgcaaatcctcagctgcaggagcagatgcggccacagctcccagccttcctgcagcagatgcagaatccagacacactatcagccatgtcaaacccaagagcaatgcaggctttaatgcagatccagcaggggctacagacattagccactgaagcacctggcctgattccgagcttcact

SEQ ID NO: 5659 - DNA, 471 bp, Homo sapiens
agactaccatcttccctgcaactctgaaggatggacttaaccaccaccatgtcgagcaaaagaacaaagaccaagaccaagaagcgccctcagcgtgcaacatccaatgtgtttgctatgtttgaccagtcacagattcaggagttcaaagaggccttcaacatgattgatcagaacagagatggtttcatcgacaaggaagatttgcatgatatgcttgcttcattggggaagaatccaactgatgagtatctagatgccatgatgaatgaggctccaggccccatcaatttcaccatgttcctcaccatgtttggtgagaagttaaatggcacagatcctgaagatgtcatcagaaatgcctttgcttgctttgatgaagaagcaactggcaccatacaggaagattacttgagagagctgctgacaaccatgggggatcggtttacagatgaggaagtggatgagctg

SEQ ID NO: 5660 - DNA, 438 bp, Homo sapiens
actttgggaggctgaagtgggaggatagcttaagcccaggagttcaggaccagcctatgcgatgtggtgagaccctgtctttacaaaaaaaaagaacagaaaaaaaaaaaaattttccccggggtggggggggggttttttttgccccaattttttggggggttaaaaaaaaggggttttccaacccgggaaaaaaaaatggggaagggcccttggggcacccctttatttccccccgggggaaaagggccaaaaccctttgtttaaaaaaaaaaaaaaaaaaaaaatcttgaaggggggtttttaaaccaaaaatttgggttttttaaaaaaaaaaaaaaaacttttttaaagttgccccctaataaaaattcccccccctccaaaagggggggaaaattttttaaaaggggaaaaacccttcgggtggttttttgc

SEQ ID NO: 5661 - DNA, 452 bp, Homo sapiens
  misc_feature (1)...(452): n = A,T,C or G
atggagatgcagcttagccacgccaaccgcatggccgccgtggcccagaagcaagtcaagagcctccagagcttgttggaggacacccagattcagttgtactgatgcagtccgtgccaacgacgacctgaaggagaacatcgccatcgtggagcggggcaacaacctgctgcaggctgagctggaggagatgcgtgccgcggtggagcaaacatagcggtcccggaagctggcggagcaagagctgattgatactattgagcgggtggcagtggtgcattcccagaacaccagcctcatcaaccagaagaagaagatggatgctgacctgtcccagctccagactgaagtggaggaggcagtgcaggagtgcaggaatgctgaggagaaggccaagaaagccatcacggatgccgccatcatgatgcgagagctgaagaagagcangacct

SEQ ID NO: 5662 - DNA, 435 bp, Homo sapiens
tctcaatttcagcaagtacctgtcatgaagggtatgaccttaatgatgtacataaaataaaacaaatgaagaaatggaaaacttttagaaattaaggtgtacttgaaaacgagtatctatcatatgacccctgcactccctctgtatcatctcaggaggtttcaggggcctgttgacatgaagtttcgaagtttcatgttggctttggaatggtagcaaaagcctttcctggctgagatgatgcttaaaacacacctcacttattgtacatgttggaaccaggacatgagagacatagaaaaacagaagtcatgaatgtaaattgaatgagaggcttaacatgcatgaaaatacagatggacctgcaggaaagtgagcaaacatcgctgagtttgttttcttgttcgggagaatggggccggggctggcctggcc

SEQ ID NO: 5663 - DNA, 472 bp, Homo sapiens
  misc_feature (1)...(472): n = A,T,C or G
tacaggacatttctggggtacttgaagcccatgttcaccagcagtcttcagtggattcacagatttcttcaaaggaaaacaaagacctcatttctgatgccacagaaaaggtttccatcgctgcagaagatgacactttagacaataccttttccgaagaattggagaagcaacagcagtttacagaagaggaagacaacctatatgctgaagcttcagaaaagctttgtacaccacttctggatcttttaacaagagaaaaaaaccaactggaagcccagctgaagtcatcactaaatgaggaaaaaaagtcaaaacaacaactggaaaaaatcagcttactgacagacagtttactanaagtctttgtaaaggacacagtcaatcaactacaacaaatcaaaaaaaccagggatgagaaaatccagcttaggcatcaggagcttcttggtgatgaccanaagaaagtacc

SEQ ID NO: 5664 - DNA, 438 bp, Homo sapiens
  misc_feature (1)...(438): n = A,T,C or G
aatctttgttttataaaataattgattaatctaactaaacaaaaataacatggcacaagtcaccataaacaaaataaaaggcaaaaaccaaggaaaatatttttgaatcatgttacagataaaagactaatttccctgaagtgcagaaagttcccaaatcaatacaatgttaatacccaaattttaaaaatggcccatgaacgaattttcctgaaagaggaaataaagatggctctttagcatatggaaagataacctcactcacaaaagaaatgccaattaaaactatcatgaactgacttttatttaacctatcaattatgcaataatccaaaaatctgacaacacactgagcaagagaatggngaaataggcacttctagatactggatgtaataggtgtaacctctgtgaaggacattgttatgatatncaatt

SEQ ID NO: 5665 - DNA, 465 bp, Homo sapiens
  misc_feature (1)...(465): n = A,T,C or G
tgagcctcgggcctgatcacaagatagatgttgttgtttagaatatccacaggcagatgaagttctgagtgggtatgaaaagcaccctcaactaaaatgcaccttcattcttatttcttgccctctctgctcaagagaaatggctgaggtttcatgtgaatttcccaaatcaacaatcatctcctaatgtttcccagttcctgtcacctgttggcgaggttgatttctaaaacttanatgagtctacctgttttgcatttaatttcagtgttccgatttcttttttcttttttttttttttgaaacggagtctccctctgtcacccaggctggagttgcagggagccaagttcgtgccactccactccagccggggggacaaaacaaaactctgcttgaaaaaaaaaaaaacccgggagggaggagccttaaggctgtaatagagggaggcggcttttttacccc

SEQ ID NO: 5666 - DNA, 451 bp, Homo sapiens
cggacgcgtgggcggacgcgtgggctgtgagccgccagcatggatgacatctacaaggctgcggtagagcagctgacagaagagcagaaaaatgagttcaaggcagccttcgacatcttcgtgctgggcgctgaggatggctgcatcagcaccaaggagctgggcaaggtgatgaggatgctgggccagaaccccacccctgaggagctgcaggagatgatcgatgaggtggacgaggacggcagcggcacggtggactttgatgagttcctggtcatgatggttcggtgcatgaaggacgacagcaaagggaaatctgaggaggagctgtctgacctcttccgcatgtttgacaaaaatgctgatggctacatcgacctggatgagctgaagataatgctgcaggctacaggcgagaccatcacggaggacgacatcgaggagctcatga

SEQ ID NO: 5667 - DNA, 469 bp, Homo sapiens
  misc_feature (1)...(469): n = A,T,C or G
agggggcgcccgcgccgccatattccctcccgccggccggctccgcggcgcgcagccaccatgagcaccgccgccttccacatctccagcctcctggagaagatgacgtccagcgacaaggacttcaggttcatggccaccagcgacctgatgtcggagttgcagaaggactccatccagctggacgaggacagcgagcgcaaggtggtgaagatgctgctccggctcctggaggacaagaacggtgaggtgcagaacctggctgtcaagtgcctgggtcctctggtggccaaagtgaaggagtaccaggtggagaccattgtggacaccctgtgcaccaacatgcggtcagacaaggagcagctgcgagacattgccggcattggcctcaagaccgtgctctcggagctccctcctgcagccacaggctccgggctggccaccaacgtgtgccggaagatacaagccn

SEQ ID NO: 5668 - DNA, 466 bp, Homo sapiens
acagcttacaggcttccaagcctacaaactacgggtgacacacctgtaccaactgaagcagcacaatattctggcatctgttggagaagatgaagagggcatcaaccccttggttaagatctggaacctggagaagagagatggtggcaatccactctgcactcgaatcttccctgctattccaggaacagagccaactgttgtatcttgtttgactgtccatgaaaatctcaactttatggccattggtttcacagatgggagtgttacattgaacaaaggagacatcacccgggaccggcatagcaagacccagattttgcacaagggcaactatcctgtaactggattggcctttcgccaagcaggaaagaccactcactcgtttgttgtgacaacagagaacgtccagtcctatatagtttctggaaaagactaccctcgcgtggagttggacacccatggt

SEQ ID NO: 5669 - DNA, 419 bp, Homo sapiens
catatttgttatgccttattctaaaattgagtctcaaactggaatgcctttgaagacagatgcttctatagaggttctttgacctaaatagttcagcatttgtatttttattctggtatctaatcagattcctaatcatagcccgtaagaaggaatgttactttaatattggactttgctcatgtgctcgtgtccgcattttttttttttcttaaaatcatagccatatgggaaattttctattttgttagggttctcttttattgaggggcatgcagggggtgttacttggaaatggccaatttttattaaaatatttctggaagaaaatttaatctggcaatatagactaatactcgtaaaaaaaaaaaaaaaaaaaaaagggggggcccttttaaagaatcctctgggggccccat

SEQ ID NO: 5670 - DNA, 483 bp, Homo sapiens
ctgacctgcttggcacgttcaggaagtgtctgttgaaagctccgtggctccaggatcagaatcccctcctgttgcagaacttccctgttcagattcctttggcagcaacaaacccttcttgggctcacactgtgagctgggagctggggtggaatgataaactcccctccgcgtggagattgtggttcaaagtccatccttttgtagcttaagctgtgtgctggtgttgcaaagatgaatttggtccatctctgccttggaagagttttcactctcatggagaagaaccaatcctgccataaagggttctgagtgctggggcaaggtcagggccaagaacataaagcagggaacaaccagaggccctggagagtcagggaatattttcaaagaaggcagcaattctttgggttttgatggatgaggaggagttcaagcagctatgcagagaagggaatccaaggcagtggggacagcacacac

SEQ ID NO: 5671 - DNA, 450 bp, Homo sapiens
  misc_feature (1)...(450): n = A,T,C or G
cccacgcgttcgcccacgcgtncggggccagaggagaaagagagagcgcgaaagagagaggatgtctctctcagactggcacctggcggtgaagctggctgaccagccacttactccaaagtctattcttcggttgccagagacagaactgggagaatactcgctagggggctatagtatttcatttctgaagcagcttattgctggcaaactccaggagtctgttccagaccctgagctgattgatctgatctactgtggtcggaagctaaaagatgaccagacacttgacttctatggcattcaacctgggtccactgtccatgttctgcgaaagtcctggcctgaacctgatcagaaaccggaacctgtggacaaagtggctggcatgagagangtttcggtggtgcacacttgcctgcacaacagcttctcttacaaggaggcggg

SEQ ID NO: 5672 - DNA, 478 bp, Homo sapiens
  misc_feature (1)...(478): n = A,T,C or G
tctccggtcgactacccgtacgagttgctcttgctgtgtaaagcactattgtcttggggttgagnnnactaggcagnnnnnttgtggnggttggtgggcagaacatatgggttaaatctcggtagagagttttcctcatncctnctnnttaagtnnnngnnngggttttttttnnngggggggggggtttttttggtgtggcgcgcgccgannaatctctcctggcccctttgcggaaaggaggaaggaagaaatgcgtttagatcttggatgcagacctttcaaagggttaaatgtaaccatatggatcaaccacatgcacatccttactacagaatccgtcctttcatttcaacttatagcaagctatgatttttatatataaatattatataaataatgtataaaacattaaaagttaactatgtaagatattatttctgaaacaatttagctatatccactatgattataaact

SEQ ID NO: 5673 - DNA, 402 bp, Homo sapiens
tagaagtgaaaattaaagaacatttcaaaattgtgggtgcccggtcagcagcatcagcattacctgggatcttcttggaactgcaaattatagagttcccgtcaatctgatgaatgataaactctggggatggggcccaacaattggtgctctcacaggtgattatgacacacagtaaaacttaagaaccgctcaactacagttacctcctgaataacatgggggtcaggtgaaccaactcctgcccctgcagcatccaaaattcatgtataacttttgactcccccaaacccactccaccttactaccagacaaccttagccaaaccattttaaaaaaaaaaaaaaaaaaaaaaaaaaaaaaaaaaaaaaaaaaaaaaggggggccctttttaaaaaatcc

SEQ ID NO: 5674 - DNA, 517 bp, Homo sapiens
  misc_feature (1)...(517): n = A,T,C or G
gcggatctaccctgngcctgacacagagaagtatgcccgcttcttcaagcacaatggctccctcttccaagagactgctgcttccaaggccagagaggagtgtgccagctgctgccgggacagctggacaccatgaggcctcaagaaattgtggaagaggaggagctggagcggatgaaggccctgctacaaagggagactctcatccgaagcctgggtattgtagagcagctcacccgtctgcagcaccctggcccccagggccagaaaaaaacttcatgagagtcgggtgagggtccctgtgaagtctcccaaaggaaaagggaacaagggctgtcattccaggacatggtgttggctcaacaaaggagggctgtgtgatgggtatctgcagtggagcctgggaaagcgagtgcgctagctggcnnnnnnnnnnnnnnnnnntnnnnnnnnnnnnnnnannnnnnnnnnnnnnngggggggctgttttaaaatctcttggggggacaattttgtt

SEQ ID NO: 5675 - DNA, 522 bp, Homo sapiens
  misc_feature (1)...(522): n = A,T,C or G
cattgaccaagcatgtctcaccactgataggacgttttgttccctttgctgccgtagctgctgctaattgcattaatattccattaatgaggcaaagggaactcaaagttggcattcccgtcacggatgagaatgggaaccgcttgggggagtcggcgaacgctgcgaaacaagccatcacgcaagttgtcgtgtccaggattctcatggcagcccctggcatggccatccctccattcattatgaacactttggaaaagaaagcctttttgaagaggttcccatggatgagtgcacccattcaagttggttagttggcttctgtttggtgtttgctacacccctgtgttgtgccctgtttcctcagaaaagttccatgtctgtgacaagcttggaggccgagttgcaagctaagatccaagagagccatccctgatttgcgacgcgtgtaccttcattatggggatgtaaagcanggagganacctctgcagctcattctgccctgcaaagctgtggagcn

SEQ ID NO: 5676 - DNA, 396 bp, Homo sapiens
caagaagttattgtctaagagatgagcagtaggtaagaaaacctgagtcattgactcttcaatgtaatgatcagagtttaaaaccattttctaataataaattaaatcttcagttgaacaaattattttgtgaatctgtttcactcaatggattgtaaagaaggctcctaaatttgagttgtttgctaatcatttcatttgcatcattagggtatccttaaactgattttctattacaattggaagtggagaatatgtgcatctacactaaaaaaatgtttaagatatcaaaaacctctcctcgtgcttcaaaatgacaggaatcctgtgcattatactaagaattacatgccataagatgactgacttcagaaatcctacttcagaagtgtaata

SEQ ID NO: 5677 - DNA, 469 bp, Homo sapiens
  misc_feature (1)...(469): n = A,T,C or G
aatacatgtaaaatttgtacaaaaatatcttctatgaaaatgatttgtaatccgtagacttattacctgggagatgtcttgatgtaaaatcccatcctttgggttgtgggttttttgttttctccaaataaatctgatctttaaagttcaaaaaaaaaaaaaaaaaaggggcgcccgttttaaagaatccttggggggccccaagtttacccgtgcttgcaaggtaatagttttttccttatagggagccgtattataacctacctgggaatttttgaaaagaacccttatttttggggggggacatattgggccaacctccctccaaaaatttaaggctctagggaaaatataaaattttaaggggtataaggggtaaaacaacctccatatcctccctcctaagaaaaaaaatgannnnnnnnannaaaccacccccccncngggggagaaaaagcccaccaccccc

SEQ ID NO: 5678 - DNA, 402 bp, Homo sapiens
  misc_feature (1)...(402): n = A,T,C or G
ataaaacttgagagataaaaagctataccataataaaatctaaaattaaggaatatcatgggaccaaataattccattccagttttttaaagtttcttgcatttattattctcaaaagttttttctaagttaaacagtcagtatgcaatcttaatatatgctttcttttgcatggacatgggccaggtttttcaaaaggaatataaacaggatctcaaacttgattaaatgttagaccacagaagtggaatttgaaagtataatgcagcacattaatattcatgttcatggaactgaaagaataagaactttttcacttcagtccttttctgaagagtttgacttagaataatgaaggtaactagaaagtgagttaatcttgtatgaggttgcattgatttn

SEQ ID NO: 5679 - DNA, 421 bp, Homo sapiens
agaggtgtcactctgctacaaaactactcagatgaggtgctgagggaagctgctggtctctgagctcacttatatgtcagaacctggctttgaggaactgggtgctgtgggagcctgctgaaaaacacacaggaacaggaagtaaaaatctctccattgttctccgctggcagaagttaacatgccagctgtcaaaggaaaagttttaaagtgtccaggcacatttttgctcaacaggcagaagggatgactttgtgactaagaagcggtaaccagcacagggttctatcgttgttcatgctagctggccactatacccttccagaacaaagcccgtcactgaggacaaactgttggaaatataatccagattgagctgcagagagacaagttagtagagacgaaaggaaaggttcagata

SEQ ID NO: 5680 - DNA, 421 bp, Homo sapiens
tgctgccaagctccaattacagcaatatcaagatctactacaccccctctgccagctatctggaggtgaccccagactctgagaatgattttgggaactacaactgtactgcagtgaaccgcattgggcaggagtccttggaattcatccttgttcaagcagacaccccctcttcaccatccatcgaccaggtggagccatactccagcacagcccaggtgcagtttgatgaaccagaggccacaggtggggtgcccatcctcaaatacaaagctgagtggagagcagtgggtgaagaagtatggcattccaagtggtatgatgccaaggaagccagcatggagggcatcgtcaccatcgtgggcctgaagcccgaaacaacgtacgccgtaaggctggcggcgctcaatggcaaagggct

SEQ ID NO: 5681 - DNA, 408 bp, Homo sapiens
  misc_feature (1)...(408): n = A,T,C or G
cggacgcgtgggttttttggaaacctctgcgccatgagagccaagtggaggaagaagcgaatgcgcaggctgaagcgcaaaagaagaaagatgaggcagaggtccaagtaaaccgctagcttgttgcaccgtggaggccacaggagcagaaacatggaatgccagacgctggggatgctggtacaagttgtgggactgcatgctactgtctagagcttgtctcaatggatctagaacttcatcgccctctgatcgccgatcacctctgagacccaccttgctcataaacaaaatgcccatgttggtcctctgccctggacctgtgacattctggactatttctgtgtttatttgtggccgagtgtaacaaccatataataaatcacctcttccgctgttttagctgan

SEQ ID NO: 5682 - DNA, 474 bp, Homo sapiens
  misc_feature (1)...(474): n = A,T,C or G
catcttagcaagcaccaaaaaactaaagcagtttttaaaccgatatttacgtaaagaaaatcataaaatccaatgcttctgcatactgtgttatgttacagtccagttttgtgtgctttactacacagtttggttacaggacttctgtgcattgtaaacataaacagcatggaaaaggttaaatacctgtgttcagattgtaagatctagtccggacttgctgtgtatattgtaacgttaaatgaaaaaagaacccccctttgtattatagtcatgcggtcttatgtatgataaacagttgaataattaanaaaaaaaaaaaaaaaaaaaaaaaaaaaaaaaaaaaaaaaaaaaaaaaaaaaaaaanaaannnnanannnnnnnnnnnnnnnnnnaaanaannnnnnnnnaaaaataannnnnnnaaannnnnnnnaaataaaaannnnnnggaaaaaaaaaattatatatttt

SEQ ID NO: 5683 - DNA, 476 bp, Homo sapiens
cttgatgaaaggagagatgtcttggatgaccttgtaacattgcataattttagaaatcagttcttgccaaatgcactgagagaattttttcgtcatatccatgcccctgaagagcgtggagagtatcttgaaactcttataacaaagttctcacatagattctgtgcttgcaaccctgatttaatgcgagaacttggccttagtcctgatgctgtctatgtactgtgctactctttgattctactttccattgacctcactagccctcatgtgaagaataaaatgtcaaaaagggaatttattcgaaatacccgtcgcgctgctcaaaatattagtgaagattttgtagggcatctttatgacaatatctaccttattggccatgtggctgcataaaaagcacaattgctaggacttcatttttacttcagactaaagctacccaaggacttagcagataagggggttacatcaat

SEQ ID NO: 5684 - DNA, 404 bp, Homo sapiens
  misc_feature (1)...(404): n = A,T,C or G
caggctatcatatcatgttgcctttcattactacgttcagatctgtgcagacaacactacaaactgatgaagttaaaaatgtgccttgtggaacaagtggtggggtcatgatctatattgaccgaatagaagtggttaatatgttggctccttatgcagtgtttgatatcgngaggaactatactgcagattatgacaagaccttaatcttcaataaaatccaccatgagctgaaccagttctgcagagcccacacacttcaggaagtttacattgaattgtttgatcaaatagatgaaaacctgaagcaagctctgcagaaagacttaaacctcatggccccaggtctcactatacaggctgtgcgtgttacanaacccaaaatctcagaagccatatgaaga

SEQ ID NO: 5685 - DNA, 428 bp, Homo sapiens
tgtctacctccctctgcactcgagccaggacagactgctgccaatgaccgtggtgacaatggccagcgccagggtgcaggacctgatcgggctcatctgctggcagtatacaagcgaaggacgggagccgaagctcaatgacaatgtcagtgcctactgcctgcatattgctgaggatgatggggaggtggacaccgatttccccccgctggattccaatgagcccattcataagtttggcttcagtactttggccctggttgaaaagtactcatctcctggtctgacatccaaagagtcactctttgttcgaataaatgctgctcatggattctcccttattgaggtggacaacacaaaggttaccatgaaggaaatcttactgaaggcagtgaagcgaagaaaaggatcccagaaagtttcaggcc

SEQ ID NO: 5686 - DNA, 516 bp, Homo sapiens
  misc_feature (1)...(516): n = A,T,C or G
ntttgaccccgtgggaccttgccggaccttccgggncgacccacgcgtccgagaaaataaaaggactggatcatattggaagtcgagaagacgttcagttactagtcctattgcttcatttaatggtgttctcttttttaagcttttccccatttgtgacagaaaaacaaggcacctgctttccttagagcaccactgataatctttggtatgatcatgaaacgattgtgcttgagaagaaaaatgggcataaataaagctaaaaagcaaagatgccttatccatagcaatagtttatttgcttttcagaatctaaccttttccttcatttttcatatttttggattgggttcgatgatgcatatctcctatctcctcaaatgtattccagtatgaggaacatgggagaaatgtcttatttttattcggaggcaaccacggatgtggccatcaactggggggtccatgtgacttcttcactagatctgatatgctctggggttgatattagactgg

SEQ ID NO: 5687 - DNA, 423 bp, Homo sapiens
aaatgagataatgtaagaaaagtgattgggattgggtggtgacttaatgaacggtagtggtttttttagtagttaatgtatagcaaaattagtttcacattgtcaagttttcaatacatccccaagttaattgaattttaaattaatgatcaataaatcacaaaggacccaaatcaattctgaacaacaatttagttatgtaagaagacttctgagattacaagaaactcactgctgtggactggatgtttgtgccctcccctccaaaatttttatattgaaattctaaccctcaatgtgatggtattaggagatgataggtcatgagggtggagctccttggatgtaattagtgcctttaacagagagacaagagagcttgttctccaatctctgctcactaccactggatgatgcaatggg

SEQ ID NO: 5688 - DNA, 415 bp, Homo sapiens
  misc_feature (1)...(415): n = A,T,C or G
cttaattttaataatcaacaccctcctagctttactacttataattattacattttgactaccacagactcaacggctacatagaaaaatccaccccttacgagtgcggcttcgaccctatatcccccgcccgcgtccctttctccataaaattcttcttagtagctattaccttcttattatttgatctagaaattgccctccttttacccctaccatgagccctacaaacaactaacctgccactaatagttatgtcatccctcttattaatcatcatcctagccctaagtctggcctatgagtgactacaaaaaggattagactgagccgaataanaaaaataactcctttttccacaaacatgagcacagaaaaaaacaaaactcggggggggggggcttttattatcccc

SEQ ID NO: 5689 - DNA, 413 bp, Homo sapiens
ttgataatgagctatggtacatattttgatattctctttataaaagcatgactgactggacttgcaagaatattggaatgaacggttgtgcagcaagcccagcgctgatgtgtctcgtcagaggaatagattaacacgaacccctcagcatactgggaatctcttcctgaacaacgaatggacattaggtcaaggctactattccgttcattcaataatgttacgcatttgaattatttattggatatcctacatatatttctcctttggcagggactagatctccactcacgtgtcttaatgtatccctccaggtggcgagcactgtttttttaatcccctgaagttgtcctgtacgagacagaaattctttgctgattgtatcccttggagtaagaaagtattggcaaggg

SEQ ID NO: 5690 - DNA, 411 bp, Homo sapiens
cccacgcgttcagaccttcctttatactatagatagagctttataccgaaaattatgcctgacatctggcgaacctattgatgctgctattgcaacactgtggctaaagctaaatgttcggacatatcctgaaacatccactgagatcacgacgagaagctactcgattggctactatctctctctctctctctctattaggaaaatttgaaaaagacacttgacttggcacttttaacggtaacctcaccaccgaccgacaagcccgtcaccaggagctacaacttgattcaacatcacatcttttgtgctctttatttttgccggaccagataagcggcatgagaatgagccttttttgtacctttgcatttaggatttataatttgaactgacgcatggacacacaca

SEQ ID NO: 5691 - DNA, 397 bp, Homo sapiens
ttttctcttcattagccagagatgactaatttaaatttagaaccagattttaatttaaattaatatttccattaataacctattcattgcagatacctattatactgtgtaacagttgttttggaaattttatgtaaaattaaaactatcagtattttacagatgttttaattagacattgttattaacaggaacagtgcagaaactagaatcaagccttataatatcttatagaccatgcatttttgaagttagtgtccactagggtcctattaactgtacatttgcaagatttcattatttttgcctctgacactatgggaaaaattttttagaagctattgggacagattcaagcttttatgcacttggttactacagctgtaaaatgaaatct

SEQ ID NO: 5692 - DNA, 403 bp, Homo sapiens
caagtcgcttgctctttatgatttggactcaactacctcatgaagcctccagactggccatgatagtaattttccctagattatcttccacaaaattctattctcaagcagatgtaagatctataataaatacctatgaaattgctgtgaaagaaactagagtaatcaaccattgcattttttatgtgaagttttgtaatggagaaaaagttaatcaagaataaagattcaggcccaggtagtgtgcatctatagttgcagctactcaggaggctgaggcaagagaatctcttgagcccaggagttcagggccagcctgggcaacataatgagacccctacctcttaaagaaaaaaaatcaagattcaaatatgaagaacagacgttagtagacaaagtgtga

SEQ ID NO: 5693 - DNA, 454 bp, Homo sapiens
aaaaagacacttccaaagggtgtcaatgacaagagagaaatatacatagagtggtcacttcatttaccaaccctggaaccgcagacctctgggcttcctgataaagaaaatgggtacggccaagaccatagacctagtgattgtcagatgaacaattagacccacagaaccatccaagctacagaggacgcattctgccttcccttggatcctgtggtttgaggatggaggtctaggaccgtggcaggctttttgtcccatgagggaaggccatggagctgaggaaggggaagaacacacacacctaatggaatctcgagagaaagttcagacatcaaaagacagaagcgacagagacccaggtctgtggggacgctgtatggctgggtcaagtcttgatcaaagtcagcattatatctggacttgcacagtttctgagccttgaaactccatt

SEQ ID NO: 5694 - DNA, 399 bp, Homo sapiens
ggaaggctgaggcagaagaattgcttgagtctatgaatttgaggcctcagtgagctatgatcacaccactgcactccagcctgggcaatagagcaagagtccgtctcaaaaaaattgcgttttaatcattctttataatattaacacaatagaatgtgaatcctgggaatttataagaaaaatgttcattttaaaatacattctctatgacatgtagtgcttccatttgttctgtatatattgtatttctttctctttagttggggcaaagaaacaggttaatatgcagaagaaatccatataggatctttgagtatttgcaactcagcctagaagaggtatgttttcaacatattattatttcagccatcggtctctgggcctgaactacactatatg

SEQ ID NO: 5695 - DNA, 394 bp, Homo sapiens
tcctagttttgcctggttctatggttacattgtccatttcatccaaattttttatattcattggttgttcatagtatcttcttatgatgttaatatttgcaagatttgtggtggtctttttcatgcatgatactaataatttgtgccttttctgtttttcttgatcattcttgctaggggtttatacactttattagcttttccagaggactagcttttggctttgttggttttctttctattgaatgtttattttgcattttgttgatttttgttcttatcattattttatttcttatgtttgatttgggtttaatgtgcttttgtttttcaagctttttgagatgggtactgtattagtttgttttcacactactgataaagacatacctga

SEQ ID NO: 5696 - DNA, 515 bp, Homo sapiens
  misc_feature (1)...(515): n = A,T,C or G
aggccggntnnnagaanccagggccttcagaancctagntggccgagcagnaacnncnnaannnngggnngannnacgcgtncgntaggattaggtggacttttatgagggcagaagggttatttcaggaaatgagaaagggcaaagagaataataaaaagcttctgtactttatagagttgcagagttgggctatacttcttcccataaacaatattactgtcttcaatttgatgatacttctccacctcctctccatcccctctttccttcaccacagggaaatggtgaaaagccgagtgcctttatttctacctaacaaccagaatcatagatttattattgctttggcagtaataaactggaagaaaggacttgaagtactaagaccgagtgtttgtaccaagagcttatttctgtttgtatatcacttactcagtagcaaaaaaaaaaaaaaaaaaaaaaaaaacccttggaagagaaataaaacctgaccccccggggaggggaacccc

SEQ ID NO: 5697 - DNA, 516 bp, Homo sapiens
  misc_feature (1)...(516): n = A,T,C or G
nattgacgccctgtgggacctggccggaccttccgggtcgacccacgcgtccgatcaagagataatttacctttcaattatgataaatagatgtgattggttgccatttgtgttcttttgcagaactctgataagaaaagtgttcaatttgtatttaagcaaacagtgaacgacgtttgcaatcaactaaaaattcgtctatcgaattagggctgaaaattactgttaaagagtgttgcagtatgtctggtggctcccttttcaggactagggctttctcatggagtacagtatgttaatatttacctatataactaatctgttaacggtttttgaaaaacctttcaaattatttgaataatcttcatattttcatttaacctatatgactctaattttttttctgaggaaatcatttggtttttgagttggtttttcttaatgtaagaaaattgtattttttttacaagtatcttcaaactggatcttttatgccccanagtggtcttgaaaagg

SEQ ID NO: 5698 - DNA, 419 bp, Homo sapiens
  misc_feature (1)...(419): n = A,T,C or G
aatccaggtcggtttctatctacttcaaattcctccctgtacgaaaggacaagagaaataaggcctacttcacaaagcgccttcccccgtaaatgatatcatctcaaaaaaaaaaaaaaaaataaatgaaaaacttaataaagacaaaaaaaaaaaaaataaaaaaggcactggggcggggctttaaaaaaaataatgttggggaaaaaacagtggaccaaatatgaagagtattttttttttttttaaagcggatctaaaaaaagctattcgggaaataaaagaaagagaacaatttttggggggggaatcatgtaggcgaaccccgcccaagcagatgttatgatgatgggaaaacttgaaacttacaattttaagaaggatttggcctgccgatgtttacttttaataaaaaattn

SEQ ID NO: 5699 - DNA, 421 bp, Homo sapiens
atctaattgtccttttagcattttatgtaatagaaaataatatttagatgggcagtgtagcctaatggttgatcattggcttcagaatccaaaactgtggttcaatttactcatatatagaatggggacaatattttctacctcatggggtgattgtaaggattaaacaagttactcgtctgtagaaatttctcttccacacacttcatatctcttgttaacatcccttccacagaatgcactttggaaatgatagttttaaaagttgggagtgctttcagctgcaagaccaacacacagttataacagggaatatggaggtgaacattattaaagtgttggcccagtggctctggctctggattagaatctcagtgatcctgttggctttcccttgaacctcaagatggctgcagcagct

SEQ ID NO: 5700 - DNA, 415 bp, Homo sapiens
cccacgcgtccggcttaggtagctggatcacctgaggtcaggagatcaagactatcctggctaatacggtgaaaccccgcctctacctgcacgacaacacatataaaaaagtggaggaggacagcaatgaaaaaacaaatactaaaaaggatgaaggcaagagaattacttgaacccaggaaagtggaggtcacagagagctgagattgcgccactgaactccagcctgggcgacagagcgagactctgtctcataaacaaacatactttcaaacaaagcaggagagccatggtgaataaacaacagcacatctacatacacttttgaaacgcaaggcaaagagatgggggattctcgggactggcggggaaaggggccaaaggaaaattaaataaaagatcagaggcgcggccc

SEQ ID NO: 5701 - DNA, 396 bp, Homo sapiens
aacaaacattaacaaatgcttgccgttgctaattatcataaaaatgacaaacaaaacatcagtgagataccatttcacaccagtcagaatgacttttgttaaaaaaaataataaataaaaaaattaaaaaagatgttggggaggctgtggagaaaagtgaacacacactgtttgtggcaaagttaattaattcagctattctggagagtttggaaattaagaagtaagaaagactgttggatacagcaaccccattactacactaggggtataccagaaggataataaatcattgtaacaaaaagatgcatacacatgtatgttcactgcagcactattcacaataacaaagacgtggagtcaatccaggtgcatccaaggtacgttgaaaatcca

SEQ ID NO: 5702 - DNA, 453 bp, Homo sapiens
ggactggtccctgcagctcttcagtgggtcatctgtgtgtctcagcctcagaagaccagcgagatggctgccaacaagagtaagggccagagctccttggccctccacaaggtgatcatggttggcagcggaggcgttggcaagtcagccctgacgcttcagttcatgtatgacgagtttgtagaagactatgaacctaccaaagctgacagttatagaaagaaagtggttcttgatggggaagaagttcagatagatattctggacaccgctgggcaagaggactacgcagccattcgagataactactttcggagtggggaagggtttcttcttgtgttctcaatcacagaacatgaatcctttacagcaactgccgaattcagggaacagattctccgtgtgaaggctgaagaagataaaattccactgctcgtcgtgggaaacaagtct

SEQ ID NO: 5703 - DNA, 520 bp, Homo sapiens
  misc_feature (1)...(520): n = A,T,C or G
natgacngtctgtgggacagttgacggaccntccggancgacccacgcgtccgagagatcatagaatatgtgaaaatgcccgttttttagtatatatatcatgacttttaaaaaatcaactttattgtggtagaacttacatgcagtaatacagtgcatacattttatgtgtacggttttgacaaatgtatactcccaaccacccaactgtttttttttctctaagagacagggtttcacagtgttgccaggctggagtgcagtggcgtgatcatggctcactgcagcctcgacatcctgggctcaagctggaggccagctaattttttaaattttttgtagagacagggtctcactctattgcccaccccaatttttaaattaaacttcaaaaaaatctctgggccaagactgcatcctctgtttgagaatgttgtgggagagattgatgagtaatcaccatacaatctggtaagtggaaagatggtaataagttttctgcagcacacacaaaggttat

SEQ ID NO: 5704 - DNA, 451 bp, Homo sapiens
tgttttcagtgtacatgatgcattcttataatgtgtaataattaaatctgaggaactgaatatctatcaccttaaacatttatctttatgctaggtatatttgaattgttctccactagctattttgaaatgtactatagattatagttgactgtagttactctactggtaatcccaggttttgaagcctggttatttatgaagtgcttttagttaatggcaacatcagattaatagatgtcaagtcagtgcacttaatattcttcacagtaagtattgattactgttttatatatctggtgttgtacttaacagtgttccagaattctgtccctctacccacatgcatcaaaaatcaccacggatagttgttaaaaatgttaacgttggccgggcacagcggctcaagtctataatcctatcactttgggaggccaaggcagtcatgagt

SEQ ID NO: 5705 - DNA, 460 bp, Homo sapiens
ggtgagacaggggatgggggaaccacgtgttagctcttgttttttgctaaccactgctccaacaagagggagcctggggagtatctacacatgtgggtggggggtgctggcgaacaagatccaggatgtcttggatgctcactaaggagcgataaggaagacaagtcttttactcagtcagcctgtctttattaagtacctcctctgcatcatgcactctgtggatgctgagggtgcaattgcatataaaacagacacaatctctgacctcccaaagtttatagtcatgcttactgttaagggaatgttgaacttgaagatctgatcttgacacctgggttggtggagagatcggggaacacttgctggaggaagtgatatttactgaagaaggaagctggaggatgaatcacaattggctgaatgacagagttctaggcaggggaccagcctgtgcaaa

SEQ ID NO: 5706 - DNA, 526 bp, Homo sapiens
  misc_feature (1)...(526): n = A,T,C or G
ttttgacgcccgtcgttagagacccgtacgcccgggncgacccacgcgtccgagaaatactcctacggccatttgcctacccacagcatcacggcctacccaatggtttccattcggatcagngaccggcagaggctcatccagccatatatccataactactcctggctgctctttgctgccctggctctctatagcgcccacctggccagtgcagaggatgtggatggggagaagctggacccccagacgcgcagcagtgccaccaccctgcggagccagtgcatgcagctcgtcggggactgtctgatgaaggctcatcaaggaaaaggccttaaagctctagctttgctgggtgtattgccagatggggactcgagcccagaagatcatgccctaccggtcactgtgcccaccggagcgtcagaggagcagctagagaagaaagcttgccagggtgctgagctgtccgaaacaagcaatggaaagagagctgttcatgaggaagtcagacctgtagatttcn

SEQ ID NO: 5707 - DNA, 473 bp, Homo sapiens
  misc_feature (1)...(473): n = A,T,C or G
gtggtcnanaatccgaaagctgaggacntgcgacggaacnccgggncgacccacgcgtccgcccacgcgtccgcccacgcgtccgtggaacctcgctgtcatttatcatcagacctcacaaagaaggtgaacgggctttgccatcaataccaaagttggccaacagcgaaaagcaaggcatgcggacacacgccgtctctgtgtcagaaacagatgattatgctgagattatagatgaagaagatacttacaccatgccctcaaccagggattatgagattcaaagagaaagaatagaacttggacgatgtattggagaaggccaatttggagatgtacatcaaggcatttatatgagtccagagaatccagctttggcggttgcaattaaaacatgtaaaaactgtacttcggacagcgtgagagagaaatttcttcaagaagccttaacaatgcgtcagtttgaccatcct

SEQ ID NO: 5708 - DNA, 415 bp, Homo sapiens
aggcaggtgtgccgagcaggtagggcttgctggcccctctgcaccagcaggcttcacctcttatgctcccaggtcggcccctggagactctggtttttaagaaatgcacacagctacagaacacacaaccttgcataaagagggtttgtggactcagctgaagaaatccaagtccaagacatatggaattaagcactccttccctcaaaatttcccctggtggttaatgtatcaaaagccatttcatctgatttcaaatagaagctgaaaattaagttcacacttgttagattttgtgtgtaacagtgttgtacctggacagtattagaaatttgtatgcttattctcttgttaagtgttttaaaatgtatgaaccgccccaaacccattttataagaaataaaaaaaaaatatg

SEQ ID NO: 5709 - DNA, 525 bp, Homo sapiens
  misc_feature (1)...(525): n = A,T,C or G
aattgaccccgctcgttgaggaccggtatgcccgggccgacccacgcgtccgcccacgcgtncgacacctagacttgcctagctcctcttggatttatgagtatcttttatgcttcttggaaagtaagagtgtagtcttgcccctgaagtagagttaaaaggtttgcacgataatctaacccttaaccttatcctaatctggactgtggtctcacagactgaactaattggcgcagtattcaagtattctaatacttggtgattagcaaaaacactacaacccagtgaaataggttgggcatgtattcacatgcctatttaacatatgagaaaacagattgtaaaggattaattgacttgagacaaatcaccttttccaactccaagttttaaaataataattttgaaacattttaagcagaaaagtacacagaataacagatccttttgtacaggaaaaacagggctatcttattgccatatttcaggttttatgttatcattacagctaaatatgcatcatct

SEQ ID NO: 5710 - DNA, 459 bp, Homo sapiens
  misc_feature (1)...(459): n = A,T,C or G
aattatgggagtacagttcaagatgatatttgggtggggtcacagccaaaccatatcaagtatataagcaggccagggattttaagcatttgcagtgggtggactaccatcttttgaaccaggagatgaaaaaatatcctcttatttatttaaacacagtgcctggcctctgacttgaatttaattctgtcattagtggatactctgaacattaaatcaagaaaaaatttttcatttgttatatatacctttctatggggaacaaaagtgctaattcttcaagggattaatttgatagtaattagatgaagcaaaacaacttgtggtataactcttgcagttntattcatactgttgtatttcttccctcanaccaacaaacttgttttttaaacactgagtaacttctttaagagaaaacataggtaaagttatctttcatttaatattaaataggga

SEQ ID NO: 5711 - DNA, 411 bp, Homo sapiens
caactacatcgaaaaggtgcgcttcctggagcagcagaacgcggcgctcgccgccgaagtgaaccggctcaagggccgcgagccgacgcgagtggccgagctctacgaggaggagctgcgggagctgcggcgccaggtggaggtgctcactaaccagcgcgcgcgcgtcgacgtcgagcgcgacaacctgctcgacgacctgcagcggctcaaggccaagctgcaggaggagattcagttgaaggaagaagcagagaacaatttggctgccttccgagcggacgtggatgcagctactctagctcgcattgacctggagcgcagaattgaatctctcaacgaggagatcgcgttccttaagaaagtgcatgaagaggagatccgtgagttgcaggctcagcttcaggaacc

SEQ ID NO: 5712 - DNA, 433 bp, Homo sapiens
  misc_feature (1)...(433): n = A,T,C or G
tgcaaagtggcggccgagtggaggagcaccttccacaaggacgtggttgtcgatttggtgtgttaccggcgcaacggccacaacgagatggatgagcccatgttcacgcagccgctcatgtacaagcagatccgcaagcagaagcctgtgttacagaagtacgctgagctgctggtgtcgcagggtgtggtcaaccagcctgagtatgaggaggaaatttccaagtatgataagatctgtgaggaagcttttgccagatctaaagatgagaagatcttgcacattaagcactggctggactctccctggcctggcttcttcaccctggacgggcagcccaggagcatgtcctgcccctccacgggtctgacggaggatattctgacacaccaccggcctcctcgctgtnaccaccgcctcctcgctgtgccac

SEQ ID NO: 5713 - DNA, 525 bp, Homo sapiens
  misc_feature (1)...(525): n = A,T,C or G
ttttgaacgcccgtcgttgaggaccggtccgcccgggncgacccacgcgtccggtagacggtgaaaagatagcacatatctgatccctgccccagttcagggaggtttagtcaacatggggctcagaaaccagngacattccaaataaggtatttttctctctgtcttgtaaggtctacctgaagggagcgcaccccaaatttcctgagggagggaagatgtctcagtacctggatagcctgaaagttagggatgtggtggagtttcgggggccaagcgggttgctcacttacactggaaaaggtaatgacctgtcttctccttgagcctgtctcccactttatcagttcccatagtcctcttggcacagtatggctgagtgtacacatgtgtatgcacgtaagggccagggccgcccttccttctatacatagcgctgatacaatagaaaggcatgtttctcagccccatttgccacaggaaagcagtccttcttcactagaattccctagccatggcagctgg

SEQ ID NO: 5714 - DNA, 415 bp, Homo sapiens
  misc_feature (1)...(415): n = A,T,C or G
gtggctgcgtggccgcctcacttcgcgcacgcgccgctaggctgggggagttgatttgcactgctccgggtgtcggctccggcgggacgggcggttctgcgtacccctctccagtgtcaacctggggctgaatcttcaacctgtcaaagccttcttaattatgtctgagaaaagtactaaaataggtgccattttaaattcccagacaaggaaaaaccaaggattagaaattaagtagcttgcccaaggccacacatcatggcagatacataactataagagagcattggcttggtcctccaaagctagcagtttggtgggagttacagaacattttaccagggtgaaaattcaaggttgaggtagagggagctacaaagattaaggcaccctggaagcacagaagagaagtttn

SEQ ID NO: 5715 - DNA, 408 bp, Homo sapiens
cggacgcgtgggcggacgcgtggggaaacatttgagaacctgcctctatcccagaatgtgctggagatttgacactcaaatcagtgtttagtcttctgcttggcaccatagcttaacctgcagtttcttcaaaatagcccaatgccttgtttcctattaccttagattgcaaaccagtctagggaagtctatgataaagtagcatttaattaaagtttaaaaaaaaaaaggttgggcgttgtggctcatgcctgcattcccaaaactttgggaggctgaggcggccggatgacttggttaggatttccttacaatgctgaccaacatggggaaaccctgtctgactaaaaattcattaattagctgaacatgaaggggtgtgcctgttttctcatttactcaagaggc

SEQ ID NO: 5716 - DNA, 498 bp, Homo sapiens
  misc_feature (1)...(498): n = A,T,C or G
tggggtgcnnnnaattgatcgcttggaggaccgtccggaatggccgggaagacccgcgccgacccacgcgtccgcgagtgagactctgtctgaaaaaacaatatttaaaattatttggagaaagaaaggaagcaaaaagctgtctgctaaggacagatggtataaggttaacagatgacaaagaggagcttggaactatctgatcgttattatgcctccatgttatctgtcaagatgaccttatgtaagtaaaaatggtgagttacaaaaacagaatgtacaatataatgccatttgatttacatatatattcaaatatatatatacacaaatatatatatatacaccccaatatatatatatatatatagagtgtgagaaggacataccctaaaatgtgagcagtttttatttttggggtaggattataatcttgccgtgcatatgtatttcccaaatattctacaattcacacatataactttaaaaataaaactg

SEQ ID NO: 5717 - DNA, 466 bp, Homo sapiens
gtccacgcgtgtgatcgtccgtgcgtctagcctttgcccacgcagctttcagtcatggcctccggtaacgcgcgcatcggaaagccagcccctgacttcaaggccacagcggtggttgatggcgccttcaaagaggtgaagctgtcggactacaaagggaagtacgtggtcctctttttctaccctctggacttcacttttgtgtgccccaccgagatcatcgcgttcagcaaccgtgcagaggacttccgcaagctgggctgtgaagtgctgggcgtctcggtggactctcagttcacccacctggcttggatcaacaccccccggaaagagggaggcttgggccccctgaacatccccctgcttgctgacgtgaccagacgcttgtctgaggattacggcgtgctgaaaacagatgagggcattgcctacaggggcctctttatcatcgatgggcagggtgtcg

SEQ ID NO: 5718 - DNA, 470 bp, Homo sapiens
  misc_feature (1)...(470): n = A,T,C or G
agctggaagatggcggcgtccgtggtctgtcgggccgctaccgccggggcacaagtgctattgcgcgcccgccgctcgccggccctgctgcggacgccagccttgcggagtacggcaaccttcgctcaggcgctccagttcgtgccggagacgcaggttagcctgctggacaacggcctgcgtgtggcctccgagcagtcctctcagcccacttgcacggtgggagtgtggattgatgttggcagccgttttgagactgagaagaataatggggcaggctactttttggagcatctggctttcaagggaacaaagaatcggcctggcagtgccctggagaaggaggtggagagcatggnggcccatcttaatgcctacagcacccgggagcacacagcttactacatcaaggcgctgtccaaggatctgccgaaagctgtggagctcctgggtgacattgtgcagaactg

SEQ ID NO: 5719 - DNA, 431 bp, Homo sapiens
cgttggtctgtctgtatctcgtgtcggatccgctgcccaaaccagggctatgaagcaggtagcaggtaccatgaagctggaattggctcagtatcgtgaggttgctgcttttgcccagttcggttctgacctcgatgctgccactcaacaacttttgagtcgtggcgtgcgtctaactgagttgctgaagcaaggacagtattctcccatggctattgaagaacaagtggctgttatctatgcggatgtaaggggatatcttgataaactggagcccagcaagattacaaagtttgagaatgctttcttgtctcatgtcgtcagccagcaccaagccttgttgggcactatcagggctgatggaaagatctcagaacaatcagatgctaagctgaaagagattgtaacaaatttcttggctggatttgaag

SEQ ID NO: 5720 - DNA, 386 bp, Homo sapiens
  misc_feature (1)...(386): n = A,T,C or G
cctggggtgtgccacgccttagttgtctacataaactgcgtcaccgtgtactgtagcttggcatgttccagcatgaacattacgttcgtgcgcggacctaagacgcccctgactacgctagagtacattaagcgctttggggaaccgagtgtacaatgtaacctactctgcgatgaaataggtgactacgctctctgtgtganaggggggacgaaagtgtccctggaagccccttcaaagtcaaggtcccttgaatcccaaaagtgcctccccagcctcagcccccacctccagccacacacacattacacacacacacacacacacacagatgtgccacacccagacacgcacagaagtcgacactacaaacacctgccttgggn

SEQ ID NO: 5721 - DNA, 432 bp, Homo sapiens
cccacgcgtacggccatgtgtatttgccaggctgattttctttcaggacacaagaggcggtattgtgttcctcagagcatgtggtcaaagaataacatctgatagtctacaggatgcgtagcttttcggtctgggcttaacttttttaaactcctctggaaatcaaaggtggcttgcgtgactaggaaatcttataccaaactccatgtagctatcacttagccattcatccctggtgaccaaatgagtccttacattacctaatggaatctcttccacagggatgatccttcacctgcctgaagcaacccaattagaaccctttctgataccgtcaacttaaagaattcagaagcattggcttttgttaggccttggtaattcttctgtaaataatgataaatgtactgaacttgtcaaggtatctctaat

SEQ ID NO: 5722 - DNA, 470 bp, Homo sapiens
  misc_feature (1)...(470): n = A,T,C or G
aaacatataatgtagtttaagaagtgtaatattaaagtancacctataaacctaccatccaacttaagaactagaactatactagtactgttgaatctaccagtgctctcttcccccattcattctcctgccttcccttcagagataactgctgctgagcattttgtatttcacatttatttaaaaaataattttaggccagccttggtggctcatacctgtaatcccagcactttgggaggccaaggtgggaaaactgcttgagctcaggagtttgggaccagcttgggcaatatagtgagatcacatctccacaaaaaattttaaaaattagctaggcatgtggtgtgcacctgtagttccagctacttgggaggttaaagtgggagattgttggagcctggatcaaggttgctgtgagccatgatggcatcactgcactccagtatgagtgacagagtgagaccctg

SEQ ID NO: 5723 - DNA, 419 bp, Homo sapiens
tcttctctccacatccctctctgtacttacagcccccaatggcccccaaaaagccagagcccaagaaggatgatgccaaggcagcccccaaggcagctccagctcccgcacctccccctgagcctgagcgccctaaggaggtcgagtttgatgcttccaagatcaagattgagttcacacctgagcagattgaagagttcaaggaagccttcatgctgttcgaccgcacacccaagtgtgagatgaagatcacctacgggcagtgtggggatgtcctgcgggcgctgggccagaaccccacacaggcagaagtgctccgtgtcctggggaagccaagacaggaagagctcaataccaagatgatggactttgaaactttcctgcctatgctccagcacatttccaagaacaaggacaca

SEQ ID NO: 5724 - DNA, 478 bp, Homo sapiens
  misc_feature (1)...(478): n = A,T,C or G
ngagctgcttncttctccgggaactttangcnngcatganctntngggtnganccacgcgtccgagtcaactctgttctcccttgctttttgctttttttccttttcctcctcacatgtcttaggcctgctagaggactcccgagatgttgctcaggccagccagtgatccctggggctaacgggcttgttgccctgggttttgggctgcagggctggcccagtggggtacgtgatgcattgggtgatcagtgcagctcctcaatcaaactggtcctgcgtgccctgaggtggcgggggttggagcagggaagtcattgggtttaggaaggatttctctaacactgagtaacatgaggatttagcagtagggttcttcacttgtcactatttctctatctgcacctcnngnncaaaaaagagaatgaaaaggaaggctacccggctatttgtgggggggccctctttaggccaacgag

SEQ ID NO: 5725 - DNA, 417 bp, Homo sapiens
  misc_feature (1)...(417): n = A,T,C or G
aaaatgtttttgagattcatccatgttgttttgtgtttcaaaagtttgttcctttagccattccatggaatgaatgtatcacattcttgtattgatagatatttgaatgtatattgatagatatttgaatacaagaatgtatccattcttgtattgatagatatttgaatgtttccagtttttcctattacgaataaaactgctatggacattcttgtatatatcattttctgcacatatgttttaatttctcttggataaatgcttaggaattactgagtcatagaataggtagttgtttagttctgtaagaatatgccagacgttttttcccaaagtgtttatactattgtacattccaaccattaatgtatgaaggtgagaaagctttcgctacttccaaagaggcctctctan

SEQ ID NO: 5726 - DNA, 447 bp, Homo sapiens
agtagccggtctttgggggtaggcggtagtggcggaagaggttcggcggctgatggcggatcaagatcggaagcctgcgtaactttctcccttgatccgggagtctttccactggattcacaatgacatcctttcaagaagtcccattgcagacttccaactttgcccatgtcatctttcaaaatgtggccaagagttaccttcctaatgcacacctggaatgtcattacaccttaactccatatattcatccacatccaaaagattgggttggtatattcaaggttggatggagtactgctcgtgattattacacgtttttatggtcccctatgcctgaacattatgtggaaggatcaacagtcaattgtgtactatcattccaaggatattaccttccaaatgatgatggagaattttatcagttctgttacgttacccataaag

SEQ ID NO: 5727 - DNA, 410 bp, Homo sapiens
aaaaactcaagaaaggcatctgtgaagctctagaagactccgatggaagacaggactctccagcaggggaactgccaaaaacggtccaacagccaacagaatctgagccagtcaccataaatatccaagacctactttcctgttctaattttgcagtgcaacacagatatctgtttgaagaagacaatcttttacggactacacaaaagctttcccattcaacaaaaccttcaggaagccctttggaagaaaaacacgatcaatgcaaatgtgaaaaccttataatgttccagaaccttgcaaacgaagaagtaagaaaattaacacagcgcttataagaaatgacacagagaatggaagccctggaaaatcgcctgagatacagatgaagattagaaatcgcgacacat

SEQ ID NO: 5728 - DNA, 443 bp, Homo sapiens
cctcggtccgctggccccagagatgattgacagcagggtgctggagaacctcaaacagcagctggaggaacaggaatacaagctgcagaaggagcagaatttgaacatgcaacttttcagtgagatccataatctgcagaataagttcagagatctctcacctcccagatacgattcattagttcagtcccaagccagggagctctcccttcaacggcagcagattaaggatggccatggcatctgtgtcatctcccgtcaacacatgaacaccatgattaaggcatttgaggagttgctgcaggccagtgatgtggattactgtgtggccgagggtttccaggaacagctgaatcaatgtgctgagctgctggagaaattggaaaagctatttctcaacggaaaatcagttggagtggaaatgaacacccagaatgaactgg

SEQ ID NO: 5729 - DNA, 395 bp, Homo sapiens
atttaccatctgacttctaggaatactactatatcgcttacacctcatatcctccctactatgcctagaaggaataatactatcgctggtcattatagctactatcataaccctcaacacccactacctcttagccaatattgggcctattgccatactagtctttgccgcctgcgaagcatcggtgggcctagccctactagtcaaaaaaaaaaaaaagatgggggggcggttaaaagaacccctccgaggggccgaaataaaccctgaaatgcaaggtattggctattcgcttatgggaagacggactatactatgactgggggactctggaaagaacctctattcggggggggggacaaaggggacaaaccgaccaccagacattggattgg

SEQ ID NO: 5730 - DNA, 517 bp, Homo sapiens
ataatttcttacagtatttaacctttttctatttaaattggtttgcctgtggcaaaataagaacagattactggtaccctaacctccaacctttttaaaggattagatggacattttcctttaagggacatttaatggggcagattcaaagtaccataaagaaaaagtggataggctgggcgtggtggcttacgcctgtaatcccaaagtgctgggattacagacatgagccatcatgcctggccaagatttcttaatttcaatttaggagatggtacaaaatttaaaaatctgtattttatcataatctatgaaagattcacacatcacagttggctggtttcatactgaagtgtgccttattgggagtggaaacttttcaagttgacttgttctcttccctgattctgattcaccagatttgccatgggacttaaacatgtgcattcttcatgtgattcagatacactttctttcgtttccacgcccaacttttgcgcttgttttggatggaaag

SEQ ID NO: 5731 - DNA, 410 bp, Homo sapiens
cggacgcgtgggcggacgcgtggggtaatttaaggaaagaacagaaagcacaaaggtttttcttttctttattaatggcctactagaaatgagcagtgcaagagtctacctgtactattctaatacagtaagatattggacacaaaatggaggtaactttttaaaatagattggcttggaagttgaaatgtagattaatggatataacccaatagaaagggattttcaaataaaaccaaagcctatttttttatttactttctaattttgaacagatgactcagtcctaaatctttgcctttatttcctataaaatgtaggtgatacttgtaactcgacttcctggagttaattcttcagcaagaggtgaccctgggagcgtactttaaaataattgctgtacagccatt

SEQ ID NO: 5732 - DNA, 490 bp, Homo sapiens
cccacgcgtccgatgaatgtggtcaaactttctgtcaaaacattcaccttattcagtttgcaagaactcacacaggtgataaatcctacaaatgccctgataatgacaactctcttactcatggttcatctcttggtatatcaaagggcatacatagagagaaaccctatgaatgtaaggaatgtggaaaattcttcagctggcgctctaatcttactaggcatcagcttattcatactggagaaaaaccctatgagtgtaaagaatgtggaaagtctttcagccggagttctcacctcattggacatcaaaagacccatactggtgaggaaccctatgaatgtaaagaatgtggaaaatccttcagctggttctctcaccttgttactcatcagagaactcatacaggagacaaactgtacacatgtaatcagtgtgggaaatcttttgtcatagctctaggcttattagacaccagaggacacatact

SEQ ID NO: 5733 - DNA, 474 bp, Homo sapiens
cctttgtcagtatgcatctcccagcttagtgtcaggatactttcgattcataattatgtatgatccaaagtgtgcataatttcatttaacgttaaagaaatagatccaattcctttcttgcaaccaaaaataaataaaatacgttgcctcagtataaggtttgggctattctgtgtttctatagaagcaatctgtttttggtaaaatgtacttttaaggatccagtcatctgaagtattttatgtagagttagagatttcacaatattgactatacatatatttaaaatataaattatccagctgatgtttgaatttgtcttactttcctggcccacctgttgtcctattttataagctggggagttaactagcttaacaaaagatgcttagcttttgtaaagaacaactgtttcattttacaaagacactccaaatgataagtacctgattttctcgagactttaactatggg

SEQ ID NO: 5734 - DNA, 410 bp, Homo sapiens
gcgatggtctgctatacagctcagactctcgtccgaattctctcacatggtggctttaggaagatccttggccaggagggtgatgccagctatcttgcttctgaaatatctacctgggatggagtgatagtaacaccttcagaaaaggcttatgagaagccaccagagaagaaggaaggagaggaagaagaggagaatacagaagaaccacctcaaggagaggaagaagaaagcatggaaactcaggagtgacattcccttcactccttttcctacccaagggggaagactggagcctaagctgcctgctactgggctttacatggtgacagacatttccgtgggatagggaagatagcaggaagaaaagtaaactccatagaagtgtcattccactgggttttgatatt

SEQ ID NO: 5735 - DNA, 464 bp, Homo sapiens
cttccagctatggagacacactacttggcctcagtgattctgtagtggaagagctagatagtgcccctggaagtgtcaaacagaatggtcctaaaacaccagtacattcttctggggatatggtacaacccttgtcaccatctcaggggcagagcactcacgtgcatgatgcccaatgtgagaacacaccagagaaagaattgcctgtaagtcctggtcatcggaaaaccccattcacaaaagacaaacattcaagccgcttggaggctcatctcacaagagatgaacttatggcaaaagctctccatatcccattccctgtagaaaaaatcattaacctccctgttgttgacttcaacgaaatgatgtccaaagagcagttcaatgaagctcaacttgcattaattcgggatatacgtaggaggggtaagagtacagtggctgctcagaaatgcaaaacaaga

SEQ ID NO: 5736 - DNA, 459 bp, Homo sapiens
attttggaggcagaagctctggcccctatggcgggggaggccaatactttgcaaaaccacgaaaccaaggtggctatggcggttccagcagcagcagtagctatggcagtggcagaagattttaattaagaaacaaagcttagcaggagaggagagccagagaagtgacagggaagctacaggttacaacagatttgtgaactcagccaagcacagtggtggcagggcctagctgctacaaagaagacatgttttagacaaatactcatgtgtatgggcaaaaaactcgaggactgtatttgtgactaattgtataacaggttattttagtttctgttctgtggaaagtgtaaagcattccaacaaagggttttaatgtagatttttttttttgcaccccatgctgttgattgctaaatgtaacagcctgatcgtgacgctgaataaatgtcttttttt

SEQ ID NO: 5737 - DNA, 491 bp, Homo sapiens
  misc_feature (1)...(491): n = A,T,C or G
tggagccggggaagtttaaantttgatacccctgtagaactagaccgccatcccggatcgacccacgcgtccgcggacgcgtgggcggacgcgtgggcagcccggaggagactgacggtccctgggaccctgaaggtcacccgggcggccccctcactgaccctccaaacgcccctgtcctcgccctgcctcctgccattcccggcctgagtctcagcatggcggatgggagcagcgatgcggctagggaacctcgccctgcaccagccccaatcagacgccgctcctccaactaccgcgcttatgccacggagccgcacgccaagaaaaaatctaagatctccgcctcgagaaaattgcagctgaagactctgctgctgcagattgcaaagcaagagctggagcgagaggcggaggagcggcgcggagagaangggcgcgctctgagcacccgctgccagccgctggagttggcccggctgggcttcgcg

SEQ ID NO: 5738 - DNA, 387 bp, Homo sapiens
cggacgcgtgggcaactattgggaggaataaggaaaagtacttgtattagggttcttcagagaaacagaccgataagatataaaaatagatacacgagaggggatttactatgggaattggctcatgtgattttggaggctgagaagtcccatgataggctgtctgtaggctgaagaaccagggaagccagtagcatggctcagtccaagtctaaaggcctcagacccaggcaagccaatgatgtagttctcagcccaaggccaaaggcctgagaaactggggggaagggtggtctctggcgcaaatcccagaatccaaaagccagagaacctggagttcttgatgtccaagggcaagaggagaaaactgtcccagctccaggagag

SEQ ID NO: 5739 - DNA, 429 bp, Homo sapiens
cccacgcgtccggacaactctatacctcaggtcaaagacatcatatttgcaataaagaaaacattaaatatttagtttggacttgaatatcaagtcgttgaaatttatttgaaatacttgctggcactgcacctggatttgtactgcaagacctgactattcataaaggaaaacgatttctaaagcaacagcaggtatttttgtacagggaagtttaaatgtgtttgtgtatggaaaactctccactctcctcccctagatgccatgcttccttttgtctgttacggttgccatgttctttgaataacaaattatatcacattttatcctctctcaccacaaggacaaagtatggatgtggcagagtcctgatgaaagatgtatccaaacaagataacttatatgtataaaattaaagcatataatata

SEQ ID NO: 5740 - DNA, 418 bp, Homo sapiens
gccaagatccagtgtggaattgtgaataaataattgcatcgaatggatgaaaagcaacaccaaccatttgtaccttaaacacatgcctggtgtgagtaaatcaagtattacattccactttaagttctttcccccaacttactgcagaaaatgaaataaaaacagaaacacaatagtggaacacatgccaaactaacaatggaaaggaggagggtaagtgcaaatatatacctgttggtgtgaaggtaaaagacgggactgaaaaatcaaaacaaaatataaaccagttattaagctgaagagagaaagggaacatatcacattagtataaatcaagcagacagctgaacataaaacaaatgtaaataactaagccagtagttctgacaatctgatctatgaataaaaccaattctgg

SEQ ID NO: 5741 - DNA, 417 bp, Homo sapiens
cgccgatccggctgcaccgcgctcgctccgagtttcaggctcgtgctaagctagcgccgtcgtcgtctcccttcagtcgccatcatgattatctaccgggacctcatcagccacgatgagatgttctccgacatctacaagatccgggagatcgcggacgggttgtgcctggaggtggaggggaagatggtcagtaggacagaaggtaacattgatgactcgctcattggtggaaatgcctccgctgaaggccccgagggcgaaggtaccgaaagcacagtaatcactggtgtcgatattgtcatgaaccatcacctgcaggaaacaagtttcacaaaagaagcctacaagaagtacatcaaagattacatgaaatcaatcaaagggaaacttgaagaacagagaccagaaagagta

SEQ ID NO: 5742 - DNA, 407 bp, Homo sapiens
  misc_feature (1)...(407): n = A,T,C or G
cggacgcgtgggttctatttccccctctattgatccccacctccaaatatctcatcaacaaccgactaatcaccaccctagcaatatcaaccattaaccttccctctacacttatcatcttcacaattctaattctactgactatcctagaaatcgctgtcgccttaatccaagcctacgttttcacacttctagtaagcctctacctgcacgacaacgcataagaaaaaaaaaaaaaaaaaaaaaaaaaaagaaaaaaaaaaaaaaaaaaaaaatgaagaaaatntggggggggccctttaaaaagaacccggggggggccacaaaataagcggggaagaaaaaaattttttttttctttaaagggggccaaaaaaaacccccccggcggactcctgaaaaaaccc

SEQ ID NO: 5743 - DNA, 400 bp, Homo sapiens
  misc_feature (1)...(400): n = A,T,C or G
tggttggaggaggtagatcaccctttctgcgggggacgatttcgtcggtggtaggctgctaccatgaggttgaatcagaacaccttgctgcttgagagttttgggnnccnccgaccctacacctcggagcatgcccccacgtaccaccagtggatgaaagcagatgagcttctgcgttggacaacctccgagccgctgaccctggagcacgagtatgccatgcagcgcacctggctggaagatgcatacgagtgtaccttcattgtgctggatgccgagaagcggcacgcccagccaggcgccaccgaagagagctgcatggtgggagatgtgaacctcttcctcacagatctagaagaccttaccttgggggagatcgaggtcttgattgcagaacccc

SEQ ID NO: 5744 - DNA, 414 bp, Homo sapiens
cttaagtcctggtgataggctgtatgttgcagggtctggctgaatgttatagatttcagtatgtttgtgaaagctggggtttattctatggccaggctgtgatgaggaatggtacgcaggcttcagagagggtgatttataggttaagtccttgcataataaatgatcggggtgtgtatgtgataggctgtcacaggtttaggggttataacacagttttggtgtgtgtattgaggtcaggatgcgtgtcatacgtcccagtgtgtatgacttagactgtgtgtgtgtgtatatatccaggatttgggtatatttaggatttgagatatatcacaggttgatggccagacgcggtggctcacatctgtaatactagcactttgggaggccaaggtgggtggatcacctgaggtc

SEQ ID NO: 5745 - DNA, 415 bp, Homo sapiens
  misc_feature (1)...(415): n = A,T,C or G
ttattacattttattaagctttttggaatctttgtaccaaaattttaaaaaagggagtttttgatagttgtgtgtatgtgtgtgtggggtggggggatggtaagagaaaagagagaaacactgaaaagaaggaaagatggttaaacattttcccactcattctgaattaattaatttggagcacaaaattcaaagcatggacatttagaagaaagatgtttggcgtagcatagttaaatctcaaataggctattaaaaaagtctacaacatagcagatctgttttgtggtttggaatattaaaaaacttcatgtaattttattttaaaatttcatagctgtacttcttgaatataaaaaatcatgccagtatttttaaaggcattagagtcaactacacaaagcaggcttgcccn

SEQ ID NO: 5746 - DNA, 478 bp, Homo sapiens
  misc_feature (1)...(478): n = A,T,C or G
tgcgnagggncccctgaaaccctcctgatagcctgcggaaccgcgccgaaacacgcgtgcggagtcttcactcgggggcgccggctcacccctctatacacagcctgtagcgtggagctcacacctcccgcagtggcacggggtgtgcgtccccttcaatctgcaggatgctggcactttgggacacctccccagctctcacagggccacctcccactgctccctgcccacaccccaccatgccctgctctgatgtggccgcatggcacccaccatccatgggcccaaagtgacgcacaccgccccacccccatgactcgaaagaaagggcagagcttcctccagcctcagacgcccaggtgggtgccgggtgctgtgtggctgctgggccatgtggtggtcaccagagggtgtggggacgctgggatcccaggccgaaaccagctcatccggaggaagaggcctcaggaaatgcccn

SEQ ID NO: 5747 - DNA, 403 bp, Homo sapiens
cccacgcgtccggtctcactctgtcgcccaggctggagtgcagtggcacagtctcggctcactgcaagctccgcctcctgggttcacaccattctcctgcctcagcctcccgagtagctgggactgcaggtgcccaccactacgcccggctactttttgtatttttagtaaagacgggggtttcaccatattggccaggctggtcttgaactcctgactttgtgatctgcccacctctgccttccaaagtactgggattacaggcgtgggccgctgcacttggcccaaactgccttttttcattgtgttggtgaatgcgtgcagagatggaggtctgctttccaatcttacaggaatttgcttttcggtgaaaaggaaggaattgatgaacacaaacagcctt

SEQ ID NO: 5748 - DNA, 438 bp, Homo sapiens
  misc_feature (1)...(438): n = A,T,C or G
gccgcattgnntgagcattttctgtttgtgtggggccctctttcgagctcgactggtccatcctggggtagcggaggtggtgtttgtgaaaaaggacgatgccatcaccgcatataagaagtacaacaaccggtgtctggacgggcagccgatgaagtgcaaccttcacatgaatgggaatgttatcacctcaaaccagcccatcctgctgcggctgagtgacagcccatcaatgaaaaaggagagcgagctgcctcgcagggagaactttgccttcttctccaacccccctgccgaagtggaccctgacaccatcctgaaggcactcttcaagtcctcaggggcctctgtgaccacgcagcccacagaatttataatcatgctttgagcaagggagtgaggcatccagaaatggtggcagaggagggtggttttgtt

SEQ ID NO: 5749 - DNA, 417 bp, Homo sapiens
  misc_feature (1)...(417): n = A,T,C or G
cccacgcgtncggaaaaaagaaccacaagcaaaacagttgccagtgaaataggatagggagctctttaaacaaggctggctgcagctggcctccgccgctcatctgcagggcgtgagcgcttggtccatgcagtgaagctcttccaacctgggtcaacgaaaacggagaagaaatggcccaagaaatagatctgagtgctctcaaggagttagaacgcgaggccattctccaggtcctgtaccgagaccaggcggttcaaaacacagaggaggagaggacacgggctgcaggaaactgaaaacacacctgcagcatctccggtggaaaggagcgaagaacacggactgggagcacaaagagaagtgctgtgcgcgctgccagcaggtgctggggttcctgctgcaccggggcgccgt

SEQ ID NO: 5750 - DNA, 404 bp, Homo sapiens
  misc_feature (1)...(404): n = A,T,C or G
cccacgcgtccgtgactgcagaatcatatggtaagactatgtttaacttcagtaagagactgccaaaatgtcttccaattttgcattccaaccacaatgaataagagctcctgttgattcacaatcttgccagcagttggtatggccagttttttgaattttagccattttaatgggtgtgtagtagtatctcactgttatttaatttgcaattccctacagacaaacgtgttaagcattttttttgcatgttcatttgccatctgtgtgttttctttgacaaagtgtctgttcaaatcatttgctcatattttaattgggttgtctgttttcttattgagttcagatatttttaatgaaggaattacgctttctgttaaaattcacataatttgctagacaan

SEQ ID NO: 5751 - DNA, 483 bp, Homo sapiens
  misc_feature (1)...(483): n = A,T,C or G
agcgnaaggggnncatagatnccttcatagaagccntgagtacccgcgtcgacccacgcgtccgaaagaaaggaaattctaaaattacaaagaaactctaaacaaatatatccaggaaaagtcaaaaataacacagagaagacaggaatagatagctaatacttcaatgcaaaggcatagacatatacttgcaagaagcaaaagcaaacagagaatcatgacctttccaaatgggcaaagcaagaaaccagtgatggagattaataagatggagatatgtgagctctctaagcaaaatgtaaacttagcagtttttaggaaactcagtgatcttccagataacacagaaaaccaattcagaaatttatcagagaaatttaacaaagagactgaaataattgaaaaataaaatagaaatcttggaactgataaatacatttactgaactgaaaaagaattattacaagctctcaacagccaaag

SEQ ID NO: 5752 - DNA, 468 bp, Homo sapiens
  misc_feature (1)...(468): n = A,T,C or G
agcggagnnnacctgggccctcgaaccctcgaaccccgcgaatcccggnagaagacgcgtgcgcatgaaacagaataaaggagtttacttattacttggaaaaatttgcaagtgactatgactttctttgcaggaacatgttccctccaaatctggaagaagcctgctttaaactgtttaaaaccaactatgacaagagaagctttaaagtgcccatccaggccaacgaaacgcttgggggggctgtgataaacaatgggtctgaggccatggtgactcttacccgaatcacagaggagctggtaccagttccaggatttgtgaatggagacaatgccctgggtctaattgtcttctccatgtgcttcggatatgtgattggaaacatgaaggaacaggggcctggcctgtgagagttctttgattctcttaacgaagccatcatgagactggctgcacacataatgg

SEQ ID NO: 5753 - DNA, 420 bp, Homo sapiens
  misc_feature (1)...(420): n = A,T,C or G
aaaccttacgatcagccttgagcgagctgattgttgccgtgcatgaaagggaataagagcgggcacctaggtgatgggaaccttgggtgagaggctgagggcggaggagctctgtgggatgtcagaagcaatgaagagctactcctgcaccaggaaagcagcaagaggagccctgcctctgggtgcctctgccccacaggaagtatgtctgccatgcgtttcctcaccgccaggaacttggagcatgcagagatgctggagaaagcgtcccgggagctgaggatgcgcgtctggtcaagggtgagtgtggggctatgggaatcctctgggaggaccttggatgactgtgtgaccttgcccaggcacgttttctaggttatgatactgcccccgcccgggggatctacttgtgctccatcn

SEQ ID NO: 5754 - DNA, 453 bp, Homo sapiens
gtgagagcccccctgatgcctcggttgactccgttttcccgggccgacccacgcgtccgcggacgcgtgggctatgagctgcctgaaaaaggtttcaaaataattgccttaaaggagttcagtgagctataagacaacacagatatacaaatagaataaatcaggaaaacaatacatgaacaaaatgagaagttaaacaaaataaaggaaatgatataaaataactgagcagaaattctggagctaaataatacaatgattgaactgaacaattcaatagagtgcttcaaaagcagattcaaacagaagaaagaatctgcaagcttgatgatatgtcatttgaaattacccagtcagaggcatggaacttatgagacatcatcaaatgaattcattattaaattcccaggagaagagaaagataaaaaagcagaaagcttatttagtaaaata

SEQ ID NO: 5755 - DNA, 385 bp, Homo sapiens
aaaaatcatgatttttgcatgttctcacttgtaagtgggagcttagctatgggtatgcaaggcatacagagtggtataatggacattggagactcacaagtggggagagtgggagggagatgagggatgaaaaactacctattagagtaaaatgtacaatacagggtgaggggtacattaaaatcccagacttcaccgctatataattcatccatataaccaaaaaccacttgtatgcctaaagccattggtgaaaaaaaaaaaaaaaaaatgcaataaaaaaaacaatgaggggggggccttttttaaaatcctttgggggggacaatttttcccgctttgtagcagtattatctttttctctttagagggggcctttttaagg

SEQ ID NO: 5756 - DNA, 383 bp, Homo sapiens
  misc_feature (1)...(383): n = A,T,C or G
agccgacccgccccgccgacgaaccccctgaagctgtgccaagatgtgtgacgacgaggagaccaccgccctggtgtgcgacaacggctctgggctggtgaaggccggctttgcgggcgatgacgcgccccgcgctgtcttcccgtccatcgtgggccgcccgcggcaccagggagttatggtgggtatgggtcagaaggactcctacgtaggtgatgaagcccagagcaagagaggcatcctgaccctgaagtatcccatcgagcatggtatcatcaccaactgggacgacatggagaagatctggcaccacaccttctacaatgagctccgtgtggctcccgaggagcaccccaccctgctcacagaggccccgctgaacn

SEQ ID NO: 5757 - DNA, 427 bp, Homo sapiens
  misc_feature (1)...(427): n = A,T,C or G
tgaatcttggcttggaacaccatttttgggctcttgcttctgaatgaatcagattggaattttttctgaagagcattataaagtaaaggagatgttaaaataagttcttgaagtatgatttatatttatctaaaacactgattttaaaagtttacattcaaatgtgtattcaaaagaagtactgatttgtaattattatagtttgtgtgtatcatcccttttaaccgagcctaacaactggacttaaattttggtttctatgggaacaaatgtttcccataagattttctagagccaaataatgggagtgaaaaattccttaagtgttatataagaaaatatattagaaaatcagctttggattatacgatttctaaaatatactaatacagaatcctcagtaatatgtnttgaattggattttttc

SEQ ID NO: 5758 - DNA, 385 bp, Homo sapiens
ctctaaaaataaatcccattcggggtttttttatggcagctccgggctccgttccgctatgcttgtatgtttgactcttggaaaaatgcagacgccaccaaatgctactgagaatttaatgcgctgctggaagagacgctagagagtgacatatccttggttcacaccgcctggcagcctgaaatttcccacacgaaggacctgattgtttgggaaaggaaaagtgctgacgagcaagaatgaattacagcacaactgctatatctctccacatcttggaggccaaggcggtctgctagaaagttttgtaaatatcagaaatgtggaaggcattaaatctgttactgctcagctgatcagaagtcttaaggtccacaaaaatatt

SEQ ID NO: 5759 - DNA, 537 bp, Homo sapiens
  misc_feature (1)...(537): n = A,T,C or G
tttgacgtatcactacgtgatatatgctacctgcgaatgaacgagcttctctgtcttctactattcccccaccagggaagcngnannnnnnnatagagacttgaggacctcggaaggaacnnccgggncgacccacgcgnccgagccgnngncccctggcaaaaagaggcccagggctgagccctgggcaagnggcncccgacatcgctaccccccctccctttattagttgccctttcccaacagaaaccatttccttctgccaccaaaactaggttgcatccaaaagtttttcacaagcttaaaaaagaaaaacgaaaaattgacaagtattacacagaagagcccacaaaagcttcagcaacaccaagggcgaagaagcagcgtcagatccaggtctgcaggacacaccaaagaactcctccaagtcacacaagggagaaaattaacttcattggcttctatcaggaaagctattttttttttcctcttctttcctggaaggttcccaaaccccatgactctgaattccaggcg

SEQ ID NO: 5760 - DNA, 470 bp, Homo sapiens
atgtaagctgatgccgtcgatcgcctcagtccgcgccgattacccgtccacccacccgtgcgcttgcggtccgtgatgaagaccgctctaaaccgtttgtgacactgcctgagccggctggtgttgccaaggtgacgaggcataaagccgcggtggatcgagtctcacttcatcaccatgctggagtgcagtggcactatctgagatcactgcaatctccacctctcggattcaagcgattctcgtgcctcagcctcccgagtagtagctgggagtacaggcatgtgccaccatgcccagctaatttttgtatttttggtacagacctggtttcgccttgttggccaggctggtctcgagcttctgacctcaagtgatccgcctgcctcggccttccaaagtgctgggattacaggcgtgaaccactgagcctgggcaggtattggctctttttaaagattgaagtgctt

SEQ ID NO: 5761 - DNA, 420 bp, Homo sapiens
tgtgtgtttgtgtgtgtgtgtgcctatgctacgatgtggatcaactttgaaaatattatgttaaatgaatgaagtcagacacaaaaggtaacatgttgcctgattccattaatatgaagtattcagaataggtaaaaccataggagacagaagcagattggtggttgccaggggctgggaaatggaggaacaagtagcaactgcctaacagatatggggtttccttttagagtgatgaaaatgttttggaaccaaacagaagtggtggttgtacaacactgtgaatatgtactaaatgcaactaaaatgttcacataaaaatggttaaatgattaattttatattatgtgaatttcaataaaaaaatcaaaatgccctgccccacaaaagaacccttgacaaaaaaccacataacgctaa

SEQ ID NO: 5762 - DNA, 426 bp, Homo sapiens
  misc_feature (1)...(426): n = A,T,C or G
ctggggttttagtaaagctccgttccnaacncnccgtgtgacctcgggccactcgctgcccctctctgggcctgttgctccatctgagcttgctcttcaatcctgatcttccgagtttgtcgcgtggggcgggtgggggagtggtgccctgcctacgatagagtcttcctttgggtgaggtatggtatgtgttggggctctgtcagttctcagcccctgtgatgatagcgcagtgtacagggctggagtcttggggagccctgtctactctgggactagaggccaggatgaagttacaggttataaaaggactaggttttttcccacccagcagttggtggataatggggagcacagaaggccagttgctgagcaggagcttgtcgtttggagatgggaggctcacggctgaaatttgggtgagtc

SEQ ID NO: 5763 - DNA, 408 bp, Homo sapiens
ccgcctgagaagatctacactcttttacagaccattatgaactatgcggtctcatgatagaatactataatcttcatatagtagatggggttgcagagaaaccacacatcggacctcttttgcctctattacaacatactcgctctgcgcgcctatggcagttcactgaacaatgtcggtagaaaactgcctcgaggttctacggagtactgaagaacaggagggttatattcatgttctcttgaggattggactgcgggctataacattcatggagacaacacaggatataaaattaagagcctagtccaacatacaacagaaaacaagtgactatattactccatgggcaacattgcaaaggattacatttaacatatttgctgaagtttccagaagatgaaacac

SEQ ID NO: 5764 - DNA, 397 bp, Homo sapiens
ctgcacatcaacaaggcgggcagcagccagggcgacactgagtcgccatcccacgagaagctggtggactccacctttaccccgagcagctactcgtccaccggctgcaacgccaacatcaacaacgccaacaacaccgccctgggtcgcctccctcgccccggcgggtaccccaccaggggaagcactgtggaggtcccccgagaagctgggggacttccccttcgccccgaggaggtactcttgcaccgggtcctacgcccacatcaacaacgccaacaacaccgcgctgggtgggctccctcgccccgccggctaccccagaacggtgagcactgtggagggggacggggcccccttgttccctgccatccgggggcaggaggaggcgtggaag

SEQ ID NO: 5765 - DNA, 409 bp, Homo sapiens
cccacgcgtacgattcggaagtaaattctcatttgatattaaatataaatatctgaatatacataattttaatatactagtcatgatgtgtgttgtattttaaaaattatctgcaaccttaattcagctgaagtactttatatttcaaaagaatgaataacattgataataaaatcgctactttaaggggtttgtccaaaataaatattgtggccttatatatcacactattgtagaaagtattatttaatttaaatggatgcaggttgtctactaaagaaagattatatataactatgctaattgttcataatcaacagaaaccaagatagagctacaaactcagctgtacagttcatacactaaactcttcttgcttttgcattataaggaattaagtctccgatta

SEQ ID NO: 5766 - DNA, 329 bp, Homo sapiens
  misc_feature (1)...(329): n = A,T,C or G
gaggaggggnnnnatggacgcctgnggttgaacgcctacggcaccgtcgacccacgcgtgcggtgggaaaccagcaagtcgagagaggatccagaagtaaccccttctaaaacgggaaagatgccttccgaaagcacttggccctaaagagaaaacactaggaggatgggaaccagggacagagaagctacttgctctgcagctgtttgggccagtatgttccctaatgttgatggccatcctgggcttattttcctgagagtctctaagtgactcactgcatcacgtataactaagaaaaaggatgtcctgaaaaaaaaaaaaaaagg

SEQ ID NO: 5767 - DNA, 543 bp, Homo sapiens
  misc_feature (1)...(543): n = A,T,C or G
tacgcctgatcctcacctctctattcaactgtgttatcgtactcaaaacgcttctctctctataaactctttccncccccaggagcagcagnnnnnnnnnatagatacctttgaggacntcggccggaactcccgggacgacccacgcggccgcggacgcgggggcggacgcgaggganaanactgttcaaataaaacgaggactgccttcaactctctacctggttaggatggcaatgacctaaacaaagggttagtaagcatagtgcacgatggagaacaggaggaattgaatttttattaaatttttattgctatattgatagtatttctaatatttttgatccacagctggttgaatctgcagatgtggaacccatgaatacagagggctgactgtattgtgtttattgctaacatattgcagaacttcagcctcatgcatttaactgaaaaaacatatgtaaattagtatcccctgccttggaattcttagttttcttgatagtatttttaattcaggccaatggaaacagacaggtg

SEQ ID NO: 5768 - DNA, 529 bp, Homo sapiens
  misc_feature (1)...(529): n = A,T,C or G
ggctgtccnnaattgaggccgattgtagcgcnatggagaacccgcgncgacccacgcgtccgcccacgcgtccgcggctgcagaagtaccgcctgcggagtaactgcaaagatgctgtccgtgcgcgttgctgcggccgtggaccgcgcccttcctcggcgggccggactggtctccagaaatgctttgggttcatctttcattgctgcaaggaacttccatgcctctaacactcatcttcaaaagactgggactgctgagatgtcctctattcttgaagagcgtattcttggagctgatacctctgttgatcttgaagaaactgggcgtgtcttaagtattggtgatggtattgcccgcgtacatgggctgaggaatgttcaagcagaagaaatggtagagttttcttcaggcttaaagggtatgtccttgaacttggaacctgacaatgttggtgttgtcgtgtttggaaatgataaactaattaaggaaggagatataatgaagaggacaggagccattgtggacg

SEQ ID NO: 5769 - DNA, 527 bp, Homo sapiens
  misc_feature (1)...(527): n = A,T,C or G
ttaagtgacatggagagctgcaataggtgaaaatacataaacatacatttaatagaaaagttaagtgacatggagagctgcaataggtgcctattatatgtttttgaaagtataatggagtgaattatatgaaacaacattataacttacagtctctgaaaattttccaagtgaaggaaatagataaaataatgaattatatgactgcaaatgtactcgaactataagcaagataaataaaaataagtacattaaaacatattatagtaaaaatgtagaaacaaaaaggtaaaaagaaaaatcctaaaagccatcacatagaaaaaaaaatactgttaggaggaaaacaaattgcaccagtatcaatagatgccacacgacaacacatannnnaaaaaaanaaaaaaaaaaaataaaaaaaannnnngggggggggcgcctttaaaaaaatcctggggggggccacctatatacgcgggaatggaagatataaanttttttccttataggagctcattaataagcca

SEQ ID NO: 5770 - DNA, 507 bp, Homo sapiens
  misc_feature (1)...(507): n = A,T,C or G
tggagggcgagctgagccctggccgccgccacaatgggccgcgagtttgggaatctgacgcggatgcggcatgtgatcagctacagcttgtcaccgttcgagcagcgcgcctatccgcacgtcttcactaaaggaatccccaatgttctgcgccgcattcgggagtctttctttcgcgtggtgccgcagtttgtagtgttttatcttatctacacatgggggactgaagagttcgagagatccaagaggaagaatccagctgcctatgaaaatgacaaatgagcaacgcattcggatgacggntccctgtctctgaaagacctttctctggaagaggagtctgcattgagtgtctcaaagacacaataaacttcctatggctgcaaaaaaaaaaaaaaaaaaaaaagggggggccgtttaagagatcctgggggccaaagtttcccgggttgcaaatattnttttttccttaaggggctgtataacccacttgggaatttgagaaga

SEQ ID NO: 5771 - DNA, 444 bp, Homo sapiens
agtcatagttacttttccttaagtgccacactggcataaaggcgttcgatgttccactatctttcctgcaggtgttcagcacatgatcggtggtttctagggtctgccatgggtcttactaattatttggaaccaaatataacagaaaacaagtttggaattctaaaaaatcccttaaaaacctttttaaaaaatcttggacacagcagctgtgaatggtctgggcctgcctgtgcagttattgctgaaattactggggctgttgagtatttggaaatcaaatcccagaagtgaattggctgtgccaatcagttgtaaaaggatctggccctgggaggtttgatgggtaggggcaaatggggacatgggaagagggtgggaggcttcatgactgcatgaactgagtagaaagatttggccttttgggacagagcatgcagcggg

SEQ ID NO: 5772 - DNA, 505 bp, Homo sapiens
  misc_feature (1)...(505): n = A,T,C or G
agtgctccaaaggatagcagagcatcgggccggaacnccngggnngacccacgcgtccgaacttttgtgacacaacagagactctataaagagcctatgcatattttacttcattttaggaaaagcttcaaagtgaggcgttggtcatacactgttcattatgccagatggcaccccagctgagtcagtaactcaattatttgtttggttatcattcttaggtgattgaaggaagtgaagccatttatatctaaatcccaccagtgttttcccctagcatattgtggggagaaattctaactgggaatcgaatcctgggcctaattccagcattttcaaattttactagggaattgattttgaatttacttttaaagaaagaaagccttgggactaaaagttttgggccaagtacacctttgcaagaaaatgccaattacaatctttccgtcatttgtagagtgaccaaacaaggtgagctgtgcagcacactgcacagcaggcg

SEQ ID NO: 5773 - DNA, 426 bp, Homo sapiens
  misc_feature (1)...(426): n = A,T,C or G
caagtgggtaaatgtgacactctaaaggagaaagtaaaactggtcaggcacagtggcccacacctgtaatcccagcactttgggaggccaaggtgggaggatcgctttagttcaggagtttaagaccagcatggtcaacatggcaaaacccatgtctctaccaaaaagaaacaaaaaaaaattgctggggcatgtacctgtggtctcagctacttggaaggctgaggtgggaggattgcttgagccgggaaggtagagtttgcagtgcgctgagaccatgctactatgctccagcctgggcaacaaaacgagaccctgtctcaaaaaaaaaaaaaaaaaatccaaaccttggngggtataaaactcccggtaccctttccctaaaaagggaaaggttaaatttaaaaaaggttagggaaaccttat

SEQ ID NO: 5774 - DNA, 455 bp, Homo sapiens
tggaattcttctcgggaggcagtgctgggttctttccaccatggcacctaagaaagcaaagaagagagccgggggcgccaactccaacgtgttctccatgttcgaacagacccaaatccaggaatttaaggaggccttcactatcatggaccagaacagggatggcttcattgacaagaacgatctgagagacacctttgctgcccttgggcgagtgaacgtgaaaaatgaagaaattgatgaaatgatcaaggaggctccgggtccaattaactttactgtgttcctcacaatgtttggggagaaacttaagggagcggaccctgaggaaaccattctcaacgcattcaaagtgtttgaccctgaaggcaaaggggtgctgaaagctgattacgttccggaaatgctgaccacgcagccgagaggttttccaggaggaggtggaccgatggtcc

SEQ ID NO: 5775 - DNA, 422 bp, Homo sapiens
  misc_feature (1)...(422): n = A,T,C or G
cggacgcgtgggcggacgcgtgggcggacgcgtgggcggacgcgtgggcggacgcgtgggcttgtcttgtgtattttctttcccttattcaagtaatatagaataactttccttaaaatgatttgatccaagatacgtcatttctgtattggcgaaatgccactattaaagtgtaattcttgaatttaggttgaattgatgactttttaaaacaaaacaaacactggacagttctacattgtattgcgtttgcgaatgtgcgtgaacacacgcacacgtgcaggagaatgtagtgccataagaacactggcgctttttaaaactttccaagctagctacttattttcattttcagggttgagtactctaagctctctacttactgtgagaagttttctacattgtaaaattaaaagattatn

SEQ ID NO: 5776 - DNA, 410 bp, Homo sapiens
caaagaaagaagtagggatgaaagagaacgatcaacttgcaagaagaagaagagtaaagataaggaaaaggaccgggaaagaaaatcagagagtgataaagatgtaaaacaggttacacgggattatgatgaagaggaacaggggtatgacagtgagaaagagaaaaaagaagagaagaaaccaatagaaacaggttcccctaaaacaaaggaatgttctgtggaaaagggaactggtgattcactaagagaatccaaagtgaatggggatgatcatcatgaagaagacatggatatgagtgactgaatattgcctctgagggagtccaactgtatacctgcatcagtgtcattcctttgtgtgatttcttaatgctgtatttgttcatctcaaacctagatgtatacag

SEQ ID NO: 5777 - DNA, 416 bp, Homo sapiens
cccacgcgtccgggttggagtggcaagggggaaggtaatttctcaagggtttaaaagaacacagtgaatgagttagaattggataatgatgatgaagaggaagaggaagtttggtcagcaacaaattattttaggcttcctcaattttttacataataaattttaggctatgagacatccaagtgaaaataccctaaagacagctgggattgtaggaatagatcatgaatgatacacagtaatgaagatttctatttgagattcagagaatcacagtattttattgcttgaaggaactttaaacgacatctggtacattctcctcaacttaaagattatgaaattgagtctcaagagcttaaataatatgcccaaggtcacaaagcaatttagtgtcagagttagaattacctccc

SEQ ID NO: 5778 - DNA, 443 bp, Homo sapiens
gtaacacactaccgaatgtgtctttagatagccctgtcctggtggtattttcaatagccactaaccttgcctggtacagtatgggggttgtaaattggcatggaaatttaaagcaggttcttgttggtgcacagcacaaattagctatatatggggatggtagttttttcatcttcagctgtctctgatgcagcttatacgaaataattgttgttctgttaactgaataccactctgtaaatgcaaaaaaaaaaaaaaagccatattgttttgtcgactttttaaattcttaaaaaaaaacacacttcatttaataaatatagcggccgttcagatagcactgaatctattttattgggggggatacctttttttatgttctgccactatgaaatcacaagaataaaactgggtttttcctttgtatttggaggaaaaaaaag

SEQ ID NO: 5779 - DNA, 392 bp, Homo sapiens
ttgcataactaaaaactgggctccccaatgcagggtgcccagtgtctctgtcagctaatattgtactacccgctggacacctgaaagttgtcattttcagggaaaccaataaaaacaggtgtgaagtcatgtttagtcattttgaagtcaggtgtctatgtttgagggttgaattctagaggcctccagaaataaaaggggtacagcctagctccgaaatgagttggttacagaggtgtccagatataatgatggtgaatataccttgtaatttagaatctaaggaagggttatttggaagtgggtaattagtctcaactaacattggtgccacttctccttacagtctgaggaaactgtggagggagaaggtgctcccagatgacagagcc

SEQ ID NO: 5780 - DNA, 445 bp, Homo sapiens
aaataaagatatatgtccaaggctagtcattatagcccactgtgtaaatagcaaaagcctggaaataactcagacaatgtccatctacagaacattggcaataaaccaaggtatatctacattggagtgctatgcagctgtgaatagaaatgagtatctctatactgctatggagtgaactccatgatgttttgctaagaggaaaaaaaaagtggaaaactgtatatataatatagaatctttgggctgggattacaggcgtgagccaccgcgcccagccaaattaaattttttatagagatgaggtcatgctgttatgttgcccaggttggcctcatgagatcttgccttagcctcccaaagtgctgggattacagatgtgagacactgcacccaaaccccaccacttttttttttcctttttctttttttgagacctccactc

SEQ ID NO: 5781 - DNA, 399 bp, Homo sapiens
aggaggttgaaaatcctgaagaagagaaaaaatatgagggaggctaaggaaacttagccactttctgatcactgatgactccttaggctgcacctgagtgatggtggtgtttttggaggctgtacctgagtgatggtggtttttggggggctgcacctgagcgatagtgatttttttttggaggctgcacagctggtcagaccatctctagatgttctttccacaggggttcatagggcgtcattcccccttcctggattattttgactatgggtagcttattttcaagagctctttgcctttttaatcctgttccagatcacttatccaaaatctttccaaatcaattatattttgctgcttttctttaattccctaaaagccatagcttctagattt

SEQ ID NO: 5782 - DNA, 414 bp, Homo sapiens
  misc_feature (1)...(414): n = A,T,C or G
cgcttgtagaactcactctgggctgtaatgtggcactggtaggttgggacaccagggaagaagatcaacgcctcactgaaacatggctgtgtttgcagcctgctctagtgggacagcccagagcctggctgcccatcatgtggccccacccaatcaagggaaagaaggaggaatgctggactggaggcccctggagccagatggcaagagggtgacagcttcctttcctgtgtgtactctgtccagttcctttagaaaaaatggatgcccagaggactcccaaccctggcttggggtcaagaaacagccagcaagagttaggggccttagggcactgngctgttgttccattgaagccgactctggccctggcccttacttgcttctctagctctctaggccctctccagttgg

SEQ ID NO: 5783 - DNA, 485 bp, Homo sapiens
  misc_feature (1)...(485): n = A,T,C or G
nggagatgccngccttnccccnnaaacgtttanaccgnancnnncnntnnnnntngggnngacccacccgtncgaatttattgaagaacaaaaatttggcgatgcttaatgttaatgaagagtaactaaaaggagtaaatatgtggataaacacaagtgaatattgactataaaacaataatactaaagtcttatggattcttaagtatttagaaaattgtaacacatgagaacataaattagagtatgggtaaatgaggctaaagtgtattctaacttttgcattgagttggtgttggtaaaaatagtaatttatgttagacttgaatttcagggatgtattatatttcataagctagggtaagcactaatacaatggtaaaagaatgtgtatctgaccagctagtactggggagaaagggaaaaataaataatactgaatccatccaaaagaatagaaaggggcccctctttagaccgccccc

SEQ ID NO: 5784 - DNA, 435 bp, Homo sapiens
tgattctcctgtctcagcttcctgagcggctaggattacaggcgcccaccaccacacccggctatttctggatttttagcagagatggggtttcaccatgttgtccaggctggtctctaattcctgaccccaagtcatccacctgcctcagcctcccaaacttctgggatcacaggcatgagccaccgtgcctggccctgatctgggatttaaaggggcagttgctgagcaaatagaagccagggcaagaaaggatttatgtgcttgggattcttgagggcgcttccagagtcagtccccacttctgatgtttttatacgcaacactaggggtccttctgaagttatcccggcccctgggaaactcacgtggcatggggcccacttctgccctggtctctttcatcccatcctgtccggccccagagcctgtaca

SEQ ID NO: 5785 - DNA, 441 bp, Homo sapiens
taaaattttcaagaaaggaaacagtaggtcacatacacatgatcaagaataaaacggcagtcaatactcagtactagcaaggaaaaatacaaatgttttctgacatttaaggtttaagaaatcttgacccatgcacattttctcaagaagtcttctaaaggatgagcttcacctaatgcaagaaagacaaaacaatatccagaaaataaggaatcaacacaggaggaagatgaaagaaattccctggacaataatgaaaataagtcttaatatgataaccgtacacaggtttataaaacaagcaacacagatacaagagtccagagacatatggaggaagagctccattaaaaaaaaattcaactaattggattaggtggtacagctgctaatataggtagttatacattgagatactgtatgtcttgtgcttgagaacat

SEQ ID NO: 5786 - DNA, 435 bp, Homo sapiens
  misc_feature (1)...(435): n = A,T,C or G
cccacgcgtccgcccacgcgtgcggactgatataattttattagcataattcttcaaattttggtaacagcactgctagaaaaacaacagcttccattttcccatggtttggttcccagggtttttggacatgggaaatttctgttagtgtttctttctgtagccctcatgttcatatgttccttttttacatttactatatctgatggcattcctgccatacccatagtgccagggtcatgtgtctccaagcattccatatttgttgaaaatatgcagaagattgaaacttgccctttggtagtggctctttatataggtacacgtctcctacttgntgcctgtagtacattataggataatcaccaaagtacatttcttttgaatcagcataaattgttctatttagcaaacatctgactattaagatggcgt

SEQ ID NO: 5787 - DNA, 431 bp, Homo sapiens
  misc_feature (1)...(431): n = A,T,C or G
tgaaaggtggaaaacaggagaaagtgaagcaaacagctgcaaaagtaaaagaagtacagaaaacaccatcaaaacccaaagaaaaggaggacaaagagaaagcagctgtgtcaaagcatgaacagaaaggtaaacattcagagcaggaggctgccggaggttctaagagaatattgggcaagaagcacatgcagtgaaattaaaagttgaaaaagaccaaaatcagacttcaaatgggggtaaaagacattaaagtaaatatatcagaaaagaaaaagtaagagaaaaagaaaaacctgaaaagaaagcaactcacaaggaaaaaattgagaaaaaagaaaaaccagaaacaaagacagtggcgaaagaacaaatagatgagcctcccttgagaaaaaaaagaaatacacaaagataagactgaaaaacan

SEQ ID NO: 5788 - DNA, 440 bp, Homo sapiens
tgcggtttcaatatgcttacttgagagtcaggcgggtcctgggcccaggaaccggcccggagccgcggacgcgctacagctgagaaggggacccaaggggtcggccgcgggcaaggcccctaagaccgccgccccagctcacgctgccgacggcagctatagacattctgcgtgaggtccgggctcctggacttcgcctttcccgagccctggaggtggggagaaaaggttcaccaattcttaaaatccaaatatatctcatggtacagtggaagaactggccagagagtctggaagattgggttctggtcctggctggggccatggtcactgtgaccttgggatcttgtgctgtgaagacatttcccaagtgcttcatgttagccagcaaatctgacccacaaggcctggaaagaggtgattgttaggttgcgcagagg

SEQ ID NO: 5789 - DNA, 403 bp, Homo sapiens
  misc_feature (1)...(403): n = A,T,C or G
cggacgcgtggggtttgtaaatgtgtgtgtgagtgtgtgtgtgtgcgtgtgtgtgcaggtgtgtactggtttattctccctcaaatttttatctccaaagcacttggaattaaaatacattatctgtattattttaaacccatgagaaacaatgttcttatttcagcttcatttcttaattatggataaaatattctgtaaagttagccagtgtccactccttcattcaataagctaaaacgattgttaaaataaaaacagaaaatttgacttctccaactgtatttgattacccaaaggcttgggatcaaaatatcaaaatcacaagtaaaatctcacattaaacttggttaaaaaattattttcctacagtattttgcataagagcatagaaaaagaatan

SEQ ID NO: 5790 - DNA, 404 bp, Homo sapiens
tctatcaagaaggatgaagaggtgctgtagaagaactgcccgcatatcgtcgtggggactccaggccgtatcctagccctggctcgaaataagagcctcaacctcaaacacattaaacactttattttggatgaatgtgataagatgcttgaacagctcgacatgcgtcgggatgtccaggaaatttttcgcatgaccccccacgagaagcaggtcatgatgttcagtgctaccttgagcaaagagatccgtccagtctgccgcaagttcatgcaagatccaatggagatcttcgtggatgatgagacgaagttgacgctgcatgggttgcagcagtactacgtgaaactgaaggacaacgagaagaaccggaagctctttgaccttctggatgtccttgagtt

SEQ ID NO: 5791 - DNA, 393 bp, Homo sapiens
cctggtgaaaccctgtctctactaaaaatacaacaattagccgggcgcggtggtgggcgcctgtcatcccagctactcaggaggctgaggcatgagaatcacttgaacccaggaggcggaggctgcagtgaacagagattgctccactgcactccagcctgggcaacagagcaatattccatctgaaaaaaaaaaaaatacaaaaccacagtcttaggtaagggctttaaagttgggggaggggcattgggagcataggggaaggagccctaattttatatgggaaggaaaggaaggtttcacataccgggtagcaatggtattataaaaattgactaaaagtttcagacagagaaaatatagcagagaaaatagccccggtatggaggggtg

SEQ ID NO: 5792 - DNA, 460 bp, Homo sapiens
  misc_feature (1)...(460): n = A,T,C or G
gaaaaatttgtaacctgcagtagagcaccgttattcccggcncgacccacgcgtccggaaagatcaagctggacttgagccactggccctctggctcagcagggagctgcaggagaaggagaaagtgattgaagtcctgcaggccaagctggatgctcagtccctcacaccctccagcagccatgccttgtctgactcccaccgctctcccagcagcacctctttcctgtctgatgaactggaagcctgctctgacatggacatagtcagcgagtacacacactatgaagagaagaaagcttctcccagtcactcagattccatccatcattcgagtcattctgctgtgttgtcttctaaaccatcatcaaccagtgcatctcagggggctaaggccgaatccaacagcaaccccatcagcttgccaactccccagaatacccccaaggaggccaaccag

SEQ ID NO: 5793 - DNA, 461 bp, Homo sapiens
cactgagctcagttacacttgaattttacagtacagaagcactgggattttatgtgcctttttgtacctttttcagattggaattagttttctgtttaaggctttaatggtactgatttctgaaacgataagtaaaagacaaaatattttgtggtgggagcagtaagttaaaccatgatatgcttcaacacgcttttgttacattgcatttgcttttattaaaatacaaaattaaacaaacaaaaaaactcatggagcgattttattatcttgggggatgagaccatgagattggaaaatgtacattacttctagttttagactttagtttgttttttttttttttcactaaaaccttaaaacttactcagctggtggcaaaaaaagggagttttcatatccccaattgtgagcaaaatggaattttttcataacctaaaaggttagacacattttggctt

SEQ ID NO: 5794 - DNA, 472 bp, Homo sapiens
  misc_feature (1)...(472): n = A,T,C or G
tgtatgtgtgcttgtgtgtgtgagaaagagagaggaggtgaggggggatttgcacaaagcttctcctcccagagcttctgctcagtagagaagtggggtatttcctggtggattgtatgtgagcccattttctatacagacagctagccttgagcttttgtctcagggctttcctgaggacagtcttgatacatgaataggaatgctatgatttcccagagtgaagcagtagcctcacatccacaccaacaggaaaatggcttggtataaatccagtctcatctcagtaattaccccaccaggcatttatgttgggctgggtcccaacaccctaccaggatagccgtcatctcccctgtgggctcaaatgacccactttgcagctgagttcatcctggaaccccatggaggaaggaagaanggagagtgctgagggtgggtctgctgctgtatgctgtgaatccatgaaagn

SEQ ID NO: 5795 - DNA, 523 bp, Homo sapiens
  misc_feature (1)...(523): n = A,T,C or G
aattgacgcccgtggtagaggnccgtatgcccgggncgacccacgcgtccgctcgacttcggagaggcagcgcggttcctctgggtgcttccgtctccccttctcctgcttctccagcctcttcggcctcctcgcccgccgcgggaacccgagaccccagtgtatgccccacccctgaccccgctcgcgacatgtccaccccggctcggcggcgcctcatgcgggacttcaagaggttgcaggaggatcctccagccggagtcagcggggctccgtccgagaacaacataatggtgtggaacgcggtcattttcgggcctgaagggaccccgtttgaggatggaacatttaaacttacaatagaattcactgaagaatatccaaataaaccacctacagttagatttgtctctaagatgttccatccaaatgtctatgcagatggtagtatatgtctggacatacttcagaaaccgtggagtccaacctatgatgtgtcttccattctaacatccatacagtc

SEQ ID NO: 5796 - DNA, 407 bp, Homo sapiens
cccacgcgtccggaaacctcttggagcctcagattcctcatcaataaactgggggcaataatacttaccttagattttataaagattaaatttttaaaaattataagagcctagccttgtgcttggcctactaggtgcttagtcggttgttgcttcagtggattacagaaataatgtagcatgtattttaatgcaaatcaggtaaaactttacaaggaaaataagagcttagggtgttcatctgtctgtctcattctttttttaaaaaacgcattatccacttatgtctcttttactatacatagatcattcttactacatttattgaatttatcttcatcagttcccatattaacagaatgcttgctagccctccacagaagactatgccttgaaagtttcttgca

SEQ ID NO: 5797 - DNA, 405 bp, Homo sapiens
  misc_feature (1)...(405): n = A,T,C or G
cccacgcgtnngaccgactaatgcttttaataacttacatagattgtgttgcggcaagtcaagttttaatatagaggaaagggtttatcttatcatagtaaaatagtagtgatgtgttcataatttaatatttgcatggtatattatcaaggctgtaaaagcttgaatttgccttttccacatcttcatttcaaattaatttttgtgaggacccagagaagtgggtagaaccaaatgcccatgtggttttgttatggttatttagatcatttcagggtggggagtattttcagcaccataatatttctgtaccagggagattatagtattctaatttttttagggaaaaattgcttagctctagggatttctaaactttgaacaataaaagttaattttagaaat

SEQ ID NO: 5798 - DNA, 422 bp, Homo sapiens
attaaattaataaactctcatatcatattatgaccccatccattctctcaaacagtcatcatagtatcaactctgtttcctgagcacagagacctctagttccttcaacttgagggttcttcctccttacctatacaaactgaactccatggtcaatcatttgctctactctcaccagtacccttaatttccttatacttgccacatcctgccaaaaccagcaaagcattccttgagagactatcgaacagccaagcaaattgcctcactgttcctggatttatatttggactggttcctcagtgtagactgtgagaaattttgtttctggtcagccctctttctgactactgtcagtgatgtttcagccttttaaaatcttccttaaaacgcccaggccaccttggctagttcttcctcag

SEQ ID NO: 5799 - DNA, 414 bp, Homo sapiens
cctcaaaccacccaacttcatccaggaatacagtctgcagtgcagcaacagaaccgcttaccaagaactgtgcttacatacctttgtcatctctcttccccccttggaagttgtcctcagggggatttgttcctgtcctggggatttacctgggatggtggctgcctgtgcttttgctcatggccttgacagtgctctagttgctggatctaatggcctgtcttggtttctatcacatgagaaggggttgtttttttggggtgactcggactgaattccccatactgtttccacgccgggacaccatgttctccatcaagctaaagaaatcacgtgcctgaaactgtgcttaagttttgggggaaagatggagttcctatccagagcccccagatttccagaatcgagtgagct

SEQ ID NO: 5800 - DNA, 411 bp, Homo sapiens
catttccaccctagatttcagcagaaatgctgaatgtaaaggaatatttgagtaaagtgagttgccgttcttgaagcccgtctcctgtctccggtccgtgcctccaagatgacaaagaaaagaaggaacaatggtcgtgccaaaaagggccgcggccacgtgcagcctattcgctgcactaactgtgcccgatgcgtgcccaaggacaaggccattaagaaattcgtcattcgaaacatagtggaggccgcagcagtcagggacatttctgaagcgagcgtcttcgatgcctatgtgcttcccaagctgtatgtgaagctacattactgtgtgagttgtgcaattcacagcaaagtagtcaggaatcgatctcgtgaagcccgcaaggaccgaacacccccaccccgattt

SEQ ID NO: 5801 - DNA, 415 bp, Homo sapiens
tctcaagcagcccggaggagactgacggtccctgggaccctgaaggtcacccgggcggccccctcactgaccctccaaacgcccctgtcctcgccctgcctcctgccattcccggcctgagtctcagcatggcggatgggagcagcgatgcggctagggaacctcgccctgcaccagccccaatcagacgccgctcctccaactaccgcgcttatgccacggagccgcacgccaagaaaaaatctaagatctccgcctcgagaaaattgcagctgaagactctgctgctgcagattgcaaagcaagagctggagcgagaggcggaggagcggcgcggagagaaggggcgcgctctgagcacccgctgccagccgctggagttggccgggctgggcttcgcggagctgcaggactt

SEQ ID NO: 5802 - DNA, 421 bp, Homo sapiens
actacgcgtacatccacgcgttcgccctcgcgcctgcaacagtcttcttcactttcatagaatttgatgaaatcgggcgagtgcttcctaaactgaagattaaggggcctaattctctgcaccttaaattcaaggaaacaaatcttgtaatgctgcagcaatttaacgcactagcccaactccgtcggattgaccatttgacagtggagcctcaaggaaatccagctgtccattttacactctggaaatactatgtactgtttaggctaagccatttcagtgtgcagaaaataaatggaacagaggtgacacaaaaagatagaaatggctgaaaggctctttggaatcctagcacatgtagcatcttctgaggtaccccagtatcgtctgatttccattctgggtgatgccaggaaaaagc

SEQ ID NO: 5803 - DNA, 404 bp, Homo sapiens
ctaccatcttccctgcaactcttttggatggactttttctccaccatgtcgagcaaaagaacaaataccaggaccttgaagcgccctcagcgtgcaacatccaatgtgtttgctatgtttgaccagtcacagattcaggagttcaaagaggccttcaacatgattgatcataacagagatggtttcatcgacaaggaagatttgcatgatatgcttgcttcattggggaagaatccaactgatgagtatctatatgccatgatgaatgaggctccaggccccatcaatttcaccatgttcctcaccatgtttggtgagaagttaaatggcacagatcctgaagatgtcatcagaaatgcctttgcttgctttgatgaataagcaactggcaccatacaagaagg

SEQ ID NO: 5804 - DNA, 406 bp, Homo sapiens
actagttctaggaaactgtgaggcaccagatcctgtgcttctgcaggccattttctgaaaacccctgttaggaaggttggatttggcgtgacttgcttgagcaagagtcctggggagagattttgaggtttaatttaacggtatatccagagctaacagtgactcaactcgtctagttctgcaagtcagatgtacacttagagtctctctgtgaagggtttgggtctgagctgtatagtatgtcaaactgccagtaagccagcccctcaccctctgatagatattcctttaatgcaccagacttcatgtttgataaatgattaatggttgaaattgtttctcttcttttgtgttttcccagataatagatggtcactgtttccacaatgttttatactttcagctt

SEQ ID NO: 5805 - DNA, 415 bp, Homo sapiens
ggccccaaggctgttgcagctcctcgacctgatcggttggtcaatcgcttgaagaatatcactctggatgatgccagtgctcctcgcctaatggttcttcgtcagccaaggggaccagataactcaatggggtttggtgcagaaagaaagatccgtcaagctggtgtcattgactaaccacatccacaaagcacaccattaatccactatgatcaagttggggggaatctggtgaagggttctgaatatctccctcttcatccctcccgaaatctggaatacttattctattgagctattacaccagttttaacaccttcctcgtgttatgtttaaaaaaataaataaatttaagaaaaccattttaaataatgcacagttgcagcctggaaaaacttaaggtggcgccttatag

SEQ ID NO: 5806 - DNA, 454 bp, Homo sapiens
aatggcttaccaagtatctagcacaattattgtaaagtttcagaatttcaaaataaatagagaatcccgtagccttttaaaaaaaaaggtttcttgtaatggaacaggaatcaaaatggcattagatttcacaacaatacactggatgctaaaagctagtgggaaatactttaaaagttctaacagataatcattttcctcctagaattctgtacctagccaaataatcaaatgggagcctgtcatatagatagtgtcattcattccaagacaatatacctgctatgcacccttcttagtaagcttcagcaaaggaaggagtaatgcaagaaaaaggaagacacaggatgctggaaacagaggacccaacaaagaagagaagcaaagagaagttccaagagaatgagtttgcaccaggcctagagattacccagtccaggttggagcagaaggg

SEQ ID NO: 5807 - DNA, 291 bp, Homo sapiens
atgcgctggatagtatgtagggacagagggaatctcgttcatatcattcatgcgcgtcactaattacatgacgaggcatttggctaccttaagagagtcatagctactcccgccgtttacccgcgcttcattgaatttcttcgctttgacattcagagcactgggcagaaatcacatcgcgtcaacacccgccgcgggccttcgcgatgctttgctttacttaaacagacggattaccctggtccgcaccaggtgtaagtcggttgctaagcgcccgccgggctccccggt

SEQ ID NO: 5808 - DNA, 449 bp, Homo sapiens
cggacgcgtggggatctacatcctgtgtgttgagatttctatttcttaacttctatttgatctgaatttgatttcagtttcttgctgacccctccaggtatgttcacagctccaaggacggctgcagaagtgcactaagctggctgggtttctgggagccaatgcatccaactggtaaaaagtcggtggcctctgtgggagcggttttgccgagagggcacggtcctgctcagtggcacttgccctgggtcagagcactgtctccagagtactgactgcctgaacctcccaccccgcttctctggcctttggggtcgactcctgcaagtcacgcctctgcccttcctccctgctgctgtccttgagctggtccactacccacttccctgaatggaggacccccccagaaaatcaggacactttccgagggaaaagtattgttagaggag

SEQ ID NO: 5809 - DNA, 452 bp, Homo sapiens
tgagatactagaacttctttttgatgcatacttgtgggaagattttgattatccatgagattacagttgtaacttcatagactcccaaagggaaattcttgagataaggtctcactacgttgcccaggctggcctcaaactcctgggctcaaacaatcctcctgcctcagcctcccaaagtgctgggattacaagtgtgagtgaccatgcctggccaacccacagctttcaaagcgtgctgatttcaactgctactctgatgcaggactgtctgctgactccagaagtggctgagaggctgagaagttgagcagagattctgacaaccctgctgggccaggggcgaaaattggaatccaaggcatgccacagaatagaagcctgactactcatgctctaagttaggtcattagaaaaccaaacccttcgaggacgtatacactaggaataag

SEQ ID NO: 5810 - DNA, 456 bp, Homo sapiens
  misc_feature (1)...(456): n = A,T,C or G
ccagcggcgcccggtcccgggtccacagccgcactcactccttcgcgctctccgccaccgccaccactgcggccaccgccaatgaaacgcctcccgctcctagtggttttttccactttgttgaattgttcctatactcaaaattgcaccaagacaccttgtctcccaaatgcaaaatgtgaaatacgcaatggaattgaagcctgctattgcaacatgggattttcaggaaatggtgtcacaatttgtgaagatgataatgaatgtggaaatttaactcagtcctgtggcgaaaatgctaattgcactaacacagaaggaagttattattgtatgtctgtacctggcttcagatccagcagtaaccaagacaggcttatcactaatgatggaaccgtctgtatagaaaatgtgaatgcaaactgccatttagataatggctgtatagctgcanat

SEQ ID NO: 5811 - DNA, 412 bp, Homo sapiens
gacccgccaacatgggccgcgttcgcaccaaaactgtgaagaaggcggcccgggtcatcatagaaaagtactacacgcgcctgggcaacgacttccacacgaacaagcgcgtgtgcgaggagatcgccattatccccagcaaaaagctccgcaacaagatagcaggttatgtcacgcatctgatgaagcgaattcagagaggcccagtaagaggtatctccatcaagctgcaggaggaggagagagaaaggagagacaattatgttcctgaggtctcagccttggatcaggagattattgaagtagatcctgacactaaggaaatgctgaagcttttggacttcggcagtctgtccaaccttcaggtcactcagcctacagttgggatgaatttcaaaacgcctcggggacg

SEQ ID NO: 5812 - DNA, 444 bp, Homo sapiens
gagctgacattacttaagaatacccttaggaagcgtataggggtcatagctgacccacaaacctataaagaaatgtttgttctggatgcctacaacaagggcctaattgattatgaaaccttcaaaaaactgcgtgagctggaatgtgaatggtaagaaataaccataactgcatcagatggctccaccagggtggtcctggtatatataaagacaggcagtcagtatgatattgaagatgctattgacaagggccttgttgacaggaagttctttgatcagtaccgatacggcagcctcagcctcactcaatttgctgacatgatctacttgaaaaatggtgtcggcaccagcagcagcatgggcagtggtgtcagcgatgatgtttttagcagctcccgacatgaatcagtaagtaagatttccagcatatgcagcgcagga

SEQ ID NO: 5813 - DNA, 400 bp, Homo sapiens
  misc_feature (1)...(400): n = A,T,C or G
acaggaggngntaagggagttcgtggcggtgactgtcgccgaggaggaccgggcccgcttctttctcgagtcggccggctgggacttgcagatcgcgctagcgagcttttatgaggacggaggggatgaagacattgtgaccatttcgcaggcaacccccagttcagtgtccagaggcacagcccccagtgataatagagtgacatccttcagagacctcattcatgaccaagatgaagatgaggaggaagaggaaggccagaggttttatgctgggggctcagagagaagtggacagcagattgttggccctcccaggaagaaaagtcccaacgagctggtggatgatctctttaaaggtgccaaagagcatggagctgtagctgtggagcgagtgacc

SEQ ID NO: 5814 - DNA, 416 bp, Homo sapiens
ttttgtttaaataggtaagcaaaatattatactttatagcagtggattaccaacaccttgacttctttgttacagtgctaacatctttttttttgtgcaggtatccatgattattaagcagggtggaagttcagtattttgtcatttaaaaagattagttatataatgtctgcttccagccagtgagaaacatctagccatacctttcttatgcaagccattgagttatcaggactgtgaattaacactgtatgaataaatttctgtacaccttattgtttggccagaaggccaccaagtgtacttatatgtaatccttaaattttaaagtagctgtaatttttaaatatttctaaacttttcttaaaccactaaaattaagctcttactacttagtcaactatcctcagctgtag

SEQ ID NO: 5815 - DNA, 413 bp, Homo sapiens
cccacgcgtccgcaaacctccagcgaagacatcccaggtcgggtgaatcttccagccctgggggtggaggtagtaaaggccatggccatgcagaaaatctttgcccgggaaatcttggactccaggggcaaccccacggtggaggtggacctgcacacggccaagggccgattccgagcagctgtgcccagtggggcttccacgggtatctatgaggctctggaactaagagacggagacaaaggccgctacctggggaaaggagtcctgaaggctgtggagaacatcaacagtactctgggccctgctctgctgcaaaagaaactaagcgttgtggatcaagaaaaagttgacaaatttatgattgagctagatgggaccgagaataagtccaagtttggggccaatgccat

SEQ ID NO: 5816 - DNA, 404 bp, Homo sapiens
attccttggttctgtcattctgtcactgctcatagttttgccaaatcccattggcacactggttaggagggttagtgcagaaacgcccagcgcattcatcagagtcctgaaaattgtatgtggtgcaactgtgccaccatcaggtgttaaaactgggtggcaaaagttgagcttcttggacagagtaaacctgacttaactggatcttcacttaactgaagccttctttctacttatagtcaagaaggagtcatctttaatttataagattataaatttataaggatgcctggagccttgtgtagaggaggaagggtttctagaagtcttcatttatcctgtgttcattcatcccacaaatgtctgttgtacacctgtgctggatgctgaatgaacaagacagg

SEQ ID NO: 5817 - DNA, 414 bp, Homo sapiens
cggagaagttttatatttggtacattactatggatggaatgtcaggtatgatgagtgggtgaaggctgacaggataatctggcctttggacaaaggtggaccaaagaaaaaacagaagaaaaaagctaaaaataaagaagatagtgaaaaggacgaaaagagagatgaggagaggcagaagtcaaaacggggacgacctcctttaaaatcaaccctctcatcaaacatgccgtatggcttatctaagacagcaaacagtgaaggaaaatcagactcttgttcatctgatagtgaaacagaagatgctttagaaaagaatttaataaatgaagaactttctcttaaagatgaactagaaaaaaatgaaaatttgaatgatgataagctagatgaagaaaatccaaagatttctgc

SEQ ID NO: 5818 - DNA, 429 bp, Homo sapiens
cggacgcgtggggcaagttaaacttcactcttgaattctttacaatctaagtcaaactaagttataatttaggattgtctttaaacagccattcagaaacaaaactgtagaactgtgtatttgattgggaatggtgcttttgccaacttaaaaggattaaagtaacggagatatacacaaattttaaaattatgtgtgatcacaagactaaagataattaaaaagaaaaccacagatcatgaaaaaaaaaaaaaaaaaaaaaaaaaaaaaaaaaaaaaaaaaaaaaaaaaaaaaaaaaaaaaagggggggggggcgcttttaaaaaaatttttgggggggccccacccccccccccactaaaaaaatttttttttttttttttggggggggtattaaaaaaccttggggggttttttggaagacactct

SEQ ID NO: 5819 - DNA, 391 bp, Homo sapiens
  misc_feature (1)...(391): n = A,T,C or G
ggcgggccatggcggcgaacctgagccggatcgggccagcgctgcaagaggcctacgtgcgggtggtcaccgagaagtccccgaccgactgggctctctttacctatgaaggcaacagcaatgacatccgcgtggctggcacaggggagggtggcctggaggagatggtggaggagctcaacagcgggaaggtgatgtacgccttctgcagagtgaaggaccccaactctggactgcccaaatttgtcctcatcaactggacaggcgagggcgtgaacgatgtgcggaagggagcctgtgccagccacgtcagcaccatgggcagcttcctgaagggggcccatgtgaccattaacgcacgggccgaggaggatgtggagcctgagtgctn

SEQ ID NO: 5820 - DNA, 392 bp, Homo sapiens
  misc_feature (1)...(392): n = A,T,C or G
gaccggcgaggaanaagaaacatggcggctgttttgttcgagctgctgggattcgcgctgctgggcacccacggagcctccggggctgccggcacattcttcactaccgtagaagaccttggctccaagatactcctcacctgctccttgaatgacagcgccacagaggccacagggcaccgctggctgaaggggggcgtggcgctgaaggaggacgcgctgcccggccagaaaacggagttcaaggtggactccgacgaccagtggggagagtactcctgcgtcttcctccccgagcccatgggcacggtcaacatccagctccacgggcctcccagagtgaaggccgtgaaagcctctaaacacatcaacgaaggggagaccgccatgcc

SEQ ID NO: 5821 - DNA, 427 bp, Homo sapiens
acatgggaaaaatcccaggggatgttgcttactctttttgcccacactgctttggatacttatctactgtccgaaggccttctttccccactcaattcttcctgccctgttattaattaagatatcttcagcttgtagtcagacacaatcagaatcacagaaaaatcctgcctaaggcaaagaaatataagacaagactatgatatcaatgaatgtgggttaagtaatagatttccagctaaattggtctaaaaaagaatattaagtgtggacagacctatttcaaaggagcttaattgatctcacttgttttagttctgatccagggagatcacccctctaattatttctgaacttggttaataaaagtttataagatttttatgaagcagccactgtatgatattttaaggaaatatgttattta

SEQ ID NO: 5822 - DNA, 492 bp, Homo sapiens
  misc_feature (1)...(492): n = A,T,C or G
taggagagcctgggaatgagggcattggagggnccacccacgcgtccgcctacccacagccaggcgggacgcgcacagtcccttcacgcggaaagaagtaccttcgccggtcaccggctcctgcagggtgcaaatatatacagagcttcataatcagcccaagaccacatagagcaaacatgaatgatatttcccaaaaggctgagattctgctttcttcatctaaacctgtcccaaaaacctatgtaccaaaacttggcaagggtgatgtaaaggataagtttgaagccatgcagagagccagggaagaaagaaatcaaaggagatctagagacgaaaaacaaagaagaaaagaacaatatattagagagagagaatggaacaggagaaagcaggagattaaagaaatgcttgcttctgatgatgaggaagatgtatcttctaaagtagaaaaggcttatgttccaaaattaacaggaactgtgaagggtg

SEQ ID NO: 5823 - DNA, 536 bp, Homo sapiens
  misc_feature (1)...(536): n = A,T,C or G
ggcgcncgnnnccccnaaagacccctgatggaacgcctgtcatacccggcncgacccacgcgtncgggagcatctgtagtggagcacagccagggacacctaacccactaggctcgacttgctcccataggagactttggccctaggggactaaagagtcagacctgaactcactgctccgaatgcctgcagggaggccagcacccactaacaccctgctacagccaatgaacatgcaccccgccacattgccactgccgctggcacatgcgaacaaggatagatcccgttgccatcaccctatgaagtgctttggctggcaccacctatcaaagtgttgtgactagcagtccgagggcacctcggccactccagcacaacagttcacagaacccatgttataccacaatcaaagccccaaggtcgtcaaacagaataaaagaaaaaacacccattcttatgacagcaacttcaaagactgaagagacattagcccacaaagatgagaaagaaccagcacaagaactccacaactc

SEQ ID NO: 5824 - DNA, 458 bp, Homo sapiens
  misc_feature (1)...(458): n = A,T,C or G
tgggacgtgggaggcctgtgagatccaggactaaagattatgctgtttcctaatgggcagatatgtaagtaggtaagtgggatcctcaggtaagcgggatccagaactaaagactgtgctatttcctgatgggcagatgtgttgtttctacctcatcttgggcagcacctggatatgctggcgctggttcatcactggaggagcctcttgtattttgagccctcggacatgctccagagggtcctgacggtcacccagcaaagagggggtacctccatggtgctggcaccaaagacagagatgggcacagctccaggctcgtgaaaatgagctctctataacattgncttcctgaggtttttcctgcccttatccaaggtgggccctaaagctcagtccccagcccagcagcacctctgngtgctcgggtggggatgacgaccagagcagctctctgg

SEQ ID NO: 5825 - DNA, 399 bp, Homo sapiens
cccacgcgtccgcacaggtaaatttcactaggttatattttgtgtagtaaagaaaaaaattatttgggcaatgttatcttaattcatactacaatttaagattatcttatgtgtattatagtaaatagatgattttcagattcaaggctcctaagagtttgatttgctctgttttttcctaaaataaatattgtctctcccaactgttaagttctaggtattgtacttccaattttaacttcagaaccaagatgttggcatgaaccaggctgctgttgaagtacatgtatattataaattatcttatttgtgttatactcttacatgttatcttttctaagaaaacaaagtccctattattcctattgcaaagcacacaggaattaagaaagtacagta

SEQ ID NO: 5826 - DNA, 409 bp, Homo sapiens
  misc_feature (1)...(409): n = A,T,C or G
cagaaatctatttttactataaggagaaaggggtacaaacataatgggataaagggatactgaaagaggaggtaaagggatgctttgaaacttcacagtcttcacttctgtatagggctggcactgttccttggtgttaacagatatgctattatccaatacctaggtttgcactcaggttttctcactttattaaaaaaaaaaatcaaaaacctacagtgacttttaggtagctgtattgtatgtctggtttgaaatgtctagcaaaccacatactatctcaaaataatcaaaccagatggaaagcagaaatgacacatatcctagaaaaatacctctgacctctgtatcatagtgcccctaaaatttaatttttattaaaaattgggctcattttagtcttagcctn

SEQ ID NO: 5827 - DNA, 443 bp, Homo sapiens
  misc_feature (1)...(443): n = A,T,C or G
cgctcggctaatttttgtattttgagcagagatggagtttcaccatgttggccaggtgatctgcactcccactccccccacacttcccaaagtgctgggattacaggcataagccacaagccacctcacccagccaacatgttacatcttaattcttggattttcttcactgcagggctttgggtggagaaataaaactcttcaaatgcataatcttggagatccctgtgaatcaataattctttagacaactgcggctcanaatccctcctttcccttttccgagttattccatccatcttattagaaaggaagtgaattangtgtaggtggtctgtaacacctgcacatctttttatacgtgtagagggtatgcctgggatatataggttgtcttcaagcaagagctgctactacagctagagagaggaggagtgccaagg

SEQ ID NO: 5828 - DNA, 433 bp, Homo sapiens
  misc_feature (1)...(433): n = A,T,C or G
aactgaaagccggaaggggcaagacggcttcacttcgtcatggggctgtttggaaagacccaggagaagccgcccaaagaactggtcaatgagtggtcattgaagataagaaaggaaatgagagttgttgacaggcaaataagggatatccaaagagaagaagaaaaagtgaaacgatctgtgaaagatgctgccaagaagggccagaaggatgtctgcatacttctggccaaggagatgatcaggtcaaggaaggctgtgagcaagctgtatgcatccaaagcacacatgaactcagtgctcatggggatgaagaaccagctcgcggtcttgcgagtggctggctcctgcagaaaagcacagaagtgatgaaagccattgcaagtcttgtgaagattccagagattcangccaccatgagggacgtgtcaan

SEQ ID NO: 5829 - DNA, 472 bp, Homo sapiens
  misc_feature (1)...(472): n = A,T,C or G
agttattttgcttgactgttaacccacacgctgattttcacttggacctaacacaagtatctctacaactaatacgggaggtattattttatcatatatatgaaatgaaggtcctctaccaagctgagtaaaacaagagtctttttcaagagaaactcacttactgaactgaattcatataaagtatatcattaaatattatataattctcttattttgcagctgagcttgagatgagagaaaagtaatagagtttgttctgctgggggccttcatcattttgactgaaagaattctaagcattactattctttaaatcatatagagcaccaatgtctaagataggaaatacaagtagggttttgtggctttctgttacgaacttaaagacatttaaaagaaaagcactgtttangaggtcaaccttgggggattgatttccaaattatactctggtgtgatgctagtactg

SEQ ID NO: 5830 - DNA, 399 bp, Homo sapiens
  misc_feature (1)...(399): n = A,T,C or G
cccacgcgtccggtcacttgcaacttgctattcgtggagatgaagaattggattctctcatcaaggctacaattgctggtggtggtgtcattccacacatccacaaatctctgattgggaagaaaggacaacagaagactgtctaaaggatgcctggattccttgttatctcaggactctaaatactctaacagctgtccagtgttggtgattccagtggactgtatctctgtgaaaaacacaattttgcctttttgtaattctatttgagcaagttggaagtttaattagctttccaaccaaccaaatttctgcattcgagtcttaaccatatttaagtgttactgtggcttcaaagaagctattgattctgaagtagtgggttttgattgagttgan

SEQ ID NO: 5831 - DNA, 442 bp, Homo sapiens
  misc_feature (1)...(442): n = A,T,C or G
caaaatcaaggagctggtgtgttgggtgtctggtgagggcctggcttcctggtttatacatggcttcttcttgctgtgtcctcacatggtggaaggggcaaggcagctctcaggggcttcttttataagggctctaatctcattcacaagggatctgcccttgggatctaatcacccccaaaaggtcccacctcctaaaatcatattattgataactagatttcaacatgtgaattttgggtcaaccaaagctatagcactactcacaagaaatgttaatgggtgttcttaaacaaggcagaagggttccatggacaaaataaatttggaaaaggatgaaataaatataaagcaagcttcttaacttcttcacttttcatagcttttgacagattggtgtgattctccagtaaggactacagaatgtagcatttcccaaacn

SEQ ID NO: 5832 - DNA, 431 bp, Homo sapiens
aaagagtaaaattagcagaacataatatatttcctgcagcccttcagctggtggccattggaactgtacagcttggagaaaatggcaagatctgttggcttaaagaggaatgaagccttttacttcagaaatggggccaccttagaaagaattatttgctgcttgcatggtggctttttatcatggacttggcccaaaagaaaaactgctaaaagacaaaaaagacctcacccttacttcatctatttttttaataaatagagactcactaaaaacatgactacttagtgcagcatatttgagacatacagccttcttgggcttttttatgctctttttctaaccgtcaccccctctttttttttttggtatggccggacaacatgataaatccctccatcgttataacctttatgttttaagcttggacc

SEQ ID NO: 5833 - DNA, 407 bp, Homo sapiens
atttacccaaataaagtataggcgatagaaattgaaacctggcgcaatagatatagtaccgcaagggaaagatgaaaaattataaccaagcataacatagcaaggactaacccctataccttctgcataatgaattaactagaaataactttgcaaggagagccaaagctaagacccccgaaaccagacgagctacctaagaacagctaaaagagcacacccgtctatgtagcaaaatagtgggaagatttataggtagaggcgacaaacctaccgagcctggtgatagctggttgtccaagatagaatcttagttcaactttaaatttgcccacagaaccctctttttaaaaaaaaaaaaaaaactgtaaaatatggggggggcgctcattaaaaaaacctcgggt

SEQ ID NO: 5834 - DNA, 483 bp, Homo sapiens
  misc_feature (1)...(483): n = A,T,C or G
gagacgagnagttttatctgatggcgtgtgaatctgatgacctctagagtcgccccacgcgttcgaaaagacaaagacttttagtacatctagtcttaagcgcttccacagctctttcgtatctgtaatgtattttgcatttgatccattttttcctagttactgcacctgggagcgactgccagtactaccacatcatttcggtagtggaggtccccattgaagggtttttttcatagcacatagcatgatcacgtctaggaagatcgttctggctgtagatagtataattatctactaatacaaagggggaaaggacgtgagatgatgtgaaaggaagttttgcatcatttacttgaaagatactgttcttctgaatttaatcacattggggattggaaaaagtagatgaataaaaattaaaaagaaaaaaacaaatgagttcatgaagttaagcaattaaagaaaaagacaaatctaatn

SEQ ID NO: 5835 - DNA, 398 bp, Homo sapiens
ttttgtggtttggaatattatttaacttcatgtttttttattttaaaatttcatagctgtacttcttgaatataaaaaatcatgccagtatttttaaaggcattagagtcaactacacaaagcaggcttgcccagtacatttaaattttttggcacttgccattccaaaatattatgccccaccaaggctgagacagtgaatttgggctgctgtagcctatttttttagattgagaaatgtgtagctgcaaaaataatcatgaaccaatctggatgcctcattatgtcaaccaggtccagatgtgctataatctgtttttacgtatgtaggcccagtcgtcatcatatgcttgcggcaaaaggaaagctgtgtttatatggaagaaagtaaggtgctt

SEQ ID NO: 5836 - DNA, 452 bp, Homo sapiens
  misc_feature (1)...(452): n = A,T,C or G
gccacgtnggggntttggaatcatgcgccatngcaangncntnnnggnngancccgcgtccgctcatgcaggctccaccctcatgacctaatcacctcccaattgccctgctgcctgaaaccatcacatttagggttaggatttcagcctatgaattttgagggggaaaccagcattcagtccaggtccataacaatggtcaaatcccatctaaaattattataacacaaagaataaggggcagagtaatgtccctacaaacaggaaactactccaggaaggcacgcccagaacatagaaactggaccctaataatgcatcaatctgagaggaaggccaggtaggtcaggagttggtcatagctcacctgggtttagggtgtgggacttcattatactggtctagtctgcttttgttggttacttttcaagatttgcctgaaatcttaaaag

SEQ ID NO: 5837 - DNA, 440 bp, Homo sapiens
cggacgcgtgggggatttattcagactgctgtactcttcatttgatgtaacaaaatgctattaatctaaatatttgtaaataaagtacctgtatctagattaaattaaaattggttgcattattttctgaactataatagggtttttcttcaggtgaacaatttgacgtgtcatcagtttttattgcagcactgtccatattcattgtataaagagaggtctacgtatgtagcatataaaaccacatcactaagtaatagacccacagctttattcttgtgtttacattacccttgaaatgttttcagtcaacccttttcagtgtaagatcagcacatttggtggctgatgctgttctcctttgactgtaccgggagccagattctatcatatgcatgtgtaatcccctgtaatacactcatgtgctcacaaaatagaga

SEQ ID NO: 5838 - DNA, 495 bp, Homo sapiens
  misc_feature (1)...(495): n = A,T,C or G
ntttgatcgcctgcggacagtgatggcctccggggncccccacgcgtncggngaggaggattatttcttccttccaaacttttttcttcatccactcatttatttcttctgcactaattctttacgttaataagcttgatttacactggaccagatttcttctacttttaaactcaaaaccgtgtctggtggctcttttgtattaaaatcatcagcccacggagcttttacgaacttatgtcctcagtccacaaggtgtcctgagttcacccttatattctcttctatccttagtcacaaagactgtctgagtcgcattttcatctctagaaactggaagaagttctaagagtgtgaggtaatgactcaaggacaacagctcccagaaaataacagggtttgccctgctgctttggaggaggttctcctgaatcatgtcactgaagcacagctagggcccgggacctgggaccacagcccttgaagggaatgacg

SEQ ID NO: 5839 - DNA, 491 bp, Homo sapiens
  misc_feature (1)...(491): n = A,T,C or G
cttcaaagaaactccttcatcaagcagtccagagctaggccagatcaatgctacaatcatgaagttctcattgcatgcaattgtgtaggattgacaaggaactcagataaaaatttccagggtgcacttccagaaccagcttcaacatatgtctacattgcccccaagttaataaagtgccaaccctttactctctcatacagccagaaatgttagaaatccaaaatcttggtgcattattttttcataaacgctaaaacatttgaagaaacaatttaattatttaaaattcaagtattttattcacattatttgcaatatccaaatgtttaaaaattcccagataattaactagctattacagatctcacctagagggttgatgttatgaagactccagtggactgtactcacaaattgactggacaccctatganagtgggtagacctctcagcggaaaataagaagggcttttacctacagggcaggg

SEQ ID NO: 5840 - DNA, 508 bp, Homo sapiens
  misc_feature (1)...(508): n = A,T,C or G
agcggtnttattgaacatagaggcctcggcaccggcccggaannncagggacgacccacgcgtccgatactcctggggagatgctgatgacaggcaggggcagccttggacccaccctcaccacagaggctccagcagctgcccagccaggcaagcagggcccacctgggaccgggcgctgcctccaagcccctgggactgagcccggagaacagacccctgaaggagccagagagctctccccgctgcaggagagcagcagccccgggggagtgaaggcagaggaggagcaaagggctggggccgagcctggcacgagaccaagcttggccaggagtgacgacaatgaccacgaggttggggccctgggcctgcagcagggcaaaagcccaggggcgggaaaccctgagcctgagcaggactgtgcagccagggctccggtgagagctgaagcagtaaggaggatgcccccacgcgccgaggctggcagcgtggttctggatgacag

SEQ ID NO: 5841 - DNA, 384 bp, Homo sapiens
aggaagcatattcatcaccagttttcaggtagctcataatgtacagaagaagaatgaagtcctagttctctggatccaaatttttttattcttaatcttaaaaatgattttttttttttcaaacagggtcttattttgtcacacaggttaaagggcaggggtgccattatagctcattgaagctttgaactcctgggcttaatcagtcctgcctcagcctccctaggggctgggactacaggcatgcaccatcatgcatatatatatttaattttttgtagaggggagatcttaccgtattgcccagtttggtcttgaactcctggcctcaagcaatcctcctacttcagtttcccaaagggcttagattataggtgctcgctc

SEQ ID NO: 5842 - DNA, 422 bp, Homo sapiens
  misc_feature (1)...(422): n = A,T,C or G
taaggcagtgtgtatcactgttgctaacatgtttatagtgggagtcttggggatgatagctggttcaacagtattttgctgctaatactttatgttgcttcttggtcaaacttttcccattcaaaggaagaagatggtgctactatagacagtttttcccctagcaaatatattgtaccataatatctatcatccaagtttcagggttttttgaaagttgataattaggaaagtgacattttacttttcttagtgccctttgcctgtttgatttccattgagaaagagcagtcaccaaagttcctcaagtgtcggaagaccaccaccatcagaatcagtgcttgtttaaaaaataaaaatccctaggttccagacctactgaattggactctttggacatgagactcagcaatctacatctn

SEQ ID NO: 5843 - DNA, 418 bp, Homo sapiens
cattcacctaccagcgttactctacttctctcaatattgccactaagccttccagatctcacacgctccttgactctgattctgactcagaagaagaatctttgccttacttacccatttcatcggaacctaatgaatcaagattagaaggatggctttcattgcctgtacgaaacaacactaagaaatttggatgggttaaaaagtatgtgattgtaagcagtaagaagattcttttctatgacagtgaacaagataaagaacaatccaatccttacatggttttagatatagacaagttatttcatgtccgaccagctacacagacagatgtgtatagagcagatgctaaagaaattgcaaggatattccagattctgtatgcctatgaaggagaaagtaagaaggaacaagaatt

SEQ ID NO: 5844 - DNA, 492 bp, Homo sapiens
  misc_feature (1)...(492): n = A,T,C or G
nnnnacaccgatcgccttgcggnaccgctgaggaacctccgggncgacccacgcgtccggcagctgggccgcggcgctccgacctccgctttcccaccgcccgcagctgaagcacatcccgcagcccggcgcggactccgatcgccgcagttgccctctggcgccatgtcgcagaacggagcgcccgggatgcaggaggagagcctgcagggctcctgggtagaactgcacttcagcaataatgggaacgggggcagcgttccagcctcggtttctatttataatggagacatggaaaaaatactgctggacgcacagcatgagtctggacggagtagctccaagagctctcactgtgacagcccacctcgctcgcagacaccacaagataccaacagagcttctgaaacagatacccatagcattggagagaaaaacagctcacagtctgaggaagatgatattgaaagaaggaaagaagttgaaagcatn

SEQ ID NO: 5845 - DNA, 424 bp, Homo sapiens
gacaggctaatttttccttgaaaatgtggcttcttcaactcctttcaaatttaggatggaatacttcctgaaagaaaactgggctttatgcaggattctctttgaaaattcttgtatgtccagaacaaaagataaaactaattgtattcctcacattcacaatccccattggtctgaagtcacgtagcacagagcatctatagcacatagtgtttaaagactaatgaatgcaaaaagataaaatcttcaactaatttttgaattgtttctcatatatgctactagaaaatgccttgttgatgaagcacattttgggtagttgaggtcttttgttttcgcctttagctttctaagctttcttacaatgtggactgattactgtaacatttcacgtgtaaaataactggatattctttatatactg

SEQ ID NO: 5846 - DNA, 419 bp, Homo sapiens
  misc_feature (1)...(419): n = A,T,C or G
cccacgcgtccggcccttgtctgaggcggaggcagtcccgcgccgcgccggacccgagcatatttcattttctgtcattggactttgagccattagaaccatgagcaactacagtgtgtcactggttggcccagctccttggggtttccggctgcagggcggtaaggatttcaacatgcctctgacaatctctagtctaaaagatggcggcaaggcagcccaggcaaatgtaagaataggcgatgtggttctcagcattgatggaataaatgcacaaggaatgactcatcttgaagcccagaataagattaagggttgtacaggctctttgaatatgactctgcaaagagcatctgctgcacccaagcctgagccggttcctgttcaaaagcccacagtcaccagcgtgtgttccgagn

SEQ ID NO: 5847 - DNA, 419 bp, Homo sapiens
tgctgagtcctttccaccatggctcctaaaagagcaaagaatagagccggaggcgccaactccaacgtgtagtccatgttcgaacagacccaaattcaggaatttaaggaggccttcactatcatggaccaaaacagggatggctttattgacaagagcgatctgagagacacctttgctgctccttgagcgagtgaacgtgaaaaatgaagaaattgatgacaagatcagaggaggctccgcttccaattaactttactgcgttcctcacaatgtttgcagagaaacttaagggagcggaccctgaggaaaccattctcaacgcattcaaagagtttgaccctgaaggcgaaagggagccgaaggctgattacgttcaggaaatgctgaccacgcagacggagaggcatgccatggaa

SEQ ID NO: 5848 - DNA, 433 bp, Homo sapiens
cgaggagtgtggatcacttgaggtcaggagttcaagaccagcctggccaacatggtgaaacccccatctctactaaaaatacaaaaattagccaggcatagtggcatgcacctgtaatcccagctactcgagaggctgaggcaggagaatcacttgaaccagggagatggaggttgcagtgagccaagatcatgccactgcactccagcctgggcgatagactgagactctgtctcacaaaaaaaaaaaaaaaatgcgcccgctctaaaaggatactctggggggcccaacgttttctcttttttggaaattttgtgggggaaactttcccccccctaataaaaagggtgcgctctttttgaaaaaagggcccccttttttaaccttccacaaaaaaaagatttttggaccaacaaaaattaagggggggggg

SEQ ID NO: 5849 - DNA, 429 bp, Homo sapiens
gcgcttgaagaagagaagaagagatccgaagagctcttatctcaggtccagtttctttacacatctctgctaaagcagcaagaagaacaaacaagggtagctctgttggaacaacagatgcaggcatgtactttagactttgaaaatgaaaaactcgaccgtcaacatgtgcagcatcaattgcatgtaattcttaaggagctccgaaaagcaagaaatcaaataacacagttggaatccttgaaacagcttcatgagtttgccatcacagagccattattcactttccaaggagagactgaaaacagagaaaaagttgccgcctcaccaaaaagtcccactgctgcactcaatgaaagcctggtggaatgtcccaagtgcaatatacagtatccagccactgagcatcgcgatctgcttgtccatgtg

SEQ ID NO: 5850 - DNA, 405 bp, Homo sapiens
cggacgcgtgggcggcgatatggctgccgctgtgccccgcgccgcatttctctccccgctgcttccccttctcctgggcttcctgctcctctccgctccgcatggcggcagcggcctgcacaccaagggcgcccttcccctggatacggtcactttctacaaggtcattcccaaaagcaagttcgtcttggtgaagttcgacacccagtacccctacggtgagaagcaggatgagttcaagcgtcttgctgaaaactcggcttccagcgatgatctcttggtggcagaggtggggatctcagattatggtgacaagctgaacatggagctgagtgagaaatacaagctggacaaagagagctacccagtcttctacctcttccgggatggggactttgagaaccc

SEQ ID NO: 5851 - DNA, 414 bp, Homo sapiens
  misc_feature (1)...(414): n = A,T,C or G
aaagtcagccctagaggagttctccaaaatgaaggaagaggtacccacggccttggtggaggcccatgttcgaaaagtggaagaagcagccaaagtaacaggcaaggcggaccctgccttcggtctggaaagcagtggcattgcaggaaccacctctgatgagcctgagcggattgaggagagcgggaatgacgaggctcgggtggaaggccaggccacagatgagaagaaggagcccaaggaaccccgagaaggagggggtgctatagaggaggaagcaaaagagaaaaccagcgaggctcccaagaaggatgaggagaaagggaaagaaggcgacagtgagaaggagtccgagaagagtgatggagacccaatagtcgatcctgagaaggagaaggagccaaaggaagggcn

SEQ ID NO: 5852 - DNA, 445 bp, Homo sapiens
  misc_feature (1)...(445): n = A,T,C or G
aacagcccccgcacgtgacccctgtggagtggatcctccgcagtgggggtataactatcggcctggctgtgaactaccaccaccttttccctggtcgtgtggggcttccctgctggcgtacagggcccagcttcctcctggctgccatctgagcggngcccaccctccctgctctgaggcgccccagctgatgcccgcccctcttagaccctaaaaactggacccatccctgcggctcagctggggtcgctgttcggatgcaggggctcacacgtgggctggggagtccagttcctgctgtggggacccagtagcttttctggaagaaatagccttgctggtagatctggggtcctgagcaccccacaagaaggagtggtgtgctgggcaagctgggtcccanctgccagttaccgcgaatgtaggggggacaccttttgctctg

SEQ ID NO: 5853 - DNA, 405 bp, Homo sapiens
cccacgcgttcgcctgacgcaccgccgtgatgcccagggaagacagggcgacctggaagtccaactacttccttaagatcatccaactattggatgattatccgaaatgtttcattgtgggagcagacaatgtgggctccaagcagatgcagcagatccgcatgtcccttcgcgggaaggctgtggtgctgatgggcaagaacaccatgatgcgcaaggccatccgagggcacctggaaaacaacccagctctggagaaactgctgcctcatatccgggggaatgtgggctttgtgttcaccaaggaggacctcactgagatcagggacatgttgctggccaataaggtgccagctgctgcccgtgctggtgccattgccccatgtgaagtcactgtgccagccc

SEQ ID NO: 5854 - DNA, 504 bp, Homo sapiens
  misc_feature (1)...(504): n = A,T,C or G
gctgtcnattgacatagaggctcgggaccggnccggaannctggggcgacccacgcgtccgcaaccatggagatcagatgtgaatcagaccagtgagctcatggagttagcatttagtgtggtcaagtcctgccataggagccttaaaatgtgacccttgaatttgacaattagttactgtgggccttttaaagattttagttaagtggtttggaaagaaattgctgtggttaagaaagtgaatggttgtgtaaagggaatgataaatgtaagcaactcttttcatggaagctctatatggggctatatatatgtatcatagtggttaagagctcagaccctgaaatcaaaccccatggattcatatcttcctcctttcacttgctagttgtgttaccttaggcaagttacttttttcatgttagagtttttcttagctgtaagatggagataaataataatccatctcatagtcttgttgtatacacggaaagcaagtaggta

SEQ ID NO: 5855 - DNA, 412 bp, Homo sapiens
cgctgccgctgccgccgtcgttgttgttgtgctcggtgcgctgagctccgcggctccgcgagccggttccatccccttcccgccgacgccatgaagtggatgttcaaggaggaccactcgctggaacacagatgcgtggagtccgcgaagattcgagcgaaatatcccgacagggttccggtgattgcggaaaaggtctcaggctctcacattgttgacattgacaaacggaagtacttggttccatctgatatcactgtggctcagctgatgtggatcatcaggaagaggaggcagcttccttctgaaaaggcgatcttcctgtttgtggataagacagtgccacagtccaacctaactatgtgacagctttacgagaaggaaaaagatgaagatggattcttatctgtgg

SEQ ID NO: 5856 - DNA, 477 bp, Homo sapiens
  misc_feature (1)...(477): n = A,T,C or G
cggacgcgtgggcagcagggctgtggctaccatgttctctcgcgcgggtgtcgctgggctgtcggcctggaccttgcagccgcaatggattcaagttcgaaatatggcaactttgaaagatactctgtatgaaaaagctgatatcaaggggcctgaagacaagaagaaacacctccttattggtgtgtcctcagatcgaggactgtgtggtgctattcattcctccattgctaaacagatgaaaagcgaggttgctacactaacagcagctgggaaagaagttatgcttgttggaattggtgacaaaatcagaggcatactttataggactcattctgaccagtttctggtggcattcaaagaagtgggaagaaagccccccacttttggagatgcgtcagtcattgcccttgaattactaaattctggatatgaatttgatgaaggctccatcatctttaataaattcaggtctgn

SEQ ID NO: 5857 - DNA, 398 bp, Homo sapiens
aaaacaataaaaatactattcttttttgaaataaatttactcagtgacatcatcacccatcatattggcaaaaattcaaatgcttggtcacacttttttgacaaggttgtgaaatagcagacatgctccatcattgctgtgaaatttttaacaatttattcttaaaatccccaggtaggggggctgggcacggtggctcacgcctgtagtcccagcactttgggaggttgcggcagatggatcacgaagtcaggagatggaggccatcctggctaacacggtgaaaccccgtttctactaaaaatataaaaaattagccaggcgtggtggtgggcacctgtagtcccaactactcgggaggctgaggcaggagaatggtgtgaacccgggaggtggat

SEQ ID NO: 5858 - DNA, 512 bp, Homo sapiens
  misc_feature (1)...(512): n = A,T,C or G
atgactttagggccaaaccatagagctctccccagagactcattaatactttaaaagctctaaagcatcagtgttaacactggatcaggtaacagcacgtatatgttagccaaaatatgactaagagatttgctctctgataacaaggcctttgactattatgtaaaaacaaggtgaacaggaacgttctgagtctgtttataaagtacctataataattgttttgtttactacatttcccagaaaggaaatttttccatagttgtaataattgctaaaaatagcagtctacaggcttcctctgatataaacaaattcaacagaagatacctggccttatttggatgcatggatgtacatactccaggagatgataggccaagagtaataagaaaaagaaagtaacaagacagacctcttctttttctagtacacatgggatgtctttcttagttcattaaacttagacaaagtgataaacagatcangttgtcatcatctgctcttgaacn

SEQ ID NO: 5859 - DNA, 429 bp, Homo sapiens
  misc_feature (1)...(429): n = A,T,C or G
cccacgcgtccggttctagatcgcgagcggccgctcgcgatctanaactagcccacgcgtccgctttccttctccctgtgcttaaccagaggtgcccatgggttggacaatgaggctggtcacagcagcactgttactgggtctcatgatggtggtcactggagacgaggatgagaacagcccgtgtgcccatgaggccctcttggacgaggacaccctcttttgccagggccttgaagttttctacccagagttggggaacattggctgcaaggttgttcctgattgtaacaactacagacagaagatcacctcctggatggagccgatagtcaagttcccgggggccgtggacggcgccaacctgaaggaagggatgattcanggccaggagttatcagcctaccaggctccctccccaccggccan

SEQ ID NO: 5860 - DNA, 475 bp, Homo sapiens
  misc_feature (1)...(475): n = A,T,C or G
taagcattgaccgtttaaaacaaaactaataatgtttacattaggagataaaaatagaagtatagaattcttctgaaaataaatgactggtttataacacatctctcatggaaaacaagatgaaaacctggaaggaaagtgaaacatatgacagctgtctgggcagtaacaaagaattgagggtcccccttaaggtagacctgacatccctccatttgacaatgcctaagtgacttgggcctgaaagacgaagcaaaagcaatgacttagttaaggagacaaaaactggaggtccgtgataccaaggcatccagaatatgagaggccattgtcccagagaanaacagagagaaacaaggctaactttccaaatcacttttcctcagaggcattntttgacttctagcatgtgcagaacaagcagatgggaggcaaagcagaaagcgcagccaaggagctaagaatcaagcagaag

SEQ ID NO: 5861 - DNA, 393 bp, Homo sapiens
cccacgcgtccggcctgaagggggggacaaacctgtgtgcccgcaggagcccggcagggtacatacagagggtactgtgctaaaccctggggagacggcgaagtggaaaacatatagagtctgtgccctcccagattttacagtcttacttggtcacttcacgtatgtacctgcggttataaattgagatgagtgctgtgaaggagaagtccattctgatgctctgagtgtcttacaagtatcaagaacttactatatgtggttgaataaacaatcaaggtaaagagcatcaagtaaaaacttctgcttgttgataagtacttcagacattcccccagtggctgaagtggcatatgaattatgaagttggatcatttggaatgaatgtaagaa

SEQ ID NO: 5862 - DNA, 457 bp, Homo sapiens
cgcgttggcacagtgtatggtttcctccagaggagacattggcttatcatggggaaaaagaggatctggagaacctcatccagcttcccttctgaatcatctgcgatgactggctttgagaaggaaaggaagatggaacaggctcacatctcatgggatagcacgtggagctcttggctggggctgaccctgggcagggactttcctgcagggccagacctgcctgcattctgagacaaagcaatggacggtccgcagaagcagacctcattgattgagtcctttcttccatccccttggcctgctccctgtaggaagtcatcctgccaactgatttaaaagggctctttagccagttgttgccaaccttatagggatgagtcccctgtgagattttgcttttccactgcctgggatgatgcagtttgaagaggcccttggacctccttgtaacatc

SEQ ID NO: 5863 - DNA, 382 bp, Homo sapiens
  misc_feature (1)...(382): n = A,T,C or G
cctctcctccatggtcctgtttgtcagcgctgttttgggagcccgccggtagaggccgggccacgctcagacacttggatcgccgagtctggcactgggcatggcgggtcagttccgcagctacgtgtgggacccgctgctgatcctgtcgcagatcgtcctcatgcagaccgtgtattacggctcgctgggcctgtggctggctgctggtggacgggctattgcgaatcagcccctcgctggaccagatgttcgacgccgagatcctgggcttttccacccctccaggccggctctccatgatgtccttcatcctcaacgccctcacctgtgccctgggcttgctgattgacatgcggggaggaaggcagggtgtggatan

SEQ ID NO: 5864 - DNA, 417 bp, Homo sapiens
  misc_feature (1)...(417): n = A,T,C or G
cccacgcgtccgtcaagatcttcaagtctgatggcctgagggggctctaccagggtttcaacgtctctgtccaaggcatcattatctatagagctgcctacttcggagtctatgatactgccaaggggatgctgcctgaccccaagaacgtgcacatttttgtgagctggatgattgcccagagtgtgacggcagtcgcagggctggtgtcctacccctttgacactgttcgtcgtagaatgatgatgcagtccggccggaaaggggccgatattatgtacacggggacagttgactgctggaggaagattgcaaaagacgaaggagccaaggccttcttcaaaggtgcctggtccaatgtgctgagaggcatgggcggtgcttttgtattggtgttgtatgatgagatcaaaaaan

SEQ ID NO: 5865 - DNA, 445 bp, Homo sapiens
aaagcaagagctggagcgagaggcggaggagcggcgcggagagaaggggcgcgctctgagcacccgctgccagccgctggagttggccgggctgggcttcgcggagctgcaggacttgtgccgacagctccacgcccgtgtggacaaggtggatgaagagagatacgacatagaggcaaaagtcaccaagaacatcacggagattgcagatctgactcagaagatctttgaccttcgaggcaagtttaagcggcccaccctgcggagagtgaggatctctgcagatgccatgatgcaggcgctgctgggggcccgggctaaggagtccctggacctgcgggcccacctcaagcaggtgaagaaggaggacaccgagaaggaaaacccggaggtgggagactggcgcaagaacatcgatgcactgagtggaatgagggccgcaaga

SEQ ID NO: 5866 - DNA, 453 bp, Homo sapiens
cgcttccctcccgcggcgaccagggcccgagccgagagtagcagttgtagctacccgcccagaaactagacacaatgtgcgacgaagacgagaccaccgccctcgtgtgcgacaatggctccggcctggtgaaagccggcttcgccggggatgacgcccctagggccgtgttcccgtccatcgtgggccgcccccgacaccagggcgtcatggtcggtatgggtcagaaagattcctacgtgggcgacgaggctcagagcaagagaggtatcctgaccctgaagtaccctatcgagcacggcatcatcaccaactgggatgacatggagaagatctggcaccacaccttctacaacgagcttcgcgtggctcccgaggagcaccccaccctgctcaccgaggcccccctcaatcccaaggccaaccgcgagaagatgacccagatcatgtttg

SEQ ID NO: 5867 - DNA, 435 bp, Homo sapiens
acagcctaattattagcatcatccccctactattttttaaccaaatcaacaacaacctatttagctgttccccaaccttttaaaaaaaaaaaaaaaaaaaaaaaaaaaaaaaaaaaaaaaaaaaaaaaaaggggggcccataaaaaaaaaaccctgaggggacaaaattaaaacccggcaaaaaaaaaaaaactttttccctaaaagggggggaaaaaaaaaccaacctgggaaatttaaaaaaaaaaacaatttttggggggggaaaaaaatggaaaaacccccccaaaaaaaaaaaaacctgtaaggaaaaaaaaaaaatttaaaagaaaaaaggggaaaaaaaacctcaaattgctcccgaaaaaaaaaaagggagttaacgaagaacaaaaaataccatgccgggcgcgaaaaattacaataacatttgta

SEQ ID NO: 5868 - DNA, 430 bp, Homo sapiens
cactatcgaccacagcaggaatcaccatctccccatcaacagctgcccccttcttcacaggcagagggaatggggcaagtgcccaggacccatcggctgatcacacttgctgatcacatctgtcaaattatcacacaagattttgctagaaatcaagtttcctcgcagactccccagcagcctcctacttctacattccagaactcaccttctgctttggtatctacacctgtgaggactaaaacatcaaaccgttacagcccagaatcccaggctcagtctgtccatcatcaaagaccaggttcaagggtctctccagaaaatcttgtggacaaatccaggggaagtaggcctggaaaatccccagagaggagtcacgtctcttcggagccctacgagcccatctccccaccccaggttcctgttgtgg

SEQ ID NO: 5869 - DNA, 421 bp, Homo sapiens
atgaaattggtggttttaggaagtcaactttagttttgctttgtttgcatgtccactaatttttttattttgatatttgtcttttttttaaattttacagtagtcatcgaaagttatgtttctttgcttacttcatttttttctctaatcaagactggaacaaaagtataaatattatttatttcaggtagcatttttttcgtgtagttttttaatatatacttgaaggaaatgtttcaccttatttttggtctttgtttattcatttagaccctgcaagttgattctcattaattgtcagattccactaccctttcttcctcatagatagtaattaccaatgtaactaagtatttgtgttctgatatctgaggccagtaactattaatatctagttctcagagcatttggaaaggttatc

SEQ ID NO: 5870 - DNA, 410 bp, Homo sapiens
  misc_feature (1)...(410): n = A,T,C or G
cggcgggccctgggagagctgggacgggcggcggccgggtggcctcggccacccgctaattgcatcttttcccggcgtctcgtctgcagagggagcactatgtctgcggaagtccccgaggcagcctccgcggaggagcagaaggaaatggaagataaagtgactagtccagagaaagcagaagaagcaaaattaaaagcaagatatcctcatctgggacaaaagcctggaggttcagatttcttaaggaaacggttgcagaaagggcaaaaatattttgattctggggattacaacatggctaaagcaaaaatgaagaacaagcaacttcctactgcagctccggataagacggaggtcactggtgaccacattcccactccgcaagaccttcctcaacggaagccgtn

SEQ ID NO: 5871 - DNA, 579 bp, Homo sapiens
  misc_feature (1)...(579): n = A,T,C or G
ngagggattgagnactgaagagctctgcaattcccgcncgacccacgcgtccgcgctcctccgcccgaccgcgcgctcgccccgccgctcctgctgcagccccatggcccctcgccgccgccaccatggacgccatcaagaagaagatgcagatgctgaagctcgacaaggagaacgccttggatcgagctgagcaggcggaggccgacaagaaggcggcggaagacaggagcaagcagctggaagatgagctggtgtcactgcaaaagaaactcaagggcaccgaagatgaactggacaaatactctgaggctctcaaagatgcccaggagaagctggagctggcagagaaaaaggccaccgatgctgaagccgacgtagcttctctgaacagacgcatccagctggttgaggaagagttggatcgtgcccaggagcgtctggcaacagctntgcagaagctggaggaagctgagaaggcagcagatgagagtgagagaggcatganagtcattgagagtcgagcccaaaaagatgaagaaaaaatgganatcaggagatcccactgaagaggcaaan

SEQ ID NO: 5872 - DNA, 416 bp, Homo sapiens
  misc_feature (1)...(416): n = A,T,C or G
atgcaggcccaggaggacctgaagctggcggagctggcgcggcggccgaggcggcggcaggcgcggcgggaggctgaggctgacaagccccgaaggctggggcggctcaagtaccaggcacctgacatcgacgtgcagctgacctcggagctgacagactcgctcaggaccctgaagcccgagggcaacatccttcgagaccggttcaagagcttccagaggaggaatatgatcgagcctcgagagagagccaagttcaaacgcaagtcaaggtgaagctggtggagaagcgggcgttccgtgagatccagttgtagctgccatcagatgccggagactcgcccttcaataaaaaatctcttctagctgaggaaaaaaaaaaaaaatgaggaccgagnaaaaaaaaaaaaaaaaag

SEQ ID NO: 5873 - DNA, 438 bp, Homo sapiens
  misc_feature (1)...(438): n = A,T,C or G
ttcaccttaaatccccaaacatattgtctgatgcctaattatgtgtttgtttaatgaatattaaataacaacaaatatggaaactaagttatcaggtcaccaagaacaaacttaaagaaatataatgtataaatatggctgatttctgtgtgtttcttttctttttttccttgtctcagctcttagagagttaagagtatagagagggaaaggtcaaagaggaggtggatatcttatcaaataaccctgataaatgtagtaagtataagaataaacacattatcaaggttcagtggtggaagaacaagtggtggtcatgtcttttaatagttgcgttggtccttacggccagttctttgttactgtgtgtttcttaaactgaacaattcaaaaaagttaactccactatgtttgaagcaatattggtggcattaaggn

SEQ ID NO: 5874 - DNA, 437 bp, Homo sapiens
  misc_feature (1)...(437): n = A,T,C or G
accacgcgtacagtgaaatgcaactattacatttaaatcgttagatgaaacatgatatttaggcctgacaaatattaaattggtctaataaatcacagtgtatgccagctctctacagaaagtggcctttggtttctaaagcactgcgatgattcctgtagctactatataactgcacagattctttttagagatagagagaatctctgtgttcttatgaagacattttttatcagtgttctgacaagatatgagaaaaatattatagtcacctagggtcactatggaatatagaaatcctagtttaaagaggaaatagcggcccttgatcaaactatttaatatggccttagctgaattagctgtatttagacaaagttagactttattgtgaaatgtaatcggcggctaattctcatcgttntaattaatgaaac

SEQ ID NO: 5875 - DNA, 420 bp, Homo sapiens
  misc_feature (1)...(420): n = A,T,C or G
tgaagttgagcatcttttcatgtgtttattggccatttttatatctttcttggagaaatgtctgttcaaatactttgtccatttttaaatgtccattttttgttattgagttgtaagaattctttatctatttggatacaagtcccttgtcagatgcatgatttgcaaatattttttcccattctgagttgtcttttcactttctttttttttgagacagagtttcgttcttgttgcccaggctggagcgcaatggtgcggtgttggctcactgcaacctccagctcccaggagaattgcttgaacttggaggcagaggttgcaatgagccgagattgcgccatcgcactatagcctgggcagcaagagcaaaactccatctcanaaacaaaaaaaaagaaacatacagtatgcccatca

SEQ ID NO: 5876 - DNA, 391 bp, Homo sapiens
gccatggagaccgaaacggcgccgctgaccctatagtcgttgcccaccgatcccctgctcctcatggtatccgttctggactatccggatctaatcaactggtggtatgtcactcgcagacttatccagctatcaagtctatgatccgctgcggagaagacattgcaaaaaatactggctgatatctgaggaacagaacacacctaagaatcagggttgggaatctctcttcatagatacttactctgatggaggaagatacattgaccattatgctggtattaaaaaggcctgggatgatctcaacaaatatttggagcccatgtgaactcggatggttttatctctgagagatggagctcgagaggaaaacctcgatgctggggaaacc

SEQ ID NO: 5877 - DNA, 486 bp, Homo sapiens
  misc_feature (1)...(486): n = A,T,C or G
aaaacttcgtggacattgttgatgccaagttgaagattcctgtctctggatccaaatcagagggccttctctacgtccactcatccagaggtggcccctttcagaggtggcaccttgacgaggtctttttagagctcaaggatggtcagcagattcctgtgttcaagctcagtggggaaaacggtgatgaagtgaaaaaggagtagagacgacccagaagacccagcttgcttctagtccatccttccctcatctctaccatatggccactggggtggtggcccatctcagtgacagacactcctgcaacccagttttccagccaccagtgggatgatggtatgtgccagcacatggtaattttggtgtaattctaacttgggcacaacgaatgctatttgtcatttttaaactgaatccgaaagagactcctattataaatttaagataatgtaatgtatttggagtgctttgataanaaagccc

SEQ ID NO: 5878 - DNA, 462 bp, Homo sapiens
attgacgccttcggatggatcgcgtgttgcaggcgcgacccacgcgtccggaggaggttgaaaatcctgaagaagagaaaaaatatgagggaggctaaggaaacttagccactttctgatcactgatgactccttaggctgcacctgaatgatggtggtgtttttggaggctgtacctgagtgatggtggtttttggggggctgcacctgagcgatagtgatttttttttggaggctgcacagctggccagaccatctctagatgttcttttcacagtggttcatagggcgtcattcccccttcctggattattttgactatgggtagcttattttcaagagctctttgcctttttaatcctgttccagatcacttatccaaaatctttccaaatcaattatattatgctgcttttctttaattccctaaaagccatagcttctagattttctatcagcaca

SEQ ID NO: 5879 - DNA, 479 bp, Homo sapiens
  misc_feature (1)...(479): n = A,T,C or G
tgggtgtnaggggnaattgatcgccttcggttcggatcccgatttgccggggcgacccacgcgtccgcctgtgatcacatgacttgcttcaccttgtcaatcacttagaagattcaccctccttacgctgcccccttgtcttgtatgcaataaatatcagcccgtccagctgttcggggtcactagtggtctctgcgtcttggtggtagtggtcccctgggcccagctgctttctctttatgtctttgtcttgtgtctttatttattataatctctcgtctccgcacacagggagaacacctgctaaaccccgtagggctggacactacacattagaaaaacagatgaggctggatacggtggctcatgcctgtaatcctaccactttgggaggccgaggcgggtggatcacaaggtcaagagattgaggccatcccggctaacagagtgaaacatggtctctactaaaaatacaaaan

SEQ ID NO: 5880 - DNA, 510 bp, Homo sapiens
  misc_feature (1)...(510): n = A,T,C or G
gggggccngnnnnnngnnnntttgatcgcctcggnaccgtcgaggaccctccgggtcgacccacgcgtccgcggacgcgtggggacaaaactccggcgacagcgagtgacacaaataaacccctggacccccttgttccctcagctctaagggccgcgatgttgtacctagaagactatctggaaatgattgagcagcttcctatggatctgcgggaccgcttcacggaaatgcgcgagatggacctgcaggtgcagaatgcaatggatcaactagaacaaagagtcagtgaattctttatgaatgcaaagaaaaataaacctgagtggagggaagagcaaatggcatccatcaaaaaagactactataaagctttggaagatgcagatgagaaggttcagttggcaaaccagatatatgacttgcagcacttctaaaagattgaaaacaccaagaagatagatagaatattcactatttctcatattgatgcaattgtggtgctctttt

SEQ ID NO: 5881 - DNA, 404 bp, Homo sapiens
ggccctcccactttcccctgcctgctcctccatgctgtgagctgctttggcagatctgtttttctgtgtagtcaggggaaaaacaaaaaaaaatgcacaactgtgtgggcattgtcatagctgttggtgtcaccactgctttgggggaaatggctgggatgaggctaatacattcatgcaatatttatattttcagggggctgcgttatcagcatgctctccctgccttgggcttttctttccgtcatgttttccttttcgtgttccttctctgatttctcttgtctctgctgctcacaggcctgcccatcagtcagtacagatactcagtgtctggtttctggccagctccgtggagggggctttaagcagaattctgactctttggggtgggggattaggaa

SEQ ID NO: 5882 - DNA, 399 bp, Homo sapiens
cctgtgatcacatgacttgcttcaccttgtcaatcacttagaagattcaccctccttacgctgcccccttgtcttgtatgcaataaatatcagcccgtccagctgttcggggtcactagtggtctctgcgtcttggtggtagtggtcccctgggcccagctgctttctctttatgtctttgtcttgtgactttatttattataatctctcgtctccgcacacagggagaacacctgctaaaccccgtagggctggacactacacattagaaaaacagatgaggctggatacggcggctcatgcctgtaatcctatcactttgggaggccgaggcgggtggatcacaaggtcaagagattgaggccatcccggctaacagagtgaaacatggtctctact

SEQ ID NO: 5883 - DNA, 399 bp, Homo sapiens
ttaaggaaagccaagttaaggacacacccttcctttccacccgtctctttctagagtacagttctgaccttctggccaaagagcagggcaacacatcatccaaggactgtggttcatcttggctctttcatcttctgaaatcaattcaacccatttatctaaggtgatgcccatcaccattaagactacggcccaggaggagaaaagtatgttcataccctggatacttctatttgaaacatgcaccattgtgagtgaaaatttctagctggaaccaccaccactattttgtagatctcttccttgatttgattagttacaagaagggtgatatctgaactttcagtggttgctgaggcattggcaacagcagaagctgaagtagtctataaaacagag

SEQ ID NO: 5884 - DNA, 468 bp, Homo sapiens
  misc_feature (1)...(468): n = A,T,C or G
cccacgcgtncgggaagatggagcccagcaccgcggcccgggcttgggccctcttttggttgctgctgcccttgcttggcgcggnttgcgccagcggaccccgcaccttagtgctgctggacaacctcaacgtgcgggagactcattcgcttttcttccggagcctgaaggaccggggctttgagctcacattcaagaccgctgatgaccccagcctgtctctcataaagtatggggaattcctctatgacaatctcatcattttctccccttcggtagaagattttggaggcaacatcaacgtggagaccatcagtgcctttattgacggcggaggcagtgtgctggtagctgccagctccgacattggtgaccctcttcgagagctgggcagtgagtggcgggatgagtttgacgaggagaanacggctgtcattgaccatcacaactatgacatctcagaccttg

SEQ ID NO: 5885 - DNA, 426 bp, Homo sapiens
acagaagccgcagtcccgtggggtctggagacgcagtttcctgttaatgacaataaatccctgctccccctggctcagacatctacgcagcgaaatcgagcctggccttgagggtccacaccgcgagggaagatgcgtgcgcccattccagagcctaagcctggagacctgattgagatttttcgccctttctacagacactgggccatctatgttggcgatggatatgtggttcatctggcccctccaagtgaggtcgcaggagctggtgcagccagtgtcatgtccgccctgactgacaaggccatcgtgaagaaggaattgctgtatgatgtggccgggagtgacaagtaccaggtcaacaacaaacatgatgacaagtactcgccgctgccctgcagcaaaatcatccagcgggcggaggag

SEQ ID NO: 5886 - DNA, 494 bp, Homo sapiens
  misc_feature (1)...(494): n = A,T,C or G
tagaaaaaaaantttgaancccgtaggacctgcccacaagtccggaattcacgcatccacccacgcgtgcggtgaagatggtttgttgctacattctggtgtgatgggtgcagcggtggctcctctgacaatattagggggtcctcttctcatcagagctgcatggtacacagctggcattgtgggaggcctctccactgtggccatgtgtgcgcccagtgaaaagtttctgaacatgggtgcacccctgggagtgggcctgggtctcgtctttgtgtcctcattgggatctatgtttcttccacctaccaccgtggctggtgccactctttactcagtggcaatgtacggnggattagttcttttcagcatgttccttctgtatgatacccacaaagtaatcaagcgtgcagaagtatcaccaatgtatggagttcaaaaatatgatcccattaactcgatgctgagtatctacatggatacattaaatatat

SEQ ID NO: 5887 - DNA, 357 bp, Homo sapiens
tgggaaaccagcaagttgagagaggatccagaagtaaccccttctaaaacgggaaagatgccttccgaaagcacttggccctaaagagaaaacactaggaggatgggaaccagggacagagaagctacttgctctgcagctgtttgggccagtatgttccctaatcttgatggccatcctgggcttattttcctgagagtctctaagtgactcactgcatcacgtaaaactaagaaaaaggatgtcctgaaaaaaaaaaaaaaagggggggccgttttaaaggatccctgggggggccaaagtttacgcgggcaggcgagggaatacctttttccctagggggagtcttattataac

SEQ ID NO: 5888 - DNA, 478 bp, Homo sapiens
  misc_feature (1)...(478): n = A,T,C or G
gcngcaattgaaacccctntttgaaacgcgtgatgtaccggtccagaattgccggctcgacccacacgtacggactatttttattcgagtatactgggctatttatttttataatggactgacatttcataatgaactctctgctgatattgacatgaaaactaacacattttaaggattcacctatctacatttacatgaaatcaatgttcttataaccttctgacatttacttacctttttgtatttacttatatacttaattttgcttttaagtattattactatctttaatgcatttgtgctcttttttaatatggcaggctatggagtacaaagatttgtgtttttctggattagcaaaaaataaaacaaaactgtaaatccaatcattcagatgagttctttggaacaactgaggagtctgtggcctgaccaacaagactaaggaccttacttcactactatttggatgccg

SEQ ID NO: 5889 - DNA, 431 bp, Homo sapiens
gcgaggcagccccgcgccgcgccggacccgagcatatttcattttctgtcattggactttgagccattagaaccatgagcaactacagtgtgtcactggttggcccagctccttggggtttccggctgcagggcggtaaggatttcaacatgcctctgacaatctctagtctaaaagatggcggcaaggcagcccaggcaaatgtaagaataggcgatgtggttctcagcattgatggaataaatgcacaaggaatgactcatcttgaagcccagaataagattaagggttgtacaggctctttgaatatgactctgcaaagagcatctgctgcacccaagcctgagccggttcctgttcaaaagcccacagtcaccagcgtgtgttccgagacttctcaggagctatcagagggacagagaagaggatcc

SEQ ID NO: 5890 - DNA, 411 bp, Homo sapiens
caagttcaaagaggtcgtctagacaagatatcaaaactaaaatctggaaaagtgggtcaggcatgcaggtcaggatattatctggataatgaaatatggaagtgtagataaaagctcagataataggcacagattggcagaagttaagatttctacaatatgacaaatctaatggttaacaagggacttttgaaataatgtaatcagccctctcattttatagtgttgttcatttgtccattcagcaacctctgtagaaattggttgcaactgtggataagactctctgcatgaatgatgtttatatggcttaatggagaagagagataaataagtcacaaatacattatagttttatttaggtatacattatatggcagcatcaaggaggagcatccgaattagagaagg

SEQ ID NO: 5891 - DNA, 428 bp, Homo sapiens
gcgctcctcggtccgcgcttgagtggttatgacagtgttcgctctaaggggagaaggaatgtgtgaccatttccaacggttaacttgcattccccagatagtttggatgagttacaacctaaatctgcaaactcaatacagccagaccctgggaagtgaccctctccaagcctcctgtacaagtcccaggaaaagagcctgttttcccttggacatgtgagcagtgaattactgctcattcagaatttcatgtgtatgtgttactgatggccaggtttagagataccaacctatttatttctagaggagaggtgatttgataaccttttcagatatcactatcagtaggcagaaaagggttaatagtatgatagggttaatatgtcctgaggagagtaaagaaattgcaaactgcagaagcacctgat

SEQ ID NO: 5892 - DNA, 424 bp, Homo sapiens
  misc_feature (1)...(424): n = A,T,C or G
atttcactttacatccaaacatcactttggcttcgaagccgccgcctgatactggcattttgtagatgtggtctgactatttctgtatgtctccatctattgatgagggtcttaaaaaaaaaaaaaaaaaaaaaaaaaaaaaaaaaaaaaaaaaaaggggggcccctttaaaaaaaatctttggggggcccaaattaaaccgggaaataaaaaaaaaaatttttttctttaaggggggggaaaaaaaaaccacccggggatttttgaaaaaaaaccttatttttggggggggaaaaaatgggaaaacccccccccaaaaaataaaccccttaggggaaaaaaaaaattttaaaggggaaaagggggaaaaacacccccaaatcccccccttaaaaaaaaattannnnnnnnnncaaaaccccct

SEQ ID NO: 5893 - DNA, 426 bp, Homo sapiens
  misc_feature (1)...(426): n = A,T,C or G
ggtccgtggtgcgggatcgagattgcgggctatggcgccgaaggtttttcgtcagtactgggatatccccgatggcaccgattgccaccgcaaagcctacagcaccaccagtattgccagcgtcgctggcctgaccgccgctgcctacagagtcacactcaatcctccgggcaccttccttgaaggagtggctaaggttggacaatacacgttcactgcagctgctgtcggggccgtgtttggcctcaccacctgcatcagcgcccatgtccgcgagaagaccctatntnaaaaaaaaaaaaaaaataaataaaaaaancggggccccccttttaaaagatccctttgggggcccaaagtttaccggggctggcaaagtaaaatttttttccttaaaggggtggaattaaaaaccacgttgggaag

SEQ ID NO: 5894 - DNA, 470 bp, Homo sapiens
cggacgcgtgggccgccgttgatgcctaaccatatacttgtggcgggtaggcatgtaacagccctggagccataatatacggattaggcaacaacggcgggaccccacgagggaggttgggaggagcttttcctgaagtcgtagcaactgagcttcgagtcgaggctgtgacagtggagttgctgcctacccgccacaagtatatggttatgatgacttgcagatgcttcagacaagatttccattggattactacagcatcccatttcccacacccactactccgctgactgggagggatggtagcctggccagcaacccttattctggtgacctcacaaagttcggccgtggggatgcctactccccagccccggccacaaccttggcccaaccccaacagaaccagacgcagactcaccataccacgcagcagacattcctgaacccggcgctgcctcctggctaca

SEQ ID NO: 5895 - DNA, 403 bp, Homo sapiens
cccacgcgtccgcacttgggaaagtatgatgcccagatggacatctgggggggagagaattttgagctctccttcagggtgtggatgtgtggtggcagtctggagatcgtcccctgcagccgggtgggccatgtcttcaggaaacggcacccctacaacttccctgagggtaatgccctcacctacatcaggaatactaagcgcactgcagaagtgtggatggatgaatacaagcaatactactatgaggcccggccctcggccatcgggagggccttcggcagtgtggctacgcggatagagcagaggaagaagatgaactgcaagtccttccgctggtacctggagaacgtctacccagagctcacggtccccgtgaaggaagcactccccggcatcattt

SEQ ID NO: 5896 - DNA, 459 bp, Homo sapiens
  misc_feature (1)...(459): n = A,T,C or G
ctttgacaggttcgtactcgacacngcccnggaantnccgggnagactcacgcgtccgcccacgcgtncgattggcatcagcaacacatttgttttcagtgtaagcaatatttctaagaaattcagaaaaaaaacagtgaaaagtggtgagacaagggttttataggtagccaagctgtcattcaaataataaaagtgtagaaaaacatactaaaatatcaagaattcagaatactgtattcacaagcccttccaaaggaggaaaacctttattaaacccaaatgtgaccgtggaatattggtaaaggtgctggtgacaaacactgagtatatttaattgcagatctgaaacaaagataaagtggaaaaagtattttataaatattatataatctgataaggtagaaattaacaagaagaaaagattaaagaaaaggagaaaattgaattcattaattt

SEQ ID NO: 5897 - DNA, 411 bp, Homo sapiens
cccacgcgtccgagacggtgcagtctccgggatcgcattcttctcccggtgcccgctgagccgagggcaagaagagaacaaggaccctctcggcctcaggaatcttctccccagagactcctaagtgggcacactgcttctgttgttgctctcgtaaccatgactctgccgcacagcttgggaggtgcgggggacccccggcccccccaggccatggaggttcacaggctggagcaccggcaggaggaggagcataaggaggagcggcagcacagcctgcgcatgggctcctctgtgcggaggcggaccttccgcagcagcgaagaagagcatgagttcagcgccgcggactacgccctggcagcagccctggctctgacggcctcctccgagctgtcttgggaagcccaa

SEQ ID NO: 5898 - DNA, 409 bp, Homo sapiens
tgcacttttaaaccatcagatctcgtgagaactcactcactatcatgagaacagcaagggggaaatatgccctcgtgatccaatcagctcccaccagacccttcccctgacatatgaggagtacaattcaacatgagatttgggtggggacacagaaaaaaccataccacctgtctttatgccaggaccacactgtctgaataactgtagctttgtaataagtcttgaaattgggaagtgcaagccttccaactttgttgggtttcaagattgtattggctgtttgggatctgttgcatttccctgtgatttttaagatcatcctttcagtttctataaataaaccagataggatttgatagcaattgtgttgaatccgtagatcaatttgagaagtattgcctttttg

SEQ ID NO: 5899 - DNA, 408 bp, Homo sapiens
tttctcagcaaatgaatgacttcgacacagaagatctcacgattgcagagcagcgcctccagcaccatgcagacaaagccttgaccatgaacaacttgacttttgacgtcatccaccaagggcaagatcttctgcagtatgtcaatgaggtccaggcctctggtgaggagctgctgtgtgatagagatgtagacatggcaactcgggtccaggacctgctggagtttcttcatgaaaaacagcaggaattggatttagccgcagagcagcatcggaaacacctggagcagtgcgtgcagctgcgccacctgcaggcagaagtgaaacaggtgctgggttggatccgcaacggagagtccatgttaaatgccggacttatcacagccagctcgttacaagaggcagagc

SEQ ID NO: 5900 - DNA, 410 bp, Homo sapiens
  misc_feature (1)...(410): n = A,T,C or G
agcgattcttgtgcctcagcctcctgagtagctgttattacagatgtgcaccactgcctggctatttttgtatttttagtagagacggggttttgccatgttggccaggctggtctcgagctcttggcctcaagccatctgcctgccttggcctcccaaagtgttgcgatcacagacatgagccactctgcccagccactttagtagtttctaaaggttttatagtagtagaacgcttttgttcctcaaatgaaatcttaattggaaaccctattgtgtagagaaagatgaaaacagtggctctagtttaggagagagagcttggagggagggccttgtacattgagcctttctttcttctcattcctgagaatctttggaacgcaggtgaatactgccatttgtctggn

SEQ ID NO: 5901 - DNA, 396 bp, Homo sapiens
aatttcctttcaaaagaaatttatttaaggataaaaaaatacagtcgattcagatattaagaccatgttaataatggtgctgagggtgtgtaaatatgacacaaatcatgaccgtggtacagaaatgaatgacagagaccaggcgcagtggctcatgcctgtaatcccagcactttgggaggctgaggcgggaggatcacttgaggtcaggagcccaaaaccagcctggccaacatggtgaaaccccatctctattaacaatacaaaaattagctgagtgtggtggcgcacacttgtaatcccagctactcaggaggctgaagcaagagaattgcttgaactcacgaggcggaggttgcagtgagctgagatcgtgccactgcactataacctggg

SEQ ID NO: 5902 - DNA, 520 bp, Homo sapiens
  misc_feature (1)...(520): n = A,T,C or G
cccacgcgtncgtgattgcaaatttaatccatttacacttaatataattattgacatgcaagaacttactgttgccattttattactatttcctttgttctcttctaccaatcttgctgtcttcctttgtgatttgtcttcctttgtgatttgtcttcctttgtgatttgtcttcctttgtgatttgttgaatttttatagtgttatgctttgattcctttctttttatctttttggtatcttctagaagttttttcttggtggttaccatggagtttatgtgtaacattttagggttataacagtctattttaagctaataacagcttaacttcaattgcatacaaaatgtctacactctcactctgcatccccaccatattttatgctatttatgtcacaacttatatcttttaattntataaatccattaacaaattggtgtagctcatagtactttttgatatttttgggctttatctnttatgctagaancacaagttatagtcttttgaaaaaa

SEQ ID NO: 5903 - DNA, 509 bp, Homo sapiens
  misc_feature (1)...(509): n = A,T,C or G
agctgtcttattgactggtcaagctacgncnnggncngtaannngtgaggcgacccacgcgggcgcgctagcccgctgcgatgttgcgcgctgccgccttcttttggccccgcctgggccgccgcctcttgtcaggcgccgccttccatgccgtgcctgcccccaaccaccagcccgaggtcttctgcaaccagattttcataaacaatgaatggcacgatgccgtcagcaggaaaacattccccaccgtcaatccgtccactggagaggtcatctgtcaggtagctgaaggggacaaggaagatgtggacaaggcagtgaaggccgcccgggccgccttccagctgggctcaccttggcgccgcatggacgcatcacacaggggccggctgctgaaccgcctggccgatctgatcgagcgggaccggacctacctggcggccttggagaccctggacaatggcaagccctatgtcatcttctaccttgtggatttggacatggtcctc

SEQ ID NO: 5904 - DNA, 466 bp, Homo sapiens
  misc_feature (1)...(466): n = A,T,C or G
tctgtggagtcaaggtccccctctcccaggcaggctctctgagggcattctgtagtcccaggcccactggaaaaatgaatctatattttggttcctggaccgaagttcagtcgcagccttctgtggccacagaaagacagcttgtgctgcttgcacaactgagctgctggtgtgtaccccttagcagggtgtctggggacttacgcctttggaattgctcttcattcagaagaggaacacaaaggaagccacccaggaaggaagcacagagctgggggctctggaaacgccctgtgtctctggctacagcaagaccagcccaggagcccaccagcacctgcctctcagctacttgctgaccatttcctgcttctcaagctgcagagaagcttttcattcccacccccacccggaacctgcccttgcctaacatttcccctctattggaacatctctgacttctctn

SEQ ID NO: 5905 - DNA, 410 bp, Homo sapiens
cccacgcgtccgcggacgcgtgggctagaaaattctctcatactgtcatgccttcccacttagaagtgcccatgccctgctcagctgtgactctactgacctcaggacctcactggacaaggcatgtggtaacccttgcaggagacctgataatggtgaaatgattctattgttatattatttatggagcaacaactttgtacagagaacgagctgcttggctttttcttccaatgccgaggatgctgctgatgctgccatgtaacagcatacctttgggtgtcctcaaggatagaacttcccctctgaataatggaaattagaacaatgaacttcacagggatataaatattaatgactgatgtgaagaaaatattccattgtttattccctaccacatcatttccata

SEQ ID NO: 5906 - DNA, 387 bp, Homo sapiens
gtttattaagctcctggcttctttctagacctcagcggttctggctgccagcctgggcagcctgggaagcctgggaggacggtggcttgccggtctgtcgtgaggcagtgcggacggggaccctctgggattctgctggatctgccccgggggttacctttgggggctgggaccccagtcgaggggacacaaccgtccctggcagtggttggttctgcttctccctgcagaaaagcagcattttcggaagctgaagaataagctagcccagccacaccaccttgttgtgtgaccttgggcaggtggctctgtctctctgagcctctgtttctctctgagctgagcagccaccatggctgacggtcagatgcccttctcctgccactt

SEQ ID NO: 5907 - DNA, 408 bp, Homo sapiens
aacatggctccgcggctgtgcagcatctctgtgacggcgcggcggctgctggggggcccggggcctcgcgctggggacgttgcgtctgcagctgcggcgcgtttctattccaaggacaatgaaggcagctggttccgctccctctttgttcacaaagtggatccccggaaggatgcccactccaccctgctgtccaagaaggaaaccagcaacctctataagatccagtttcacaatgtaaagccagatgctgctgtccaggagaaaccagctgctcctcgagttcagcttctggaatgagccacagcccagaatgggtcccaacatctatgagctgaggacatacaagctcaagccaggaaccatgatcgagtgggggaacaactgggctcgggccatcaagtaccg

SEQ ID NO: 5908 - DNA, 432 bp, Homo sapiens
gacttggagcttgagaagtgggctttggccaggccctggcactgaccacctaggaacagtcatcttttccaagcttctggttcctcttctgtaaggtgcgagtccctaaccacctttccaaagacagcatcctgtgcaagctgtcacgggagggggaagggccctggtgaccctcagggcctctagagcctgtgggcaagagctggccctccatgccaaggtgccaggcctaaccctggtgaagagtgacccaactgggcgactgcctgaggcctcagaggaggacaaggagaaggtgcacagcagcagggtgcacaccttgccctggcctctcctagggtagaggacggtgtgagcccccagaggctgtcatccagcctgagaggtttcttggctcttcctcccatgcccagggttctcccagactgcaga

SEQ ID NO: 5909 - DNA, 464 bp, Homo sapiens
  misc_feature (1)...(464): n = A,T,C or G
tggagtttcactcttgttgcccaagctggagtgcaatggcgcgatctcggctcaccacaacatccgcctcctgggttcaagcgattctcctgcctcagcctcctgagtagctgggaatacaggcatgcgccactacacctggctaatttttgtatttttagttgagatggggtttttccacgttggtcaggctggtctcgaactcctgacctcaggtgatccgtccacctcagcctcccaaagagctgggattacaggtgtgagctaccgcgcctggccatgatgatattattaaacaccattattcacatttcaaataataacaatactttttgtttttcaaaaataaaatgcaatgttatataaagctataaactaagttctttatgatatttgagcaacaactcaggaatataacatataagggagatgtaattttaaatttccactacacttattatctn

SEQ ID NO: 5910 - DNA, 421 bp, Homo sapiens
  misc_feature (1)...(421): n = A,T,C or G
ggtttattaagctcctggctccgctctagacctcagcggttctggctgccagcctgggcagcctgggaagcctgggaggacggtggcttgccggtctgtcgtgaggcagtgcggacggggaccctctgggattctgctggatctgccccgggggttacctttgggggctgggaccccagtcgaggggacacaaccgtccctggcagtggttggttctgcttctccctgcagaaaagcagcattttcggaagctgaagaataagctagcccagccacaccaccttgttgtgtgaccttgggcaggtggttctgtctctctgagcctctgtttctctctgagctgagcagccaccatggctgacggtcagatgcccttctcctgccactacccaagccgcctgcgccgagaccccttccgggn

SEQ ID NO: 5911 - DNA, 472 bp, Homo sapiens
  misc_feature (1)...(472): n = A,T,C or G
aggcccaatgatcccttcgttgagcccgtaanacccggcncgacccacgcgtccgagaccagacaggatggtgaggatggctgacttcatgctgcggaaactgaaggcaataatgttggcttttggaaggggcaagacgagaaactctgaagaaagctctgactctcaggaagttatctggaaagatacctggatgtttactgccttgggacactgtgggatctccatgtttggactatgggacagagaattgaccctaactaactatgaactatttatttcctcctcccctacccctagttaagtgccacaaagactgtgttatgtagtcagtacttttctcatgtatctttctctagaccatttatatacgggtgaaatgaaagcttttttgcatgtacttgatactcagtctgtaaactcagacttcgctttttttgtgagactatcctttcaatatttttataaactt

SEQ ID NO: 5912 - DNA, 539 bp, Homo sapiens
  misc_feature (1)...(539): n = A,T,C or G
ggatgccagncnnccncaattgacgcccgcatggaacggctcgtaanacccggcncgacccacgcgtccggcattaggagacatacctaatgtaaatgacgagttagtgggtgcagcacaccaacatggcacatgtatacatacgtaacaacctgcacgttgtgcacatgtaccctagaacttaaagtataataaaaatatatatatatataaaaagaaaaatattttccagagcacaagagatagatcatctgaagcctaaaatcagtgacaaatacctttaacaggtgggacttcaggctttttaggaggagtcgagggcactttcttttcaaggacaacttctttgggagcctctggcacttaaaagatattagtaaagttacatgtggagctatggagactactagcaaaatatacagcagaggaattggatcttctgaagcttaaggtcaaatgacaagtacctgtaacaggtggaacttctggctttataggaggcaccagtgttttcttttctggcacaatntcttgtggga

SEQ ID NO: 5913 - DNA, 420 bp, Homo sapiens
tagggtttcaccgtgttggccagactggtctcaaactcctgaccttaggtgatctgcccacctcggcctcccagggtgctgggcttacaggcatgagccactgtgcttggcctacattttttattcttgtttgcatattagaaaaagaactttaataattaaagaaggaacagttttacaaagacttttcatttcaagctcattatcctttaaaagagaagacgattatattttcttctttttttttttttttggggaaaaccttatttccttttcaactttggccaccggaaccttagggttaaaacccaaatattggtttccattgggaagggagggtggaatttttggaataaaaaaaggaattggttaatttttgttttcggggtttaacccttaaaaagaacccccgggtgtcct

SEQ ID NO: 5914 - DNA, 438 bp, Homo sapiens
  misc_feature (1)...(438): n = A,T,C or G
gcgcggacgcgtgggtgcagcgccgcccaggccgactggcgttataacttgcccctgcgcggncgcgacgaggcgcgctgggtcgcgggccacatggccgaggggctgaagaagatgcagagcagcctgaagctggtggactgtatcatcgagggccacgatgcccggatcccactttcaggccgcaaccctctgtttcaggaaacgcttgggcttaagcctcacttgctggacctcaacaagatggacttggcggatcttacagagcagcagaaaattatgcaacacttagaaagagaaggcctaaaaaatgtcatttttaccaactgtgtaaaggatgaaaatgtctagcagatcatcccgatggtcactgaactgattgggagaagccaccgctcccaccgaaaagagaacctggagtactgtatcatggtcatn

SEQ ID NO: 5915 - DNA, 408 bp, Homo sapiens
  misc_feature (1)...(408): n = A,T,C or G
ctttattttcctccagctttgatactttccccactcatactttgttttacagtttttgaatctgaaaatttaaaaatagatcacactgatgagcttgtgaacttttaaaattagtatgaattgtgagtagtagagtgcattgttgctccctggccctctgaacctttattcttacatcctttttatttctttttcttttttttctttggagacatggtctgtgtcaccatgaggctgtttccttgaggctggagagcagtgatgctatcatggctcactgcagcctcgacctcctgggctcaagatcctcccacctcagcctcctgagtagtagggactacaaatgcatgccaccacacccggcaaattttttgtgttttttgtagagatggngtttctccatgttgc

SEQ ID NO: 5916 - DNA, 465 bp, Homo sapiens
  misc_feature (1)...(465): n = A,T,C or G
tgcaacttcgggtaagcgacacggncccaccgtgcctggcctgttttttcttattacatatttttgttctataattaatttttccagatttgcttggtttctttgttttgcttggttttgggtttttttgggggttttgtttgtttgtttgtttttttaaagtaacttcgcgttacttgccaaatttttcaggattgggattttatatttttgaacatagtaagcaggtatatgaatagtttgctagtatctaggggagctttgttttgttccccgttggttactaatacttaaggttcatctttttccagtgtctgggcttcagatgttcagaagtttaatcacattccacttgtggactgcttttcttcttgttcatctttcctggtaggatatcacttttttggtttcaagcccaaaggagggggtcatttactcaagcttcttggcttggcttggcttgcn

SEQ ID NO: 5917 - DNA, 50 bp, Homo sapiens
cccacgcgtgcgcccacgcgtccgcccacgcgtccggttctagatcgcga

SEQ ID NO: 5918 - DNA, 463 bp, Homo sapiens
  misc_feature (1)...(463): n = A,T,C or G
agtttggtttattacggctttgtcaaaccaagctaaacaaatttggcatgggatctgtacagtctgttgtgcagtgattgtgtaacaccagcttcttgtccagttctactgtacaagtactgatagaccaaggtttaagtatgtttacgttttgacattacatgatattttgtagtaataataatgccaaaatattcttaaacgccttctgtatagaaactttggtaaagcaaggccaggtgcggtggctcacacctgtaatcccagcactttgggaggccaaagcaggtggatcacttgagatcaggagttcaagaccagcctgaccaacatggtgaaaccctctctctactaaaaatacaaaattagagccaggcgcagnagctcacgcctataatcccagcactttgggaagccgaggcgggtggatcacctgaggtcaggagttcgagaccagcctagc

SEQ ID NO: 5919 - DNA, 484 bp, Homo sapiens
caccctttttatccaggtcattgggttagctgacagggagccaagattgaaatctaagatctttgccctgcaggattcagggctaatggacatcctgagatgggaggaaggagctttcattacagccttgtgggtcttgactcaccagtccctgcaggagccagtggagttcctgccatggtgtccctgaggaggtgtagcttctcacctaccctgccgccaagcccctcagtctgggtcttcttttcccatgcagcctccagcccaggctgcatactatggctgtggcccagtgacacccacccagcctgcccccaggtggacatcccagccacctagaccttcctgtgagtgacccagccccttccactctcagactggcctattggtgtgggccccgtgaggcagtcataacacagggatgaaacctggctctgccattcccaaggtgggtgacttcacttctctgagcctcagtttcctc

SEQ ID NO: 5920 - DNA, 460 bp, Homo sapiens
cacgcgtccggtgaatagacatatcagtgaacagttaactatattaaatttttatcatttactttttttaagattcagacctcagttatataaatttcagtttaatatcaaccaaaaaattaaaattttaatctaacccttatgtgtataaattggtgtcccataccagcttttaatggtggacctatagaatccagtacttttaatggtgggaatttacagtagaagcatcctttgctgagttatacattcctttatcaatctcttttgatacaacatttaaaacaagtagcttcaagaaaccactggtgttttgaggatagtatttctaaatagcattcaggaacagagtattattgcacagatctgaagatcaaaaaaaagctcaaggaaatacagattggaagtgctgatgagttatatttattgaaaacccaacttttaaggaagtgctaggatg

SEQ ID NO: 5921 - DNA, 483 bp, Homo sapiens
  misc_feature (1)...(483): n = A,T,C or G
nttgaaaccctgngaccgatgataaccntcgggacgacccacgcgtccgtgattttttcccatccccatgaatcactatccattggggtgctagggaaggatgatatatggagaagtgatatttcctgagcactcattatgtgccaggaaaacactttctgtgctttgttccacaaaatacttagtctccctgtaagatggcagctaatgtttcctttttaaggatgaggaaactgaggcttgcagaggtcccaggatgccacagctaatagcagcacagaagatgcagacgagggctcaccttcccacctatccagttagtactctcccagcccaagtgcaggacacagccagctgttctccttgcctctccctgcagagagggcaatgcctgcagggcacctccttagctaccgatttgttatggggattctgtgcccactgtgagcacagcatgagtgtatttccaagcctgatggaagg

SEQ ID NO: 5922 - DNA, 487 bp, Homo sapiens
  misc_feature (1)...(487): n = A,T,C or G
acttctcaggacgacgaatcttctcaatgggggggcggctgagctccagccaccccgcagtcactttctttgtaacaacttccgttgctgccatcgtaaactgacacagtgtttataacgtgtacatacattaacttattacctcattttgttatttttcgaaacaaagccctgtggaagaaaatggaaaacttgaagaagcattaaagtcattctgttaagctgcgtaaaaaaaaaaaaaaaaaaaaaaaaaaaaaaaaaaaaaaaaaaaaaaaaaaataaaanngggggggggtttttttaaaaaattcttgggggggcccaaatttaacgggggaaaaaaaaaaaattttttttttttttggggggggtttaaaaaacccccggggggtttttggaaaaaaaccctttttttgggggggggaaatttgggcccccccccccccaaaaatttttcggcttggggggaaaaaaaaattttttgggg

SEQ ID NO: 5923 - DNA, 414 bp, Homo sapiens
  misc_feature (1)...(414): n = A,T,C or G
cgttgaaggacaccagctgcggaatttgcggctttggcagctgtttgttcccaccgagctgtgctttaggaagctggccagccgggcctcctttaggtgcgctgcagcctttttcaaagcgagtgaatgtggcccggcccctacagttcgccaggcccgctgtaaaagggttagatttcagtctatagacgatcagtgggaaggcctttcctaggaggtaaccagaacagagagctgtaaactccgtgaatgcaagaggctgcttctgttacctgagtggntctcactcatctttgccttccttacctcgtgatctcaccattccagattgaaatcatggcaggtccagaaagtgatgcgcaataccagttcactggtattaaaaaatatttcaactcttatactctcacaggg

SEQ ID NO: 5924 - DNA, 444 bp, Homo sapiens
  misc_feature (1)...(444): n = A,T,C or G
tttttaaaacaatgagatagctttacatttcccctttgtttgaatgagaaaatggatcttgggttgctatgctagaacacttgtagattgctgggtcctttgtaagggggccatggacacaccacactttctttcaatccttacatttgaagcattgatattcttcaaaaccttcttgttacatgtgcgcaatagaaatttctaatgttcatgacttttatctttcctgtccatcaattcactggttgtaaatgcttcctgagagctgtctaggtctgtatcccagattgttgcttaatgacatctgacagatgcattgttttctgaaatcagcttaagacaccaattgtggcaactggaaactcattacctgctgcattggatcaactatggaagttggagcagaggtgggcggaggtcacctaaccaatcaatggaaggcan

SEQ ID NO: 5925 - DNA, 408 bp, Homo sapiens
cggggaggtaactgcataaaggcccgcttggccctggagtccacgcggattttcgaagctggggctggcaagaggccgctggacaccacgctccagtcgtcagcccacttcctagctgaacagcgcgaggcggcggcagcgagccgggtcccaccatggccgcgaattattccagtaccagtacccggagagaacatgtcaaagttaaaaccagctcccagccaggcttcctggaacggctgagcgagacctcgggtgggatgtttgtggggctcatggccttcctgctctccttctacctaattttcaccaatgagggccgcgcattgaagacggcaacctcattggctgaggggctctcgcttgtggtgtctcccgacagcatccacagtgtggctccggagaatg

SEQ ID NO: 5926 - DNA, 399 bp, Homo sapiens
cccacgcgtccgcccacgcgtccggtgcctagcgctgagattttgagttattctttactaagagatggtttttcttctctgttaagcttttaagtaattttttgttgattttgtttttcgagtcacttaatcacacgtgtaaatattttccctccaatatagaaaaggcgagtcactataggcgacactggtctcgatcccattccagcagtactttcggtacaggtctcggagacgacaggtcagaaatctccgagatttaccctagcttttcatgctgcagtgaggtaacaagaccgtctgatgaaggaggtatcaaacattcactgcttacaaagaaaatcgattcattttttaagtgtgtcacaagagtgtctttaaaattcttttcacttttga

SEQ ID NO: 5927 - DNA, 429 bp, Homo sapiens
agaacgcggcgctcgccgccgaagtgaaccggctcaagggccgcgagccgacgcgagtggccgagctctacgaggaggagctgcgggagctgcggcgccaggtggaggtgctcactaaccagcgcgcgcgcgtcgacgtcgagcgcgacaacctgctcgacgacctgcagcggctcaaggccaagctgcaggaggagattcagttgaaggaagaagcagagaacaatttggctgccttccgagcggacgtggatgcagctactctagctcgcattgacctggagcgcagaattgaatctctcaacgaggagatcgcgttccttaagaaagtgcatgaagaggagatccgtgagttgcaggctcagcttcaggaacagcaggtccaggtggagatggacatgtctaagccagacctcactgccggcctca

SEQ ID NO: 5928 - DNA, 481 bp, Homo sapiens
  misc_feature (1)...(481): n = A,T,C or G
attgatncccctnngttcgatcnccattggnaccggccacgaaatcccggggcgaaccacgcgtccgtgcctcctaccccagggcctgccatgctctcggggccatgctgtccaaaggagccctgaaccctgctgacatcaccgtcctgttcaagatgttcacaagcatggaccctcctccggttgaacttgtaagttgcttctcaagaatccccaatgtcagctggtaaggtgactttggaaagtctgtgcttgtctgattgtctgaaggctgtgaatgcaaatccatcattgtcctggtcctttctcagtcacactctctgcctggagcctgttgggcccctgctgtgtagggaaccctgaggggaggtgggtgagcagtgccctcacgcctgccatcccgaactgggcatatgcttctcctcagatccgcgttccagccttcctggacctgttcatgcagtcactctttaaaccaggg

SEQ ID NO: 5929 - DNA, 424 bp, Homo sapiens
  misc_feature (1)...(424): n = A,T,C or G
gaaaactgagacctcctggtcacccgccgccgggccttttagaaactcccacaagctctgccttccctccctggtcctcttcagaccccctcttagttcttcgcggctaacggctcgcgctcggggccgggtgtggagctggaacagagggctggcaaggcgcgcatgcgcaccgagggtggagccgctgagcacagaaccggaaacttagagacaaagttcggagccccgcccccgccgcgcgccgttgagttgtctggccccgccgacccacggnccacgacccaccgacccacgaatcggcccggccgtcgcgtgcaccatgtctggctcctccagcgtcgccgctatgaagaaagtggttcaacagctccggctggaggccggactcaaccgcgtaaaagtttcccaggcagctgcagac

SEQ ID NO: 5930 - DNA, 408 bp, Homo sapiens
  misc_feature (1)...(408): n = A,T,C or G
gatttaaaagttgatctaatattaataaaggctcactttgttttcaaaatttgaagtaattcacatacttatagcctaaaaaaatcggcaggaattacaaaatttcaaaactggcacattgtaaactgcatatgcatttgccaggtagtggtgccacttgaaatggtgaacagacacactgttatcctttgtcagtatcctgtaaagcccaggattctttaccagcaccatacagcgattttggtgactattttaacattcacactgaggccaggggtggtgagtcatgcctgtaatcctagcactttgggaggccaaggtgggaggatcatttgagctcaggagttcaagattagcctgggtaacatagtgagaccctgtctctattaaaaaataataataaaaatn

SEQ ID NO: 5931 - DNA, 417 bp, Homo sapiens
gcgcaaaaaagaaaaaaaggaaaaagattattatgagagttacttaaaggtaacatcacatactgaatgtcttctataatcctatatttattaatgcattacaactctgtagattgttagttactaggccagtagctaggaattggtataaatttaatgcaccttctatcctgaataactagcatggaaaagtgaatatatgtgtgagcagatatggctataaagacctatagcttttgcactttatgcatatataatcaatcctttctagttcagtgaattgaccccatccacaggctgattcatctttgtgttaaggggcaaatgaaacggtatattatttctttgcagtctcctctcagtcattcatcaatgtggccagcttatctactcccaattatgttggtgatacatctc

SEQ ID NO: 5932 - DNA, 481 bp, Homo sapiens
  misc_feature (1)...(481): n = A,T,C or G
ggaaaantttgacncctgtggatcgatcgccattgccgggtcgacccacgcgtgcggaaacatttgaagtagaataaaattaatcaaaaccacattttttcaatggcttggcataattgccatgctttttgaaatggcctgattactaacacggagcaaagacatgattttggctttgctcgatcattatgttcttgaccttttaaaatctaaaattctggctaaaggattttcaaagggagtattatttagatggctccctcgggtttccaaggcaatacaagaattttgataggcagaaaaatgcatgctacataacacattgctcttatctgatttgccttaacactgaaagattgaagattgcaaatctagtctctcaatttagagtaaattgacaaaaaatttatttcccagccacacaaatcatcatataaaactaatgggtaaaagatgccattagctgccaaaaacttgtatg

SEQ ID NO: 5933 - DNA, 384 bp, Homo sapiens
tctgcttgagcctcctggccacgtgcgaggaggatgtggacctgttcaaagaggatatctacacgctactgggactcatgatgaacctgtggcttcaggctcccttcgtctctgaggtttgggctgaggaggcgaacataaggggcctgtctttactaaacagcctggatggaggaatcctgacaagagctgctggtgttctgagccggaccctttcttcctctctgaaaactgatgaggaggcctgtgcgagcatgagtggaaagaaaatgatgaaattcctgaagacaggaggtgagactgcatcacgttatgctataaagatactagctatctgcacgaatagttatcatgaagctcgggaagaagtaataagactggata

SEQ ID NO: 5934 - DNA, 414 bp, Homo sapiens
  misc_feature (1)...(414): n = A,T,C or G
cccacgcgtncgtttactcttttgaggtgaatataatttatattacaatgtaaaagcttctttaatactaagtatttttcaggtcttcaccaagtatcaaagtaataacacaaatgaagtgtcattattcaaaatagtccactgactcctcacatctgttatcttattataaagaactatttgtagtaactatcagaatctacattctaaaacagaaattgtattttttctatgccacattaacatcttttaaagttgatgagaatcaagtatggaaaagtaaggccatactcttacataataaaattccttttaagtaatttttttcaaagaatcacagaattctagtacatgtaggtaaatcataaatctgttctaagacatatgatcaacagatgagaactggtggttaat

SEQ ID NO: 5935 - DNA, 452 bp, Homo sapiens
aaaaaagatagaagaatcgaaagaggaattttagttgggatattatgatgatttccctgtggcagttgaagtaattgttggtggtgttcggatggtttacccttcagcatttgttttgatctctcagaatgacatcccggttcctcagagtgttgccagtgctggaggccacattgcagttgggcagcaagggcttggtagtgtgaaggacccaagtaactgtgggatgcctctgacccctcccacctctccagaacaggctatcctaggtgagagtggaggtatgcagagtgctgccagtcacctggtttcccaagatggagggatgataacgatgcacagtccaaagagatcggggaagattcctccaaaactccacaatcatatggtccatcgagtctggaaggaatgcatcctcaacagaacccagtccaagaggagccaaatgtctc

SEQ ID NO: 5936 - DNA, 442 bp, Homo sapiens
  misc_feature (1)...(442): n = A,T,C or G
cccacgcgtccggtaaaatcaagagcaaagcatgcttcctgcatttctcacaccctgcaatgcccaaagaaataatctggagctgagctacaccagtgggctctttttcagtcctagaataaagagaggggcctttagtggatatagccctttctagggtcatctctccttccactcttgaactcaggaagttccagtagagtgctaagaggttcaggctttatcataccttggcacctagggctgaaacacctggagaccagcagaggctacatagggccaatctcataattctttctcctcctagaggctgcagtcttctgtctgtggtcgcggttcattttcccagtattccccagagtaacttcagtcctctggctcttctgacttttggtaaggaggcttgccaagctgtcttcattcctgaatctcattacctacn

SEQ ID NO: 5937 - DNA, 408 bp, Homo sapiens
ggagaggggcgggcactgtatcttgcgaacgacagaaatggcaaccaactgtgcttctgcattacagaccaccaaccaatgggtggtggcagcgctgattctgttcctccaataggaaaggggcagaaggagaggcgttacttcctggagacttcaggtgtggtagccggcgccgcgcccatatccggacggggatctgagctggcaggatgaatgtgggggtggcacacagcgaagtaaaccccaacacccgagtgatgaatagccgaggcatctggctggcctacatcatcttggtaggattgctgcatatggttctactcagcatccccttcttcagcattcctgttgtctggaccctgaccaacgtcatccataacctggctacgtatgtcttccttcatacgg

SEQ ID NO: 5938 - DNA, 490 bp, Homo sapiens
  misc_feature (1)...(490): n = A,T,C or G
aggnttnnnnaactggattcgtgtgaccgncnncgatnnccggncganccacgcgtcccgggaagctgctggagggagaggagagccggatcaatctccccatccagacctactctgccctcaacttccgagaaaccagccctgagcaaaggggttctgaggtccataccaagaagacggtgatgatcaagaccatcgagacacgggatggggaggtcgtcagtgaggccacacagcagcagcatgaagtgctctaaagacagagaccctctgccaccagagaccgtcctcacccctgtcctcactgctccctgaagccagccttcttccatcccaggacaccacacccagcctcagtcctcccctcacagcctctgacccctcctcactggccatccctcgtggtccccaacagcgacatagcccatccctgcctggtcacagggcatgccccggccacctctgcggaccccagctgtgagccttggcn

SEQ ID NO: 5939 - DNA, 380 bp, Homo sapiens
ccagctaagacctgaatgccatcaccctccccagggctctgcagttttctcgtggtgaacccttgatggatttgttgttgcttgagaaatggcgatgatcgaattggggtttggaagacagaattttcatccattaaagaggaagagttcattgctgttgaaactcatagctgttgtctttgctgtgcttctattttgtgaatttttaatctattacttagcgatctttcagtgtaattggcctgaagtgaaaaccacagcctctgatggtgaacagaccacacgtgagcctgtgctcaaagccatgtttttggctgacacccatttgcttggggaattcctaggccactggctggacaaattacgaaggtaagaggtaa

SEQ ID NO: 5940 - DNA, 403 bp, Homo sapiens
tgcatcatgatttcccaatgccgggagaatgtttaattgggtaattacccaggttcagttctctgaacttgcttaattccctggataacaaaaaaaaggaaagaggggtaacttaccagtcagatatctactcccttttttaatgttatatagacctggatgcttagcttgtttgtgcaaccctagtcaatttgcacagcttcgtttgtaccattttttttggaagaggcaaaataagttctgttctcaaaatagagtcaccacaggtggaaacataacacttgatatatttggcattaaactcgggacaaaagaagacacaaactttatcttgtggtttgggtcctccaatcctcataaaagtgtggtttcacctgttacctcataaaggtgccattgctgg

SEQ ID NO: 5941 - DNA, 427 bp, Homo sapiens
  misc_feature (1)...(427): n = A,T,C or G
gagtcggagaagaacgctccactgactgatannnnnttttgtcgaccatggcgcccggagtggcccgcgggccgacgccgtactggaggttgcgcctcggtggcgccgcgctgctcctgctgctcataccggcggccgccgcgcaggagcctcccggagctgcttgttctcagaacacaaacaaaacctgtgaagagtgcctgaagaacgtctcctgtctttggtgcaacactaacaaagcttgtctggactacccagttacaagcgtcttgccaccggcttccctttgtaaattgagctctgcacgctggggagtttgttgggtgaactttgaggcgctgatcatcaccatgtcggtagtcgggggaaccctcctcctgggcattgccatctgctgctgctgctgctgcaggaggaagaggagccc

SEQ ID NO: 5942 - DNA, 420 bp, Homo sapiens
acgctgaatatactgttgtggcaaggagcggccctggttaagacagctgtaaaggggagctgacagtaaccctactcccacctgcaacagatatcaccttaagacccatgttcaaaaggttactggcaaatgctgaatgccaacactgccaaagtgggtgctttgagatcagagagtctggcctccccccaccaacattaaaaagggagaaagatggtctgccactgtccctggggcctaacattgaaattatccatgaaggctaggatattatgctctgcacatcatggacactttgcctgaagacacgggttattatagagtcacagccactaacacagctgggtccaccagctgccaggctcacctacaagtggaacgcctgaggtacaagaaacaggaattcaagagtaaggaggg

SEQ ID NO: 5943 - DNA, 429 bp, Homo sapiens
  misc_feature (1)...(429): n = A,T,C or G
cggacgcgtgggctctgttaccagctgcagaaattgacaggtgatgtggaagaattagaaattcaagaaaaacctgctctgaaagtgttcaaaaatattactgtaatacaagaaccaggcatggtggtattagaatggctggcaaacccttctaatgatatgtatgcagatacagtaacaactgtgatattggaagttcagtcaaatcccaaaataagaaaaggtgcagtacagaaggtttctaaaaaattagaaatgcacgtttacagcaagaggttggagatcatgctccaggacatatttggagaagactgtgtaagtgtaaaggatgactctattcttagcgtcacagnggacgggaaaactgccaaccttaacttggagacacggactgtagaatgtgaagagggaagtgaagacaatgattcn

SEQ ID NO: 5944 - DNA, 519 bp, Homo sapiens
  misc_feature (1)...(519): n = A,T,C or G
ttctagatcgcgatctagaactagcacacacacacacacacacacacgcacaatcttacagacccatcccctgcctgccagctccacgagccagagagagacagagcgcggacgccgcaggaggcagcgtctggaccccagctgcccaggagaggtgaggggctagatggggcctgaggacactgtgccagaaactgtggctttggccacgccgaaagagagaggtacaacgtgaaggtgggggctggatcaacccagttcaacttacagatagggggttgggggtatagaggacaccacctgtctctccctctctcattctctccccgtgacccccaaatgaggtgaggccgtgtggctcccaggggagcatgtatgtgtctgtgtctgtgtctgtgtatagcacctgcgtctggctcaagaggcagagagcatcatatacctgcaagccgcactcttctgtntgggaacagcggagagagaccgtcttgacagaaaaacccagggccgttcagttgg

SEQ ID NO: 5945 - DNA, 430 bp, Homo sapiens
  misc_feature (1)...(430): n = A,T,C or G
agcaggagacgtagaagatgatgtgggtcagtgttagaagaaggcagtctcggccaggcatggtggctcatgcctgcaatcccagcactttgggaggccgaggcgggctgatcacctgaagtcaagagttcgagaccagcctggccaacatggcgaaaccccgtctctactaaaaatacaaaaattagccggacctggtggcacatgcctgtaatcccagccacccgggaggttgaggcaggggaatcgctggaacctgggaggcagaggttgtagtgagccgagatcacaccagtgcactccagcctgggtgacagagggagacttcgtctcaaaagaagaagaagaagaaggcaatctcaaaagccagcgtacatgttaggcagcagctctcatgttggtgaatttcagttttgtgccctaagtctgn

SEQ ID NO: 5946 - DNA, 407 bp, Homo sapiens
  misc_feature (1)...(407): n = A,T,C or G
gagtgagtattgtatctgagttccctgagggatttcattgatctgtcccggtagaccgccactggtctcagagacatctgaggcttcttcctgtggcagagccactcactgcccctcttcttctgagtgacatgaccaaaggcgtgacttgcaggcactgcaaaaactgctactctgtgcccacttaacataaacgtctactgagcaactagtatgtgcccagcattaaagagacacacagatgaggctaacagcatccccaggaagttattaatgtaaccactccatttccttaaatgtttatctggggagccagaagccagcttttctgatgaatgggattttctgagatttgtcctgtcttctccctctgtggaagaaactgagactatatctggtacgtttcn

SEQ ID NO: 5947 - DNA, 408 bp, Homo sapiens
cccacgcgtccggggagctctccgcccccttggagttgaaccaggggtgtgtatgaaggggggtgacaaggtccccctggggaggggaccaaccttgtctggtggatgagaaggcgtatttatttttcactgtacagtatttaaaaagagaataaaaaaatccaaatggccgaaaaaaaaaaaaaaaaaaaaaaaaaaaaaaaaaaaaaaaaaaaaaaaaaaaaaatggggggggggccttttttaaaattttttgggggggcccaaatttacccgggggtggaaaaaattttttttttttttttaggggggcaaattaaaaccccctgggggttttttggaaaaacccctttttttggggggggggcttttggggcccccccccccccaaaatttttaccctttggg

SEQ ID NO: 5948 - DNA, 400 bp, Homo sapiens
  misc_feature (1)...(400): n = A,T,C or G
tacaccaacagctaatgaagtctcttttacttttaataaacccttatttggctttggcatatttacatggtagaggcctagaattttataaataaaattttgaagaatagaaatgtattttttcacgatttaaaaaccacctgtatggtttactctggagttgacctgttccactcatccttctccccagttcatttgtttcgtttcaattccactttcccttatagctatcttcaaagcagtgtctatgggacagcattgccaagagccctgactgggcctggcttggtaactcactcctgtaatcccacctgcccctagaagtgcagatatactagaaaatacagctgtctttgttccagtgaatatgtataaggggtgacatgccttggtggaaagn

SEQ ID NO: 5949 - DNA, 464 bp, Homo sapiens
  misc_feature (1)...(464): n = A,T,C or G
gtgcgtgtccanaccncttgatcgcctcggtagataccccctgcaagtaccgcgncgacccacgcgtccgcttaatgagacattcttttttttataagactatttttctactcagtttcagaacactaatctgattttcactctgatttttaacgtttctttaaatatttataatgcagcttctttcaaaatattttcatgaaaaactacttttattataccattatgtgcatgttattggtagcaggcatagtttactatttagtactgaaacatgctcttttacctaacagtaaacaagtatgttttgatatatatctgttaatatgcttatagtggtaagaaatggacttgaggtcccaggagatttcattttattcaccctggtcagatacaataaaggctatgagtataaatacataacttcctaaccaggtgtagggcatgttcatgaatatcaaatn

SEQ ID NO: 5950 - DNA, 369 bp, Homo sapiens
ctcgcttccctcccgcggtgaccagggcccgagccgagagtagcagttgtagctacccgcccagaaactagacacaatgtgcgacgaagacgagaccaccgccctcgtgtgcgacaatggctccggcctggtgaaagccggcttcgccggggatgacgcccctagggccgtgttcccgtccatcgtgggccgcccccgacaccagggcgtcatggtcggtatgggtcagaaagattcctacgtgggcgacgaggctcagagcaagagaggtatcctgaccctgaagtaccctatcgagcacggcatcatcaccaactgggatgacatggagaagatctggcaccacaccttctacaacgagcttcgcgg

SEQ ID NO: 5951 - DNA, 429 bp, Homo sapiens
gtatctcattatggttttaatttgaattcccttaatacgtaatgatgttgggcttcttttcatgtatttatttgccatctgtgtatctttttcatgaaatgtttgttcagatcttttgcctatttttattggattgtgtgttttcttattatggtatttaacttgtcactgttaggatacatttcaaaaatcctgaccaagttctaacagtagaatgtgtcagtaaatgctcagtttaagtaaaatgtcacattgcaaactaactaccagggtgtggcccagcaatcttaagtactttccctggaagtttctgtaatatgcagaacactttcaattgaaataaatgctgttaaggaggtcaactcaacctttccaaatttttattaattaaaagcagttgttggagagttgtagaaaagtattttttca

SEQ ID NO: 5952 - DNA, 386 bp, Homo sapiens
aaacaattgctggtttaaaagcgttattgcgaacagcaatttatactaaaatttatatttgctccttgaaaccaatatatgtcgagagtgccccactccctctcctacctccccaccttgagctctcaagggctttggaaccttttgattttatgacacttttaacttagcaaggcaactacaaggcatgtctaggccacagtaaataagggtaagagtaatgcatttaatcaatgggcatgaatgaagtaatgaaactgtttcagctctggccacctggtgtgctcccaggatactgacatacagaaaggccattttggtacagagagaagctaagaactgcagtggcatcatttttgcctggcaagtagggcacgctgaagatt

SEQ ID NO: 5953 - DNA, 423 bp, Homo sapiens
aatagaacagcataattacctggagttagggggagtatttctgcactattacttgtcagggagagaagaaacttagaattgtccctcaaaggagtgtcaagaagtatgaataaatgtcctttcaccagctcacaggccagaaatggaggacccaagtcaactaggtgaaactactagcagacccagctttcccataataacctaatctgcaaattgttctattaaagtctcattgttttcaggatgcaatgaaagtggatttcaaaaggctttggaaaaataagtggaacatgactgatcttgaaaaaaaaagcaaaagcttaaatatttgatacaagtttacttagctacaacatactttacattgttgcctttagttatctcacaggcactgacattttatatttagaaaatacttttaat

SEQ ID NO: 5954 - DNA, 380 bp, Homo sapiens
tgatccatacctagtgtggggatactccacttgttttgtgcatatttgtgacaataatgatttgtgaaagcaatcaggaaaaggagagaagcaaagtcaggtccaaaaatgatacctgaactgtgtcacttaagagttgctgaactgcaagaagaacgtggaaatattcttgcatatggaatctactgagctctctccaaggcattcatcttttgctattcattggatctctaccaaggtttcttcacctctaaaatcggaataataggggttcctatgggattatgtagtaagatgctgcagaattttattttttaaatatgccgtttagagcagacacagtcacaataaaagttaaaaagttaaaaaaaaaaaaaaag

SEQ ID NO: 5955 - DNA, 413 bp, Homo sapiens
  misc_feature (1)...(413): n = A,T,C or G
caaactgcagcaaatccctggacttgcagcaaactcaccagtgctccagtgttaacaatgggtgagcacagagcaactatgccactttaaagagcacaccaattttaatgctatctcaactatcatcaaggtttttccttaatcatataaacatcaaattgtggcttcttcaggatctatccccgaagttcttctggggtaaaatcaaagcatctattctttttataatttaaacttttattttagattcagtggtacacatgcagatttgttacatgggtttattgcacgatgctgaggtttgggatacgattggtcccgtcactcaggtagtgagcatagtatccatagttagtttttccaccctcccttcctcctgcctctagtagtccccgttgtctatagttgccatn

SEQ ID NO: 5956 - DNA, 423 bp, Homo sapiens
cgcagcccgccgccccagccatggcgaagcccctgactgaccaggagaagcggcggcagatcagcatccgcggcatcgtgggcgtggagaacgtggcagagctgaagaagagtttcaaccggcacctgcacttcacgctggtcaaggaccgcaacgtggccaccacccgcgactactacttcgcgctggcgcacacggtgcgcgaccacctggtggggcgctggatccgcacgcagcagcactactacgacaagtgccccaagagggtatattacctctctctggaattttacatgggccgaacattacagaacaccatgatcaacctcggtctgcaaaatgcctgtgatgaggccatttaccagcttggattggatatagaagagttagaagaaattgaagaagatgctggacttggcaatg

SEQ ID NO: 5957 - DNA, 412 bp, Homo sapiens
tgggtcctttccaccatggcacctaagaaagcaaataagagagccgggggtgccaactccaacgtgttctccatgttcgaacagacccaaatccaggaatttaaggaggccttcactatcatggaccagaacagggatggcttcattgacaagaacgatctgagagacacctttgctgcccttgggcgagtgaacgtgaaaaatgaagaaattgatgaaatgatcaaggaggctccgggtccaattaactttactgtgttcctcacaatgtttggggagaaacttaagggagcggaccctgaggaaaccattctcaacgcattcaaagtgtttgaccctgaaggcaaaggggtgctgaaggctgattacgttcgggaaatgctgaccacgcaggcggagaggttttccaagg

SEQ ID NO: 5958 - DNA, 460 bp, Homo sapiens
  misc_feature (1)...(460): n = A,T,C or G
ggagggtaccaccncctgatagcctgttagaccgccctcgagtaccgggncgacccacgcgtccgagaaggtggagctgcaggagctcaatgaccgcttcgccaactacatcgagaaggtgcgcttcctggagcagcagaacgcggcgctcgccgccgaagagaaccggctcaagggccgcgagccgacgcgagtggccgagctctacgaggaggagctgcgggagctgcggcgccaggtggaggtgctcactaaccagcgcgcgcgcgtcgacgtcgagcgcgacaacctgctcgacgacctgcagcggctcaaggccaagctgcaggaggagattcagttgaaggaagaagcagagaacaatttggctgccttccgagcggacgtggatgcagctactctagctcgcattgacctggagcgcagaattgaatctctcaacgaggagatcgcgttcctt

SEQ ID NO: 5959 - DNA, 439 bp, Homo sapiens
  misc_feature (1)...(439): n = A,T,C or G
tttgcccaaggctgcattccagtatggtatcaaaatgtctgaagggcggaaaaccaggcgcttcaaggaaaccaatgacaaagcagagcttgatcgccagtggaagaagattagtgcaatcattgagaagaggaagaagatggaagctgatggggttgaagtcaaaagaccaaaatactaatcactagttacaaccagagatgctccacaaggatatgctccccacggttttctttctacaatttccaaaggttgcaagatgtttttttggggatgaatataaaattttattgtgtaattacttggttccattaaaattgggtaacttgcttannaaaacaaacaaaaaaacttcccaaaggaaatccccccccaaaaaanntttaaaaagggggccgccttttaaaaatttcttgggggggccacatttttatcggtt

SEQ ID NO: 5960 - DNA, 430 bp, Homo sapiens
  misc_feature (1)...(430): n = A,T,C or G
gcgagccactcttttgggggcaccagacaaatgtgggtatcaaggctcagcccctggcaagaggctgctgctgctggagacagaaaacaaagcaaagactttagtgcttgtcaaggacaaaattagcgggtagggcatccaacccaagcattctctccatcaagacctttgccaaattctgaaggtgacgaggtcaggagtgtgagtgctgagcttaaacttctctaaggccaagctgaatcacccacaatcattcagaactcaggatgcaaagactttccaagctctcagataaagccctgagaacagaggtaggttgagtctgatcaaaactacaccaatccctaatgcgtggcccttgggaatcaacctcctctgccttagagaggagacacaaaacactttcatgtggaaaagaacatcattggan

SEQ ID NO: 5961 - DNA, 443 bp, Homo sapiens
  misc_feature (1)...(443): n = A,T,C or G
caattcgtcaccaggaggaagacggagctggctgcccagcccaaaggcccatgaggggatgcagttatgggctctgtcgccgtggaacttgtttgcttcattcttatgtacctacctttgcaccttgtaatcatcctttatgcctcagattgttattttgtgtcagtaagtaatccataaagtgccaacatgggaaagaaacggacaaagggaaaaactgttccaatcgatgattcctctgaaactttagaacctgtgtgcagacacattagaaaaggattggaacaaggtaatttgaaaaaggctttagtgaatgtggaatggaatatctgccaagactgtaagactgacaataaagtgaaagataaagctgaagaagaaacagaagaaaagccttcagtttggctgtgtcttaaatgtggccatcagggctgtggcagaan

SEQ ID NO: 5962 - DNA, 412 bp, Homo sapiens
tgaaaagccctgaattgggggtttatcattcattcacttcttcactttatagtttcctatctcctaaaaatcacttttaaaatcttcatatgtttttgaaaatcctgtataccgtaagttctagaggtgtgtgtgtgtgtatatgtatatatgtatatagagagagatatatatgttttttatgtgtgtgggaaggaaagggtggaagtaatggaagaaattatgcatttaaacttgatagttaacaccttctcttgtttcagaacttaaaatattttttacatgtttaaagtaatttaattggtggcaatattttaattctaaaattaaattgggatttactgaattggaaacctaggttttgttattttgtaaatcctgggaagagtatcagagttgaaatcccttcaat

SEQ ID NO: 5963 - DNA, 390 bp, Homo sapiens
ataaaactgaatgtataaagtcatataacaaatcaaagtagtattcagagtacagtaaggtgtcaaaagtaaattaagaaaacaaaattccctaacgtaaattactttaaaaaataatagcacacagagaaaagaatctctagtcactattcctctaatttatacccaaagagagtatatcgcccagcaacagagaggacttggattatatcatcacagaagaatttcagtcactttacttatcagctatttttgctccctcagcacagctctgtaggagccaagtacttgaaagaataacaaggatgaaattctcacttggttaaatcttagactgcagagccaggagaatacatgtatagcaattgtttgtgaaggcattactcctat

SEQ ID NO: 5964 - DNA, 465 bp, Homo sapiens
ccttggtccttgttccctgaccttgcgccgagggaccaggaaggtcaggtgctcgccccgcgtcggtgcttcaggagggaatgtggccagaacgagaaagtggtgatcatgtgtgcgagcagtgacaccatccggagcatcatgctggtggcgcacaggcatggcatgaccagtggagactacgccttcttcaacattgagctcttcaacagctcttcctatggagatggctcatggaagagaggagacaaacacgactttgaagctaagcaagcatactcgtccctccagacagtcactctactgaggacagtgaaacctgagtttgagaagttttcatggaggtgaaaagttcagttgagaaacaagggctcaatatggaggattacgttaacatgtttgttgaaggattccacgatgccatcctcctctacgtcttggctctacatgaagtactcagagctg

SEQ ID NO: 5965 - DNA, 466 bp, Homo sapiens
  misc_feature (1)...(466): n = A,T,C or G
cccacgcgtncggcggcggccacggcatcctgtgctgtgggggctacgaggaaagatctaattatcatggacctgcgacagtttcttatgtgcctgtccctgtgcacagcctttgccttgagcaaacccacagaaaagaaggaccgtgtacatcatgagcctcagctcagtgacaaggttcacaatgatgctcaaagttttgattatgaccatgatgccttcttgggtgctgaagaagcaaagacctttgatcagctgacaccagaagagagcaaggaaaggcttggaaagattgtaagtaaaatagatggcgacaaggacgggtttgtcactgtggatgagctcanagactggattaaatttgcacanaagcgctggatttacgaggatgtagagcgacagtggaaggggcatgacctcaatgaggacggtctcgtttcctgggaggagtattaaaatgccactn

SEQ ID NO: 5966 - DNA, 461 bp, Homo sapiens
gagcatctgtagtggagcacagccagggacacctaacccactaggctcgacttgctcccataggagactttggccctaggggactaaagagtcagacctgaactcactgctccgaatgcctgcagggaggccagcacccactaacaccctgctacagccaatgaacatgcaccccgccacattgccactgccgctggcacatgcgaacaaggatagatcccgttgccatcaccctatgaagtgctttggctggcaccacctatcaaagtgttgtgactagcagtccgagggcacctcggccactccagcacaacagttcacagaacccatgttataccacaatcaaagccccaaggtcgtcaaacagaataaaagaaaaaacacccattcttatgacagcaacttcaaagactgaagaaacattagcccacaaagatgagagagaaccagcacaagaactt

SEQ ID NO: 5967 - DNA, 400 bp, Homo sapiens
  misc_feature (1)...(400): n = A,T,C or G
ctgggattactggcacccgccaccatgcctggctaattttttttatttttaatagagacggaattttaccatgttggctaggctggtctcaaattcctggcctcaggtgatccacctgcctcagcctcccaaagtgctgggattacaggcatgagtaaccgcacccggcccgaccagtatctttttcttatgcagtgaaacaactttagcaaaagaggcaatgaatgttatactgagtttgtacctctttaactccacctgcaatttctgtcaatctacaaatacaagtgtcacctcgcagtgtttcgtatggacagaatatcttgggtttgctttttgtcacttatttcacttgcacattttcttttgtttggttgtttgtttgatttttgagacggan

SEQ ID NO: 5968 - DNA, 496 bp, Homo sapiens
  misc_feature (1)...(496): n = A,T,C or G
tgggtgtccangggganaganaaaaaactgacgcccgtcggnacctggccggaccttccgggncgacccacgcgtccgattatttctggaaactgtgccaagagtagaaatggcaaatatgttttaaagtctcccatggaataacaccagttggttgaaggtatttgcttcaatttagtgttcagaagattctgctttaaattgccatgcttggcacaaaggatggaatattatctcccttctctgggaaggcatgttttccagaactaagtatccaaggaagaagaagaagtagggagtttcctccctcaacttttctttcttcctctccattctttcgccacctccttcccatactccctttttccctccttcattcctttatttccttcctttccttctttcagttttcatcccacctactatatattaaatgacctgagtcatttaatcagaattatttctctcttcaaaatgctcactcatcactcctgga

SEQ ID NO: 5969 - DNA, 401 bp, Homo sapiens
  misc_feature (1)...(401): n = A,T,C or G
caatcccaaaaaggcctaagaggtggatacggccccttgagtaataacagcagtgtaaaatgtcataaaaatgttataacatccaactggaaaacctaaatattgcaaaaaaaaaatggaattaagttttattaatattttcagcctccataaatctgtcattttatgcaacacaccacacttctatcaaacataaatatcaatctcaaatttacaaatctacacatacactccaaaacaaaagtgacacgagtgaaatatcagtcccttttccacccacatggatcaaagcacacaaccccatgagctgagcagtgtcagtccagtgtagagctgcaagaaaagcctccagattgaggacaccggcaaaaaagcgaatacagagtcctaggccagcacan

SEQ ID NO: 5970 - DNA, 462 bp, Homo sapiens
  misc_feature (1)...(462): n = A,T,C or G
taccctcggtttagaaccggcccgaggtacttttgtattatatttcttggatcgctattatgttttgttatttaatatatttactatataagggatactgtcatataaaatgctgtttgccacttacttagagctatgctaattttgcattgatggggagtgatagttgtattgagccaggttcctagcttagggtgacagctgggctgctgcaagtccggcctgatagacatgctagctttatctcatggagccatagggtaacagatggctcattacttattcagcagtcattgaatgtgtgctgtgtgccaggcatttaaagatgaatcaaagtccctgccctcaagaggttgatagcctaatcccagccagaaagccctcatataaaattttagcttttgtcatatgcaaatagaaaggatcgtgtgaaattcagtgaacttgttacatgattgttan

SEQ ID NO: 5971 - DNA, 388 bp, Homo sapiens
tgattaactcatatcattttaccacccctaccatagaagctgtattttaacaatgcatagcaatttcctgtttatctaggagctaaacgaacatatgtcgaatattttttgaatgagggccatgctaaaatagatcttggaaggcagaattggggctcagatcaccacataatttctgcagcctcttaagacaaaggtttccagaagcaaaatggataaacatgagaatccagttctttttctcaacttgtttttttatattcccagttaactaaaaagaacctaatgttcttgtaagtggacttttccattggtttgtggttttagccaaggtccccagattgtctttctctgccagtttgtgtagcatgatgtggattctggagtt

SEQ ID NO: 5972 - DNA, 476 bp, Homo sapiens
  misc_feature (1)...(476): n = A,T,C or G
cccacgcgtccgcccacgcgtccgctgaggtgggaggatcacttaagccaaggaggtcaaggctttggtgagctatgatcatgccatgggcactccagcatgggtaacaaagtgagatcttgtcttaaaacaaacaacaacaacaacaaaaaagaagaccctgaatgagagaggacagcaaagtggcaaagtgactataaatatagtaaatatattgtgttcatctaatgtcagtccttacaacagctgtgtaaggtagatatccttaatcacctttcacaggcgaggaaactgaggctcaggaagtttcagtaactttcctgagattttacaactagcacatggggggtgagaagataggattctaaccagtctgttagactgcaaaacacaccaccatcatcggccaccacattgtaccttcacctgaaagaaagaggaaaaacacacagatgccagaaaaaaaaaaattgtan

SEQ ID NO: 5973 - DNA, 485 bp, Homo sapiens
acccgtcatctactctaccatctttgcaggcacactcatcacagcgctaagctcgcactgattttttacctgagtaggcctagaaataaacatgctagcttttattccagttcttggattttgggattaggggaaatggaaaacttttggctagagaatagtttccagattgaattgtggaagaaaaatttggagtggaaggaggaaaccaggctgggaagtgcctcatgttctagccctgggtggggactttcacattttcagtagatgccagtaaaagattagagtcaggatggtattattattataatttcttttttttaaataatgataactgtggcagaaatgtggagaattgaatggagaagatggaggctggtagcaggatggctaaatattaagtcatggttaccaacgtttattgagtgccaactgtgtgcgagacattgccagagagagaagaggggtgtttttaataatacagc

SEQ ID NO: 5974 - DNA, 429 bp, Homo sapiens
gtcatcatgcttttatcatacaagatgactggttattttgtctttattttgtgttcgaagttggcagtaccatgaggctgttgcatgatagggaaaagaaaaaatgaggccaaactttcttctttccctgagcattattattaatggtctaggggctactgtgagctgctggtattggggtagaaatctttacagactattttatcttatatagtcttaagaaaacagggctgtcacggtggctcacatctgtaatcccagcactttgagaggccaaggtgggaggattgcttgagcccaggagttcaaaaccagcctgggtaacatagtgagacctgtctataaaaaactaaaaattagctgagtgctgtgacatatgcctgtactctcagctattcaggaggctgaggtgggaggatcacttgaccc

SEQ ID NO: 5975 - DNA, 393 bp, Homo sapiens
  misc_feature (1)...(393): n = A,T,C or G
ncggccccgtcgctctccaacgccatctccgtctctcgctcgtcgagctccagccgaaagagaaggggggtaagtaaggaggtctctgtaccatggctcgtacaaagcaaactgcccgcaaatcgaccggtggtaaagcacccaagaagcaactggctacaaaagccgctcgcaagagtgcgccctctactggaggggtgaagaaacctcatcgttacaggcctggtactgtggcgctccgtgaaattagacgttatcagaagtccactgaacttctgattcgcaaacttcccttccagcgtctggtgcgagaaattgctcatgactttaaaacagatctgcgcttccagagcgcagctatcggtgctttgcaggaggcaagtgaggcctatc

SEQ ID NO: 5976 - DNA, 395 bp, Homo sapiens
aacagcatgacctttgcgaccaaatccagcaaccagaacttcatcattttcctggaataaaataagaagtttatttctggtgttggtggcgatcacaaaaatactttcatgtgaggaaactcccttgcatcagataaaaatgtgagggaggccaccccaagaacagaaggtacgatagagttgaaatactcacctcaataaagttcaagcaaccgtcattgggtacaaaggctgtgattttcttgccattcttgatcagctggacccttacacacttcctaatggcagaatttggctgtttggcttcaactcctctgaaatacaaaaggcacagcactgtgagctggctttctgaaaaagattatcttttcatattaactagagaactaatgaga

SEQ ID NO: 5977 - DNA, 475 bp, Homo sapiens
  misc_feature (1)...(475): n = A,T,C or G
aggggtgagcngagccnnnnnnncctagatngactgaaggacctggcgaggaaccctcggggctacccacccgtccggngaaaattagttcttatggtaaaatattacgtttttttacctttggtccttgtacttttttgcttatttaattacttatttgtggccacggcgtagaacatagcatattccatgaaatgatttaacctattttgctagagtaaactataatttagcaattgcagtatgtttaggaaagctaatacataatacttaggattcttatcttttgaaatagtttattccaacacttctgctacaagtaatcatgcttattagttaaattggtgtagtctagcttcttaaatctgaaagaaaaggagaaagggaaattctttatagaatagctagtgtttaatactttggactagcaacagatgagatgtattttagtaccatattttttggttaaaggaat

SEQ ID NO: 5978 - DNA, 539 bp, Homo sapiens
  misc_feature (1)...(539): n = A,T,C or G
ccccgccggtttgaagtttcacactacagattaagagctcagttatctcgtcttccttcttctcgacccanacagaagggcngnnnnnnnnncctggattgcattcggnaccgccccggaatttccgggncgacccacgcgtgcggcatgtggatcccgctctacctgcaccgcgcccttgttgtgcataagacagcagagacgtgcaacagcccgccctgtggggccaaggacagcctcatctttggggccatcacctgctttacgggatttctgggcgtggacacgggggcaggagccacgcgctggtgccgcctgaagacccagcgggccgacccactggtgtgtgccgtgggcatgctgggctctgccatcttcatctgcctgatcttcgtggctgccaagagcagcatcgtaggagcctatatctgtatcttcgtcggggagacgctgctgttttctaactgggccatcactgcagacatcctcatgtacgtggtcatccccacgcggcgcgccactgccgtggccttgcagaa

SEQ ID NO: 5979 - DNA, 469 bp, Homo sapiens
  misc_feature (1)...(469): n = A,T,C or G
gctcctnaaatgagactgnaggcatggcaagaacnncgggntgacccacgcgtccggaaaaaggaaggagaaaagatccggaagaaatatccgtacagggtccccgctccggggcttgtgtggggacagccagcctcctcgtgttgatttctgatcacctggaacctggtcgcgataaggcaggactgagacgttttttcttcgttttggacaccggcttaagtagttaaaactaccgcaggcagtgagtaggaacacaaaagtattaggtatctttcagcatccgggcgtttttcccattaccccctcccccgcccacttgcctggggtttctctaatgcaggctgcgccacccaaatggaagggaaaatatagctttagtggtaaggggaaccacaccttgttgatttttgtaatgggtggaccgagattttaaaagtgggcttcttatcttcagatggagtattan

SEQ ID NO: 5980 - DNA, 477 bp, Homo sapiens
  misc_feature (1)...(477): n = A,T,C or G
aaagaagtctgggtttgtcagcagatgaaacacagaggaggcagcacaacaaaacacatcacataacagaagcagtttgattccttgacagagcccagaaagaacagggcagcacaccttgcagggccgtttgggacacacatgctcaaccagtgggtaggggcaagagagaggcagagacagaggacttgtgggattaaagcatttattggggtccaaagtattatccaagcaggtttcccatggggagttttcattggtgggtttaaagcaagcaggcatgagttctgtggggccacgctgtgactgagagatggttactgtgatatttccgtgcagtccgtgtgggggggtgggggcagtggggcatgtccatggggctgtatctagcttccccatagggaggtggcaaccggaggcaattggatcggnggctatctagatcgaccacattgaggaatggggagaagtaaagaa

SEQ ID NO: 5981 - DNA, 415 bp, Homo sapiens
cccacgcgtccgcggacgcgtgggactagttctagatcgcgagcggccgccctttttttttttttttttttttaaagggggcgggggtgaaatgatttgggggggggaacccccaaaccttttaaaaaaaatggggggaattagggggagccccaattttgttttggattggggaccctggattaaatttcctggggggtttttttattggtttaaccccctaatttttttaaaaggggaaagtttttaaattttaaaaaattccggttttgggctgggggggaatttttgggggcccacccccagaaaaggttttttggccccttatttgaccccaattggggggcccttcctccaggattaaaaaaaatttttgaaaaaaattttttttttcttaatttccacaaaaaaagcg

SEQ ID NO: 5982 - DNA, 461 bp, Homo sapiens
  misc_feature (1)...(461): n = A,T,C or G
cggacgcgtgggctgtaagtaatttgtacaagattggctagtaagtgaccaagcaagaatttgacacagacaactttgcaagtttaatgctctctcatttttgttcattatgtcattatgtgtagcccaggtgtgaggagactgtttatgaaaatgctttgtgtcaagcttaatgttaggacaccaatttttcttctgctctcatttccgtcgngatgtaactggcctctacatcagctactgatgaaaaaatataatgccgataagaggacaacttgtatagaaggtttacagtaaagcaatgaacagagggaaataagctgtggtgcccagactcttgaaagcattaccttcacattacgaagttcctgaaacttgtattgcttattgttgaggatggagagccgaatgcctcagtgtaaagaatccttgaatcctccagagtagtaaagattaaccan

SEQ ID NO: 5983 - DNA, 471 bp, Homo sapiens
  misc_feature (1)...(471): n = A,T,C or G
gaaatttgactagtgtaatctgagatatgtcatagggatttctttctgacaaaagggtgctttgctgttctttatattaaatacttttagatcaactctttttgcaagactttttaaaaatgtaaagttctttaagaaatatacaaaaatacacacactctagcattaacagtgaacagattagaaagattttataaatcaaactacaaacataattagataactcagaaattatgcccatccacatctcatatacttaaggtgattatttacttattgttattcaatgtaacatttttagaaagttatctttagcccagttgcaataggaatattttttgttacttacataaggggattaagactcaggctataaggcctgggtatggtggctcatgcctataatcccagcactttgggaggctgagacaagagaattgctcgacccaggangttgagaccagcctgggg

SEQ ID NO: 5984 - DNA, 477 bp, Homo sapiens
cggacgcgtggggtcatgactatacccaacagttgtcttagaacgggcatagcatctctcattgggagaaatatgtcacttctaagggctctagatgaagaagcaggaagtatgtttaagaccataagatttattatccactactttgaaaaaagaaaatatatatatatatattattattttgtttttggatgcatcgaaacaaaatataatatatataattggaatattttcctgggttcaatacgcaacgtgtctcagcaaaacacgacagtgtttagtaacagatatccaaaagttgtcttaccggtgataaaccatgaccatattaacatgtttgggcagcattaaaagatctatggcaacatcaatgtttctctttgagccgactctcagagcagtcatcttttgatttgtcctaactcccacatgatgcaaaagaagaggctttgcttctggtttctgttccttgctcac

SEQ ID NO: 5985 - DNA, 415 bp, Homo sapiens
aaaatacccagccaattttagatgatgtttcagactttgatgtggcacagattataatcaggataaatactgcaacaactgtagctgacttaaagtcaataataaatgaatgctataactaccttgagttaattggatgtctcagacttataacgacattaagtgataaatatatgttagtaaaagacatacttggctaccatgtaattcagagagtccacacaccctttgaaagttttaagcagggtctgaaaacccttggtgttttggagaaaattcaggcttatccagaagcattttgtagcatcctgtgtcataaacctgagagtctttctgcaaaaatccttagtgagctttttacagtacacacattacctgatgtgaaagctttggggttttggaacagttacttaca

SEQ ID NO: 5986 - DNA, 416 bp, Homo sapiens
  misc_feature (1)...(416): n = A,T,C or G
cccacgcgtccggcagaatagaatatcttttaatgccagatatgatacactgcacatattgcttttgcactcttaaaatttttgtactaaataatagaaaatatttatattctttgagtgtgagctttgaatagatggcattatcactttattgtttttttaacaaaaactttttctcaattattctattgcaatgttattctgagcaagtcctatgccaaatatcttgtataatgtttgtatggaagattaaattttactcttgtgtggtaagactatttcagttactgattttatagttggaatttgatattccagcacaaagaccacagtgtattcagaaatccaagttggtgtcatacatttcattttgatgtgaacttttctttgctttcctttgatctaagactccattn

SEQ ID NO: 5987 - DNA, 397 bp, Homo sapiens
caaccaacaaacattatcaaagtccttaaaacgcaccaaccctcagcggaaactccaaccaacaaacattatcaaagtccttaaaacgcaccaaccctcagtggacactccaaccaacaaacattaccaaagtccttaaaacgcaccaaccctcagtggaaactccaaccaacaaacattatcaaagtccttaaaacgcaccaaccctcagtggacactccaaccaacaaacattatcaaagtccttaaaacgcaccaaccctcagtggaaactccaaccaacaaacattatcaaagtccttaaaacgcaccaaccctcagtggacactccaaccaacaaacattatcaaagtccttaaaacgcaccaaccctcagtggaaactccaaccaacaaag

SEQ ID NO: 5988 - DNA, 422 bp, Homo sapiens
  misc_feature (1)...(422): n = A,T,C or G
cccacgcgtccggcttcgtgggagaggactcctgcacagtacagtgggagccgcctgcctacgatggcgggcaggccatcctgggctacatcctggagcgcaagaagaagaagagctaccggtggatgcggctgaacttcgacctgattcaggagctgagtcatgaagcgcggcgcatgatcgagggcgtggtgtacgagatgcgcgtctacgcggacaacgccatcggcatgtgcaggcccagccctgcctcccagcccttcatgcctatcggtccccccagcgaacccacccacctggcagtagaggacgtctctgacaccacggtctccctcaagtggcggcccccagagcgcgtgggagcatgaggcctggatggctacagcgtggagtactgcccaaagggctgtgagtgtcccccn

SEQ ID NO: 5989 - DNA, 390 bp, Homo sapiens
cacttgtgttccctctgccgacctccgcaggcacccacctgtgtcccagcatctgcgaatgcagtgctcagagaggaacacaagggctgggttgtgacagtcctgccagcccaggccaacccactcttcccccggggaaggagtgggcagctgcctcccaaggtcactacaggggcactgggagagaataatgcccccaccaactcctggccaattcctggaatgcctccaccgtggaaccacccctgggctggcaactttattctgggttaaagtacaacaagccagccggaggatcattgccactgcatgactgcaatttctgttacactttgctaggcactctcaaatctgcttccactcttcattcgagacatactagtctccctc

SEQ ID NO: 5990 - DNA, 409 bp, Homo sapiens
ctcagaagcttgtcacttactggggaccctgatgagtttctctctgttgtcctgccttatccctaatctagctccctgatcatttgaatgtaaccctaattggacaagaattttctccctttcagtatggacaaaatcaacaaccatgaatcagagacttttataggatgggtagtgaagtgggggaagaacagaacattgtagagtgaggggcagagaggcaggcagtgggcatgggtaggttctggttttgtgattagtaatattatctctttaattgaaaaaaataaactcatttcagattcgtataatttcactaagtgtacagttttttcatgcaagttggttcacgtggtcttcaaactgtcctctctcatctggggcccagtgaggatacctcaggaaagag

SEQ ID NO: 5991 - DNA, 462 bp, Homo sapiens
  misc_feature (1)...(462): n = A,T,C or G
ctcatgatcgccttcggttgagcccggtanncccgggccgacccacgcgtccgtctcattccattagtttaatcatatttcccagaattttacgtttcaagctcttgacggttaagcctttctatcacgtcccactcttaacccccaaacacccgcatcagtcttctttgtcacagatgtttgaaggatgctttcacgttgggcctctctttgtatgtgcaattctgctgcctggcacagtctccccagtttctctgaggcccagcaggctgcaggttaagcttttcctcctctgggccggcctgatcttacctcttgcctcgtcctcctctgtgttttcatagcatcctctgcacatctttgttcaagttgcctgtttataagcttctcccttttcatacactgaggtcctctctgagggcaaggagagagctgtgctcttatttttattccattatagta

SEQ ID NO: 5992 - DNA, 396 bp, Homo sapiens
atttgcctcagggcctgggaaaagattcaggacccaggaacctcacgcccttcttttagttcaatcagacaaggctctaaagagccatatccagacttcgtggcaaggttgcaagatgcggctcaaaaatccattgcaggtaataacgcccgaaaagttattgtagaaacaatggcttatcaaaacgcaaatccagagtgtcaatcagccataaagccattaagaggaaaggtttcagcaggagttgatgtaattacagaatatgtgaaggcttgtgatgggattggaggagctatgcataaggcaatgctattggctcaagcaattacaggggttgctttaggaggacaagttaaaacatttgggggaaaatgttataattgtggtcaaatcggt

SEQ ID NO: 5993 - DNA, 477 bp, Homo sapiens
  misc_feature (1)...(477): n = A,T,C or G
ggggntgagcacgnccnnnnnnttcctgaaatcagtaggacctggcgcaggaacccccgggncgacccacgcgtccggcggggttctggaggggacagtgaagtgcagcgcacgatgctggtgttgctcaaccagctcgacggctttgaggccaccaagaacatcaaggttatcatggctactaataggattgatatcctggactcggcactgcttcgcccagggcgcattgacagaaaaattgaattcccaccccccaatgaggaggcccggctggacattttgaagattcattctcggaagatgaacctgacccgggggatcaacctgagaaaaattgctgagctcatgccaggagcatcaggggctgaagtgaagggcgtgtgcacagaagctggcatgtatgccctgcgagaacggcgagtccatgtcactcangaggactttgagatggcagtagccaaggtcatgcagaag

SEQ ID NO: 5994 - DNA, 455 bp, Homo sapiens
  misc_feature (1)...(455): n = A,T,C or G
aaaattgcagctgaagactctgctgctgcagattgcaaagcaagagctggagcgagaggcggaggagcggcgcggagagaaggggcgcgctctgagcacccgctgccagccgctggagttggccgggctgggcttcgcggagctgcaggacttgtgccgacagctccacgcccgtgtggacaaggtggatgaagagagatacgacatagaggcaaaagtcaccaagaacatcacggagattgcagatctgactcagaagatctttgaccttcgaggcaagtttaagcggcccaccctgcggagagtgaggatctctgcagatgccatgatgcangcgctgctgggggcccgggctaaggagtccctggacctgcgggcccacctcaagcaggtgaagaaggaggacaccgagaaggaaaaccgggaggtgggagactggcgcatgaacatcgatg

SEQ ID NO: 5995 - DNA, 428 bp, Homo sapiens
  misc_feature (1)...(428): n = A,T,C or G
cccacgcgtncgaaaggtttcacaccactaatcctnnnnacaacagcagggcatgttggagttgttgaaatccttttggataaaggtggagatatagaagcacagtctgaacgaactaaggatactccgctttcattggcatgttctggtggacgtcaggaggtggtagacttgctgctggctcgaggtgcaaataaagaacataggaacgtatctgattatacaccactgagtctagctgcgtctggaggatatgttaatatcattaagattctgcttaatgctggggcagaaattaattcaaggactgggagtaaactaggtatttctcccctgatgttggctgcaatgaatggacatgttcctgcagtaaaattgctgctcgatatgggttcagacattaatgcccaaatagagaccaatcggaa

SEQ ID NO: 5996 - DNA, 413 bp, Homo sapiens
agatgtggtgcccaaagatgtcaacgctgccattgtcgtcattaagaccaagcgcagcattcagtttgtggactggtgccccacaggcttcaaggttggtatcaactaccagcctcccactgtggtgcctgggggtgacctggccaacgtgcaacgtgccgtgtgcatgctgagcaacacgaccgccatcgccgaagcctgggcccgcctggaccacaagttcgacctgatgtatgccaaaagggcgtttgtgcactggtatgtgggtgagggcatggaggagggtgagttctccgaggcccgtgaggatatggctgccctggagaaggattatgaggaggtgggcatcgactcctatgaggacgaggatgagggagaagaataaagcagctgcctggagcctattcactatg

SEQ ID NO: 5997 - DNA, 429 bp, Homo sapiens
cccacgcgtccggctgatgatggggaggagtaacctgaaatttgctggaatgccaatcactctcaccgtctccaccagcagcctcaacctcatggccgcagactgcaaacagatcatcgccaaccaccacatgcaatctatctcatttgcatccggcggggatccggacacagccgagtatgtcgcctatgttgccaaagaccctgtgaatcagagagcctgccacattctggagtgtcccgaagggcttgcccaggatgtcatcagcaccattggccaggccttcgagttgcgcttcaaacaatacctcacgaacccacccaaactggtcacccctcatgacaagatggctggctttgatggctcaccatgggatgaggaggaggaagagccacctgaccatcagtactataatgacttcccggggag

SEQ ID NO: 5998 - DNA, 423 bp, Homo sapiens
  misc_feature (1)...(423): n = A,T,C or G
gcgcagggattataggctttcgctctaagagtaaaaatgccctagcccacttcttaccacaaggcacacctacatcccttatccccatactagttattatcgaaaccatcagcctactcattcaaccaatagccctggccgtacgcctaaccgctaacattactgcaggccacctactcatgcacctaattggaagcgccaccctagcaatatcaaccattaaccttccctctacacttatcatcttcacaattctaattctactgactatcctagaaatcgctgtcgccttaatccaagcctacgttttcacacttctagtaagcctctacctgcacgacaacacataaaaaaaaaaaaaaaaaagggggggccgttttaaaggaaccctcggggggcccaagtttacccgggcatgcaaan

SEQ ID NO: 5999 - DNA, 415 bp, Homo sapiens
gctacaacaggcctgcgccggcggcagagaggatatcttgggcgggggatgtgagcgctgagcccttggcagcaccgaacaagatttgtgatgaaatggagcctggaacaaactcttttcgggtagaatttcctgatttttccagcaccattctacagaaactgaaccagcagcgccagcaaggacaattatgtgacgtctccattgttgtccaaggccacattttccgggcacacaaagccgttcttgctgccagttcaccctacttttgtgaccaggtactcctgaaaaacagcaggagaattgttttgcctgatgtgatgaacccaagagtgtttgagaacattctcctatctagttatacaggacgtctagtaatgcccgctccagaaattgttagttacttgacagcggc

SEQ ID NO: 6000 - DNA, 482 bp, Homo sapiens
  misc_feature (1)...(482): n = A,T,C or G
ntttgacnttcgatcagcattcggcaccagtccccgagtcgacccacgcctccggcaaaagacaaagctgagtgagaggggcttttannnnntttatgatgctactatgaaggcctttcagactcaatcatttgcctcaatgcacaccaaaacactcctcatttctcagagaatctttaaaaaattaagtgaaatcccctggaagggaactcaatcaaaatgaagtatctgtaattggtaataaaagaaggatcaccatatcatgagccagagaactaacctcatttgaattagactttgactccttattaaaatggaattttgagtgcaagtataaacactcattccctccccttcagatccaaagcaatgaaacatgcacacatatacacatacagacagatatttatatatttatgtatattatgtataagattgaaaaagacaactgaactcagaaacaagatcaacattctataaca

SEQ ID NO: 6001 - DNA, 465 bp, Homo sapiens
  misc_feature (1)...(465): n = A,T,C or G
caggacacccagtgagcccatacttgctctttttgtcttcttcagactgcgccatggggctcagcgacggggaatggcagttggtgctgaacgtctgggggaaggtggaggctgacatcccaggccatgggcaggaagtcctcatcaggctctttaagggtcacccagagactctggagaagtttgacaagttcaagcacctgaagtcagaggacgagatgaaggcgtctgaggacttaaagaagcatggtgccactgtgctcaccgccctgggtggcatccttaagaagaaggggcatcatgaggcagagattaagcccctggcacagtcgcatgccaccaagcacaagatccccgtgaagtacctggagttcatctcggaatgcatcatccaggttctgcagagcaagcatcccggngactttggtgctgatgcccagggggccatgaacaaggccctggagc

SEQ ID NO: 6002 - DNA, 450 bp, Homo sapiens
tcagcggcctctgaggtttcaggctcttggcggtgaaggtcagagtgcagacctgagaccactgctcaccgacttcagactccagtttatctgtgccccagcttcctcacttagtctcagaagacttaggctgaggcctcagaaggagatctccatcctttgtccagagcagaacaggatggccatgtcccaggaatcattgaccttcaaggacgtgtttgtggacttcaccctggaggagtggcagcaactggactctgcccagaagaacctctacagggatgtcatgcttgagaactacagccacctggtgtccgtggggtatctagttgcgaagccagatgtgatcttcaggttgggaccaggtgaggagtcctggatggcagatggggggaccccggtacggacctgtgcaggtgaggacaggccaggtgagtcatgcccgggaat

SEQ ID NO: 6003 - DNA, 502 bp, Homo sapiens
  misc_feature (1)...(502): n = A,T,C or G
cctccgtaagagaccctctnnctacggaaggacttgcacnnnnccccnnnngnngagagncccgcgtctgtccttgaatccactcgccagcccgccgccctctgtcgtcgcaccctgcacacgcgaccctctcctgtgcgaggaacttgctactaccagcaccatgccctaccaatatccagcactgaccccggagcagaagaaggagctgtctgacatcgctcaccgcatcgtggcacctggcaagggcatcctggctgcagatgagtccactgggagcattgccaagcggctgcagtccattggcaccgacaacaccgaggagaaccggcgcttctaccgccagctgctgctgacagctgacgaccgcgtgaacccctgcattgggggtgtcatcctcttccatgagacactctaccagaaagcggatgatgggcgtcccttcccccaagttatcaaatccaagggcggcgttgtgggcatcaaagtagacaagggcgtg

SEQ ID NO: 6004 - DNA, 454 bp, Homo sapiens
cggacgcgtgggcggccaccaggaccccagccaggccacggggacaacaggcagcagcgtcagctgcacagaggagaaaaagcatagcaagtcacagcatctgaaaaagatttttcaagagtatggcactgttggcgtgtcattgcacattggaatctcattaatttccttgggcatattttacatggttgtgtcaagtggtgtggacatgtctgcaatcctgctgaaactcggatttatagagtccctggtacagtcaaaaatggcagcaggcacaagtaccttcgtggtggcctatgcaatccacaagctgtttgcgccagtgagaatcagcattacactattctctgtgcccttgattgtcagatattttcgaaaagtgggattttttaaacctccagctgcaaaaccttaatgaactcttcagtcgtacacactgaaaacctatttcttg

SEQ ID NO: 6005 - DNA, 400 bp, Homo sapiens
  misc_feature (1)...(400): n = A,T,C or G
ctagcacggccagtgccaggaccgggccgagggaggccagaccaagggaggcacgcgcgctgccgggcggacagaggctgaggctcacaccccacacccgggcaggagcgctccctggccccaacacatcggggctccgaggcagtgaccagaacgtggtctcaaggtggtgggggctatgggggctgcagggggtagccctgccgcactttgtcacgggagcccagggtacccgcctccttttcgtaacactgttccccccggtcagcccatctagccctgtcctccattcctcacgccatctccatccccatcttgagtcctggaacggccctgggtgcctgcccctcactgtgcatctctgggagcagcctggcaggttggggcgtcttccagaacn

SEQ ID NO: 6006 - DNA, 402 bp, Homo sapiens
  misc_feature (1)...(402): n = A,T,C or G
tcaccccgactcaacgtgagacgcaccgcccggactcactatgcgtgaatgcatctcactccacgtggggcaggcaggtgtccagatgggcaatgcctgctgggagctctattgcttggaacatgggattcagcctgatgggcagatgcccagtgacaagaccattggtggaggggacgacttcttcaccaccttcttctgtgaaactggagctggaaaacacataccccgggcagcttttgcggatctggagcctacggtcattgatgagatccgaaatggcccataccgacagctcttccacccaaagcanctcattactgggaaagaggatgcttgcaacaactatgcccgtggtcactataccattggcaaggagatcattgacccagtgctggatcg

SEQ ID NO: 6007 - DNA, 432 bp, Homo sapiens
  misc_feature (1)...(432): n = A,T,C or G
tagttctagacaaaaaaggaaggaatcgaaccccccaaagctggtttcaagccaaccccatggcctccatgactttttcaaaaaaaaaaaaaaagggggggccgttttaggggttccttggggggccccaatttaacccgggcttgcaacggaaaagttttttccttatggggggcctaataaaaacctacttgggaatcttggagaggaacctttatttggggggggggacatagggggacaacctccttacaaaatttaaaggttttagggaaaatataaatttttaaggggtttagggggtaaaacaagcggaatatccttgctgttggaaagttttgttaacggggtttcttttagaaaaaatttatccccggggccttgggtgaacnnnnnnntnnnnnnnnnccncncnncncncctttgactgcg

SEQ ID NO: 6008 - DNA, 443 bp, Homo sapiens
aagttcccagggagaaggcagcgcgttgtacccgagaaaaaagaaatcctctttttagaacatctcttggtggtaccatcagaaatgtcttccttaagtggaaaagtccaaaccgttttgggccttgtagagccaagcaaactgggccgtaccctgacccatgaacacctggccatgacctttgactgctgttactgtccacctcccccgtgccaggaagctatttccaaagaacctatcgtgatgaaaaatttatattggattcagaaaaacgcctattcccataaagaaaaccttcaattaaatcaggagacagaagccataaaggaagaactgttgtattttaaagctaatggtggaggggctttggtggaaaacacaaccactgtgattatgccgaaaacacaaaccttgaagaagcttgcacaaaagaatggcgttct

SEQ ID NO: 6009 - DNA, 414 bp, Homo sapiens
  misc_feature (1)...(414): n = A,T,C or G
cggacgcgtgggctcagtccgagatgtagactatgcaataacgctaatctaatcccggtacgattaaccccactcagcccgccctggcttaatgtccgctggtggtgtttggagacctcgagcatttaaatgaagcgctcacaaacaagagcacaggttgctttgggatcataaaagagcaggagagaaaggcttctgggggctctcggaagatggatgtcaacgcagagttttcaaggctgagtacgggttagccaggagaaagaagagaaggtggagagagcaacacggcagatacaaggaaggaagtgctggcttgggaactgcaggtgctgggtagccagagctgggaaggagtgagcagcagcatggtgtgggcattctggtgggggaaaccagatcatgaaatgccan

SEQ ID NO: 6010 - DNA, 445 bp, Homo sapiens
gagcacggcgggcgggcggtgatcatctctgacaacgcagttgacaatgacagcttctacgtggagatgatccaggacagtacccagcgcacagctgacatccccgccctcttcctgctcggccgagacggctacatgatccgccgctctctggaacagcatgggctgccatgggccatcatttccatcccagtcaatgtcaccagcatccccacctttgagctgctgcaaccgccctggaccttctggtagaagagtttgtcccacattccagccataagtgactctgagctgggaaggggaaacccaggaattttgctacttggaatttggagatagcatctggggacaagtggagccaggtaaaaggaaaaggtttggcgttgctaggctgaaagggaagccacaccactggccttcccttcccagggccccccaaggtgtt

SEQ ID NO: 6011 - DNA, 400 bp, Homo sapiens
ctgaggagctggaacctaaagcaatgcctctagattaagttactcaatcaccaaaacacagatttgtatttttgtctgatattactaatgaaccaccaaaaatgttacaagaaatgccaaagcatgccaggtgtagagaaggggattccatcattcttgaatgtttaatatctggtgagccccagccagttgtaacatggtttcaaaatggagtccttttaaagcagaaccagaagtttcagtttgaagaagttaattgtagccaccaattatatattaaggatgttaattctcaagattctggaaaatataaatgtgttgctgaaaacaattcaggggcagttgaaagtgtttcagatctaacagtggagcctgtcacttatagagaaaatagtcaatt

SEQ ID NO: 6012 - DNA, 397 bp, Homo sapiens
atattgatgagcagctgaactgggaggccagttgacacacgcggcttcaacacgctcaaaactgctagagcttctcctgggcgccacagtcctccttcctggtgcattgggtggcatcccacccatctggagtggaagccaggtctagacagggagagttagatgcagaaactagaaaacaaaagcaacacgataggctcagagaaggaggctcccagagctgacgttcccttgaagatggaccacatctctgaataggcagtgcagtttatatatgcatcctccagcctataaacttagagttagaaaacagcaacaacaaaaacccaccaacgtttagcagcattctgaggaggaggtccagctattctttttttttttttggttgggggggggg

SEQ ID NO: 6013 - DNA, 403 bp, Homo sapiens
cccacgcgtccgcctgggcgggtcaggaaagctgtgtagaggaggcaacttgaggtgggacttgaagggttaaagcggcaactggggaagaagtatctgctgaggatcttggaggtgctgatcttcattgcagaaagtctggagtaagtgaccactgggctttggatgatcatcatgcccttcacttaactaggaaggttgtgaggaatctaaattatcagaagaaattggatgtcaccattgaaccttctgaagagcctttatttcctgctgatgaattgtatggaatagttggtgctaaccttaagaggagctttgatgtccgagaggtcattgctagaatcgtggatggaagcagattcactgagttcaaagccttttatggagacacattagttacagg

SEQ ID NO: 6014 - DNA, 397 bp, Homo sapiens
cccacgcgtccgtaatcatactgcggcaccgtttttttcttgcagcagtagctgcttgcggaggaggtctgcccactgcagctctctgcagtctccggctctctcctgcaggatcggtcaacgcagccgtcgccgccctctgcacccagcccaggtcgccactgcttcagtccggttctcaaagcctcagcaccatcttttatccccgagcagcctggatcgtcgttccctcagtccggacgccactgctaggtccgaccaccgccgcttctgatatttcggtgagtcttttcctgtggaggtttggtctcccgatctctgtggtagccaccttaggcgtgtacggtcctttgaaaaatggccgagtcagagaaccgcaaggagctgtcagaatcca

SEQ ID NO: 6015 - DNA, 400 bp, Homo sapiens
ttcagaaataattccagctaggttaaactcttaaatataaaatataaaaatagatcaaaatcctgaaaatctagtgggagagatgcttttaaccaaatctacagacctagtcaatgtacttgactatttaaaaattaaaaatctttataggcaaaagatgtcttaaagtcaatatacagatgacacacctaaaaaaaaatccgtaatgcagatgacagacaaaatcagtatttaattgtctttaaaacatcatttaatttgagaaacatcattattttatgtactactaaaaaagaaaaatgctaggctgggcacagggagtggctcatgtctgggtgacagagtgagaccttgtctcaaaaaaaaaaaaaaaaaataaggcggggggcggaaaataccc

SEQ ID NO: 6016 - DNA, 393 bp, Homo sapiens
  misc_feature (1)...(393): n = A,T,C or G
cccacgcgtncgaatacacacagctagctagcaaatagctcgccagagagttaaaggccaaatttttcactagtatgccatactgtttttccctaatagaggttagggaatgtcacgtgcataggtatatgtgtttgaacttgctgactagaaagggtttaggggcagaacagattggtgtttttatagatatggcatgtaatttgcatttatcctgccacagttgatacctgctcttggcaggcatcaccctttggtcctgggactcatttcagcagtcgtgactctgcctcagaatcctgctcaatatagcaatgtggcaaccactaccaagagactggaattgacctacagatgaaatctctatgttgtatttgccttacagccatgctg

SEQ ID NO: 6017 - DNA, 397 bp, Homo sapiens
  misc_feature (1)...(397): n = A,T,C or G
agatgtacatatatttgtacatctatgcatttgccttgcctcctccttattgtaaatgcatagatgtacaaatatatgtacaacagattttgctttttatttatttataatgtaattttatagaataattctgggatttgagaggatctaaaactatttttctgtataaatattatttgccaaaagtttgtttatattcagaagtctgactatgatgaataaatcttaaatgctttgtttaattaaaaaacaaaaatcaccaatatccaagacatgaagatatcagttcaacaaatactgtagttaagagactaactctccacttgtatgggaactacatttcactcttggttttcaggatataacagcacttcaccgaaatattctttcaagccan

SEQ ID NO: 6018 - DNA, 232 bp, Homo sapiens
caagtcaatagaagccggcgtaaagagtgttttagatcaccccctccccaataaagctaaaactcacctgagttgtaaaaaactccagttgacacaaaatagactacgaaagtggctttaacataaaaaaaaaaaaaaaggggcggccgttttaaaggatccctgggggggcccaagtttacgcgggcatgcaacggaatagttttttccttatagggagccgaattataac

SEQ ID NO: 6019 - DNA, 500 bp, Homo sapiens
  misc_feature (1)...(500): n = A,T,C or G
aggcaactgaganacttcgnaanncctgnngggattagnancagncnngcaanntnnggggaganacacccgcccggtaatattccttgaaggtattattctgtaaagagctgttagtatgtaaatgagtctgatttgtttaaaaaaggaacctctgtttttcttgcctttgttcattcatctacattgttggacacctactgtttgctgggctgtatacccagtgttttacgtgttttctaattcttaaaacactatgaagtagatataatattattttatagatgagggcactggagtttaaagaagttaaattccgcaagtcatggcagacggtaaaatggtagaactggaatatgaacccagttgtaaattttggccatttcaattaaaagatatatttctgataaagtcatggtggtttgcagccataatgttgagttgttttgatccccagccttccattcccgggttacagcttgtgtcattaacatcaagag

SEQ ID NO: 6020 - DNA, 493 bp, Homo sapiens
  misc_feature (1)...(493): n = A,T,C or G
agacgctagggngctttgnaanngcaagttgacnagacnnancnncannntngggnagaacacccgcccggtttatattatctcactttactctcagctatctgtttaaagatcagaatcctatgagaggggacagtgcggggatatattctgaaaaacaaaagtaaacgttaaagaaatggagaatgggaacttacctggttggcactgtagttagtggccatgatcttgtgctgtttacactcgttgcttggcaactgcaaaaggccgacctcctgggactaccaatgagcagaggctgcctttctcttctgcttattattattcacttccttggctcacactgcccccatttgttttctctggaacttagattcatttttattttacagacgggaaagactgagtaaatgtgagaaaattagctgaatagccactactttttttctggcataacctacccctgcttaagacttccacgggcctttgattg

SEQ ID NO: 6021 - DNA, 496 bp, Homo sapiens
  misc_feature (1)...(496): n = A,T,C or G
ttttgatcgccttcggaataggtttgctgcgcagncgcnccacgcgtncgatcatttcaccccctgcttgaggtgccattttgtttttctgactgttctgcttctttcttccctctcccatcctaggccattaaaaacacctgactttttttaagtttgttgagagctgttgaaatttaaaggtattctcaacaatgtggtttttgccttaattgttactgaaactcagttgtgccttcaagtttatcaaaactagaccaattctacacccttacatacaggatagcaacagtttgtccacatctcaggtatggcagtatcagtttaagccatattgttcatttatctcagcatgtatatgactgtttagaaattgtgtttacataagatccctctgagccattttagtgcctgtggtaattttggttcttccattggttaggaacgggattttccaacagaaaccattaaatttggccctgaacgcatgtatatg

SEQ ID NO: 6022 - DNA, 396 bp, Homo sapiens
  misc_feature (1)...(396): n = A,T,C or G
aanaacatttatctttactattttacctacgtataaagttttagttcattgggtgtgcgaaacaccctttttatcacttttaaattcgcactttattttttttcttccatgcttgttctctggacatttggggatgtgagtgttagagctggtgagagaggagtcaggcggccttcccaccgatggtcctggcctccacctgccctctcttccctgcctgatcaccgctttccaatttgcccttcagagaacttaagtcaaggagagttgaaattcacaggccagggcacatcttttatttatttcattatgttggccaacagaacttgattgtaaataataataaagaaatctgttatatacttttcaaaaaaaaaaaanagaaaggcaacaaaa

SEQ ID NO: 6023 - DNA, 398 bp, Homo sapiens
aaaaatataatatgaggagcgactggttcttattggaaccctgggggcgtgccctaaattaaattgttattggggagttattttatattcacagaagaggggcaaataaagcacagagagggcctgtgtataaggcactccattttccttggtgggaacatattagataactcacctacattatgtctaactgctaaaggaccattggaacattattattaattgaggtgtcaactttattcatatttcatcccttttgcaaataatggcccttttctgttccacaaagccacactgcatttagtcatcgtgtctcctttgtctcctctggttggggccagtttttcagcctttccttatttttcatgaccttgacagttttgaagaatactgctctg

SEQ ID NO: 6024 - DNA, 405 bp, Homo sapiens
ctaaaagatgccagtaatgatgtctaccctgcagtgttgctgtgagaatgaaattgaatttcaacctggtaaatgctgtataaccgcgcctggtatgtggtaacattcaaggagtgtaatggttgttgctgttactgtcatcatcaactttagggaccttattgtggacattagaaaatacacaaaatcagagattaaagatgatataaaatactgagatttctgttttattatttttctacctgattttctttccagtaccacttcagagactgctggatcaaaagtgtgcccattttgtataatttttttttcttaatgactcaggatctaaacctataccaccagcatcccagcagaggtttctttcttttttttgtttgttagttggtgttgttgttgttg

SEQ ID NO: 6025 - DNA, 355 bp, Homo sapiens
ttgtaaaactctttcaaaaattctgatatggtaaggtacttgagacccttcaccagaatgtcaatctttttttctgtgtaacatggaaacttgtgtgaccattagcattgttatcagcttgtactggtctcataactctggttttggaagaataatttggaaattgttgctgtgttctgtgaaaataacctccccaaaataattagtaactggttgttctacttggtaatttgacaccctgttaataacgcaattatttctgtgttcttaaacagtataaatagttgtaagtttgcatgcatgatggaaaaataaaaacctgtatctctgttataaaaaaaaaaaaaaaaaaaag

SEQ ID NO: 6026 - DNA, 417 bp, Homo sapiens
atgatgcatgacatacagtgtttgtcaaataaatgtttgctgttaatgaatgctgatgcagtctaagacctctctagtgttaatcgtttaagtatcagatagtctaaagggcatttcaaattatagtatctttaaagcagaactcttgatttctgtctcccctagaggctagtccttttgcaatgggtaagtagcactaacaaaccagatgtttgcacaagccccaagccccgaagcatcctagatccctctctttaacagtacctgtccccagtccaggctggcgggaggtcttgtcagctccaccctctgctgtgtcacatgttgtaagcccacagctctgtccccctgctagcatcctgtgtcaagctgctgcacctctcaccttgttaacctctcgactactctctctgctat

SEQ ID NO: 6027 - DNA, 403 bp, Homo sapiens
aagcggaagctggagggcgacctgaagctgacccatgagagcatcatggacctggagaatgacaagcagcagctggatgagcggctgaaaaaaaaagactttgagctgaatgctctcaacgcaaggattgaggatgaacaggccctcggcagccagctgcagaagaagctcaaggagcttcaggcacgcatcgaggagctggaggaggagctggaggccgatcgcaccgccagggctaaggtggagaagctgcgctcagacctgtctcgggagctggaggagatcaccgagcggctggaagaggccggcggggccacgtccgtgcagatcgagatgaacaagaagcgcgaggccgagtttcagatgatgcggcgggacctggaggagtgcacgctgcagccct

SEQ ID NO: 6028 - DNA, 415 bp, Homo sapiens
agaatgtctcagggctatgtgagactggcaggagaagataagactttatgcctgagctcagtcgtttatttcctggtgtatgtgcttttgaatgattatgctcataaaggcaccattttctgtttcctcttcgggaatgtttttactaacatgagtggctattcagagtattgcaatagatgagctgcttttatatttgctttaagtcacgtgtatatggttttgtttggacagctcccagggtagaaatggaagactctatactctgtatgatgaaaaagaacaggaaagctctcctcttctttggtcttaagggatgccttgtattagctgcttttatatttgctttgactccagtgttcaggttttttttgtatatctcccccggcacaagtggaagactcttcacactatg

SEQ ID NO: 6029 - DNA, 486 bp, Homo sapiens
  misc_feature (1)...(486): n = A,T,C or G
acgggncctnaactggagncctgcnaggctagacnancangctcggaanttacgggncgacccacgcgtacgatgaaatgcgcctatggcaagaacctcattctatattttagttgcaaattgtgcctcatgcttaaacctctgctataactggggacaaaagtggctagatgctatggtgaaagaatatggatagttcactttacacacattcctacttttaaagaaagaatgcattaatgcattattctccctaataacgatttagaagcatcttgttgatagatacagaggagcgcattttaagctttataattttcagtttcagctctggaattggggaagactgatgtgtacattggttttaggttaaaacgtggcatgtagcattttgcaaagcaaagtgaataaataaaaatccagggggaaattttatttcaatgcttttgctctaggaacttatttatgctggcagcattagctgcg

SEQ ID NO: 6030 - DNA, 417 bp, Homo sapiens
gaacaggaagccctgaagggtcaaaagaaatacaaaagcaaaggctatcttctttttttttttctttctttcatcccttccttcctcggtatctttctttcttcctttcattttttttccttttttaaaagcgagcggttttgcgggggcggttggggggggccgccgccaaggggaggccgtctcgcctcccgcgcgccggtagatgggttgtttcattagggaggggggggaggagggtaaccttattatcaaaaagaggtttgtgtctgaggcaaaactaaatgaacggcgcaaaaggaggcaagacaattgggagaaagttcgaaaacctgaaaatccaaacgaagggccagaggaggttaatgaccctcgatctctatatgaaaggctacaggaccagaaggacgggaggct

SEQ ID NO: 6031 - DNA, 482 bp, Homo sapiens
  misc_feature (1)...(482): n = A,T,C or G
agtgcnctaaattgataactgaaggcnctgcgaaggaacttccgggntgacccacgcgtccgaatctctggatcttccatggtaaaactccttttgccattttctgtgctttcctcttgagtttcctgagcactgaacacacatatatatgtacatacaggaatgcagggacataggccctcacatacagtgcaagtcacattttataagggtaatttgttaaatggtatttctctaattcttaaaagcagtgactcaatgtattattctaacctctttcacctaagagttctgatatgtagctgtaatccaataaatctccaatgcatgattgaattagagaattttttaagttgataagaagttagagtaactagaaaaaaaatgggtcttttattttagattaatagagaaatttgcctctgtattaatccattttcatgctgctgataaagacatacctaagactggacaatttacag

SEQ ID NO: 6032 - DNA, 486 bp, Homo sapiens
  misc_feature (1)...(486): n = A,T,C or G
cggaccctgatgcccctcgnaanccatcgaggcgagcaccgccccgaannnngggngaccacgcgtccggagctcagggagcataggaccagaagcacagagctccagcttcctgtgatgaactgcctagagcgtggccttcctgagtagccattttggtttccaggagtctattttacatgatgaaatataagaaaagatttggaaggggatttaagtgacattgccaagataaaagcacattagacatttggtttggagacagaaatgtcatgtacctgagcagtttctttgaaggaataagacagattatcctatgtggccaataaatttagtctcattctttacaatgactcaatatgacaaaagatctaaaaacagccttgcttttttacttggaaatacatgttgtgtgctctataacccctgttttggatgtcttcttatttcaatctgtcccaaactaggcatgtgcccctgaaatgg

SEQ ID NO: 6033 - DNA, 418 bp, Homo sapiens
  misc_feature (1)...(418): n = A,T,C or G
tcctgtcagccgctgtccccttcgccgcgatgccgctggagaacctggaggaggagggtctgcccaagaaccccgacttgcgtatcgcgcagctgcgcttcctgctcagcctgcccgagcaccgcggagacgctgccgtgcgcgacgagctgatggcggccgtccgcgataacaacttttggaacagaatccggcaagagcaaaccgaggattgccctccctccagccctagtagaggttggcattgccaggattggccgtcacgcaaacctcccaccagcatacgtttatgttttgccaagtcgattattaagcgccatcgcatgccttcctacatggctccttactatgaagccttgtgcaaatccctcgactggcagatagacgtggacctactcaatanaatgaagaaggcaat

SEQ ID NO: 6034 - DNA, 502 bp, Homo sapiens
  misc_feature (1)...(502): n = A,T,C or G
ggttccggnntanagnaancctggtaggcgagcanagactgangatctncgancgacgcacccaancggatgtgagaaagctacgcgatattttttatcatcatttatggagtacatgccactagcttgatacgcttaagagcgaaccttgcttcgagaaagagaaagatttggacctgctagatccaaaaatctatagcggtaaacgtacttgtttctgaaaaaagcgtgctaggagatttacatcattgttctgctgagaagattgacagattagaatacaagaataatcttaaaacatcaaagagattttccagacaataaggaatgccaagtccaaaagtaaagagaataagagaagcaagcatgtacccttactctgacaaccttatgagtgagggggacagaaattaaagttcagggcccatataaggtgatgaacctaacaggagaccctccacacaataggctgagactcccaaatactttcacctttaggatg

SEQ ID NO: 6035 - DNA, 420 bp, Homo sapiens
ctgatgcatcagccagggtcccagacctgaaagaggatcctgctgaacaagccttgagatgtgtctgcaaggagcgtataagaagtgtcagagggctgtgggtgcacagggcagaaggcacacatcagagaggcaaggcatcccagaggagactgcgcttgaacttgggtgggtggaggacttgggtaggtgaagatagaaaccaggtagaaaaagaaggaatgtgtgttagtatttgtcaccactgagagcggccacttcaatccaccccaagtgaggtctttgtagttttgtgtgctaaggggatgggggtccacttataccttgttcatggccagggatgtatctgaatagcggaaatgcctgcagaaaggctacgtggtttcttcgtaaacaaccatgccagtagaaggcaggggt

SEQ ID NO: 6036 - DNA, 478 bp, Homo sapiens
  misc_feature (1)...(478): n = A,T,C or G
nagggccnnaatgatactgagggcttgccaaccgcccggaattccggtcgacccacgcgttcggttaaggacagataatctaatgcaaggtgtaaaaatgtaaaaattagtaatgtttaaagtactaattagcatatagcccatatgtatttgttggatgtgagtgtagcgtttgtaaacttttgaaagtagggctagaactctgctcatccctgtactctgcatagtacctagcacagacgtttgcacatagttaggtgctcaactgatacttataaaatttaattgaatttgacgcaagaatcatattaagtaaatgtttaaagtagcagcctagcaaatttttgggcatggtgtaagcactggtaaaaccagttaattttagagactatcaagttgttaaaaaatattaggacaccatcctttaattgttatcagcatcaataagacagttcagtttacaatgttatacgatatt

SEQ ID NO: 6037 - DNA, 414 bp, Homo sapiens
  misc_feature (1)...(414): n = A,T,C or G
ctctaagatcaagaacatgacaagaatgcccactttggccatttatattcaatatagtactgcaagtcctagccagaggaattaggtaagaaaaaaataaataaaaggcatccaaatcaaaaaagagaaagttaaatggtctgtttgcagataacataattttatatagagaaaatccttaagactctaccaaaaaactgttagtactaatacatacagtaaagtggcaggatacaaaatcaacataaaaaaatcaataagatttctccacactaataactatttgataaaattaaaaaccagtcctaattacaatagcatcaaaaacaaattagaaagaaatgtaacaaaagaggtgaaaggtctgtcactgaaaactatacaatattgatgaaagaaagtgaagacacaaan

SEQ ID NO: 6038 - DNA, 430 bp, Homo sapiens
cacttttcaaaatctctcctcttgtcacatttgattatagcccattagacaaaacatgtcttgtggccaagcccaaagtcaaggggtaggaaaatactttccacctatgtgaagccatggctggagcgtgaatgtatgatactactagggatgtgaaaggattgaggccaataattcaatcttctattggagacaagctcaacgagttagttaaaatggaaggctaatatttactaactttgcaacccaaggaagagaaagcaggatctctctgacgatgacggaatttcataccctcatctttgaagttatactaaagcttaggaacaaccatcagataggactgaattgctccccctttcagattcagcatgtgaagtatgcagcatcttattatagcagtagccaaaacagcctgtttcttcaattt

SEQ ID NO: 6039 - DNA, 418 bp, Homo sapiens
  misc_feature (1)...(418): n = A,T,C or G
cataaccagtctcagcaagacatcctacaagagaatacgattcttaaagctactgaagtgcagttcccgccaaagccagtattaacacctgaagcaaaggcgtttattctacgatgcttggcctaccgaaaggaggaccgcattgatgtccagcagctggcctgtgatccctacttgttgcctcacatccgaaagtcagtctctacaagtagccctgctggagctgctattgcatcaacctctggggcgtccaataacagttcttctaattgagactgactccaaggccacaaactgttcaacacacacaaagtggacaaatggcgttcagcagcgggtttggaacatagcgaatccgaatggatctgatgaaacctgtaccaggtgcttntattttcttgcttttttcccatccata

SEQ ID NO: 6040 - DNA, 491 bp, Homo sapiens
  misc_feature (1)...(491): n = A,T,C or G
cgaactaccattgttcctgnantatccaatgntcgtgnacnancncnnaannnngggnganccacgcgtccgcaatgataggttttggtgtgtttgaccacacaccatgtctcggacctcatctccagggaacagggacaagtgagtggctaccagaggggccccggtcagcctggagttccccagagcctggttggtcctacagagcacttctcccctgggccaccaggaccaaagcgacctaaacacttgaagctaaaagcaagtgctgatgatgggatgggctggcacgtggctgggagggctcctgtgcaccacagagccctcagcccagcagagagtggaggctcagtccgcggggagtgggggttgtgaaggagacatggccaagcccctgggtcgggagataagctcccccatgcccaggccagccccatgggcaacaagccaacatggaaagaggtggcaggtgaggctgacaggtggatgag

SEQ ID NO: 6041 - DNA, 481 bp, Homo sapiens
  misc_feature (1)...(481): n = A,T,C or G
agtggcctaaatgataactgactgtcatcncgaaggaacnccngggngacccacgcgtccgcgtgttaattgttatatttaacgactggaaaagtgttctggtttcagcagacatcttcatgttaatggcattattgttgtagtagcagtagtaataatcatatgtatggttgggggctaagagcatggccttctcactcagacctgggtttgagtcttgcctctgacatttactatgagaccattaagcacgttaatagcattattttccacaactgggattacttggacaaagaatatgaaaactatatttttatctctagaaatgaattccttagctggtttttgaatgggttattccagctcctgttagaagagtgtagaggtattacccttcaactgttctctctcatctttctgaatctgattattttcttacgtctctacctgaccacagattttattttgctacagactgtgg

SEQ ID NO: 6042 - DNA, 415 bp, Homo sapiens
aagtctttctacaacactgctggtcccaaccctggccatgcagcaggataatctggtgaattaccaaaaaaaaaaaaaaaaaaaaaaaatttttggggtaacccccaaggtttttaataccccaattttaagggggggaatcgggccctaaaagggcatataaaacatttggtttaacaacaacggtttgaaaaaaaaataacccattctggaaatttatagggtttaatttttaacccaattttttccttacaaaaaaaaaaaaagggggggccctttaaaaaaacccctgggggggccaaaattaaccgggggagggaaaaaaaaaatttttccctaaaaggggggaaaaaaaaaaaccacctgggaatttttgaaaaaaaacctttctttggggggggaaaaaaaaaaaaaa

SEQ ID NO: 6043 - DNA, 405 bp, Homo sapiens
cggacgcgtgggcggacgcgtgggcggctccagcgccatggcgccctccaggaagttcttcgttgggggaaactggaagatgaacgggcggaagcagagtctgggggagctcatcggcactctgaacgcggccaaggtgccggccgacaccgaggtggtttgtgctccccctactgcctatatcgacttcgcccggcagaagctagatcccaagattgctgtggctgcgcagaactgctacaaagtgactaatggggcttttactggggagatcagccctggcatgatcaaagactgcggagccacgtgggtggtcctggggcactcagagagaaggcatgtctttggggagtcagatgagctgattgggcagaaagtggcccatgctctggcagagggactcgg

SEQ ID NO: 6044 - DNA, 419 bp, Homo sapiens
cttctcgggaggcagagctgggtcctttccaccatggcacctaagaaagcaaagaagagagccgggggggccgactccaacgtggtgttcatgttcgaacagacccaagtccaggaatttaaggaggccttcactatcatggaccagaacagggatggcttcattgacaagaacgatctgagagacacctttgctgcccttgggcgagtgaacgtgaaaaatgaagaacttgatgaaatgatcaaggaggctccgggtccaattaactttactgtgttcctcacaatgcttggggagaaacttatgggagcggaccctgatgaaaccattctcaacgcattcaaagtgcttgaccctgaaagcaaaggggtgctgaatgctgattacgttcgggaaatgctgaccacgcaggcggagag

SEQ ID NO: 6045 - DNA, 475 bp, Homo sapiens
  misc_feature (1)...(475): n = A,T,C or G
attgatcgccctcggttgttatgaccacttcccgggncgacccacgcgtgcgatctactcgcggctgctgcgggagcgcatcgtgtgcgttttgggcccgatcgatgacagcgttgccagccttggtatcgcacagctcctcttcctgcaatccgagagcaacaagaagcccatccacatgtacatcaacagccctggtggtgtggtgaccgcgggcctggccatctacgacacgatgcagtacatcctcaacccgatctgcacctggtgcgtgggccaggccgccagcatgggctccctgcttctcgccgccggcaccccaggcatgcgccactcgctccccaactcccgtatcatgatccaccagccctcaggaggcgcccggtgccaagccacagacattgccatccaggcagaggagatcatgaagctcaagaagcagctctataacatctacgccaagcacaccaaacag

SEQ ID NO: 6046 - DNA, 411 bp, Homo sapiens
  misc_feature (1)...(411): n = A,T,C or G
cccacgcgtccgttttataatctataagattagggttgttaaggtaagtattagcatgaaaataaatgcttatactgtaacaataagtagaaaaatgatgcacaaaagtatacatgcattccagttgcagctatcttatttttcaacagcattaaaaactactggaaggaaatacatccaaaaggctaatagtgattaaaatttactaccagtgtcaattacaatgttttatttgcaaggaacagaaaatccaactctcactggcttgagcaatgaaatatatttcttcatgtaactgtgtaactagaaagcccaagggttgggcttcaggtttgaaccagccagcagctcaaccaggtcattaaaggtctggntgtttctcttcactcttccttaatgtttgcttcatgg

SEQ ID NO: 6047 - DNA, 456 bp, Homo sapiens
gttgacgtttgctgatttttgactttgcttgtagctgctccccgaactcgccgtcttcctgtcggcggccggggctgtaggtgagcgcgagaggacggatgatggaatcctgcaaacagacgccttctccatcccaaggcgcgggcaggtgccgggacgctgggcctggcggtgttttcgtcgtgctcagcggcgggaggaggcggaagaaaccagagcctgggagattaacaggaaacttccaagatggaaactttgtctttccccagacataatgtagctgagattgtgattcatattcgcaataagatcttaacaggagctgatggtaaaaacctcaccaagaatgatctttatccaaatccaaagcctgaagtcttgcacatgatctacatgagagccttacatatagtatatggaattcgactggaacattattacatgatgccagtgaag

SEQ ID NO: 6048 - DNA, 486 bp, Homo sapiens
  misc_feature (1)...(486): n = A,T,C or G
cggcccctgaagcccctcgnaannccagttggaccgnancaacnccaanntngggngaccacgcgtccggaattttgatgatacagttttgaaatattttcactgtgcaaattccttcaaactgtttcctattacctcaagtttaaaaggtggttaggttcatttctgaaaatttgatagctgtcaaagatagcattatcaattagtttataaaggatgtactattcaataaaaggtgttaggataaatagttatatatccatgtataagagtttaaagctcttacaaaaaaataaataacttggaagaattatcaataaacatctaaagagtagatgtcagaggccaggtgtggtgtttcacacctgtaatctcagtactttgggaggctgaggcaggcagattgcttcagctcaggaatttaagaccagctggggcaacatggcgaaactctgtctcttcatataaaaattagttgggtgtggg

SEQ ID NO: 6049 - DNA, 478 bp, Homo sapiens
  misc_feature (1)...(478): n = A,T,C or G
cgctccccatttgataactgangacatcgcaaccgccccggaannnacgggccgacccacgcgtccgaagccacattctcccagaccacttatatctataatatagatgacattttatcaggtgacatttttgtctgcacttaatttgtggaatccagtgcaaaataaaaattaccaagaatttcaagatggcaacaacagagcattaaaccaagtgcagggccctatgcaactcacacaggtcccacgcccatgaattcagccgtgcactttagttctgcatatgctgacccttttgtcttatttctctctctttttttagatgtaattaaagcctatgtcttatttctcaattggttcatatctatgattgttacagtaggtaattggtcagacatgagtggggcaggagagggcctccaccaaccaagagtgtcaggagaccatcagatgttggtcaggcagttgttaacttgct

SEQ ID NO: 6050 - DNA, 407 bp, Homo sapiens
atggcttttatttacttatctatatttatatatacatatttatatgtagctgtcacccaagctgtagtgtgactgatgcaatcatagctcactgccaccttaatctccccagctcaaaaaacccaacctcagtctcaaagatggttacttcaccacaaaaaaattaaaatgcttaagtttctcattaaagagtagaagtgtacattcagaaacaattatgggaggtaattcattaatattaaatatgccaacggtattttaaaggttattggagaattagaagggggtggggtgcaggacgaaaaattaatgggtgcaatgtacaccattcaggtaatggctgcacaaaaagctcagactccaaactacttcatatacctatgcaacagaactgcacttataccccg

SEQ ID NO: 6051 - DNA, 419 bp, Homo sapiens
tgaagacactgatggggatggaagcagacccatggcatcaactgcagtgtttctgctgtgttcatcttctcagaggactctgtgacccagttctttgggagcttttgtcagtctctttcgtgccatctaccttcgaaggaaggaacacttttagagttacaatgatgaggagaggagcgggacaatactcaatcctataccaagtcaattgagattagtttcctactgggagtaagtgcctggccctgctactcctatttgaatgctattaatattacctagccttttacaaaggatactttgtaaatgtctgctgttggaacttgatgttaatccattttggtcatagccatattagagagatttgcacagaatgtaaaggcaaaagcataggaaacaccttcctttctaaagcaaca

SEQ ID NO: 6052 - DNA, 487 bp, Homo sapiens
gctgctgttggttgggggccgtcccgctcctaaggcaggaagatggtggccgcaaagaagacgaaaaagtcgctggagtcgatcaactctaggctccaactcgttatgaaaagtgggaagtacgtcctggggtacaagcagactctgaagatgatcagacaaggcaaagcgaaattggtcattctcgctaacaactgcccagctttgaggaaatctgaaatagagtactatgctatgttggctaaaactggtgtccatcactacagtggcaataatattgaactgggcacagcatgcggaaaatactacagagtgtgcacactggctatcattgatccaggtgactctgacatcattagaagcatgccagaacagactggtgaaaagtaaaccttttcacctacaaaatttcacctgcaaaccttatacctgcaaaattttcctttaataaaatttgcttgttttaaaaaaaaaaaaaaaaaaaaaa

SEQ ID NO: 6053 - DNA, 477 bp, Homo sapiens
  misc_feature (1)...(477): n = A,T,C or G
cccacgcgtccggtggaaccagagaggaaccagaggggagagacagagcagcaagcagtggattgctccttgacgacgccagcatgagctccttctccaccaccaccgtgagcttcctccttttactggcattccagctcctaggtcagaccagagctaatcccatgtacaatgccgtgtccaacgcagacctgatggatttcaagaatttgctggaccatttggaagaaaagatgcctttagaagatgaggtcgtgcccccacaagtgctcagtgagccgaatgaagaagcgggggctgctctcagccccctccctgaggtgcctccctggaccggggaagtcagcccagcccagagagatggaggtgccctcgggcggngcccctgggactcctctgatcgatctgccctcctaaaaagcaagctgagggcgctgctcactgcccctcggagcctgcggagatccagctgcttcg

SEQ ID NO: 6054 - DNA, 476 bp, Homo sapiens
  misc_feature (1)...(476): n = A,T,C or G
attttatggccttcggnaccgttgaggaccttcccggacgacccacgcgnccgcacgacccgggccgcggcgcgcccctcgccaaggtggttttccgggatccgaatcgttttaagaagcggacggagctgttcattgccgccgagggcattcacacgggccagtttgtgtattgcggcaagaaggcccagctcaacattggcaatgtgctccctgtgggcaccatgcctgagggtacaatcgtgtgctgcctggaggagaagcctggagaccgtggcaagctggcccgggcatcagggaactatgccaccgttatctcccacaaccctgagaccaagaagacccgtgtgaagctgccctccggctccaagaaggttatctcctcagccaacagagctgtggttggtgtggtggctggaggtggccgaattgacaaacccatcttgaaggctgggcgggcgtaccacaaatataag

SEQ ID NO: 6055 - DNA, 416 bp, Homo sapiens
  misc_feature (1)...(416): n = A,T,C or G
ctttatcctgggaggcaaccagtctggggaaggttgtgtgattacacgagacagaaaggaatcattggatgtatatgaactcgatgctaagcagggtagatggtatgtggtacaaacaaattatgaccgttggaaacatcccttcttccttgatgatcgcagaacgcctgcaaagatgtgtctgaaccgcaccagccaagagaatatctcatttgaaaccatgtatgatgtcctgtcaacaaaacctgtcctcaacaagctgaccgtatacacaaccttgatagatgttaccaaaggtcaattcgaaacttacctgcgggactgccctgacccttgtataggttggtgagcacacgtctggcctacagaatgcggcctctgagacatgaagacaccatctccatgtgaccgaacan

SEQ ID NO: 6056 - DNA, 480 bp, Homo sapiens
  misc_feature (1)...(480): n = A,T,C or G
agtgcncaaaatgataactgacagctactggcgaagagctccggaattgaccgacccacccacgcgttcgagcataacttgtttataaacagcagtttcttgttgaatctcactgtaatgcatgttcattttaaagcagcttgtatttatttggctcttgaccatttgatttctattggaggctaaaattagccaccatcattaaacaactcagaaaattgccctaagtatgctgttgtctctgagactgtacaatacaataatatttagtaatttagaaataaatgttagtgaaaagtcacacagtgcttctgattaatagaacatgttgaagtatgactgataagcggtgctaaaaatttgtgtatttcctaagaaataactacaaacaaatgttctggtacatcatggttttttttttttttttcacataaacggggttaaaatggggctggtaactccaaggaaaaaaaaaaaaaa

SEQ ID NO: 6057 - DNA, 477 bp, Homo sapiens
  misc_feature (1)...(477): n = A,T,C or G
cccacgcgtccggtaccaggcgccgcagctgcagcctgacaggatgcagtgaggggcgttcctgccccgaggactgtggcattgtcaccttcacagcagacagagctgccaggccatgatgggctggcgacagcccggctgagcttcagtgaggtgccaccagcacccgtgcctccgaagaccgctcgggcattccgcctgcgccctgggacagcggagagatggcttctctttaatctaggtcccattgtgtcttgagggaggactttaagaatgactgagaactatttaaagacgcaatcccaggttccttgcacaccatggcagcctctccttgcaccttctcctgcctctccacactccaggttccctcaggcttgtgtccccactgctgcatcgtggcggngtgtcacagaccctctgcagcccctggctgccctggactgtgcagagatgcctgactccacggaaacctgn

SEQ ID NO: 6058 - DNA, 488 bp, Homo sapiens
  misc_feature (1)...(488): n = A,T,C or G
agcctcgcttccctcccgcggcgaccagggcccgagccgagagtagcagttgtagctacccgcccagaaactagacacaatgtgcgacgaagacgagaccaccgccctcgtgtgcgacaatggctccggcctggtgaaagccggcttcgccggggatgacgcccctagggccgtgttcccgtccatcgtgggccgcccccgacaccagggcgtcatggtcggtatgggtcagaaagattcctacgtgggcgacgaggctcagagcaagagaggtatcctgaccctgaagtaccctatcgagcacggcatcatcaccaactgggatgacatggagaagatctggcaccacaccttctacaacgagcttcgcgtggctcccgaggagcaccccaccctgctcaccgaggcccccctcaatcccaaggccaaccgcgagaagatgacccagatcatgtttgagaccttcaacgtgcccgccatgtacgtgn

SEQ ID NO: 6059 - DNA, 459 bp, Homo sapiens
  misc_feature (1)...(459): n = A,T,C or G
accaagtacacatttgtcgtgcctgaagacacccgtgtgggcacctctgtgggctctctgtttgttgaggacccagatgagccccagaaccggatgaccaagtacagcatcttgcggggcgactaccaggacgctttcaccattgagacaaaccccgcccacaacgagggcatcatcaagcccatgaagcctctggattatgaatacatccagcaatacagcttcatcgtcgaggccacagaccccaccatcgacctccgatacatgagccctcccgcgggaaacagagcccaggtcattatcaacatcacagatgtggacagcttgacttgtggggcaggattctctgcagcccattcccaagggagactgaccatcatgccctctccaggcctgtcaagagggaggaaggggccccatggcagctcctgaccttgggtcctgaagtgacctcactgn

SEQ ID NO: 6060 - DNA, 468 bp, Homo sapiens
  misc_feature (1)...(468): n = A,T,C or G
cttcactcctggagactatgacgtcaacatcaccttcggggggcggcccatcccaagtgtgcaaagagagtggtcggggtctcatggaagacaagggagggtgcaggatgctcgccccacaagggggaaactggaaggaagttgggtaagaatgttcatagagaggacagcctaaagtgggttggggccggagcccggccagagggaggacgtggaggaggcaggcaatgagggttgatgtgacagcccccctagtcaatcacaggaacacactctggcctcctagccccttgtctggagctcaagaccttggctttgcaggtccaccactcactgtgtgtccagaaactcagacacagcccactcctcttggcggctcaagccagccttgggccttcttgcacgcatcgtctgcagaactcccctgccctctgcagacccagctgcccgggcaggtcatgtcttaan

SEQ ID NO: 6061 - DNA, 472 bp, Homo sapiens
tgaggggtcccggagctcagcccgcccgtccgtgtccgcaggccccggccagcgccgcctggaggagcgtcctcagggtctccccgcgcccaggtccagcgtcggaagtggaagctgaacctgattgcagagttggagtccagagttctggctgagcctgtccctctgccagccgacccaatggaactgaaaaatctggagtataggccagtgaaggtcagggggtgctttgaccattccaaggagctgtatatgatgccccggaccatggtggaccctgtccgggaggcccgggagggcggcctcatctcctcctcaactcagagtggggcctatgtggtcactcccttccactgcaccgacctgggagtcaccatcctggtaaatagagggttcgttcccaggaagaaagtgaatcctgaaacccggcagaaaggccagattgagggagaagtggacctcattgtgatgg

SEQ ID NO: 6062 - DNA, 414 bp, Homo sapiens
  misc_feature (1)...(414): n = A,T,C or G
gggtcccctccgggggtcgcaccgggcagtgtgaagagatgccccgatgagctcctgggcacctctgtggtgggagacacaccctgcgggcccatcttcttcacccggacttcaatggtctcctccacctccacccacttgggctggggccccgagagtccgggcagagctggagagtgggcctcggcctccgtcacatacagtgtgggcaccacgggcttctggcctggttctgcctccggcctgcggggctggccagcacctggcaggtacagcaggtcgggggccagtaggcctggcctcagcgggctggcagagcancgggaaggtgagcgggagggggacttgctgggggaccgtcgttggccacgtgggctcttcaccacagtggtgatggtctcttctctggggagg

SEQ ID NO: 6063 - DNA, 478 bp, Homo sapiens
  misc_feature (1)...(478): n = A,T,C or G
agcggcccaaatgatnactgaaggcantggcgaagaacttccgggtngacccacgcgtccggaagaggacttgtcagaagctacctggatggagcagtcaaatgtggcagatactatggatttaatagggccagaagcacctataatacatacctctcaagatgaaaaacctttgaagtatggccatgctttgcttcccggtgaaggtgcagctatggctgagtatgtaaaagctggaaagcgaatcccacgaagaggtgaaattgggttgacaagtgaagagatcggttcttttgaatgctcaggttatgtcatgagtggtagcaggcatcgcagaatggaggctgtacgactgcgtaaggagaaccagatctacagtgctgatgagaagagagctcttgcatcctttaaccaagaagagagacgaaagagagaaagtttgattttagccagtttccgagagatggtgcacaaaaag

SEQ ID NO: 6064 - DNA, 487 bp, Homo sapiens
acctcacaagcggatgccggggcttctcctggctgccccagcgcccgcggatctgtctgccgaggcgcgcttccactcccagagtttattcctcgttccttcttcagtcctgctcgtcggaggacccggttgccatggtgaaggaaaaagtggcccaccctcaggaccctcaccacccatcagagaagcctgtcattcactgccataaatgtggggagccttgcaagggtgaagtgcttcgggtccagaccaaacatttccacatcaagtgtttcacctgcaaagtgtgtggctgtgacctggcacaagggggcttcttcataaagaacggagagtatctctgcaccctggactaccagcggatgtacgggacacgctgccatggctgtggggagtttgtggagggcgaagtggtgactgctctgggcaagacctaccatcccaattgctttgcttgtactatctgcaagcgcccgtttccacccgg

SEQ ID NO: 6065 - DNA, 477 bp, Homo sapiens
  misc_feature (1)...(477): n = A,T,C or G
cggccccataggagtacctaaggcatgacaaccgccccggaanttacgggccgacccacccgtccggatggagcccagcaccgcggcccgggcttgggcccttttttggttgctgctgcccttgcttggcgcgggtggcgccagcggaccccgcaccttagtgctgctggacaacctcaacgtgcgggagactcattcgcttttcttccggagcctgaaggaccggggctttgagctcacattcaagaccgctgatgaccccagcctgtctctcataaagaatggggaattcctctatgacaatctcatcattttctccccttcggcagaagattttggaggcaacatcaaccggggagaccatcagtgcctttattgacggtggaggcagtgggctggtagctgccagctccgacattggtgaccctcttcgagagctgggcagtgagtgcgggattgagtttgacgacgagaaan

SEQ ID NO: 6066 - DNA, 480 bp, Homo sapiens
  misc_feature (1)...(480): n = A,T,C or G
atgtcccccaacttgagtcnctacagtcnatggcnaggaacnctngggntganccacccgtccgcccacgcgtacgaccacgcgtacgtaaattcctgttttttgcttattttttaattacactgagataattttgaaaagaaatagaaattaagctactatataaaacaattgtttacgtgtacttttaacttttaaaagtacttaattaacatatgttgtttgacttgcataaagtttttaaaaattgttgtttatttgccaaagtcaacagaatgtctgttattggtttatgtatacggtaaagaaatttaaagtgtagaattttcctcccccaaaaagtcatgtgttgatagtagaagcagaggtagttgttgtaacagcaatcattgtcattgtcattatcttcttaaacatgaagctgctcctgatcataggtggtacacgttaataacactagtaaaaataacgtcttacact

SEQ ID NO: 6067 - DNA, 460 bp, Homo sapiens
ccagggtgactcccatgatgcctcccttcaaccaggctttttggccccacaaatactttaagcaaatcattaaaattataacagttaatggtttgggggagtgtatgctgcaactgctaactcctatgaaacagccttttccctggacacagatggtccatacgctgagccacgtgaaactgctgatgttttgtttagatgcacacacatggcagcgtttcatacaggtcagcaggttacaccggcttttgaccatattcatcgctatttaaaacctgcggcctagtgaacgcttattttacagactttctaatttgaccagatttcttaatgaatagacacagaattaactaaaaacagtctcaccccatgtagtgcgccgtgtcctgagagaggtgccctccctacgaggagggaagaacaggccctgacctgcagacgcccggcacgtatagaacct

SEQ ID NO: 6068 - DNA, 488 bp, Homo sapiens
aagagttggtcaggtatgggctttgaactcattttaaaaccttagcagtgttcatctttgttatccaaagtctctggaaagaattacaataccaagtaatacaggatctctgcccttttagtaaaattaacaaagagcagcagtttttaaacattttgatctgagaacacttttacattcttaaaaattattgaggactaaaaatacaaaaattagctgggtgtggtggtgggcacctgtaatcccagctacttgggaggctgaggcaggaaaactacttgaacccaggagacagaggtttcagtgagccaagatcaagccactgcacttcacccagggcgacagaacaagactctgtctcaaaaaagaaaaaaaaaaattatcgaggactagaaaagagcttttgtttatgtgagttgttatttattgctgataggcattattaggtattaaaaattaaacataataaaaaattattccctaattca

SEQ ID NO: 6069 - DNA, 413 bp, Homo sapiens
ctcctcttaattgctcactgctaagacccttgttgtttttgacagtgcccttagacatgaacatcctccatgctctgtttcagatcaaagtcagtccccttagggagagctgtgaagccttctgttctgactctccctctgggcaggcccctgcaccactgagccagagctaaaggagcagggtcagtggcctgcttctcccagagtgacattcctggcctacagactgctcactagatgggaatggtagccactagtcttctgggcttgcccctttcaacatggaacctctaccctataagcaatctggggaggggctatcaggtccaccattcttggcctgctgtacctggagcagagcttgtgccctatgagtggggcctgggtgggggaagggggccccaggcctcttg

SEQ ID NO: 6070 - DNA, 484 bp, Homo sapiens
tcgcgcagggtaggggactgcgcggcggtgccaggccgggcgtgggcgagagcacgaacgggctgcctgcgggctgagagcgtcgagctgtcaccatgggtgatcacgcttggagcttcctaaaggacttcctggccgggggcgtcgccgctgccgtctccaagaccgcggtcgcccccatcgagagggtcaaactgctgctgcaggtccagcatgccagcaaacagatcagtgctgagaagcagtacaaagggatcattgattgtgtggtgagaatccctaaggagcagggcttcctctccttctggaggggtaacctggccaacgtgatccgttacttccccacccaagctctcaacttcgccttcaaggacaagtacaagcagctcttcttagggggtgtggatcggcataagcagttctggcgctactttgctggtaacctggcgtccggtggggccgctggggccacctccctttgctt

SEQ ID NO: 6071 - DNA, 475 bp, Homo sapiens
taaattccacaaaggcatcatcacttcctggtgagcagaaacaggtggccttttgcctccctgagacatttgccaagtcgagacttgggcaggtggaagatttgcctgccataggcagaaagactttgctggggttagtcaaaaccatcagagcttttaatgaccatgtgtgttggcatgacaaagtggaatgaattacttaaccaaagacatcatactgtcatgtaatatcacacatgacggtatacctctgcatttaaacatggctcttattgacttccacgtggcactgaaaagaaagaaaaccatgattcctaggattttgctctgacaccatcatgttgtatgggttagaatatcatgagtctgtgaagatatttgctttctaaacataagatcatgtccaagattgtgacaatgacaaaatcctcttaccaagtgaatatgacactttctatatactggaatgtttctt

SEQ ID NO: 6072 - DNA, 461 bp, Homo sapiens
  misc_feature (1)...(461): n = A,T,C or G
tttcgggtcgacccacgcgtccggagccagccaaccagatggtgaaatgtgaccctcgccatgnnntgtacatgnnnnttttttgtgttgtaccgtggtgacgtggttcccaaagatgtcaatgctgnccattgnnnnnnttnnnncgnnngngatgnntttnnaatttttttttttgggggggttgggtttgggtgggtaaaataacagcctcccactgtggtgcctggtggagacctggccaaggtacagagagctgtgtgcatgctgagcaacaccacagccattgctgaggcctgggctcgcctggaccacaagtttgacctgatgtatgccaaacgtgcctttgttcactggtacgttggggaggggatggaggaaggtgagttttcagaggcccgtgaggacatggctgcccttgagaaggattatgaggaggttggtgtggattctgttgaggg

SEQ ID NO: 6073 - DNA, 395 bp, Homo sapiens
cccacgcgtccgcggacgcgtgggaaaggtttgacaggcttaatgtgggcatccagtggcctgtggacccccccctgccaccacgactgctgccacccggagttcccccattgtctttggtgcctgggcttccagagtccctcccatcaggactaccagcttgctcagttagcagcagagggcagttccccagcttgatggtttctgagctaagtctggcatggaggggcaaggggtaggggatggggtgctgtgtaggaatggcctcagctcttgttttgctgctggttttaggggccaaagtaaatgggtggattctggaacctcaggcctagactaggttgcctttgtgggggcgatgaagcagagtcccctggtcaagtctctcggctcct

SEQ ID NO: 6074 - DNA, 371 bp, Homo sapiens
cctaagtcctttcgaatatctgcaaagccttctcaataaggacgggcacaaacaagcccagagagtgaagactacagtaactatctaactattcaatgccttgacactgaataacacctaccagcgccagcaccatccaggaaaatatgacctcaccaaatgaactgaataagacaccagggaccaatcctggaaaaactgagatatgtgacatttcaggtagagaattcaaaataactgtgttgaggaaactcaaataaatacaggagaacacagagaagaaactcaaagttccatcagataaatttaacaagtaaattgaaataattaaatagaatcaaacagaaattctggagctgaaaaatctatta

SEQ ID NO: 6075 - DNA, 431 bp, Homo sapiens
cacagataaagataagttttactgtcatgctgcttttaacataacagagcaacatcacctaggaaaaaagtttgtaggaggatttttaatccatatatttgtcttatggctagataaagatttctctgaaaaaaagaagcatgtcaggaatctctgggtgcccctttttcctctggggacttctagcattgttgggcttggctttggttatatcactgatcttcaatatttcccactatgtggaaaagcaacgacaagataaaatgtacagctactccagtgaccacaccagggttgatgagtattatattgaagacacaccaatttatggtaacttagatgatatgatttcagaaccaatggatgaaaattgctatgaacaaatgaaagcccgaccagagaaatctgtaaataagatgcaggaagccacc

SEQ ID NO: 6076 - DNA, 445 bp, Homo sapiens
  misc_feature (1)...(445): n = A,T,C or G
gcagatgcaggcctggagtagtctcctttctggactgagaagagaagaatggagaagcccctcttcccattagtgcctttgcattggtttggctttggctacacagcactggttgtttctggtgggatcgttggctatgtaaaaacaggcagcgtgccgtccctggctgcagggctgctcttcggcagtctagccggcctgggtgcttaccagctgtatcaggatccaaggaacgtttggggtttcctagccgctacatctgttacttttgttggtgttatgggaatgagatcctactactatggaaaattcatgcctgtaggtttaattgcaggtgccagtttgctgatggccgccaaaggtggagttcgtatgttgatgacatctgattagcaaaaagcatgttccagcttggactcatgaaagaatanaaatctgcatcttt

SEQ ID NO: 6077 - DNA, 412 bp, Homo sapiens
gcgagatccttcattttagattaagcttttcattttagtatattatttaatgtaaataaaacatcactatcaattttaaggaaactttttaattgtgcaaaggataaattttttgacctattttagggttctaaatgcaataagatttagttgagttattccacaaacacattataaagttcagatgtttcatcaatgcagttctcacgaaagtatttactttttaaaaataactgagatattattttaaatttcttttattaatactttcttttattaatatatgggggaaaattattttgacatgacgtggtaaaatgtgaaaaactaatgtgtctcaggctcaagtttttatagttattaaatgtttcaaaatagacaagttttgtttcctcattgatgttaagaacca

SEQ ID NO: 6078 - DNA, 425 bp, Homo sapiens
ttgattttgagaaagctctatgagctctaagtaactgcatggttttttgtttaatgtaatataggagacccttcacattcccaaggaatatattccaaaacatttttgtgaatatctaagtttgtgaaactactagggcatgatacagtaaggtgtaattacagaatttacgaaatgtaaatgacctctacagagttttatggaatacctggtactaacgtaggcagctgcaaaaccacactgagttacagctgtcagccctcctcattcctaaataacttgccttacatatcagccctcccacttctgaagttcaaattagtgcctcggaaatgtagaatttattatttgtcatttttttttttttagcataaattgagaacagttgaactcttaaatcctcaaatgccaggggtctgctctaa

SEQ ID NO: 6079 - DNA, 402 bp, Homo sapiens
cccacgcgtccggagaagaataaccccagctctcatcaacacggaaagaaactggccagcaaactagcttgaatgattctcacatactgtggcgacaactctgtgcacagaccaaggaaggagaagccgcgggagcccgtaaagtacttcgttggtggtcaaattctggagggctaaatgtgtgtgtgcgtgaatgatcacaaacaaccccacttgcagtgttgttcatgtggatggtgacaagtactactgctggatggagtgagtgggtcctctccgccgttctgtagctacctcatatggcttaaggcagatcctgccatgggatttataccagcatgccaacactaagagcggcctaattctcccttgggggagcagccagggatgacaacacgagtg

SEQ ID NO: 6080 - DNA, 414 bp, Homo sapiens
tatatctgtatcttcgttttggagacgctgctgttttctaactgggccatcagtgcagacatcctcatgtacgtggtcatccccacgcggcgcgccactgccgtggccttgcagagcttcacctcccacctgctgggggacgccgggagcccctacctcattggctttatctcagacctgatccgccagagcactaaggactccccgctctgggagttcctgagcctgggctacgcgctcatgctctgccctttcgtcgtggtcctgggcggcatgttcttcctcgccactgcgctcttcttcgtcagcgaccgcgccagggctgaacagcaggtgaaccagctggcgatgccgcccgcatctgtgaaagtctgaggtggtgccattgtgacaatgacaaacccacactcccac

SEQ ID NO: 6081 - DNA, 442 bp, Homo sapiens
gcatccgggccgtgctgctggggcctcccggggccggtaaagggacccaggcacccagattggctgaaaacttctgtgtctgccatttagctactggggacatgctgagggccatggtggcttctggctcagagctaggaaaaaagctgaaggcaactatggatgctgggaaactggtgagtgatgaaatggtagtggagctcattgagaagaatttggagacccccttgtgcaaaaatggttttcttctggatggcttccctcggactgtgaggcaggcagaaatgctcgatgacctcatggagaagaggaaagagaagcttgattctgtgattgaattcagcatcccagactctctgctgatccgaagaattacaggaaggctgattcaccccaagagtggccgttcctaccacgaggagttcaaccctccaaaagagcc

SEQ ID NO: 6082 - DNA, 180 bp, Homo sapiens
ttggccaccacctcttctacttgctgtctgaaaaaacacctgactagtacagctgagatcttggcttctcaacagggcaaagataccaggcctgctgctgaggtcactgccacttctcacatgctgcttaagggagcacaaataaaggtattcgatttttaaaaaaaaaaaaaaaaaaag

SEQ ID NO: 6083 - DNA, 412 bp, Homo sapiens
ccttgggtgtgtgagtgcctatgaaaattgttatgggcttgctagtttatgaggacctgaatcaggtaggacctatagagtgaaaataatgggattttataattgttaatattttaatctttctgggaaaagtattctcaataagaacatacacctttgctattagacttctgtacatttagctttcatacatttcaaatattgagggggcttttctgtaccattttaaggtgaaggaaagcgatacgaccttcctaagttggatccaggctgaagaatcaagactaccattttgaagcgatgtagattattcttttatcctgagacagatcatggaaaagagacagcggatctttctaccttgttttagggcatcagttgtattccaagttatggaacaacatgtatgtct

SEQ ID NO: 6084 - DNA, 493 bp, Homo sapiens
  misc_feature (1)...(493): n = A,T,C or G
nggggcccttgatcgccctgcggnaccgactgaggaacctccgggtcgacccacgcgtccggtctcaagcagcccggaggagactgacggtccctgggaccctgaaggtcacccgggcggccccctcactgaccctccaaacgcccctgtcctcgccctgcctcctgccattcccggcctgagtctcagcatggcggatgggagcagcgatgcggctagggaacctcgccctgcaccagccccaatcagacgccgctcctccaactaccgcgcttatgccacggagccgcacgccaagaaaaaatctaagatctccgcctcgagaaaattgcagctgaagactctgctgctgcagattgcaaagcaagagctggagcgagaggcggaggagcggcgcggagagaaggggcgcgctctgagcacccgctgccagccgctggagttggccgggctgggcttcgcggagctgcaggacttgtgccgacagctccac

SEQ ID NO: 6085 - DNA, 419 bp, Homo sapiens
cccacgcgtccgcccacgcgtccggagacggagcttgcagtgagccgcagtcgcgccactgcactccatactgggtgacagagtgagactccgtctcagaaaagaaaaaaaaaaatgtgaattcagttgggtgtagtggctcaggcctcaggcctgtaatcccagcactttgtgaggtcaaggtgggaggatcacgaggccaggagttcaagaccagactaaacaacatagcaggacctcatctctaaaaaaataaataaataaaaaacaaaaacttgggtgaatttgcattctattttataatataaccaaatgatctcggccttcacaccatcttcttggaaacctctgcaccatgagagcctagtggaggaagcgaatgcgcaggctgaagtgcaaaagaagaaagatgaggcagg

SEQ ID NO: 6086 - DNA, 490 bp, Homo sapiens
  misc_feature (1)...(490): n = A,T,C or G
ggggaattgatcgccctgcggnaccactgatgatccctcgggacgacccacgcgtccgggtgcatgttgtgtgaggatcccggggccgccgcgtcgctcgggccccgccatggccgtcaccatcacgctcaaaacgctgcagcagcagaccttcaagatccgcatggagcctgacgagacggtgaaggtgctaaaggagaagatagaagctgagaagggtcgtgatgccttccccgtggctggacagaaactcatccatgccggcaagatcttgagtgacgatgtgcctatcagggactatcgcattgatgagaagaactttgtggtcgtcatggtgatccttaccaaagccggccagggtacctcagcacccccagaggcctcacccacagctgccccagagtcctctacatccttcccgcctgcccccacctcatgcatgtgccatcccccacctgccgccagagaggacaagagcccatcagaggaa

SEQ ID NO: 6087 - DNA, 412 bp, Homo sapiens
cccacgcgtccgcccacgcgtccgcccacgcgtccgcccccagagccaagaccttctccagaaggtgacccttcccccccaccaccaccaatgtcagccctggtccccgacactcccccggacacccctcctgccatgaagaatgccactagctctaagcagctcccactggaaccagagagcccctcagggcaggtcgggcctaggccagcccccccgcaggaagagtccccttcctctgaagcaaagagcagaggacccaccccaccagccatgggcccacgggatgccagacctcctcgaaggagcagccagccatctccaacagcagtgccagcctccgacagccctcccaccaagcaagaggtgaagaaggcaggagagagacacaagctggcaaaggagcggcgag

SEQ ID NO: 6088 - DNA, 444 bp, Homo sapiens
  misc_feature (1)...(444): n = A,T,C or G
ccaaggtgctcggtccttccgaggaagctaaggctgcgttggggtgaggccctcacttcatccggcgactagcaccgcgtccggcagcgccagccctacactcgcccgcgccatggcctctgtctccgagctcgcctgcatctactcggccctcattctgcacgacgatgaggtgacagtcacggaggataagatcaatgccctcattaaagcagccggtgtaaatgttgagcctttttggcctggcttgtttgcaaaggccctggccaacgtcaacattgggagcctcatctgcaatgtaggggccggtggacctgctccagcagctggtgctgcaccagcaggaggtcctgccccctccactgctgctgctccagctgaggagaagaaagtggaagcaaagaaagatgaatccgaggagtctgatgatgacatggggcttgn

SEQ ID NO: 6089 - DNA, 404 bp, Homo sapiens
aattgacaggtttctcagatcctgtatatgcagaagcttacgttcatgtcaaccaatatgatattgtcctggatgtacttgttgtgaaccaaaccagtgatactttgcagaattgcacattagaactagctacactaggggatctgaaacttgtggaaaagccgtctcctttgactcttgctcctcatgacttcgcaaatattaaagctaacgtcaaagtagcatcaacagaaaatggaataatttttggtaatatagtttatgatgtctctggagcagcaagtgacagaaattgtgtggttctcagtgatattcacatcgacatcatggactatatccagcctgcaacttgcactgatgcagaattccgtcagatgtgggccgaatttgaatgggaaaacaaa

SEQ ID NO: 6090 - DNA, 413 bp, Homo sapiens
gcgcagttaacagcaactgtgtatacttgaaacaatattatctatatacatatatttttctgtggcataagggatatccattatttaatctacaaactaggtctggaaaaaatgtagatttgtagacccttgatcattccacacctctaggggctgaacactcataaactacaggctctaaaacagactatttcctgaaacttctgcctctgaaattcagtaactataacttgggtggattcctcaattatcttttttttattaatataggacattacacaaaggtgtctacaaaaattctgtaaaaaatcagtaataacaaaaggcctacatatttatttttatgaacagctgtaaaatctgcacaatacttagcataatttttaactttgatatttcagcaattgttacaa

SEQ ID NO: 6091 - DNA, 408 bp, Homo sapiens
  misc_feature (1)...(408): n = A,T,C or G
cgccccgcgatgtcggaagaaacccgacagagcaaattggccgcagcgaagaaaaagttgagagaatatcagcagaggaatagccctggtgttcctacaggagcgaaaaagaagaagaaaataaaaaatggcagtaaccctgagacaaccacttctggtggttgccactcacctgaggatattcaggacattctgaaggtgctggtgtccgaccttaaccgttccaatggggtagcgctccccccattggacaagtggaagacacccaaggacaatgctgctactctacaaccacgaccaatgatatgaaaaaccatcgttgtatttcaactacaagaacaccnnngnaaaaaaaaaaaaaaaaaaaaanngggggggggcctttttaaaaatcccttggggggcccc

SEQ ID NO: 6092 - DNA, 417 bp, Homo sapiens
cggacgcgtggttgaatgaatgttcagactaatgaaaaactttcttcttaatcccaaccttttccactcatattgtttagggattttagatatttctatgcagtcacccgagcttgtcttgtattatcttcccacatgctgtattatcttgtattatcttctcacatgctgtatgggaacagcagcatgaggtctccatgaacacggggcttggccctccctgctgtttctctgattgcctaggtctctctctctgcctctgctcatgttgtttcttgcatctatttctgttatttctagtttgcaccccatgctttgctcttgggtccctgcttgctcttgcccttggcacatcaagactgacttcggcttccccactttgtgttcttccatactgtgcatggactcagttcctct

SEQ ID NO: 6093 - DNA, 420 bp, Homo sapiens
  misc_feature (1)...(420): n = A,T,C or G
cggcaggggtagggtttggtgtccctgtcttgcgtgatattgacaaactgaaagctttttctgcncccactgtgctttaaaggagaagggactcctaagcggacagctttagtgggcggccggccgctctcatcccccataaagagcagagtcctttgtactgaccaagatgagcaacatctacatccaggagcctcccacgaatgggaaggttttattgaaaactacagctggagatattgacatagagttgtggtccaaagaagctcctaaagcttgcagaaattttatccaactttgtttggaagcttattatgacaataccatttttcatagagttgtgcctggtttcatagtccaaggcggagatcctactggcacagggagtggtggagagtctatctatggagcgccattcaa

SEQ ID NO: 6094 - DNA, 406 bp, Homo sapiens
gaacggctgagcgccgagggccacttcttccaccgggagtgtttccgctgcagcatctgtgccaccaccttgcgcctggccgcctacacctttgactgcgatgaaggcaaattttactgcaagcctcacttcattcactgtaaaaccaatagcaaacaacggaagagacgggcagagttgaagcaacaaagagaggaggaggcaacatggcaagagcaggaagcccctcggagagacactcccaccgaaagttcttgcgcagtggccgccattggcaccctggaaggcagccccccagttcatttcagccttccagtgctacacccacttcttggctgacacacttctgctctaagagtctccctccctttatagaatgtcaaccaaagagtgccctcctcccctc

SEQ ID NO: 6095 - DNA, 416 bp, Homo sapiens
  misc_feature (1)...(416): n = A,T,C or G
atttgggtaactggccgctaatggaactgaagacagctgggcctaacaagtgcccaggtgactcaggttgtggcagcactgcctgaaggttaggagtcggctttatgtgggacgagagaaaaagcttgctctaatgctttctggactaattgaagaaaaaagtcaactacttgaaaaatttagccttgttcaaaaagagtatgaaggctatgaagtagagtcatctttaaaggatgccagctttgagaaggaggcaacagaagcacaaagtttggaggcaacctgtgataagctgaacaggtccaattctgaacttgaggatgaaatactctgtctagaaaaagagttaaaagaagagatatccaaacattctgaacaagatgaattgatggcggatatttcacaaaggatacagn

SEQ ID NO: 6096 - DNA, 403 bp, Homo sapiens
  misc_feature (1)...(403): n = A,T,C or G
ttagacgcgagcggccgcctacctccctcaccaaagcccataaaaataaaaaattataacagaccctgagaaccaaagtgaacgaaaatctgttcgcttcattcattgcccccacaatcctaggcctacccgccgcagtactgatcattctatttccccctctacctgcacgacaacacataagaaaaaaaaaaaaaaaaaaaaaaaaaaaaaataaaaaaaaaaaaaaaaaaaaaaaaaaaangggggggggttttttaaaaaaatcctaggggggccccaacacaacgcgggggagaaaattttttcctttttctgtgggggggggcataaaaaaaaccctggggggttttttggaaaaaaccctttttttggggggggaaaaaaatggaaaccccccccc

SEQ ID NO: 6097 - DNA, 404 bp, Homo sapiens
tcccccctccccccgagcgccgctccggctgcaccgcgctcgctccgagtttcaggctcgtgctaagctagcgccgtcgtcgtctcccttcagtcgccatcatgattatctaccgggacctcatcagccacgatgagatgttctccgacatctacaagatccgggagatcgcggacgggttgtgcctggaggtggaggggaagatggtcagtaggacagaaggtaacattgatgactcgctcattggtggaaatgcctccgctgaaggccccgagggcgaaggtaccgaaagcacagtaatcactggtgtcgatattgtcatgaaccatcacctgcaggaaacaagtttcacaaaagaagcctacaagaagtacatcaaagattacatgaaatcaatcaaaggg

SEQ ID NO: 6098 - DNA, 465 bp, Homo sapiens
  misc_feature (1)...(465): n = A,T,C or G
tgtgggcannatacggaagtcgncatccgcaccgcannncgggtcgaccacgcgtccgcccacgcgtccgctaccatcttccctgcaactctgaaggatggacttaaccaccaccatgtcgagcaaaagaacaaagaccaagaccaagaagcgccctcagcgtgcaacatccaatgtgttcgctatgtttgaccagtcacagattcaggagttcaaagaggccttcaacatgattgatcagaacagagatggtttcatcgacaaggaagatttgcatgatatgcttgcttcattggggaagaatccaactgatgagtatctagatgccatgatgaatgaggctccaggccccatcaatttcaccatgttcctcaccatgtttggtgagaagttaaatggcacagatcctgaagatgtcatcagaaatgcctttgcttgctttgatgaagaagcaactggcaccat

SEQ ID NO: 6099 - DNA, 421 bp, Homo sapiens
accttggaggttggcattaaaccaaggaagtgtggagcaacagccactatatgtcaaggtgttgtggaatgggggagtgggtttcccttgtattaagaagaaacagatatctctatatccctctggccacataacttaaattttacttcttcctatttccagaagaactttcccttcctcccatcatgttttccttattgattgggaggatgctaatgatattgatgggtgggtgctaatgacagtcaagtgtgatgccctcagtctcttgtacttacgtagaacattaagactaagggtcttttaaattggaaaatacacataacataaaatttaccattttaaccacagtgtacctctcagtggcgcttattatattcgcagtgtgatgcacccatcaccattatctagttccagaaca

SEQ ID NO: 6100 - DNA, 405 bp, Homo sapiens
tgatgacttcaccacctggacccagcttgccaagtgcctccatatctgggacctggatgtgcgtggcaaccatcggggcctgtggagattgtttcggaagaagaaccacttcctggtggtgggggtcccggcttccccctactcagtgaagaagccaccctcagtcaccccaattttcctggagccacccccaaaggaggagggagccccaggagccccagaacagacatgagacctccttcaggaccctgcggggctgggtactgtgtacccccaggctggctagcccttccctccatcctgtaggattttgtacatgctggcaggggctggggctaccttgtttttaacatgagacttaattactaactccaaggggagggtgtccctgctccaacaccccgt

SEQ ID NO: 6101 - DNA, 453 bp, Homo sapiens
  misc_feature (1)...(453): n = A,T,C or G
ccgcactctgggaggccgaggcgggcggatcagttgaggtcaggagatggagaccatcctggctaacacggtgaaaccccatctctactaaaaaatacaaaaaaaaaaaaattacccgggggtgggggcaggcacctgtagtccaagttactcaggaggctgaggcaggaaaatggcatgaatccaggaggcggagcttgcagtgagtgagcccaaataacgccactgcactcctttttnnaanaaaaaaaaaaaaaaaaaaacacaaannnnngggggggggcctttttaaaaaattccttggggggcccaaatttaacgggggggggaaaaaaaaaatttttttttttaaggggggggaaaaaaaaaccccccggggatttttggaaaaaaaaccattttttgggggggaaaaaatagggcaaaccccccccacaaaaataaaagcctttg

SEQ ID NO: 6102 - DNA, 403 bp, Homo sapiens
aacaatttggattttttttaaacaacaatatcataactgtcataaaacagatggtccaaccccaggagcagataataacttgggcagctctgtggggaacaagacggggaaaacaactgttctaactgcccactagaacagtggtttcaactactacaattctcagtgtttgagaggtacaagggaagaaaggactatgtggatcccttgtggctatgcagatacctacctcacagagttgttgtagaagactggtggtttggttcaaaccttgtgattaaagagtttgtcaagcattttattcttttgaataaaagcaacatatctaaaacaaaaaaaaaaaaaaaaaggggggcccgtttaaaggaatccttgggggggccaaagttaaccctggctggca

SEQ ID NO: 6103 - DNA, 423 bp, Homo sapiens
ccgctgtcccggcggcgccaaccgaagcgccccgccttatccgtgttcgacatgctgcgccgcgctctgctgtgcctggccgtggccgccctggtgcgcgccgacgcccccgaggaggaggaccacgtcctggtgctgcggaaaagcaacttcgcggaggcgctggcggcccacaagtacctgctggtggagttctatgccccttggtgtggccactgcaaggctctggcccctgagtatgccaaagccgctgggaagctgaaggcagaaggttccgagatcaggttggccaaggtggacgccacggaggagtctgacctggcccagcagtacggcgtgcgcggctatcccaccatcaagttcttcaggaatggagacacggcttcccccaaggaatatacagctggcagagaggctgatgac

SEQ ID NO: 6104 - DNA, 416 bp, Homo sapiens
  misc_feature (1)...(416): n = A,T,C or G
ttaaactctttttctgctgcaaaaaaaataaaacagatttaaaaaaaaaaaaaaaaatatgggggggggcccttttaaaaatatccgtgggggggccattttctcccggggggaccaaaaaaaaattttctctttaaagggggggaaaaaaaaaaccctcttggggtgtttagaaaaaaccccttttcttgggggggggcctattgggcaaccccccccccaaaaaaaaaaagcccttggggaaaaaaaaaaatttttggggggagtgggggaaaaaacccctattattcccgggggtaaaaaaatgtgnnanancaacacagagcctataaaattggggatacgaaaagccacagccacctcttgagagaggggcatggaagccatgctaggctatttgtagctcaatcctcatg

SEQ ID NO: 6105 - DNA, 406 bp, Homo sapiens
cttaattgtaataatcaacaccctcctagccttactactaataattattacattttgactaccacaactcaacggctacatagaaaaatccaccccttacgagtgcggattcgaccctatatcccccgcccgcgtccctttctccataaaaatcttcttagtagctattaccttcttattatttgatctagaaattgccctccttttacccctaccatgagccctacaaacaactaacctgccactaatagctatgtcatccctcttattaatcatcatcctagccctaagtctggcctatgagtgactacaaaaaggattagactgagccgaataaaaaaaaaaaaaaaagggggggccgctttaaaggatccataggggggccaaaattaacccgggcatgaga

SEQ ID NO: 6106 - DNA, 409 bp, Homo sapiens
ttaaggaaagccaagttaaggacacacccttcctttccacccgtctctttctagagtacagttctgaccttctggccaaagagcacggcaacacatcatccaaggactgtggttcatcttggctctttcatcttctgaaatcaattcaacccatttatctaaggtgattcccatcaccattaagactacggcccaggaggagaaaagtatgttcataccctggatacttctatttgaaacatgcaccattgtgagtgaaaatttctagctggaaccaccaccactattttgtagatctcttccttgatttgattagttacaagaagggtgatatctgaactttcagtggttgctgaggcattggtaacagcagaagctgaagtagtctataaaacagagaagatagata

SEQ ID NO: 6107 - DNA, 396 bp, Homo sapiens
  misc_feature (1)...(396): n = A,T,C or G
actacgcgtacatcgcgagcggcctccatgactttttcaaaaaaaaaaaaaaaaggggggggccttttaaaaaaaccctataggggccccggggcccccttaaaaaaacccccttgggtcccttctttttggggggggggcaaaaaatcttttttttttttttggggggggaattttttttttggggggggggtttaggggccccccccccttttggggggggagggttaggggccccccccccccttttaaggggtttctgggggcacccaccccttttttgggggggggggggggggacccccccccccccccgggggggaaaaaagtttccnnnntncttangccctcccccccccgaagcttgaggggtctataaccccccccagatttatt

SEQ ID NO: 6108 - DNA, 469 bp, Homo sapiens
  misc_feature (1)...(469): n = A,T,C or G
ggcggtatnnaaacttggagacttcnancggcaccgcaannnngggncgacccacgcgtccgagcgcggacgccgcaggaggcagtgcctggaccccatctgcccaggagagacggagcccgtggctggtgaggccgcagagcagggccaggccgggccctgcccgcaaggacgaccaaacccctcaccggcccctgggccccagagcccaccaggctctcctgctggccccaccatgacttcagagtcgacgtcacccccagttgtgcccccgctccactcccccaagtccccagtctggcccaccttccccttccacagggagggcagcagggtctgggagcggggtggtgtcccacctcgggacctacccagccctctgcccaccaagcggaccaggacctattcagcgacagcccgggcctcagctggccccgtgttcaagggcgtctgtaagcagaactcaagc

SEQ ID NO: 6109 - DNA, 455 bp, Homo sapiens
cccacgcgtgcgctctagtttttcagttataactgaatttgccatgtgggtataggcatagcgtaaattacattaatgtagtaaaacatcaattgtggttcggcttgtctttcatttatgagtagtatagaaatcacctttctaatatgtgttgccaaactatttgccaccatctatttggtgaaatattcattgtcattgtgattttccacaagtataagttcttaagtactttatagattcagaagtaaatgctgtcctgttctccatcagctgttcgtttgttacagattttgtatttcttttttttttttgaaaatggagtctaactctgccacacaggctgaagaacaggggggcggcctgggttccttgcaacctttgcttccaggattaaagcaattctcctgcctcaccctctgaagaaccgggaactactcggccttcccacaccc

SEQ ID NO: 6110 - DNA, 473 bp, Homo sapiens
  misc_feature (1)...(473): n = A,T,C or G
cgtggttnatnnaaactggaaagcatgncnatancgcaccgcaannccgggtcgacccacgcgtccgcggacgcgtgggcgcagagctgaagccatggttcatcaggtgctctaccgggcgctggtctccaccaagtggctggcggagtccatcaggactggcaagctggggcccggcctgcgggtgctggacgcgtcctggtactcaccaggcacccgagaggcccgcaaggagtacctcgagcgccacgtacccggcgcctctttctttgacatagaagagtgccgggacacggcgtcgccctacgagatgatgctgcccagcgaggctggcttcgccgagtatgtgggccgcctgggcatcagcaaccacacgcacgtggtggtgtatgatggtgaacacctgggcagcttctatgctccccgggtctggtggatgttccgtgtgtttggccaccgcaccgtatcagtgc

SEQ ID NO: 6111 - DNA, 402 bp, Homo sapiens
cccacgcgtccgctgtttctgtgcaacccctttgttttaccagacaaaatttgaatactttttttcctgaattgtatatgaccttggtgctgcatgcatgctgttgacttttaggactttgatcttttaaggttttttttccccagcattaatattgatttataaagatttgaaaatctttaatgaactggagaacactaagatttaaactcgaaaattcgttgttcaagtaaagaaagccatgatgctctgtatgttatctgtgtgtgtgcatgcactcaggtgccctttgtttcatgaacaaatacatttcattgtacatgttttctgtttaaatcattgtataaagtaattgcaggtcagaattataccacagaactgtttatgaaaaaaaaaaaaaaa

SEQ ID NO: 6112 - DNA, 423 bp, Homo sapiens
  misc_feature (1)...(423): n = A,T,C or G
tctggccccgccgacccacggcccacgacccaccgacccacgaatcggcccggccgtcgcgtgcaccatgtctggctcctccagcgtcgccgctatgaagaaagtggttcaacagctccggctggaggccggactcaaccgcgtaaaagtttcccaggcagctgcagacttgaaacagttctgtctgcagaatgctcaacatgaccctctgctgactggagtatcttcaagtacaaatcccttcagaccccagaaagtctgttcctttttgtagtaaaatgaatctttcaaaggtttcccaaaccactccttatgatccagtgaatattcaagagagctacatttgaagcctgtacaaaagcttatccctgtaacacatgtgccataatatacaaacttctactttcgtcagtccttaacatn

SEQ ID NO: 6113 - DNA, 405 bp, Homo sapiens
tgtgggctccctctcgggggcggagggggtgcctgtgagctctcagccacttccctcccaaccctggtgagctccaagttggttgcgggggagaggggagaatggagtagagtcccttggtacaagctcctctcccccctcttttcccaccaactcctatttccctaccaaccaaggagcctccagaaggaaaggaggaagaaatgttttcttaggggaattcgctaggttttaacgatttgtttctcctgctcctcttctatcagacctgaccccacacaaacctgtcccctcggttgtgttgaagtcccctggacagtgggcaggggtggcagaggacacgagcagccactgcccgtaccccctctcctctctgtaagcccataccctgtcttcccagggacg

SEQ ID NO: 6114 - DNA, 409 bp, Homo sapiens
tgaaatcatctgcctctaactttgtggtataagaattatatatgaataagctattatttttataaaggaaaactttgccattatagtaaattacattagttgatctcgataatttgaggataacagatgacaattgaatttttaattgatttagtatttcctcctcctctttgggggctgggtgggagggcttacatgctcttatagtgaggcacatctcactgttttgcagcagaatttgaattgtgcaactcctgtgtaaagtaaggatttctttaaatagcatttttgcaccagtaaaaatagataacttataactcagtcttgataactgaaatgacttatttcacttagaatacatttctcccttctctgccatctccacaaatgccattgggaggttttgaaa

SEQ ID NO: 6115 - DNA, 404 bp, Homo sapiens
cccccttcccttccgaagccagaggtgggcattagctccctccagctgtccctgagtccacacagccagctgctgcctgctgcgaaagggcattgccaccaccatctgcagctcatttccctggtgtgaattttgcaaacaaccttcttaatcatgtttatgaactcagcatacatttgctgcaggttgagtttcccgtgatgatggaaagcttggttataaagccagcaggttgggtttcaaaatccagcctcattgaggatccttctctaccttcctctcgtcttccttccctccatgactttttcaaaaaaaaaaaaaaaaaaaaaaaaaaaaagggggggggcccttttaaaaaatccttgggggggcccaattttacccggggtgggaaagttattttt

SEQ ID NO: 6116 - DNA, 419 bp, Homo sapiens
ctcaatcgttctgtcgccactctcctgatgcatatgctgtaggttgacccactgaaacgagcaactatcaaagacataagagagcatgaatggtttaaacaagatttgcccagttacttatttcctgaagacccttcctatgatgctaacgtcattgatgatgaggctgtgaaagaagtgtgtgaaaaatttgaatgtacagaatcagaagtaatgaacagtttatatagtggtgaccctcaagaccagcttgcagtggcttatcatcttatcattgacaatcggagaataatgaaccaagccagtgagttctacctcgcctctagtcctccatctggttcttttatggatgatagtgccatgcatattcccccaggcctgaaacctcatccagaaaggatgccacctcttatagcaga

SEQ ID NO: 6117 - DNA, 472 bp, Homo sapiens
  misc_feature (1)...(472): n = A,T,C or G
gcacgtaggagctctctcggggtggggtgactgggagacctatagggaaagcctgctatgcacggggagagcacaggactggccctgctctgcggcctcctttgtcccataacctgaagttaagtcacatccactgtcgggacctgcgtgcactcatctgtcaagcgggggtgcttcccttccagcatcacctgcaacagacgggctctcgggagtcgggggttccaggcagctgtgtggacccatggacaacattcaaagggacgccagccatccttggtgacaggggccccaacttagcatcgcttcccttccgttaggaaggagatgaccggaagcaaccccttcacagacacgagcacatcggcaaaccctatgaaagtggaattttctaacaaaataaaactgcttgttgatctgttttctgtaacttttgctaaatactntatacatttttcatgttaaagagccg

SEQ ID NO: 6118 - DNA, 421 bp, Homo sapiens
cccacgcgtccgggcaaagtgggagaatcaacagaaagggaacttctggaactgagaaccaaagtatccaaacaggagcagctccttcagagcacaactgagcatctgaagaacgccaaccagcagaaggagagcatggaacagttcattgtcagccagcgtaggttccctgagagggaacgggggcagaaacaggcagtcttcccgatgccccacttgtgcttcagatgagaagtgatcaggggggcttggggatgttgggagtggagactgatttgatgtccccaaacctcctgtgccaggagcaattgtggctgcagagggaggggaggacggggtggatagaaggagactccaagctgaatagccagaaagaaataaatgctttagaattctcacgctaagcaagtagggttaattt

SEQ ID NO: 6119 - DNA, 405 bp, Homo sapiens
  misc_feature (1)...(405): n = A,T,C or G
gcacgcacccactccaccttactaccagacaaccttagccaaaccatttacccaaataaagcataggcgatagaaattgaaacctggcgcaatagatatagtaccgcaagggaaagatgaaaaattataaccaagcataacatagcacggactaacccctataccttctgcataatgaattaactagaaataactttgcaaggagagccaaagctaagacccccgaaaccagacgagctacctaaaaaaaaaaaaaaaaaaaagaaaaaaaatttgagaaaaanggggggggcccttttaaaaaaatccttgggggggccaaattttacgggggggggaaaatttttttttttttcttttagggggggcgttaaaaacccacccggggaatttttggaaaaaacc

SEQ ID NO: 6120 - DNA, 449 bp, Homo sapiens
  misc_feature (1)...(449): n = A,T,C or G
ttaaagggcagagcgcttgcccggcctgccagggtcgtgatctcctgacagaagagtcaccttctggaagaggctggcccagtcagaatcaggagctgccttcctgctcttctaggtagtcacacttcactaaagtgtcatccaccagtgtgttgaatccgaagaatgacaattttctaccactggtgtaaaaaacaaacatttgaagacccttgtgcattgtgtgtcacaaagctaaatacatggaaatcgttaatatcgttgatattaagtaatttccccactctgagtgaatactttgatgattgccaacagtggctaataaaatgacggctaccacactcatgggtcactggggctgcgcagggctctttgaggtgggtggcttcttttggaaagtactatgaacgtctcgaagcagtattctagtgataagaattcttaacatn

SEQ ID NO: 6121 - DNA, 425 bp, Homo sapiens
gagaacgcagcaagcccaggcggcggtggtaaggctggaggacacacctaaacatgtggaatcccaatgccgtgatagtagacaagaagatgcagaagaaaatgaagaaagctcataaaaagatgcacaagcaccaaaagcaccacaagtaccacaagcatggcaagcattcctcctcttcctcctcctcttccagcagtgattctgactgaatacaggccctggacccttccctcaagtctcaccagttctgctctcccatcaagcttcagatgccatgttgtactgggggaatgtagcccttgtgctccccaccccctacctccacctgagcctcaccctgctgttgagccctgagtggctaggggaaatgggaagaggattgccatggcctggccatcttgttgctgcttggttagatcatt

SEQ ID NO: 6122 - DNA, 414 bp, Homo sapiens
tgagcacccggcagcggtctcaggccaagccccctgccagcatggccagcgagttcaagaagaagctcttctggagggcagtggtggccgagttcctggccacgaccctctttgtcttcatcagcatcgggtctgccctgggcttcaaatacccggtggggaacaaccagacggcggtccaggacaacgtgaaggtgtcgctggccttcgggctgagcatcgccacgctggcgcagagtgtgggccacatcagcggcgcccacctcaacccggctgtcacactggggctgctgctcagctgccagatcagcatcttccgtgccctcatgtacatcatcgcccagtgcgtgggggccatcgtcgccaccgccatcctctcaggcatcacctcctccctgactgggaactcgcttg

SEQ ID NO: 6123 - DNA, 402 bp, Homo sapiens
atctattcttctgatgctagataaattatatatcacaaaactttcaatattggtgactacctatgtgtgatttttgctggctactaaaatattctcaccacttataagagcacgctaacacattgtcttaagctgaacaaggattttttgtatataagtctgtgttaaatctgtataattcagacgacttcacttctgataatgtgaagaataaccattatgaaaaggaaagaatgacctgtatagcatcattatttttagcctttcctgttaataaagctttactattctgtcctgcgcttatattacacatatgactgttatttacatacttagccactaatttcgaaaattaccagcgtgatacataagaattattattcacaatgttgcctggtcttt

SEQ ID NO: 6124 - DNA, 429 bp, Homo sapiens
  misc_feature (1)...(429): n = A,T,C or G
gcgcccacgcgtncgcccacgcgtccgtgcagactaccatcttccctgcaactctgaaggatggacttaaccaccaggtgtcgagcaaaagaacaaagaccaagaccaagaagcgccctcagcgtgcaacatccaatgtgtttgctatgtttgaccagtcacagattcaggagttcaaagaggccttcaacatgattgatcagaacagagatggtttcatcgacaaggaagatttgcatgatatgcttgcttcattggggaagaatccaactgatgagtatctacatgccatgatgaatgaggctccaggccccatcaatttcaccatgttcctcaccatgtttggtgagaagttaaatggcacagatcctgaagatgtcatcagaaatgcctttgcttgctttgatgaagaaagcactcgcaccatan

SEQ ID NO: 6125 - DNA, 407 bp, Homo sapiens
  misc_feature (1)...(407): n = A,T,C or G
acaacagtcctcaaatacactgatgtatgaaactattcatacatcaagcagcatttttttcactctccttagaattggaactatgcagttaaggcagataaaatgtacagatgtttcatatattacaggttacatatataaatcaaaatttcctatataaaactgatttgggatttggggtggaaatattttgaatattaatttatttttaaagatgcaagataggactttgtgcaatgtatttttgtaaatgcttttcaaaatatctgtctttggtagtgcttctgctgctgccaccaaattgataagatgctattaagaggtttaaataaagagttttaatttttaaaagggaaaaaaaaaaaaaaaaaaaaaaaaaaaaaaaanangggggggggcccttttaa

SEQ ID NO: 6126 - DNA, 424 bp, Homo sapiens
accaaacccaggatcatgaatatggtgtctattatagtgaaacatgtactttgagcttattgctattattctgcattaaatattttcagggttttaaacactaatcacaaactgaatgacttgacttaaaaagcaacaaccttaaaggccgtcatttcattagtattcctcattctgcatcctggcttgaaaaacagctctgttgaatcacagtatcagtattttcacacgtaagcacattcgggccattaccgtggtttctcatgagctgtgttcacagacctcagcagggcatcgcatggaccgcaggagggcagattcggaccactaggcctgaaatgacatttcactaaaagtctccaaaacatttctaagactactaaggccttttatgtaatttctttaaatgtgtatttcttaagaa

SEQ ID NO: 6127 - DNA, 375 bp, Homo sapiens
caaagaaaatgaggaacagaataatcaagaatgaagttaagaagcttcaaaaggcagctctcctgaaagcttctcccaaaaaagcacctggtactaaaggtactgctgctgctgctgctgctgctgctgctgctgctgctgctgctaaagttccagcaaaaaagatcaccgccgcgagtaaaaaggctccagcccagaaggttcctgcccagaaagccacaggccagaaagcagcgcctgctccaaaagctcagaagggtcaaaaagctccagcccagaaagcacctgctccaaaggcatctggcaagaaagcataagtggcaatcataaaaagtaataaaggttctttttgacctgttaaaaaaaaaaaaaaag

SEQ ID NO: 6128 - DNA, 449 bp, Homo sapiens
aatacagatgcttttaccaaatgtttcagttgtgaagtgcaaactcctttctccccccagctggttgaagatcaagtgggagacttttgagagcttaacagtaagttttccttgtttttctcaagctgatatgcctaaaagtcacctggggatgattggtgaaaatacatattcctactcgtacaccttgaagttgattctatagtggaaggtactgaaaatctgcatttttaatgtatcttcaacaatcccaaatgattctgactaatgcaggtgacccataacctcctttggagaagttgatctatctgaactttactatcttatttggctaaagatctatattttgcttcattcaattacgatactccacaggttaaggtataaagcttacagggtgatgatgaaggtgtgatgatgatgattattattattatttggagacagag

SEQ ID NO: 6129 - DNA, 419 bp, Homo sapiens
cactacacctggagtagaaggcggctgcgtcagtttttggcggcagattgttgactaccagggtatttagcctagttggcaagcgagcaatttccacctctgtgtgtgtacgagctcatgaaagtgttgtgaagagcgaagacttttcgctcccagcttatatggatcggcgtgaccaccccttgccggaggtggcccatgtcaagcacctgtctgccagccagaaggcactgaaggagaaggagaaggcctcctggagcagcctctccatggatgagaaagtcgagttgtatcgcattaagttcaaggagagctttgctgagatgaacaggggctcgaacgagtggaagacggttgtgggcggtgtcatgttcttcatcggtttcaccgcgctcgttatcatgtggcagaagcactat

SEQ ID NO: 6130 - DNA, 407 bp, Homo sapiens
agagacgggatttcactgtgttagccaggatggtctcgatctgacctcatgatccgcccgccttggcctcccaaagtgctgggattacaggcgtgagccaccgcgcccagccgctaattttttattttttattgtttgtagagagggggtctccctatgttgcctaggctgttttgttttttttttaaacagagacagggtcttgctatgttgcccaggctggtcttgaactcctgggctcaagcagtcctcccatcttggttttccaaagtgctaggattacaggcatgaaccaccaggcccggtctccactgtgaatctttttttttttttttggaaacggattttattttttgttgcccaggttggagggaagggaccccttttgggttaaccgaaccttcccc

SEQ ID NO: 6131 - DNA, 418 bp, Homo sapiens
  misc_feature (1)...(418): n = A,T,C or G
cttattgacagagtatgacccagaactcccactagtttatgaaatatagtttcctgacctctagccctacctaaaaggaagaactttaaagagcagtgatgattttgattcttaacaagcaccatcaggcttaaggcctaagaacctgacaaatccagcattcttttaaagtgtgtcttatatctagcacagccatcctccagtagaactacagttatggaaatggtctaatttacactgtccaatatggtagccactagtggcaggtggctgttgagcacttgaaatgtagctagtgcaactgagggattgaatttttgagttgtatttaatcttaattaacttaacatttaaacttaaagggctacctgtggctattggctactgcatggggcagtccaggttaagatctttcttn

SEQ ID NO: 6132 - DNA, 475 bp, Homo sapiens
  misc_feature (1)...(475): n = A,T,C or G
gggccccattgaacgcctgcgtagagcccgtgaataccggcncgacccacgcgtccgattccgtgctgcgcggatgttctctggagcagcgttcttttatctccgtgcgccttctctcctacctaagtgcgtgccgccacccgatggaagattctatggacatggacatgagccccctgaggccccagaactatcttttcgggtgtgaactaaaggccgacaaagattatcactttaaggtggataatgatgaaaatgagcaccagttatctttaagaacggtcagtttaggggctggtgcaaaggatgagttgcacattgttgaagcagaggcaatgaattacgaaggcagtccaattaaagtaacactggcaactttgaaaatgtctgtacagccaacggtttcccttgtgggctttgaaataacaccaccagtggtcttaaggttgaagtgtgggtcagggccagtgcatat

SEQ ID NO: 6133 - DNA, 408 bp, Homo sapiens
acaatacgtatatatgataaatggtgtacatatacagatgtttatggtgtataaatttttctatacccaattagaattatcttcctgattctttattcaataacatgctaattcctcttctatgttctatagtgacagaatgctaacttttcttataccctggcagaggacagaggagtctggtctaggatggggaactgaatttttgaacgaaaaggaaagagaaaggatgaaaaaacaaacaaacaaaaaaacacacgataatgtttcttagtcattttgattggccatttgaacagtctacaagtttaacgttatttccagtgaagtaggatggctgacctagcaatacatgtttcttcaaaagggtaaacatgctttagtgacctacagctaaattttgtacat

SEQ ID NO: 6134 - DNA, 413 bp, Homo sapiens
cccacgcgtccgcaaacttatggctacacacagctggaatggagacggactccactgaggagactcatacaggacaggagggaattttaagaggataaccctgttgagaccaatctacataagtccaggttaaagggaagcttcttcccgccctccagaagacacaggcagtggctcaggtgacctgccagcatggaacctgtctctctcaacaagattgaaaacatcaaaccaaacctgaagcactgagaggctgggtaaccagctctggtcactgagttggtgagggatggattcagaagaggtctccaattgtgacaccgcagaggacctgctcttggccactacactctaccagctctgcaagaagcgcttccacacttttcatctcagacccacagagccagtgtgtg

SEQ ID NO: 6135 - DNA, 417 bp, Homo sapiens
cggacgcgtgggagaattaggttttcctatccaggaataatattcttctttccattcattgcagggcttttttggtatggttttgtggttttatagtttcttcatgtggatgttttgttcaaattatttcttaagtattatattttgttgctattataaattaaattcttttttaaatctagtttctttcttttaaatactacagtttaattacacatgtaataattaaagacatcccctgggtggggtgaaggaccatcgttacatgtaagggtacacctttgactctccgttgttaatcctagcaccaacaccagaggtatgtgtagtaatcacacttggtcttagccaaaaggccaagaagcgtattgagtaatcaaatgaccatacagattaccatgcaggtatcatcatgct

SEQ ID NO: 6136 - DNA, 571 bp, Homo sapiens
  misc_feature (1)...(571): n = A,T,C or G
aggagttgatccctttgaagaccnctcaatacccgnctcgacccacgcgtccggcaaagtattacctcatccaggggctggtgaatatgtgccagagtgccctgcaggacatgaaggactcctaccagcctgtgtgcaacatccccatcatcacatccctaaaggaggaggagcggctcatcgaatcctccaccaagcccgtggtgaagctgctgtacaacagaagcaacaacaagtattcctacaccagcaactctgacgaccacctgctgaaaaacatcgagctgtttgacaagctctccctgcgcttcaacggccgcgtgctcttcatcaaggatgtcattggtgacgagatctgctgctggtccttttatggccagggccgtaagctggcagaggtgtgctgtacctccatcgtgtatgccacggagaagaagcagaccaaggtggaattcccagaggcccgaatctatgaggagacactcaacgtcctactctatgagactccccgcgtccccgacaactccttgttggaggccacaagccgtagccgcagccatgcttnccccan

SEQ ID NO: 6137 - DNA, 475 bp, Homo sapiens
  misc_feature (1)...(475): n = A,T,C or G
gcaccccattgatcccntcggtagagcccgtaagnaccgggncgacccacgcgtccgggagtctcagaaaggacacggctggctgcttttcttagcgccgaagccgcgccatgctcgtcctcagaagcgccctgactcgggcgctggcctcacggacgctggcgcctcagatgtgctcatcttttgctacgggacccagacaatacgatggaatattctatgaatttcgttcttattaccttaagccctcaaagatgaatgagttcctggaaaattttgagaaaaacgctcatcttcggacagctcactctgaattggttggatactggagtgtagaatttggaggcagaatgaatacagtgtttcatatttggaagtatgataattttgctcatcgaactgaagttcggaaagccttggccaaagataaggaatggcaagaacaattcctcattccaaatttggctctcattgg

SEQ ID NO: 6138 - DNA, 422 bp, Homo sapiens
tccacagttatttatgaacgatgtcgtgattctccctccacctgacagtttgtaagagtgaaagagcatctaacctgatgctcttggagagagataacctgtctgtcataacttaaaggatgagaaaatgtggtgtagctattaaagattcatgcagtcccaaaaggcactgtcctgggatgatgagagattataaggtgatttcataaaaggaatccaaccctgtgcccggccattgatgtgttgtcattgaatccaggaggatttctagggcactgaagttttgttgtttcttttgctgactttggttacagtcagaaaaaataaactagatgtttgtgtctaaaaaaaaaaaaaaaaaaaaagggcggccgttttaaaggatccttgggggggcccaagtttacccgggcttgcaaggc

SEQ ID NO: 6139 - DNA, 415 bp, Homo sapiens
gaatgtgaattctgaggaattaaggtagaatatatttgactttctggtaaagatcatggttaagtataatcattactgccaaactggaattttcaagttattataatatcccaggccccttgataaaagctgagggttatcatgaccttaacgctaattcaatgagaaatgagtttaatagcataacattaccaaggtaatcaaactaataaaattccatatatcttccctgcatcttgtcactgtgtaccattcaaagtgtttataaaactctagattcatcaaatgagacttgctcagctttttgaaatgttaagatgtgtttggagaaggctgcatgactttgtttttccctttcagcaaaactaaataaagttgtcaaatatgaatcatgttcattaaggtaattactaca

SEQ ID NO: 6140 - DNA, 392 bp, Homo sapiens
tccgaggcgctggaaccctgcgtccaggcgtgactgtcatcccgaaaggccggccccagtttcatccttttatcctgtaatctgtcaccatgaccctgacaaaaggttccttcacctactccagtggggaggaatatcgtggcgagtggaaggagggtgagaaggacccctggggagtatccatgatgaacacttcatttgctggaggacaaatacatcaggatatatagccaactttatggatcttcattttcaactccaggatttaattccatatagtgcctgccattcctttattccattttaggattaaataaaggaatttgaaaatgcaaaaaaaaaaaaaaggggggccgtttttagaagacctcttgggggccccacctttacct

SEQ ID NO: 6141 - DNA, 405 bp, Homo sapiens
  misc_feature (1)...(405): n = A,T,C or G
ttaatgattacaaaacaaaaataagttaagcacaaattttgattcaaaagtagaaagtgtatatttcatttcacttttgtacttaataagtggtatagttctcacttgtttgttgtttcatttgttccctcagtctgtcacttataaataatgaatatgtaaacttgattttcacaacttggtttgctgcaatatagccccccaaagtaactgggcttttattagtttttattgcaagtattccagttttaacagctttgatagcaactatatcttaattttttctcttataaaaatgctgagaatcccttttcataaacaagtgttttttttaaagataactttatcaacatggcaacagtctctaagtttcagatgtggtgctacttagtcccttataaagan

SEQ ID NO: 6142 - DNA, 456 bp, Homo sapiens
  misc_feature (1)...(456): n = A,T,C or G
ataggatcataaaagacagaaaagacttaagtaatcttgtaatgacaattatttccatttttgctgaactaaaaatatttaacttcataaatatgttactacagcttccagatttaaagaaaaaaagtttcccccactctcaattaaaagttagaaccctccacttttaaaattatacaaatatttcttttttacattacacagaagccttctgtaccattttacgaatttctgtcttcataatataagtgaaaatactgtcatttcaattttctgctttaaattgtttttaataagcattccaaagtgatacagacttaagcttttaatcaatcagtcattcagttgatagacaaagttagcgatgctttatgctaggagacttgttgacagtaacctgtgcgactntatgcagaagacaattgtagtaattatattgaccagggaaaaattttt

SEQ ID NO: 6143 - DNA, 465 bp, Homo sapiens
  misc_feature (1)...(465): n = A,T,C or G
atcagctttattatacacaaaattattactgcttatctttgctcttttccttgttatctcgcaaggtttagttgagaagatacaaaatgtttacagtgttggcacttagagtttttaaattcaagtacatgaaattcagtaatagcattgccttgagctaactaggaagtaccgggaaaaaagttaaatctacatcaagtttcttttgaactttgaagtgttttctgacccactgctaactgtagcaacaaaatttaaaagaaaaaaaacatactttatctggctattataacataaactgtcacgtaggtttgctgccttcagaataccgcaatttaattgcgggaatataataatattgggactgtttcacagcacaaactcatctttacagtgttgatcaatgcatcagttaagaaataatgccacctcaggaattaactggcattgngaacatttgcctca

SEQ ID NO: 6144 - DNA, 489 bp, Homo sapiens
caggtgatccacctgcctcggcctccaaaagtgctgggattacaggcatcagccaccatgctcagcccaatcatttcacattttaaagtggaatgtgtgaaatagaaatcatgttaaatagttgatttactgataaagttaaagttgtttcaagatgtagataattaataaaaatgtattggacttatagttaatagcaatgtattatattcttgaaaattgttaggagtagattttaagtgctctctctacaaaaacagtatatgagacaacacataaaaaaaaaaaaaaaccaaaaaaaaaaaaaaaaaaaaaaaaaaaaaaaaaggggggccccttttaaaaaaacccttggggggcccaaattttcccggggggggaaaaataatttttttttctttttgggggggtttttaaaacccccctggggtttttttgaaaaaaaccctttttttggggggggaaaattttggccccccccccccccaa

SEQ ID NO: 6145 - DNA, 450 bp, Homo sapiens
  misc_feature (1)...(450): n = A,T,C or G
cccaggtgctgggactgtacaacactctgaaccctgaagcatctgcctcgccttgctgcttgagaattagcagnaacccctgaccatcctgtactatgttgggaggacccccaaagtggagcagctctccaacatggaggcgaagtcttgtaaatgtagctgagaccccacgtgcgacacagagaggggagagagaaccaccactgcctgactgcctttcctcgggaaacacacaagcaacaaacctcactgagaggcctggagcccacaaccttcggctccgggcaaatggctgagatggaggtttccttttggaacatttctttcttgctggctctgagaatcacggtggtaaagaaagtgtgggtttggttagaggaaggctgaactcttcataacacacagactttctgtgacgcaaacagaggggatggggatagaggaaaggga

SEQ ID NO: 6146 - DNA, 402 bp, Homo sapiens
ccgggcattttgctgcgtcaccagccgccgcccggcctcaccacccctcgtttgcacgcacgcacgttcattctccgtcctcgcgccccttttcctacactttcctcttctccccgaccggaggagccgctctttccgcgcggtgcattctggggcccgaggtcgagcccgccgctgccgccgtcgcctgagggaagcgagaagaggccgcgaccggagagaaaaagcggagtcgccaccggagagaagtcgactccctagcagcagccgccgccagagaggcccgcccaccagttcgcccgtccccctgccccgttcacaatgcagcctgcttctgcaaagtggtacgatcgaagggactatgtcttcattgaattttgtgttgaagacagtaaggatgtt

SEQ ID NO: 6147 - DNA, 418 bp, Homo sapiens
ataaaagcggaagtcacagtttgtttcctggaaactttgacaagctttattaagttgagagagagagaggggaaaaaaaaaaaggcctttcgtagttcagtaattgccagcaatataacacggttaaaatgaagtttttacggtatatgacatagggcgcttcataaataggtttatttctgagtttttagcaaaaggtaatgaaatatcgggtggatttttttgattaaccagaacaaattacttgagtaataggaaattaggaggatctagggacagagggaaggcgaaaaaggggaaaatccaaaatacccaagatttaagaccgggggaaaaaaaccacaaatgggtaaataagggttggctttttggaaaaaatttcatttatctctaatatgcttatgggattgcccctagg

SEQ ID NO: 6148 - DNA, 474 bp, Homo sapiens
taggggactgcgcggcggtgccaggccgggcgtgggcgagagcacgaacgggctgcctgcgggctgagagcgtcgagctgtcaccatgggtgatcacgcttggagcttcctaaaggacttcctggccgggggcgtcgccgctgccgtctccaagaccgcggtcgctcccatcgagagggtcaaactgctgctgcaggtccagcatgccagcaaacagatcagtgctgagaagcagtacaaagggatcattgattgtgtggtgagaatccctaaggagcagggcttcctctccttctggaggggtaacctggccaacgtgatccgttacttccccacccaagctctcaacttcgccttcaaggacaagtacaagcagctcttcttagggggtgtggatcggcataagcagttctggcgctactttgctggtaacctggcgtccggtggggccgctggggccacctccctttgctt

SEQ ID NO: 6149 - DNA, 414 bp, Homo sapiens
  misc_feature (1)...(414): n = A,T,C or G
attcaagtcattttgccattttacaacccacttggaagactttgctattgccatgcagatgttcagtttagctcatcgtcctgtcagactagcggagtttaagagagctgtgaaagtagcaacaggacaagaactctcaaacaatattttggacactgtctttaagatctttgatttggatggtgatgaatgtcttagtcatgaagagtttcttggggtgttaaaaaacagaatgcatcgaggtttatgggtaccacaacatcagagtatacaagaatactggaagtgtgtgaagaaagaaagcattaaaggagtaaaagaagtctggaaacaagctggaaaaggtcttttttaataaaagatataatagtatggcaattatattgttccaaatgtcaaaatttgtgatttttn

SEQ ID NO: 6150 - DNA, 392 bp, Homo sapiens
agggcagaatcatttgcacttttcaaatcattgttcctttctgtgtctctgtcacttaactaccaagcacagtagaactgaattgagtcacttaaaggaacacatgatgcagttccattatatgaggcagctaagccctcatttttggttaatatcccccaatctgtttaggctactgatcctttttagcatatcacctcatttagttacctaaattgtatattttgtttatcttgataatctcaagaaatgatgtacttgaggctggatgttctttgccaacaatgagcatctggttataatttaaagctttgtcacagaggatttcatacttgagacagctagagttgaatggagtagaacgttctgcacacaccaatgattgtttcttt

SEQ ID NO: 6151 - DNA, 405 bp, Homo sapiens
tgactatcacagtttttataaataatctaggtaaacaattaataaaataactaggtaaatgtaatgggataaatacttatagaccaactggacataatttagaatataaagtcatattaaattaaataatagataatttattatttgggtattttccaataaatatatcttgtaggaaaacattgttgcttaaaaaaaagtgtgtccttttttaaaaaaatggtgaacaagttttgtctaattcaaagcttattaaaaggttatatataaaacaaggtaaaaggaaccagaaaagaaaaaaaatgtaaataaagttataaaaataaagaattttttcaaggttaaaaagctgaaaaagaaataattttatataagaaagaattttatatggtaaatttagtcctt

SEQ ID NO: 6152 - DNA, 473 bp, Homo sapiens
ttctacacaccaattaccctgggccaaacaacaccaacccatttggttccacattctgctttggtcttcagcgaatgatctttgaggtcatgcagaacaaccacattgcctcggtgaccctgtatggcccccccaggcctggtagccacctgagaacagcggaactcccctagggacaccaccacccatgcccctctgtcccgtggaactgtgcatcacatcctgctcagtgggcctctgtaccaccctgtgggttttcttggacacctggccagtgctgaagggctgttgtgatgttctgaggttgggctcaggctgggtgctctgccatgggctgagtggcccagatattcttctgtccatctttggcctgctggtgccagcaggggacacagactgcaaagagaagcacaaagtttgagccttgattcctggacccaggagctctcaactaacaaggaggcaggagaggt

SEQ ID NO: 6153 - DNA, 419 bp, Homo sapiens
  misc_feature (1)...(419): n = A,T,C or G
tcaagaaaatgacggtcacagaccaggtgaactgccccaagctctcgtaaccaggttctacagggaggctgcacccactccatgttacttctgcttcgctttcccctaccccaccccccgccataaagacaaaccaatcaaccacgacaaaggaagttgacctaaacatgtaaccatgccctaccctgttaccttgctagctgcaaaataaacttgttgctgacctgctgtgctcgcagtnnaaaaaaaaaaaaaaaaaaaaaaaaaaaaaaaaaaaggggggggcccttttaaaaaaaccctgggggggcccaaatttaaccggggcgggaaaattaaaatttttttctttttggggggccttttaaaaccccccctgggatttttggaaaaaaacccttttttggggggggaaaaac

SEQ ID NO: 6154 - DNA, 486 bp, Homo sapiens
ttatgcaataaaatgtctctaacctgcgaacaaatctatcaagcagacggcacagtactgaatttgaaaccagaaatactgggtttttatataaatgcttcatagatttgttttatgataaagggcacataactctcctaaacctcacaccacctcttgaataggtataataagtccacatcaatgctgatgccttagctattattaaactcttacagtatgatgtaaagtgaaagtacaatgtaagatcattcctaggccaactttgaccagttttatacagaaacatgtgccaacttttctgtttgcaaggataatatcaaagcaaacaccagaaagttatatctttgatgcatttttttcaaaatcatacacataatacacaaaccaaagacaaatgatgaatattatgtcagaaaatataaagtcttcccctttcttcttttgccaagaaagtccaatattttcaccatttttatgcacaca

SEQ ID NO: 6155 - DNA, 511 bp, Homo sapiens
atgggctaagaaaattcagagtgaaaagtttcgctggcataactctcagtggctggagatggtagagagtcgtcagatggatgagagtgagcagtacttgtatggtgatgatcgaattgagccatacattcatgaaggagatattctcgaaagacctgaccttttctacaactcagatggattaattgcctctgaaggagccataagtcccgatttcttcaatgattaccaccttcaaaatggagatgttgttgggcagcattcatttcctggcagcacttttcatccaaggatttcaaagtgttttacaaatacgcactaattaagcctcacaaacagccagagccttggaatggatggctttgccaaccagttgcattcttggacgccctgcacagcatatggattccgccctgataaacctactactattgctatggatctggtaaggattcggtttcatgtgtaacttcacttaaaacaaaaccgtggggggttggttaatcttgac

SEQ ID NO: 6156 - DNA, 487 bp, Homo sapiens
cgagccgacccgccccgccgacgaaccccctgaagctgtgccaagatgtgtgacgacgaggagaccaccgccctggtgtgcgacaacggctctgggctggtgaaggccggctttgcgggcgatgacgcgccccgcgctgtcttcccgtccatcgtgggccgcccgcggcaccagggagttatggtgggtatgggtcagaaggactcctacgtaggtgatgaagcccagagcaagagaggcatcctgaccctgaagtatcccatcgagcatggtatcatcaccaactgggacgacatggagaagatctggcaccacaccttctacaatgagctccgtgtggctcccgaggagcaccccaccctgctcacagaggccccgctgaaccccaaggccaaccgggagaagatgactcagatcatgtttgagaccttcaatgtccctgccatgtacgtggccatccaggcagtgctatccctgtatgcttctg

SEQ ID NO: 6157 - DNA, 475 bp, Homo sapiens
gaatctaaaaagaaaataagaaagaaacagagaatctgaagggaaatggaaagatgtaggtcaaaagatatgaagctggagttatggtcctattaaaaaatctagagatctaatgtacaatctgagatgatggatatgtaaatttgcttgaatatagaagtcacttcactacatgtatcaaaacatcatgtcgtacacaatatatacatttaaaaatcagtcatgtcatccagcagcagcagaatatacatttaagtgcacacataacatctactaaaactctcttctgagccacaaaacaagtcttaaatttaaaagaattcagccaggtgcagtggctcatgcctgtaagcccagcactttgggaggctgaagcaagaggatggcttcagcctgagactagcctgagcaatatatcgagactccatatctatttttttatgttaaaataactcatgtcatacaaagtatgttg

SEQ ID NO: 6158 - DNA, 467 bp, Homo sapiens
  misc_feature (1)...(467): n = A,T,C or G
cccacgcgtccggcgcagtctattaacatcacggagctgaatctgccgcagctagaaatgctcaagaaccagctggaccaggaagtggagttcttgtccacgtccattgctcagctcaaagtggtacagaccaagtatgtggaagccaaggactgtctgaacgtgctgaacaagagcaacgaggggaaagaattactcgtcccactgacgagttctatgtatgtccctgggaagctgcatgatgtggaacacgtgctcatcgatgtgggaactgggtactatgtagagaagacagctgaggatgccaaggacttcttcaagaggaagatagattttctaaccaagcagatggagaaaatccaaccagctcttcatgagaagcacgccatgaaacaggccgtcatggaaatgatgagtcaaaagattcancagctcacagacctgggggcagctcangctactgctaa

SEQ ID NO: 6159 - DNA, 417 bp, Homo sapiens
aactatcctccaagccactttccccagaggaatcgtgtggggttggctcctggctccccagcccttttcttacattccacagcatccatgcacactggagatgtttgtttttggtctcgttttccaaagggtaggctgagagcaaatgcttgtttccaacctcgaagggtttgtaagaatgtgcaaatctagatgtgagagggagttcaaagacaaaaccataggcagaggagttgggcttaggaaattccccaatccgtgggcaaaaggaatggtagttgtggtaaggcaacgttttcccacactcgaggcattttaaaattaggtatgccaccagccctgactgtggacaagacagtggaaaaaggcttgaatcacagttaagggactgagtagggaaaaacacacataaggtgt

SEQ ID NO: 6160 - DNA, 419 bp, Homo sapiens
agcaatgtgtctaatatgaaaaaaaagaacaaaacaaccccaatggtaagaaacagaggcgatatggggaggaggaaaaaaaaaaccattaccaggctgggtgtgggggctcacgcttgtaatactagcactttgggaggccaaggggggtggatcacctgaggtcaggtgttggagaccagcctggccaaaagggcaaaacccggtctctactaaaaatacaaaaagtagctgggcgtagtggcacacgcctgtaatcccagctactcaggaggctggggcagtaaaatcgcctggggggcagaggttgcagtgagccgaaatcgcactccagcctggatgacaaacgtgaaacccgtcaaaaaaaaaaaaaaaaaaaaaaaaaaaaaaaaaaaaaaacatgaatttcaacatctggg

SEQ ID NO: 6161 - DNA, 463 bp, Homo sapiens
aacctttccagggagtggatgtgtgatcgccatcttagggaaaagatgttctcgtccgtggcgcacctggcgcgggcgaaccccttcaacacgccacatctgcagctggtgcacgatggtctcggggacctccgcagcagctccccagggcccacgggccagccccgccgccctcgcaacctggcagccgccgccgtggaagagcagtatagctgtgactatggatctggcagattctttatcctttgtggacttggaggaattattagctgtggcacaacacatacagcattggttcctctagatctggttaaatgcagaatgcaggtggacccccaaaagtacaagggcatatttaacggattctcagttacacttaaagaggatggtgttcgtggtttggctaaaggatgggctccgactttccttggctactccatgcagggagctctgaagtttggct

SEQ ID NO: 6162 - DNA, 409 bp, Homo sapiens
  misc_feature (1)...(409): n = A,T,C or G
cccacgcgtccggccaatgttggtgctggcaaaaagaaatgaagtgtctagcagtgagctggagattggatcacagccgaaggagtaaaggtgctgcaatgatgttagctgtggccactgtggatttttcgcaagaacattaataaactaaaaacttcatgtgaaaaaaaaaaaaaaaaaaaaaaaaaaaaaaaaaaaaaaaaaaaaaaaaaaaaaaaaaaaaaaannnggggggggggccttttaaaaaaatttggggggggccccattttacggggggagggaaaaaatttttttttttttttaaggggggggaattaatacctgggcggggactttggaaaaaaaccctttttttggggggggggatatttgggcccaccccctcaagaaatattaagctttttag

SEQ ID NO: 6163 - DNA, 507 bp, Homo sapiens
  misc_feature (1)...(507): n = A,T,C or G
ccttgattgagaaggaggtaggttctctttgagaaaaaacactgcaatgtggtcagagatgtatactactactcctcccctaagtattcttgagagagacctatggtcatttactaggtgactgaacactgggaaaagacaaattccaagtctttctagagctgttaagatactatttataacctgatgataatccctggaaataaacactgtggtcagagtggaagcttacgagggtcaagtgataaatggagttttcatccaattccatttccaagtgggtccaataaagactgtgagctcagtttttattttctcccctccaatctcagagcatagtgaaacttcctaactataaaggctactactatggtaagatgggaagacacanatgaatgttcatacacctatccccattcttcttctatgcctcaccccgacatcattaccgggttttctcttaaaaaaaaaaaaaaaaagggccgcccgttttaaagattccctggg

SEQ ID NO: 6164 - DNA, 419 bp, Homo sapiens
ctttctttcgccagccttacgggcccgaaccctcgtgtgaagggtgcagtacctaagccggaacggagtagaggcgggccggcacccccttctgacctccagtgccgccggcctcaagatcagacatggcccaaaacttgaaggacttggcgggacggctgcccgccgggccccggggcatgggcacgggcctgaagctggtgctgggggccggggccggggcctacggcgtgcgcgaatctgtgttcaccgtggaaggcgggcacagagccatcttcttcaatcggatcggtggagtgcagcaggacactatcctggacgagggccttcacttcaggatcccttggatgcagcaccccattatctatgacattcgggccagacctcgaaaaatatcctcccctacaggctccaaagac

SEQ ID NO: 6165 - DNA, 492 bp, Homo sapiens
  misc_feature (1)...(492): n = A,T,C or G
gcccgccccaattgaaacccttacgaaggcgtacagcanccggcccgnaannnngggnngacccacgcgtccgcccacgcgtccgggcatgtgccactacgcctggctaattttgtatttttagtagagatggggtttcactatgttggtcagcctggtcttgaactcctgacctcaggtgatctacccacctcggccttccaaagtactgggattacaggtgtgagccactgcgtccagcctagccatcaaatttgaaaccacagaatctactgtttgatctgatagtgtaataacaatgaagagaggccttagggctgtatttacctgtggcatatttgatgactattagaaatggtagcaatttagaaacatctggtacaaattgtacatcttagtttctcttttacagtgccatgaattgatgaagaaatggtctattaaaatgcccagtacccagcagattattcttaccaccaaagattgtataat

SEQ ID NO: 6166 - DNA, 384 bp, Homo sapiens
  misc_feature (1)...(384): n = A,T,C or G
aaagaacagtcatttcagaaactagagagtcatggttagcaataaagcagcgggatcaataatgcaactgcacagcaacatcaccaccaccaccatcaccaccaaggaagatcatactcaccccagggacaagatcagtgttgaatctgtgtgttagattgttgatagagcactcttgattaaggtggaaagggcatgggacagtggctcccctgcctgaatgaattgttccattctaagaagtattttgctcacacaggtggcattaaaaaaaaaaataaaaaaaaaaattaattaattaattaaagaagtngatccctagaaaaacagagacggacagaccgaccgaccgatggatngatggatggatggattgattgattg

SEQ ID NO: 6167 - DNA, 409 bp, Homo sapiens
cggacgcgtggggtgccctgatctccgttggctgcttggccatatttgtcactgtgatctccctcttggtgtacaaaaaacacaaggaatacaacccaatagaaaatagtcctgggaatgtggtcagaagcaaaggcctgagtgtctttctcaaccgtgcaaaagccgtgttcttcccgggaaaccaggaaaaggatccgctactcaaaaaccaagaatttaaaggagtttcttaaatttcgaccttgtttctgaagctcacttttcagtgccattgatgtgagatgtgctggagtggctattaacctttttttcctaaagattattgttaaatagatattgtggtttggggaagttgaattttttataggttaaatgtcattttagagatggggagagggattatact

SEQ ID NO: 6168 - DNA, 425 bp, Homo sapiens
acgcgggagcccacggagaacgctccaggagggcctgtccatcctcgctgtcctttccctgttctccccctgccccccgtctctatcctctgtggccttcagctaatttctgctcccctgagattcgtccttcagccccatcatgtgctttgggatgagtgtaaataaaacggggctgtggcttgggaaaaaaaaaaaaaaaaaaaaaaaaaaaaaaaaaaaaaaaaaaaaaaaaaaaaaaaaacataaaaaaaaaaaataattaaaagaaaaaaaaaaataaaccaccaccaaacactttgaaaagaaaagaaaaaaaaacacctaatgagacttgcgaaaactttctctcaaaaattggatgcagaatggtgcccccccttgcttgatgggtcccttttacataattttacgaataaataaac

SEQ ID NO: 6169 - DNA, 387 bp, Homo sapiens
aacctttccagggagtggatgtgtgatcgccatcttagggaaaagatgttctcgtccgtggcgcacctggcgcgggcgaaccccttcaacacgccacatctgcagctggtgcacgatggtctcggggacctccgcagcagctccccagggcccacgggccagccccgccgccctcgcaacctggcagccgccgccgtggaagagcagtatagctgtgactatggatctggcagattctttatcctttgtggacttggaggaattattagctgtggcacaacacatacagcattggttcctctagatctggttaaatgcagaatgcaggtggacccccaaaagtacaagggcatatttaacggattctcagttacacttagagaggag

SEQ ID NO: 6170 - DNA, 429 bp, Homo sapiens
  misc_feature (1)...(429): n = A,T,C or G
cggacgcgtgggtgacttcaacaaatgctgataaagaatttgaaaaaattcaacatcccttaatgataaaactgtcatcaaaatgagtatacatatatgtcatatatatacccattattcaaaataataaagggtatatatgacaaatccttggttaatatcatattgaatgtggaaaaattgaaggcctttttttctaaggacgggtacaagagaaagacacccactttcaccactattatttaacataatactggaagtcctggcaagagcaattaggcaagacaaagaaatgaagagcatttaaatagaaaagtagaaagtcaaattatacttttccaaagacaatataatgttatacctagaaaaacctagactccatgactttttcnnannaaaaaaggggaanccaggagggagcaacacaaa

SEQ ID NO: 6171 - DNA, 421 bp, Homo sapiens
aaaaagatgttccatgcaaacaataaacatgagaaaactgggggctatattaaaatcagacaaagtggattttaagacaacaaatattaccagagataaggtgagtattttgtcattttttaaagatcaatttatgtagaagacctaatcattataaatgtatatatatatattcataacaaagtttccaaattcgaaaagaagaaattgacagaactaaagagaaaaatagagaaattcacattcatacttggagactataacacctctctctctcagcaaatgatataacaaataaaccccaaaaaaatcagtaaggatataaaaggattgaaataccacttttaaccaatttgacatttataaaaaactatagccaaaatctgcaaatactcattattttcaattgcacctaaaatat

SEQ ID NO: 6172 - DNA, 408 bp, Homo sapiens
ctcccagtcactttattccatttggtatcacaataaagaagtatcttgcttccatgaataacacacaatgacaaatataaaacaaactgaagagtctaccaagtcatggagtgtgacaagattccagataaacatacagaatggatgtctcagttgactggtaactgaatacgctggcttttttcatgcttaagaattaaattcaacctagatccagggcaacggaaagatgtcaccttcggaaatattggtattcaattccttcctgatactattaccagctgcattcttgttgtccctctctgaccaggacaaagatcagagtgggacgcagtcttccatttcatcacccctccgggtcccctgggggtggggacccaggtgagaaacgtgcaaggatgctattgt

SEQ ID NO: 6173 - DNA, 399 bp, Homo sapiens
cgagatctgatggtttttatatggggcttccccctttgctgggcactcattcttctccttcctgccaccatgtgaagaaagatgtctttgcttccctatctgccatgattgtgtttcctgaggcctcccgaggcatgctgaactgtgagttaattaaacctctttcctttataaattacccagtcttaggtatgtctttattagcagtgtgagaatggactaatacaacatcttttgctcttttgccctacaaggtaatattcatagattcaggtattagaatgtggacatctttggaggccattatttagcatgccacattgtgtgaactaggacaagttacataagctttcgtggtcttaatttcctcatcaataaaatgagttattaatagcattt

SEQ ID NO: 6174 - DNA, 418 bp, Homo sapiens; identical to SEQ ID NO: 4346

SEQ ID NO: 6175 - DNA, 396 bp, Homo sapiens
  misc_feature (1)...(396): n = A,T,C or G
atttaccatctcacttctaggaatactagtatatcgctcacacctcatatcctccctactatgcctagaaggaataatactatcgctgttcattatagctactctcataaccctcaacacccactccctcttagccaatattgtgcctattgccatactagtctttgccgcctgcgaagcagcggtgggcctagccctactagtcaaaaaaaaaaaaaaaaaggggcgcccgtttaaaagaatccttggggggccccaaattaacccgggatagcaagaaaaaaccttttcccttaaagggggtctaataaaaccctggctgggaatcttgggaaagaacctttatttgggggggggcccctatgggaacaacctccctccaaaaattagaggctn

SEQ ID NO: 6176 - DNA, 395 bp, Homo sapiens
atagctggcaggttcctaccaaaagttaccagctacctctctgatgctctttccctacaatatcctcctggattattacattttagcaccttgacctatctgatgtcctgcatacacaggcatggtcctgctcagggtttgccttctctgctccctctttcctggaatgctcttcccctaattgttgcatagcgtgtttctttacattattaagctgtcctctagtctcacctcagtgaaacctttcctgactccccccatgtacacctaccccctatacatattacactaccttgttacccccacccctgcccacaagagaaaacgcacgttaactgtaatttttccactacctacccaaatcctataaaactgccccaccccatctccttttg

SEQ ID NO: 6177 - DNA, 403 bp, Homo sapiens
aaaaattaacaatgaaaattaattcttacgggcggtctgcttgattagatctttggggagatgccaaaatgtgcttaaatgaggaacttataatgccttaaaatggcagattcatgtatgaatatgatcgtgctcttgtgagacatctacctataatggggtgtgagtgacttatactcttaaataatttggttaaatcatgtggctagcagaaaactaccttctgtaggtgttaattaaaaactttatacatgcgtcttcattaaagaaaacacatctaaagctttatctttgtgtaatctaagtatatgtgagaaatcagaattggcataatttgtcttagttgatattcaaggctttaaaagtcattattcctgggcttggtaagtgaatttatgagatt

SEQ ID NO: 6178 - DNA, 403 bp, Homo sapiens
  misc_feature (1)...(403): n = A,T,C or G
aaacagaaaaaattacttagnggggtgccagctgtgatttttcaactgccaggtgccttaagaaggaagaccagggatgctaggacggattgaaacccaagaggaagtgccatcatgaggaatcaatgagagatctgtgaacagagagggctgggtgggagcccataaggatagaacccggaagatcaatatctcccgtgagggaaataacaatggagccaggttctaagtcagtgactaagtcagactggcatcctgaaccatgacanaggcctataaccccgctagagcctgggccagaaaagacacccatagcccagccagaatcgaagactctgcagggatccaatacccaacagaagcctgcttcaaaccaaagacccctcacccagcaggagacccc

SEQ ID NO: 6179 - DNA, 403 bp, Homo sapiens
tggataagaacagatttttgtactctagaaacagatgttttcaacataatatgcagcaaaattattctatgcctattccctcctaatttaagggcgtgcagatgaaggctgacatcggcatagaaatgtgctaaatttcaaatatggttgttcaataatatatttttaattgtattttaaaacatccctttgtagggaatatcagtagaactattgaattgatgttgtatttttgcattagctgtcctttaattttgctttccatgtcttgatcttgttaccgaaatgcattctgtgtaatttcaacgtagactacgttcctgagtctgatgatgtcattgtaaataatcattcctcatgttgctctcacgggtttgacattggaggatagatgtgccatcaa

SEQ ID NO: 6180 - DNA, 462 bp, Homo sapiens
ttctctttctttgctgaggttttatatttctttgatgagatgttttgttttttcatttgtttcatgcgcatttgtaattgatcattgaggcatttttatgatatctcctttaaaatctttgtcatataattctaacaactgtgtcatcttgatgattgtgtttctttattttagagctcactggttcttgtgataatgaatctattaaaaatctatttttaataaattcaataaaatttctattttaaaaaaatctatttttttctattaaaacctagatattttggctggttgcagtggctcacgcctgtaatcccagcactttgggaggctgaggcgggtggatcacctggggtcaggagttcaagaccagcctgaccaacatggaaaaaccccatctctactaaaaatacaaaattagccgcaagtggtggtgcatgcctgtaatcccagctacttggg

SEQ ID NO: 6181 - DNA, 423 bp, Homo sapiens
  misc_feature (1)...(423): n = A,T,C or G
attctttaaagaatgcatatgatacatctaatattgttatggaattttagaagccaagggttatttctgttaaaaaaaaattgttaaggaactttatttttaaacaaccaagggccatggtgataggctatttaggcggatctaagcaagcagtagttagcagtaatagggagtgtttacatgattactatgtaggccttcaagttttagtgttaataaagtgtggtttatgatgaaaaacttactggatttggggaaatgactcatacagttttcatggatttgaagaagcgatttatacaaagacctggttctccataggggtggactaaatgaatacactcttaaagtagacagatcattttaatattttatggaatgaaaccatgcctcattgttcttaatattcaaatgtgctttctn

SEQ ID NO: 6182 - DNA, 411 bp, Homo sapiens
  misc_feature (1)...(411): n = A,T,C or G
taatcatctctgtgtgtttctgagcttgttgcattgtgacctgaagtgaagcaagctcatccaaggcctcaatgcatctgttcacatccttcatgacaaaacagtaatttcatagctgttaattatcttaacacttaaacaatctgtttctaaagatcgtttccaaaaaaaaagaggtagtgcaaaatgaccactaattatcccttaaatttacatactcataagatcatgtgagaaaataaaaaaggaagctgtaaacgcagtactgaagtattaaatgaagttaaacacttacaagattatcaatcttgagtgaatttttaatctcagcatgcatactttgaagacgagaatccattgatgttgctacaaattaaaatatgtgaaaaacagagaacagtttttccacan

SEQ ID NO: 6183 - DNA, 384 bp, Homo sapiens
ggttgactgatacgcacagtgtctgttgacagttaacacctttgtgaaccccgggctggaggctggaccttaaggatctgcttgctgttcacaaacacagagaggttgctaagcgatccccctcagccttggattccaaaggacacatctgaattgctcccatttgtgagatcccattccatctaaatgctattctaaaggggtgggttttgtcataaaggggatacgaatttctggtggaagaagccacaaagtacaatgtgaggaaacgtctccggtttaagggaggaataatagctgttaagtcttgtagctcctgagcacttggttcaaatccagccggtcttagccttaacaacgtgttaccaaaaccagcccgtggat

SEQ ID NO: 6184 - DNA, 457 bp, Homo sapiens
  misc_feature (1)...(457): n = A,T,C or G
tgaagactctgctgctgcagattgcaaagcaagagctggagcgagaggcggaggagcggcgcggagagaaggggcgcgctctgagcacccgctgccagccgctggagttggccgggctgggcttcgcggagctgcaggacttgtgccgacagctccacgcccgtgtggacaaggtggatgaagagagatacgacatagaggcaaaagtcaccaagaacatcacggagattgcagatctgactcagaagatctttgaccttcgaggcaagtttaagcggcccaccctgcggagagtgaggatctctgcagatgccatgatgcaggcgctgctgggggcccgggctaaggagtccctggacctgcgggcccacctcaagcaggtgaagaaggaggacaccgagaaggaaaaccgggaggtgggagactggcgcaagaacatcgatgcactgagtggaan

SEQ ID NO: 6185 - DNA, 419 bp, Homo sapiens
ctcactactaataattattacattttgactaccacaactcaacgggtacatagaaaaatccaccccttacgagtgcgggttcgaccctatatcccccgcccgcgtgcctttctccataaaattcttcttagtagctattaccttcttattatttgatctagaaattgccctccttttacccctaccatgagccctacaaacaactaacctgccactaatagttatggcatccctcttattaatcatcatcctagccctatgtctggcccatgagtgactacaaaaaggattagactgagccgaataataaaaaaaaaaaaataaaaaaaaaaaaaaaaaaaaaaaaaagggggggggggccttttaaaatttccctgggggggcccaaattttccgggggggggaaaattatttttttc

SEQ ID NO: 6186 - DNA, 460 bp, Homo sapiens
  misc_feature (1)...(460): n = A,T,C or G
cccacgcgtccgctagttctagatcgcgggcggccgctcgccccacgcgtccgacgaaagtggctttaacatatctgaacacacaatagctaagacccaaactgggattagataccccactatgcttagccctaaacctcaacagttaaatcaacaaaactgctcgccagaacactacgagccacagcttaaaactcaaaggacctggcggtgcttctttnnnnaaaaaaaaaaaaaaaaaaaaaaaaacaaaaaaaaaaaaaaaaaaaaannnaaaggggggggcctttaaaaaaatttctgggggggcccaattttaggggggtggggaaataaaatttttttttctttagggggggggattataaaaccccgtggggattttggggaaaaaacctttttttgggggggggcaatatgggccccccccccccaaaattaagcccctggggggaaaaag

SEQ ID NO: 6187 - DNA, 395 bp, Homo sapiens
ctttgcctgtccgagcctgtttcttcatctgtattatggggataggagaaggccccaccacctccgagggctgtcgtgagagtgttgagtactcacatcagaaatcagagctcccgctcagtggtgagcagagtggagggaagaggggtgctgggtggcgggtttggggctccagccatggctttcttccacctcaggagacagccaggtgccagggcccataggctgcaactgtgacccccaaggcagcgtcagcagccagtgtgatgctgctggtcagtgccagtgcaaggtcagtccgaatccctgtccctgcggggcctgctctgccccgctgcccagaccctgcggggaaatcaggcagcatctggtggaagccgagacctgggcatggg

SEQ ID NO: 6188 - DNA, 454 bp, Homo sapiens
  misc_feature (1)...(454): n = A,T,C or G
attttacctcacccccactgatgttcgccgaccgttgactattctctacaaaccacaaagacattggaacactatacctattattcggcgcatgagctggagtcctaggcacagctctaagcctccttattcgagccgagctgggccagccaggcaaccttctaggtaacgaccacatctacaacgttatcgtcacagcccatgcatttgtaataatcttcttcatagtaatacccatcataatcggaggctttggcaactgactagttcccctaataatcggtgcccccgatatggcgtttccccgcataaacaacataagcttctgactcttacctccctctctcctacaaaaaagaaaaaaaaaaaaaaaaaaaaaaacccaacaaaaaaanannaaaaagggggggggtgtttaaaaaaaatttggggggggccccatattgcgggggcc

SEQ ID NO: 6189 - DNA, 522 bp, Homo sapiens
  misc_feature (1)...(522): n = A,T,C or G
nttgacgcctgtgacattgacgaccgtccgaccgacccacgcgtccgatggaaggctggaaactgacaccaaactccttattcagccaaagacacgccgagccatttagaatacattttcaaaagctgatgctgaatataaaaaacttcatagttatggaagagaccagaaaggaatgatgaaagaacttcaaaccaagcaacttcagtcaaatactgtgggaatcactgaatctaatgaaaacgagtcagagattccagttgactcatcatcagtagcaagtttatggactatgataggaagcattttttcctttcaatctgagaagaaacaagagacatcttggggtttaactgaaatcaatgcattcaaaaatatgcagtcaaaggttgttcctctagacaatattttcagagtatgcaaatctcaacctcctagtatatataacgcgtcagcaacctcttgttttcataaacactgtgccattcatgtanttccatgggaccaggaatattttgatgn

SEQ ID NO: 6190 - DNA, 420 bp, Homo sapiens
  misc_feature (1)...(420): n = A,T,C or G
ctgatggctgccctttgacccccggtggctgccctttgacccccgggtgtgctctcagcgcaagtggtcctagaacaggattctttttggaaatgtctgtcgactggaccttggtggatttggaaatggaactgagggaccggtgacacgtgcttcagaccggtctggggtgcggcgcacacctgggcccgtgcagggctcagctcggcagcagctctgagggcagctcaatgaaaaagtgaatgcacacgcccttgttggcgtggcctggcatggcctggtgctatcggcagccgctctccactccccgactgatactcaattacgtgaagccaagaaagatgatttttagaacctttgcctatattaggttgtacttatgtacatattttgcagtgtttcacaggagaaagtggcctn

SEQ ID NO: 6191 - DNA, 396 bp, Homo sapiens
cccacgcgtccggggtgggcaggatcgtgtttgtgtcctcccaggcaggacagttgggattattcggtttcacagcctactctgcatccaagtttgccataaggggattggcagaagctttgcagatggaggtgaagccatataatgtctacatcacagttgcttacccaccagacacagacacacctggctttgccgaagaaaacagaacaaagcctttggagactcgacttatttcagagaccacatctgtgtgcaaaccagaacaggtggccaaacaaattgttaaagatgccatacaaggaaatttcaacagttcccttggctcagatgggtacatgctctcggccctgacctgtgggatggctccagtaacttctattactgaggggctcc

SEQ ID NO: 6192 - DNA, 427 bp, Homo sapiens
ctataatgttaaacatatgttcattaaaagcatagcactttgaaattaactatataaatagctcatatttacacttacagcttttcatttgatcaggtctgaaatctttagcacttaaggaaaatgactatgcataattatacctgaccatgaaaaaaataagtacctcaaatgcatgcatttgcactggtgattccaactgcacaaatctttgtgccatcttgtatataggtattttttacatgggttgacatgcacacaacaccattttcattcagtatgaaccttgaggctgctgccatttttccacttaaccaaaccagcctgaaggtgaacctcgaaacttgtttcataaatctttcaaaagttgttttacatcaatgttaaaatttcaaaatgctgcagggtaatttaatgtataaaatat

SEQ ID NO: 6193 - DNA, 407 bp, Homo sapiens
  misc_feature (1)...(407): n = A,T,C or G
cccacgcgtccgcgcttagcgacccgccgccgccgccaagcgaggctgaggactccgatcgcgatgtctcatctgacagctccatgagatagagacctgcctcccccttgcacccgaggccctcgcagcagggagctcagcgaggcagagggtggggctgcacagaggggaacatcagctgcagctctgcaccaggccggtccctggggactggggcgctcctccctcaggctttctccctcagtcttggcttctccagggctctggggtgtctggagctaggcttggccctaccattctggggccatttccaccacagttggggctctcctgccttcacgcgtgggtgtctgctacttccccatctttaaaatgctgccagagcgattgcggcccctcaccttgtn

SEQ ID NO: 6194 - DNA, 421 bp, Homo sapiens
gcgaggaaatctagctaagcacgcattatgtaccaataaaagattattatatttggacccaagatgagcttaaatccgttcacatgtatataattaagatatataggaattatatttacagaaaagaatgttacaaaccttcgcaaagtaaaaatatttttatatgagatagatccttctgttgcaatccataaaaccagggttaggatcattttagaaaaacaacctaaaatcatggattggattctttagggaggacctgatagaataaaatgacgggctgaccaaataggccttaaaagggagaggtgcctgggcaagcacaaggacctaagaaggaagaggggcttggccacagacattgtctttacttgattgagggaggtgaactcacagagagagagttgcacttatatagagg

SEQ ID NO: 6195 - DNA, 422 bp, Homo sapiens
acaacagaagacattataagatctgtgaaagtggaaagagaagaaagagcagaagagtcaattgaggacatctatgctaatatccctgaccttccaaagtcctacataccttctaggttaaggaaggagataaatgaagaaaaagaagatgatgaacaaaataggaaagctttatatgccatggaaattaaagttgaaaaagacttgaagactggagaaagtacagttctgtcttcaatacctctgccatcagatgactttaaaggtacaggaataaaagtttatgatgatgggcaaaagtcagtgtatgcagtaagttctaatcacagtgcagcatacaatggcaccgatggcctggcaccagttgaagtagaggaacttctaagacaagcctcagagagaaactctaaatccccaacaga

SEQ ID NO: 6196 - DNA, 491 bp, Homo sapiens
  misc_feature (1)...(491): n = A,T,C or G
tggtgntaganannnnattganccccctnnatagaagcgccgtgatgtaccggtccggaaatgccggcgcaacaacctgctagccttactactaaaaattattacattttgactaccacaactcaacggctacatagaaaaatccaccccttacgagtgcggcttcgaccctatatcccccgcccgcgtccctttctacataaaattcttcttagtagctattaccttcttattatttgatctagaaattgccctccttttacccctaccatgagccctacaaacaactaacctgccactaatagttatgtcatccctcttattaatcatcatcctagccctaagtctggcctatgagtgactacaaaaaggattagactgagccgaataaaananaaataaaaacaaataactttaccaaagaaaaantggggggggcccgttttaaaaaaattttgggggggcccaaattatacggggtgggaagaatt

SEQ ID NO: 6197 - DNA, 420 bp, Homo sapiens
  misc_feature (1)...(420): n = A,T,C or G
cccacgcgtccgcccacgcggacgttctagagtggattttacatatctgaacacacaatagctgagacccagactgggattagataccccactatgcttacccctaaacctcaacaggcaaatcaacaaaactgctcgccagaacactacgagccacagcttagaactcaaaggacctggcggtgcttcatatccctaaaagaaaaaatgaactctaacctgggtgacagaatgaaactccgtattaaaaaaaaaaaaaaaaaagaggggggccctttttattaaccatcagggggggggccgtaggatttcggaatagggaaaagtaatcttttttagagggggggggggaggaaccaatatggcattttttttttgaaggacacccatgtttgggggtatggaaagaaaacaaaaaan

SEQ ID NO: 6198 - DNA, 420 bp, Homo sapiens
gcggtggcggagccggagcaagcaggggttcggcggcattacctgtacccattcaccggcggctaccggcggcggcgcgcagcgtgtcaggcggagagacccgccgccaggtgtgcaactgaggaacatggctcaagaaactaatcacagccaagtgcctatgctttgttccactggctgtggattttatggaaaccctcgtacaaatggcatgtgttcagtatgctataaagaacatcttcaaagacagaatagtagtaatggtagaataagcccacctgcaacctctgtcagtagtctgtctgaatctttaccagttcaatgcacagatggcagtgtgccagaagcccagtcagcattagactctacatcttcatctatgcagcccagccctgtatcaaatcagtcacttttatcaga

SEQ ID NO: 6199 - DNA, 417 bp, Homo sapiens
aattactcaaatattatatcccaattttaaaaaacttacttacagatgccaaaattaccaaaacaaattaattctaatctcacttcccaaaggctaccacgtataccagatttttcttctgttatcaggctaccagctatttcaacaaggtttatcaaagaaagtaataattctgataagttcatgaaaatttgacttagaggaataatactgagttatgaaaaacatagctataacctaaagtattcaatttcaaattatttaatatatggacaacaacattcattattcaagatattgccatggctgctccctttaaaataattggttctgggatattgctgcagactatgaagtaactgatatcaaactaatctttgctaagagcgcttctgttagtctggttgcattgttata

SEQ ID NO: 6200 - DNA, 422 bp, Homo sapiens
attgcattctgccgtgtttataggtgttcactttcctccagagctgattaactactgacatgacttggctttctcatccagaaattatggaaacagggtctgtcagtggcaggaggccgtgctgtgttttacttggatgacacaatgcagtttacttgcctcttcatacccatgcatgctgctcaccctagacaatgacatataagccgtatatagatcaatgtccacatatatatacacacacacatatatatatataaagtgtaacaaggaacactaaaacagtgttgattcttgtctctgaagacaaataattaaaccttttttttcccaactaaagaatggatttaattaaactatgtattgaaaaaaaagtagcctaagtgttagagatggtgaatatattccattttagttaaaga

SEQ ID NO: 6201 - DNA, 391 bp, Homo sapiens
atagcgcctcacattttttactgtagagtgataaaaaattaacctgccatatctactgcttattgaacattctctagttttggtcctgactagtacattttctgcagaaatttttttttgaatttcacatgtctagcagaacgagaaatctggcgtacattacaaccaaccaaaacattgctctggacaggcctaaaacaaggacctgaacgtcagtagagaatggaatcagcgattccataaatgacaccagtttcatgcagtcacacagtggggagggaacagagatcatttccgcatttccctctaaatgggcaaactaaagcccacagttttgttaagagggtgctgtgtataactcagatgccttactgggatacagaaatggact

SEQ ID NO: 6202 - DNA, 493 bp, Homo sapiens
  misc_feature (1)...(493): n = A,T,C or G
ggggagnnnnnaattgaacgcctgattggccggcacgcagtaccgggtcgacccacgcgtncgatgatgcaggagaatcgcttgaacttgggaggcagaggttgcagtgagccaagattgggccactgcactccatcctgggcaacagagtgagactctgtgtcaaaaaaaaataaataaaaagaagaggtgatttggacaactagcaacaagtttaggatagagttgtcactagaaagctaagcaaaggagaaaaaaatccaaaaaattgtgcagcaaagaagtcatattttatggctcaactctgaatagcacactaatctaaccaaaattaaggttaaactacactgaaaggatacaatgtgtgagccgagatcgtgccactgcactcaagcctgggtgacaaagtgagactccgtctcaaaaaaaaccaaaaaaacttgtggatgtacttgagtctcttaactctgtaaaatcaaaacctaaagaaaaa

SEQ ID NO: 6203 - DNA, 435 bp, Homo sapiens
  misc_feature (1)...(435): n = A,T,C or G
cctggttccacagaatggtgaatttttttcccctttgnnnnttttgccctcgccccccggctgttatagactgcttaagtttgtataattcttatctttttttnnnnntgggggnnnnnnnnnnnngggggggggggggggggtttttttcccctcgggccccccccccccccccccccctccgggacgatattttaggaataacggactcttaaagaagcaaaaaaaaagactgaatttccttgcttactttgcatatacagactggattttttttttttttttcccccccttcccccaagggaaggcctggcctacccccgcccttggggacgtcccctccctgggaaaatttcttattttctccgggttggaaacccccgtaaaaaacccccggtttgataatattttgagggcgggaaaacccccttttgt

SEQ ID NO: 6204 - DNA, 415 bp, Homo sapiens
  misc_feature (1)...(415): n = A,T,C or G
atcttgaggagagggaaatatctcacttgtgaattctttacccacagggatgactcagattaagatttattgaattgaattaaggatttaaatgagtgctatacaataaacattatattgttatatttattatgttaactgagatgtgaaaatactatcatatcttagatacatgttcaataaagatagataaaataccttacaggacttttcaatgaaaaaagaatacagtttgttggattctcacaataaacctcagaaattaaggattcataagtaaaaaaaaaaaattcaggattgaggggtctatgacttgtccacattcacagagctataagtaggagagctgggatgagaacctaggtctctgactattagtttgggtgcttgctatgatatttaaactattatactn

SEQ ID NO: 6205 - DNA, 469 bp, Homo sapiens
  misc_feature (1)...(469): n = A,T,C or G
tgacactcgggtcaggcacacgtnccgggttcaattattaaaagtgtgggggcagtgggcggattaaattcgccgactacagaggctggacgtaagcggagcggtggcgcgcgtgcgcagcgccggcccgaggggcccccaaacccggggccgcagagcagtaccagtccgtggcctgttaggaaccaggctacagagcaggagttgccaaaacaaaggggatttggtgatggaggctttgttagaaggaatacaaaatcgagggcatggtgggggatttttgacatcttgtgaagcagaactacaggagctcatgaaacagattgacataatggtggctcataaaaaatctgaatgggaaggacgtacacatgctctagaaacttgcttgaaaatccgtgaacaggaacttaagagtcttaggagtcagttggatgtgacacataaggaggttggaatgttgcatcan

SEQ ID NO: 6206 - DNA, 422 bp, Homo sapiens
ctatattgtagatttactgtaggttttcaaccttttttatatttatgcatgtggacatttttataatgtaattacaatcaccacaaggttagcttttttaattgcagacagtaatgcatgtcacactaatatgtagtggccttttcaaggcctagtcccagggaaaacattttgtagagtataggggagtgggaggaaggggaggaataattttttatttaaagttgatttctgcactatctttttctcagttacctgcatgaataaataatgagaaatattttgtgactttaattggtaaatatgttacaaaaccaagtacttaatcttttacatcatgtcttcagctatttgtattttaaccagtaatttcaatggtctgaaacatgattctgagcttcacataatatcttaactgtgga

SEQ ID NO: 6207 - DNA, 427 bp, Homo sapiens
acgaccttggcaggtgccaccatgagtgcaaaagtggcttgcacccatgaaccagggggcgcctagagaaaaggaacagaattatctgctctcacctatatctccttcccacctactgtcagtagccttggagttccctagacctcatttatgccatggatattaacgtggcctttatccatgaaacaggaagcttggggttggcttaatcagcaggaatcagccacattcacctgtgctgtgccttttaacctctgctaccatgtggctctggattccttagatgcagttttccttcctagggctttgacctgaagcttggaattgaggctgggacaaaaatgtgtcttgggggattgtacggactccttatcataagctgaatgctaaggtgaaactgcggaactcagccctcctcaaacaaggg

SEQ ID NO: 6208 - DNA, 380 bp, Homo sapiens
agaacaagtgactctgaccagcaggcttaccttgttcaaagaggagctgaggacagggactggcggcaacagcggaatattccgattcattcctgccccaagtgtggagaggttctgcctgacatagacacgttacagattcacgtgatggattgcatcatttaagtgttgatgtatcacctccccaaaactgttggtaaatgtcagattttttcctccaagagatgtgcttttgtgttatttgttttcactcaaatattttgcctcattattcttgttttaaaagaaagaaaacaggccgggcacggtggctcatgcctgtaatcccagcactttgggaggtcgaggtgggtggatcacttggggtcaaggtttgagat

SEQ ID NO: 6209 - DNA, 459 bp, Homo sapiens
  misc_feature (1)...(459): n = A,T,C or G
tttcgggtcgacttacgcgtccgctgtgaaaacaggaaacgccggaaagagaagagcgtatggnnnaaagaggnnnnnnnnnnatgcacgcagcagcattgtaagcactcctgtgggcatcatggcttccgattatnnnaannannttnnnnntttcnnnnnnggggggnnnnttgttttttttgttgggggcggcaatattttttggtgaaacggaacgctttgacccatgtcggccccaactgcagcctggaagtccatctcttgtgtcagaggagtcaccttcagccattgattcagacaagatgtcagacctagggggcaggaaacctcctggaaatgtgatttctgtgattcagcacaccaactcactgagccgacccaattcatttgaaaggtctgagtcagccgaacttgtggcttgcacacaggaataaagcccttccccttcagagactg

SEQ ID NO: 6210 - DNA, 405 bp, Homo sapiens
cacgcgtccgcccacgcgtccgaaattttctgttttgcaatagaaggatgtggagaaatgctttcagtctacttttcttaaatctctgttcatcagtggcaattcgtaaaaaccttaagtgatactttgtttatatgtttataatttttaggtgtttcctgaaattttcacatattatttcacttttgttagtgctttatgggaagaatagggagtctataccagtgctgtgggaaaaatggtaacatttcagggcttctctatttgtgtttcatttctgtagatgtccatcgtgtttcactaactggcgttttcttagccatagagatgactgtagaacaatagaaactttaataatgatagcttttaacttttatgtttaaattttttttaaatcttaaaacc

SEQ ID NO: 6211 - DNA, 427 bp, Homo sapiens
aatgtagacattttattgatgctcaacgtgtacgaatttctgttgcataacatctgtccctaattttttgtttaattcttactcttgtaaaaggaaattgcatttgtgccttctttcttatgaaacgttattcgttcattcattcaccaaagatatcttgaccatcttctacagctgcgaaggcttattttctgtataagaaaccaaacacattactctttgcattcctgcattatcagggcgatacatgcattgcaaactgagacgctttgggcatatttttggaaagatctggacctcaaacacagtctctgtttatgggcaataagccaccataaattttagggtgactcctccccttctcctgtctttgattttatttgctaaaattaactgctgtcctttctacctgttgaaatattaaaca

SEQ ID NO: 6212 - DNA, 414 bp, Homo sapiens
cggacgcgtgggcctcgttgagagaaggtctcattctgtgttttgggaagagagtcgtgtgggcccaggtgtcgtagcggcgacactagagagacgggcggtgtgacagccttccactacctgcacgagtgtattggcaacggtggggtgggtgcactcttttggagctggaggaagtgctgccctctgctcccccatcccagcgctttggtttctcccacccggcagtcatggggacgctggatgagcccatttctgaagtgcggaggggccgggcttcttaggctgtgggcggagcctgggcctgggagaggaacagggccctggagcacctggtttcggggacagtaaggttggtgggagttgcgatgatattgccacctacctcttacatcttttagggcgtatggtctg

SEQ ID NO: 6213 - DNA, 406 bp, Homo sapiens
aaacatgtagtggttattatttagagtttatagccgtattgctagcaccttgtagtatgtcatcattctgctcatgattccaaggatcagcctggatgcctagaggactagatcaccttagtttgattctattttttagcttgcaaaaagtgacttatattccaaagaaattaaaatgttgaaatccaaatcctagaaataaaatgagttaacttcaaacatttcagaaaacaaaaaaaaaaaaaagggggggccgttttaaaggatccttgggggggccaaatttaaccggggcaggcaagggaatatttttttccttaaaggggggggaattaaaacctccctggggttttttgaaaggaacccttttttctggggggggacaaattgggccaacctccctacg

SEQ ID NO: 6214 - DNA, 411 bp, Homo sapiens
cggacgcgtggggaagaatctaaatcatgtcagctatggccgtttgaccttcaaatatgaaagggattctaactaccacttgctctgtggcttttcccaacacaatcagtgctagtgctggggaggaacagtcaagagcagtcagttgcttgcttattttttctggatgagtctgggacacactgtaactttaacacatttaagaagtaggtgtgtggccttttcagaaggtggcatggtcctcaagtgagttcttagtattttatatcagcaaaataattcaattttgcaggttgcaaacaaatataaaacctgtttctgtttatgaatattattcttttagaatagaataagtacatgctgctgtaataaaattgcctttaatcacttaacaagcctaaccttgactcg

SEQ ID NO: 6215 - DNA, 410 bp, Homo sapiens
  misc_feature (1)...(410): n = A,T,C or G
agagtttgaattctcacagttgcccctcaaagtggagttcctggagtgcagtgccaagggtggaagaggggacgtgggctctgctgacatccaggacttggagaaatggctggctaaaattgcctgagaggcagctctaaagcacaagacctggatgtgtgacacacagttttggaaaaaggtctgtggtagtctggagttgatgaggaaggggtacaagatgtggttagaaacatttctttgttctggaaacaaagtactgttgaaaccacnnaaaaaaaaaaaaaaaaaacgggggcgcccttttaaaaaaacccttggggggcccaaactttcccgggcttggcaagataaaatttttttccttaaggggggccgaataaaaccctccttgggaatttttggaagag

SEQ ID NO: 6216 - DNA, 415 bp, Homo sapiens
cttgcttcaacagtgtttggacggaacagatccggggactctcttccagcctccgaccgccctccgatttcctctccgcttgcaacctccgggaccatcttctcggccatctcctgcttctgggacctgccagcaccgtttttgtggttagctccttcttgccaaccaaccatgagctcccagattcgtcagaattattccaccgacgtggaggcagccgtcaacagcctggtcaatttgtacctgcaggcctcctacacctacctctctctgggcttctatttcgaccgcgatgatgtggctctggaaggcgtgagccacttcttccgcgaactggccgaggagaagcgcgagggctacgagcgtctcctgaagatgcaaaaccagcgtggcggccgctctatatgatccctct

SEQ ID NO: 6217 - DNA, 412 bp, Homo sapiens
caatttttttctcttttcttaaggtatcagatacacaccggacttcaacattctatcataagacctacccaacccaactgtttacctctggacaatgccaccctacctcagaaactgaaggaggttggatattcaacgcatatggtcggaaaatggcacttgggtttttacagaaaagaatgcatgcccaccagaagaggatttgataccttttttggttcccttttgggaagtggggattactatacacactacaaatgtgacagtcctgggatgtgtggctatgacttgtatgaaaacgacaatgctgcctgggactatgacaatggcatatactccacacagatgtacactcagagagtacagcaaatcttagcttcccataaccccacaaagcctatatttttatatg

SEQ ID NO: 6218 - DNA, 417 bp, Homo sapiens
  misc_feature (1)...(417): n = A,T,C or G
caaatgtggtgtcattccatgttcagcagagtattttaattatattttctcgggattattgctcttctgtctataaattttgaatgatactgtgccttaattggttttcatagtttaagtgtgtatcattatcaaagttgattaatttggcttcatagtataatgagagcagggctattgtagttcccagattcaatccaccgaagtgttcactgtcatctgttagggaatttttgtttgtcctgtctttgcctggatccatagcgagagtgctctgtattttttttaagataatttgtatttttgcacactgagatataataaaaggtgtttatcatannaaaacaacaaaaaaaacaaaaaaataacataaaaaaaaaaaaaaaaaaactagcattaacttaaaccataaccgag

SEQ ID NO: 6219 - DNA, 420 bp, Homo sapiens
aataaataggtcaaacccttatttatatttaaattcttaaaaaattgaaaagattatggttctcaaatttagttgagctttctaagagaagcaattggctttttcccacttcaataatcattttcagtttgactcatacagttaacacaatgtgaatttcttcctcagcataacagagttatagaatgacagggctggaagtgaccttagagagtatccagttctttcattttacaggtgaggcaactgagactcaaaggtgatgtaatttgtgcaaagattatagctaattagtagcagagccctgactgggacatagtttgaaggtgaaaaacttcaccaagctacctttcttgaaaggtccaaatgtttatgttttcaactactctttccactgtaccataactttcactacatatt

SEQ ID NO: 6220 - DNA, 415 bp, Homo sapiens
ttcctgcagcaaattgggcagttctctgccccttgcctaaaagcctgtacctctggattggcggaagtaaaggtggaaggattctcactcgtatttcccacccctagtggccagaggagggaggggcacagtgaagaagggagcccaccacctctccgaagaggaaagccacgtagagtggttggcatggggtgccagcatcgtgcaagctctgtcataatctgcatcttcccagcagcctggtaccccaggttcctgtaactccctgcctcctcctctcttctgctgttctgctcctcccagacagagcctttccctcaccccctgaccccctgggctgaccaaaatgtgctttctactgtgagtccctatcccaagatcctggggaaaggagagaccatggtgtgaatgtagt

SEQ ID NO: 6221 - DNA, 428 bp, Homo sapiens
cacatttctcccataaactgttaccagaataattcaagataaaggttagtctaacacataggttcccggaagattggatttgatcgtttttcttgattgtcacttgggataattttgaaggtatataaaatctgaaatagggaatcatatatgtcatttcccattcataaggtaaagttcaagattaaatttaaatgcttcaagtaaaatatagagaagcttagtttcaaatctaacaaataaaccatatccaagttataaaagtataataggtaaggaagaattcaaagacagagaatacaggacttcactggggagcaaaatcataaagaggtatgagattttagagagctctatcttatatcaaaaaggcagtctccaagagaaagaccattagtaattaaagcatgttggagtagcagctttaa

SEQ ID NO: 6222 - DNA, 476 bp, Homo sapiens
  misc_feature (1)...(476): n = A,T,C or G
ggggccagggccttgctccgaaaccanggacgtctggaaccgcccgaatnccgggcgacccaccgccgcgatgtctggatgataagcgcctgccgtcacgcccggtaatttttgtatttttggcagagacggagtgtgaccgcgttggtcaggatggtctccaactcctgacctcgggtgatcacccccacctcacctttccaaactgctataattacaggcgtgagccaccgcgcccgacctcttctggttttcaacatgacattgaaacactacattacagaaggggaaaggctgacaggttcaaggctcatcttcccaagtaaccgcagttttcgttgagtgtcattccagacgttccctctgcacctggcctataagtaaacagacatatgtgcatccgtgtgtttgcttcacttttggccaaacggattcgtgttctcgagctgctgcggcggccacaaggaacccggatg

SEQ ID NO: 6223 - DNA, 490 bp, Homo sapiens
  misc_feature (1)...(490): n = A,T,C or G
atgcacgggttgnnnccccnaagttttcanganagnacncggcnnggaantncngggncgacccacgcgtgcggaaaacggtctctttcaccactaattaagttttctccagtggaacaaagattgagaaccacaatagcatggagggttggagaactacctaatttaaaggaagaagacattttgaataagagccttgatgcaaaagaaccaccgtctgacttgacaagatgaagacgtacccatttaatataactatgatgcacttaaattgaagctatgccacaggatagaaaatgaattacaacttaaatacatgttggaagtgtaacactgtttttcaaggtttaaaaaaattcctaatgccttttagccttctttaatatttttaggtaaggaaagtatgtttggattttttcctctttgtaggtatatgagattgaaatgtgaagtatttggacaacaaacgtcaagcaatgggaagccattt

SEQ ID NO: 6224 - DNA, 481 bp, Homo sapiens
  misc_feature (1)...(481): n = A,T,C or G
aggcggggttttcccaggttgccgagatccgaccggcttnngggtcgacccacgcgtgcgctagttctagatcagcggccgctggaaaagcttaggttgagaggatctgagaaagactcgttgcgttgtcagagggaagctgaccataaggcagaatgagtttacaataacttatttacctgtccaaatccttcatatcacattaaagctttcccctgctacccgggactctggagtgctaagaggaaaaaggaaaatcaattgataatgatatatttggtttaaaaaaatatattgattcccaggtaatgacagtcgtgcgttttgcagtgggggatgccatttcccgttgtgaagatggctttctcatagattacatttaaaagaaggaaccaggagtagctctgcctccccgtaatagatagcctctttctcctaggtattaaatctataatttaaaaaaaaaaaaaaaagggcggcc

SEQ ID NO: 6225 - DNA, 373 bp, Homo sapiens
cgaggtgtttccattcggtgatcagcactgaacacagaggactcaccatggagttttggctgagctgggttttccttgctactattttaaaaggtttccggtgtgaggtgcagctggtggagtctggaggaggcttgatccagcctggggggtccctgagactctcttgtgcagcctctgggttcaccgtcagtaccaactacttgagctgggtccgccaggctccagggaaggggctggaatgggtctcaactatttatgccggtggtagcacatactacgcagactccgtgaagggccgattcaccttctccagagacaattccaagaacaccgtgtatcttcaaatgaacagcctgagagccgaggacac

SEQ ID NO: 6226 - DNA, 417 bp, Homo sapiens
tttgaaggctctgacttataactgctgtatcagaagaaacattttgacagtgtcttggttggagatgaacatccctaattgacatgtgatgactatttcttattccattcatctaagagtcattgaaattttgttttgcttgtttgtttagcttcaaggtctttggtaaagtcacatgttaaggatgactgaaataattccaaaggagtgatgttggaatagtccctctaagggagagaaatgcatttgaacgaatgtgatataaaaccacataatcaaatagaaacttcatgtacttacaaaaactgagtttgtaaaattaccttcatttctttgacattaaatgcttatattagcaataaacatgttgacactttcctataaaaaataaaccacgttgcagtaaaaaaaaaaaag

SEQ ID NO: 6227 - DNA, 478 bp, Homo sapiens
  misc_feature (1)...(478): n = A,T,C or G
tgtcgggtttccccaggggtcgagaacctgncnggccnnnngggnngancacgcgtgcgccagattgactcaaacggcatctgtatgcacctgggcctgtgcaaatcccggcagccagagccagagcaggagccagggatgtcagaccccctgcccaaacctctgcgggaccctctgccagaccctctgctggacaagctcgtcctccctgtgctgcccggggccctccaggcgaggcctgggcctcacacacaggatctctccgagcagcaattccccattcctctcccctattgctggctctgcagggctctgatcaagcggatccaagccatgattcccaagggtgcgctagctgtggcagtggcccaggtgtgccgcgtggtacctctggtggcgggcggcatctgccagtgcctggctgagcgctactccgtcatcctgctcgacacgctgctgggccgcatgctgccccagc

SEQ ID NO: 6228 - DNA, 424 bp, Homo sapiens
tgaaaactacaccaccgacttcatttaccagctgtattcagaagagggcaaaggcgtgtttgactgcaggaagaacgtgctgggtcacatgcagcagggtggggcaccctctccatttgatagaaactttggaaccaaaatctctgccagagctatggagtggatcactgcaaaactcaaggaggcccggggcagaggaaaaaaatttaccaccgatgattccatttgtgtgctgggaataagcaaaagaaacgttatttttcaacctgtggcagagctgaagaagcaaacggattttgagcacaggattcccaaagaacagtggtggctcaagctacggcccctcatgaaaatcctggccaagtacaaggccagctatgacgtgtcggactcaggccagctggaacatgtgcagccctggagg

SEQ ID NO: 6229 - DNA, 481 bp, Homo sapiens
  misc_feature (1)...(481): n = A,T,C or G
natgggcggtttctttctaagcttctcctccgtcncgacntncgggtcgaccacgcgtncgaaaagtaataccaaaccataaagttaaaatctatgtatattgagtcatatctaaaaccacgtataaacataaattgtatttcctgttttaattccaggggaagtactgtttgggaaagctattattaggtaaatgttttacaaattactgtttctcactttcagtcataccctaatgatcccagcaagataatgtcctgtcttctaagatgtgcatcaagcctggtacatactgaaaaccctataaggncctggataatttttgtttgattattcattgaagaaacatttattttccaattgtgtgaagtttttgactgttaataaaagaatctgtcaaccatcaaaaaaaaaaaaaaaaaaaggggcgccggttttaaagaatccttgggggggcccaagtttacccgtgtttgaaatt

SEQ ID NO: 6230 - DNA, 490 bp, Homo sapiens
  misc_feature (1)...(490): n = A,T,C or G
ntggggnnnnnnnncnaccgggaacgttaagncgangtcncgacncgnaagnncngnnnngacccacgcgtgcgcatggataatacattagcctaaaattactattcttgggtcttatttaagtatggaatattcattttactcagaggagctgttttgtgtatattggaggatattatataactctttgagcctttattgggaaattctggtatacattgaattcattataatttgggtgactagaacaacttgaagattgtagcaataagctggactagcgtcctaaaaatggctaactgatgaattagaagccatctgacagcaggccactagtgacagcttcttttgtgttcctatggaaacattttatactgtacatgctatgctgaagacattcaaaacgtgatgctttgaatgtggataaaactgtgtaaaccacataatttttgtacatcccaaaggatgagaatgtgacctttaagaaaan

SEQ ID NO: 6231 - DNA, 415 bp, Homo sapiens
tcctgctggcttaatttaaacagttattgcatgaagtagcgtggaggccctggactgctgctcgttctttaggatggactgttctggtatctggtattggtttagagactgttaataagggacatcacaaggtgatgggattcatttgaagcactctatttctgttttaatggttttatccaattttgccttcccaagatttttgttctacataaaaagttcatgccactttttaatataaaaaaatttaacaaaaaaaaaaaaaaagggccgccccttttaaaggatccttggggggccccaattttacgcgggcaggcaaggaataagttttttccttatagggagccgttttataacctacctgggattctttggaaggaaaccttccttttgggggggaacataatggaag

SEQ ID NO: 6232 - DNA, 484 bp, Homo sapiens
  misc_feature (1)...(484): n = A,T,C or G
atggggggttttttaagggcgtcgccgcaccgacnncgccttnccgggtcgacccacgcgtgcggggaacccaggctctgtgaccatctttggagagtcagcgggaggagaaagtgtctctgttcttgttttgtctcgattggccaagaacctcttccaccgggccatttctgagagtggcgtggccctcacttctgttctggtgaagaaaggtgatgtcaagcccttggctgagcaaattgctatcactgctgggtgcaaaaccaccacctctgctgtcatggttcactgcctgcgacagaagacggaagaggagctcttggagacgacattgaaaatgaaattcttatctctggacttacagggagaccccagagagagtcaaccccttctgggcactgtgattgatgggatgctgctgctgaaaacacctgaagagcttcaagctgaaaggaatttccacactgtcccctacatggtcggn

SEQ ID NO: 6233 - DNA, 481 bp, Homo sapiens
  misc_feature (1)...(481): n = A,T,C or G
tcgcngggtttcnnaagggccagnagnaccgacncgcatnccgggtcgacccacgcgtgcgagagaccagcccacccccgtgtccactgtgacccctgttcccatgctgacctgtgtttcctccccagtcatctttcctgttccagagaggtggggctggatgtctccatctctgtctcaactttatgtgcactgagctgcaacttcttacttccctactgaaaataagaatctgaatataaatttgttttctcaaatatttgctatgagaggttgatggattaattaaataagtcaattcctggaatttgagagagcaaataaagacctgagaaccttccagaatctgcaaaaaaaaaaaaaaaggggcgcccgttttaaagaacccctcggggggcccaagttaacgcgggcgggaaaggtattacttttttccttaaggggagccctttaataggcaacctgggaatcttagccagag

SEQ ID NO: 6234 - DNA, 476 bp, Homo sapiens
  misc_feature (1)...(476): n = A,T,C or G
tggggggtgnnnaagggcctgangancggccggacnnnnggnngancacgcgtgcgggcgcagaggcaggcagcatctctgagggtccccaaggagcatggctgggagccgtgaggtggtggccatggactgcgagatggtggggctggggccccaccgggagagtggcctggctcgttgcagcctcgtgaacgtccacggtgctgtgctgtacgacaagttcatccggcctgagggagagatcaccgattacagaacccgggtcagcggggtcacccctcagcacatggtgggggccacaccatttgccgtggccaggctagagatcctgcagctcctgaaaggcaagctggtggtgggtcatgacctgaagcacgacttccaggcactgaaagaggacatgagcggctacacaatctacgacacgtccactgacaggctgttgtggcgtgaggccaagctggaccactgcatgc

SEQ ID NO: 6235 - DNA, 416 bp, Homo sapiens
atttcgagagtcaaaatgtggatttccgaggcaagaaggtgatcgaactgggtgcggggacaggcatcgtggggatcttggcagcgctgcagggctgggtctcttctgcgtcagtcgccccagccaaggcacacattttatgctgggccccgtctgtctgcctcggcctccagcaaggagctcctcatgaagctgcggcggaaaacaggctactcctttgtaaattgcaagaaagctctggagacttgtggcggggacctcaaacaggcagagatctggctccacaaggaggcccagaaggagggctggagcaaagctgccaagctccaagggaggaagaccaaagaaggcctgattgggctgttgcaggaaggaaacacaactgtattagtagaggtaaactgtgagacagattt

SEQ ID NO: 6236 - DNA, 432 bp, Homo sapiens
  misc_feature (1)...(432): n = A,T,C or G
aaattgaggccctcggaaccggcccggatgatcgctctaggcacgcctccgnttntacccgggagctgtgacagtggcctggaaggcagatggcagccccgtcaaggcgggagtggagaccaccaaaccctccaaacagagcaacaacaagtacgcggccagcagctacctgagcctgacgcccgagcagtggaagtcccacagaagctacagctgccaggtcacgcatgaagggagcaccgtggagaagacagtggcccctacagaatgttcataggttcccaactctaaccccacccacgggagcctggagctgcaggatcccaggggaggggtctctctccccatcccaagtcatccagcccttctccctgcactcatgaaaccccaataaatatcctcattgacaaccagaaaaaaaaaaaaaaaagg

SEQ ID NO: 6237 - DNA, 446 bp, Homo sapiens
  misc_feature (1)...(446): n = A,T,C or G
aagcaatatcaaatttttgtctttccccaaacttgactctgatgacagcaatcagaagacagccaagctggcgagcactttccatagcacatcctgcctccgcaatggcacgttccagaattccctaaagccttccacccaaagcagtgccagtgagctcaatgggcatcacactcttgggctttcagctttgaacttggacagtggcacagagatgccagccctgacatcctcccagatgccttccctctctgttttgtctgtgtgcacagaggaatcatcacctccaaatactggtcccacggtcacccctcctaatttctcagtgtcacaagtgcccaacatgcccagctgtccccaggcctattctgaactgcagatgctgtcccccancgagcggcagtgtgtggagacggtggtcaacatgggctactcgtacgagtgtg

SEQ ID NO: 6238 - DNA, 501 bp, Homo sapiens
  misc_feature (1)...(501): n = A,T,C or G
aaactgatagcctcgcaagnnccgaatgangtctagcacgccncggaagatctgagtcacttgcactttataatgcagatattttattcacacatgaattcgctgctcaaaaatgattttattaccttgttcggtaaaatccatttaatcaatatttaagagattaagaatattgcccaaataatattttagattacaggattaatatattgaacaccttcatgcttactattttatgtctatatttaaatcattttaacttctataggtttttaaatggaattttctaatataatgacttatatgctgaattgaacattttgaagtttatagcttccagattacaaaggccaagggtaatagaaatgcataccagtaattggctccaattcataatatgctcaccaggagattacaattttttgctcttcttgcctttngaatctatttagttgattctaattactttctgaatcacggaagggatcagaagatatcttt

SEQ ID NO: 6239 - DNA, 450 bp, Homo sapiens
acgcggacgcgtgggacctggtgagaccccaactctactataaatacaaaaataagctggacctggtggcgcatacctgtaatctcagctactcgggaggctgaggcacgagaattgcttggaccacggaggtgggggttgcagtgagccgagatcatgctactccactccagcctgggcaatagagcgagactctgtctcaaaaataaataaataaataaataaataaataaaggaaaggaaaaaaacccttcaaactggcttaaacaacaacaaaaagtttaaagaactttaaccttctaaagaattgccacttctagggttagtttgttgagcaacctcaagaatctaagttatcttggccaggtgtggtggctcatgcctgtagttccagcactttgggaggttgtggcaggtggatcacctgaggtcaggagttcgagaccagct

SEQ ID NO: 6240 - DNA, 431 bp, Homo sapiens
atcgaacgtgagcttgatgagggtcgctatggtgtctatgaggatgaaaactatgaagtgggaagcgatgatgaggaaataccattcaagtgtttcatctgtcgccagagcttccaaaacccagttgtcaccaagtgcaggcattatttctgcgagagctgtgcactgcagcatttccgcaccaccccgcgctgctatgtctgtgaccagcagaccaatggcgtcttcaatccagcgaaagaattgattgctaaactagagaagcatcgagctacaggagagggtggtgcttccgacttgccagaagaccccgatgaggatgcaattcccattacttaggtttcccataattcttaaatttaaaaaataaacgttttgttcttttggaagtaaaaaaaaaaaaaaaaagggcggccggtctaaaggatcct

SEQ ID NO: 6241 - DNA, 483 bp, Homo sapiens
  misc_feature (1)...(483): n = A,T,C or G
atggcaggttttccccaaggtttcangaagnaccnncncnaannntnggnnagacccacgcgtgcgcgcgtccgccccgcgagcacagatcctcgcctttgccgatccgccgcccgtccacacccgccgccagctgaccggggatgatgatatcggcgggctcgtcgtcgacaacggctccggcatgtgcaaggccggcttcgcgggcgacgatgccccccgggccgtcttcccctccatcgtggggcgccccaggcaccagggcgtgatggtgggcatgggtcagaaggattcctatgtgggcgacgaggcccagagcaagagaggcatcctcaccctgaagtaccccatcgagcacggcatcgtcaccaactgggacgacatggagaaaatctggcaccacaccttctacaatgagctgcgtgtggctcccgaggagcaccccgtgctgctgaccgaggcccccctgaaccccaaggccaa

SEQ ID NO: 6242 - DNA, 415 bp, Homo sapiens
cttataaatgtatttgaaagttaaatatattttaaatattgtttgggaggcatagtgctgacatatattcagagtgttgtagttttaaggttagcgtgacttcagttttgactaaggatgacactaattgttagctgttttgaaattatatatatataaatatatataaatatataaatatatgccagtcttggctgaaatgttttatttaccatagttttatatctgtgtggtgttttgtaccggcacgggatatggaacgaaaactgctttgtaatgcagtttgtgacattaatagtattgtaaagttacattttaaaataaacaaaaaactgttctggactgcaaatctgcacacacaacgaacagttgcatttcagagagttctctcaatttgtaagttatttttttttaa

SEQ ID NO: 6243 - DNA, 497 bp, Homo sapiens
  misc_feature (1)...(497): n = A,T,C or G
gagggtccnattgagcccctctgaaatttgatagcctgcggnaccgcnccggaattcccgggctggccatcccacaagtggcggtaaccctggcggatgctgttttcctcccttctgctactggcaaaaggatctttgtggccaaggagctgctataacctggggtggggtcatgccctcctctcccattgtccctctgccccatcctccagcagggaaaatgcagcagggatgccctggaggtggctgagcccctgtctagagagggaggcaagccctgttgacacaggtctttcctaaggctgcaaggtttaggctggtggcccaggaccatcatcctactgtaataaagatgattgtgaaataaaactggctttggcttcttggaaaagaaataactagactgatgaactaaacaaaaaggggggcggccctcctaaaatatcctttaggggcccacaatttaccggggtgagacacaggaaatctttttcttt

SEQ ID NO: 6244 - DNA, 404 bp, Homo sapiens
acctgcagcaagatggatgtgggcagcaaagaggtcctgatggagagcccgccggactactccgcagctccccggggccgatttggcattccctgctgcccagtgcacctgaaacgccttcttatcgtggaggtggtggtggtcctcatcgacgtggcgattgtgggagccctgctcatgggtctccacatgagccataaacacacggagatggttctggagatgagcattggggcgccggaagcccagcaacgcctggccctgagtgagcacctgggtaccactgccaccttctccatcggctccactggcctcgtggtgtatgactaccagcagctgctgatcgcctacaagccagcccctggcacctgctgctacatcatgaagatagctccaaacatcct

SEQ ID NO: 6245 - DNA, 420 bp, Homo sapiens
aaacctcctggggagaaaggcacgcggtgggtgccggggccaggccctccccgcagcggccccaggggcgggcaggagtcccacctgttggcggcctcctggagccgcagccggcgctcctccatctttctctggagctgggtgcagagtcaaggggccgagcgtgggatctgagcgggccctcggttcccaaccccgtcccacacccggagaggccgggacgtcccagggacctcctctcggtgaggggctgtccccagggaggcctcctccagtggcgtcagctctctggaaatgtgacaagctgctgtctagaccccaggaagcccagtggtgtctggacaccagaggagtctctctcatcctcccggattgctctgaggccaggagctttgtgactctgccccctgaagcttctgg

SEQ ID NO: 6246 - DNA, 487 bp, Homo sapiens
tcccatagatcgccttaggttcgagccccgatttcccgggccgacccacgcgtccggagcctgagccagggcaatggccctgccaccctggaggccacctcttctaagagtcccatctgctatgcccagccacattaactaactttaatcttagtttatgcatcatatttcattttgaaattgatttctattgttgagctgcattatgaaattagtattttctctgacatctcatgacattgtctttatcatcctttcccctttcccttcaactcttcgtacattcaatgcatggatcaatcagtgtgattagctttctcagcagacattgtgccatatgtatcaaatgacaaatctttattgaatggttttgctcagcaccaccttttaatatattggcagtacttattatataaaaggtaaaccagcacaaaaaaaaaaaaaaaaaaaaaagaggggggcccctttaaaaactccctgggggggg

SEQ ID NO: 6247 - DNA, 480 bp, Homo sapiens
  misc_feature (1)...(480): n = A,T,C or G
aggcgcggggggattaaatgatgcctgcgnangactgatatcatgnaganccaccgncgatatcgaaagccgcggacatctttggaagagaggatagattccttaattcttttgcaagtatgcatcgggggggtcctataccccttggttccttgggctggaagacagttaaacaaccagtatatgtcgtagatgtatccaaaggaattgttaatgcagttaaggatcctgatgccaatgggaaatcctttgctttcgttggtcccagtcggtacctccttttccacctggtgaagtacatctttgctgtggctcacagattgttcctcccattccccttgctgctttttgcctatcgatgggtagcaagagtctttgaaataagcccatttgagccctggataacaagggataaagtggagcggatgcacatcacagacatgaaattgcctcacctgcctggcttagaagaccttggtt

SEQ ID NO: 6248 - DNA, 478 bp, Homo sapiens
  misc_feature (1)...(478): n = A,T,C or G
attatccgaggcctcgtaaatccatccgtgctagnacagccncnaantnngggncgacccacgcgtccgcgacgcgtccggctatggtgtgctgcggttcatcatggagagtggggccaaaggctgcgaggttgtggtgtcggggaaactccgaggacagagggctaaatccatgaagtttgtggatggcctgatgatccacagcggagaccctgttaactactacgttgacactgctgtgcgccacgtgttgctcagacagggtgtgctgggcatcaaggtgaagatcatgctgccctgggacccaactggtaagattggccctaagaagcccctgcctgaccacgtgagcattgtggaacccaaagatgagatactgcccaccacccccatctcagaacagaagggtgggaagccagagccgcctgccatgccccagccagtccccacagcataacaggtatgtctgcaagggcag

SEQ ID NO: 6249 - DNA, 483 bp, Homo sapiens
  misc_feature (1)...(483): n = A,T,C or G
ntttatactgagagctgncgtaaanactgacgtgcgtagnacagccncnaannnngggncgacccacgcgtccggcgagccggtggatccataaagaacccagccaacccgcatagggaggggaggggctgagctgtgaggagagcggggcccaagaaccatgtctacgcgggagtcctttaacccggaaagttacgaattggacaaaagcttccggctaaccagattcactgaactgaagggcacaggctgcaaagtgccccaagatgtcctgcaaaaattgctggaatctttacaggagaaccacttccaagaagatgagcagtttctgggagccgttatgccaaggcttggcattggaatggatacttgtgtcattcctttgaggcacggtgggctttccttggttcaaaccacagattacatttacccgatcgtagacgacccttacatgatgggcaggatagcgtgtgccaatgtcct

SEQ ID NO: 6250 - DNA, 492 bp, Homo sapiens
  misc_feature (1)...(492): n = A,T,C or G
ggtgccggnggnnttgaaactgaagcctgcgtacngactcgatantcatggnaganncacgcgnncgnggnattgactcttcagattcagagtctgatatcctgttgggcattctggacaacttggacccagtcatgttcgtcaaatgcccttccccagagcctgccagcctggaggagctcccagaggtctacccagaaggacccagttccttaccagcctccctttctctgtcagtggggacgtcatcagccaagctggaagccattaatgaactaattcgttttgaccacatatataccaagcccctagtcttagagataccctctgagacagagagccaagctaatgtggtagtgaaaatcgaggaagcacctctcagcccctcagagaatgatcaccctgaattcattgtctcagtgaaggaagaacctgtagaagatgacctcgttccggagctgggtatctcaaatctgctttcatccagccacn

SEQ ID NO: 6251 - DNA, 497 bp, Homo sapiens
  misc_feature (1)...(497): n = A,T,C or G
agtggccgnnngnnnattaaattgataccactcgtaaanactgatanctgagtaccgccncgaatncngggcgacccacgcgtccgcccacgcgtccgcctctttgatcttgtgctcagcatgattctttaatagaagttttattttttcgtgcactctgctaatcatgtgggtgagccaggggaacagcgggagacctgtgctaggtttacagattgcctcctaatgacgcggctcaaaaggaaaccaagtgggcaggagttgtttctgacccactgatctctactaccacaaggaaaatagtttaggagaaaccagcttttactgtttttgaaaaattacagcttcaccctgtcaagttaacaaggaatgcctgtgccaataaaaggtttctccaaaaaaaaaagagaaaataaaaaacaaaaaatttggaatttttgagggggggctcttttttgggggggccgcttggtggggccattttctcacgcggcttt

SEQ ID NO: 6252 - DNA, 480 bp, Homo sapiens
  misc_feature (1)...(480): n = A,T,C or G
gggcgngnngnnattacctganacatcgtaaaccttgatgcctactgnanancncnannngggngannagcggcggaagaacngnaaannnnnttnannaggagagcactnataaaanncaannnagggggaacatanacccaagggtaaagacnnacnnganacaggaacactaagagactctgatttttagccaaactaaacaaagtgcttctactgagaggcctttataccaccatgtacagtaactctaagtgaatacggaagaccttggttttgaaattctgccaccttgtttctccctgctcatgaggtcgcaccttttgctcttgctgctaattgcccattcttagagggtgtaatgccaggtggaatggtttcaacaagtcaggtgaaaaccatcctttattggtgctggcacaacttgaaatatagtctgactcagaactgaagcttacatttcaaattcatttcatgccg

SEQ ID NO: 6253 - DNA, 497 bp, Homo sapiens
  misc_feature (1)...(497): n = A,T,C or G
ggtgcgnnnnnnnntttaaattgatagcactcgtaaanactgatanacgagtaccggcncggaatnncggncgacccacgcgtgcggaggccgctagaggcctgaggatgagctggaaggagtgagaggggacaaaacccacgttgttggagcctgcagggtggtgctgggactgagccagtcccaggggcatgtattggcctggaggtggggttgggattgggggctggtgccagccttcctctgcagctgacctctgttgtcctccccttgggcggctgagagccccagctgacatggaaatacagttgttggcctccggcctcccctcnnaaaaaaaaaaaaaaaaaaaaaaaaaaaaaaaaaaaaaaaaaaaaaaaaaaggggggggggggctataaaaaatttcttggggggccccaatttttccggagaacaaaaaaatatttttttttttttttgggggggcagataaaaactctcgggggaattttgaa

SEQ ID NO: 6254 - DNA, 491 bp, Homo sapiens
  misc_feature (1)...(491): n = A,T,C or G
agggccgngnngnttttaaactggagcctgcgtacngacttgaggtcatcggaaanncacgcgnncgagcgacagtgcccagggctctgatgtgtctctcacagcttgaaaagcctgagacagctgtcttgtgagggactgagatgcaggatttcttgacgcctcccctttgtgacttcaagagcctctggcatctctttctgcaaaggcacctgaatgtgtctgcgtccctgttagcataatgtgaggaggtggagagacagcccacccttgtgtccactgtgacccctgttcccatgctgacctgtgtttcctccccagtcatctttcttgttccagagaggtggggctggatgtctccatctctgtctcaactttacgtgcactgagctgcaacttcttacttccctactgaaaataagaatctgaatataaatttgttttctcaaatatttgctatgagagggtgatggattaattaaataagtcac

SEQ ID NO: 6255 - DNA, 481 bp, Homo sapiens
  misc_feature (1)...(481): n = A,T,C or G
gagtgcactggacccagctagnggngcgagnaccgccncgaantcccggncgacccacgcgtccggccccttgcccagggggagggctcggtggcagagtgatgctgttctctacggggagcaagggctaccctggggccgatttggggcagccctaacagtgctgggggacgtaaatggggacaagctgacggacgtggccattggggccccaggagaggacgacaaccggggtgctgtttacctgtttcacggaacctcaggatctggcatcaggccctcccatagccagcggatagcaagctccaagctctctcccaggctccagtattttggtcagtcactgagtgggggccaggacctcacaatggatggactggtatacctgactgtaggagcccaggggcacgtgctgctgctcaagtcccagccagtactgagagtcaaggcaatcatggagttcaatcccagggaagtggct

SEQ ID NO: 6256 - DNA, 491 bp, Homo sapiens
  misc_feature (1)...(491): n = A,T,C or G
agggccgggggggatttaaactgatgcctgcgtacngnactganntcatggnagancccgcgtncgggcttaagaaaattattcaccactcataagtcatggagacatcctcaaaaggtctgcttacccaagttactcagggttggaacctcctagatgatctagctcagagtgaccctgagggctatgagaagtttattcagcagcagctgaaagaagggaaacagctctgtgctgccccagaaccacagctttgtctacagaccaggattctgaaaccaaaagaaaaaatactttttatcaacctgtgtcagtggacaaggatcccagctccccaatcaaccactcatccagtacctctaactgttggcaaaccagaagatacaactgagatatcagatgcttacacagtcattgatgttgcctacaatcctgatgttcttcatgcagcagaaaaggaccaagtgaaaaaaaatcagttaattcagatg

SEQ ID NO: 6257 - DNA, 494 bp, Homo sapiens
  misc_feature (1)...(494): n = A,T,C or G
agtgccgnnnnnnnntttaccttgataccatcgtaaanactgatgntctagnacaancncgaannnngggngaacacgcgtgcgaaaaaacaaggttaacattaaaaaagaaaaacaacaacaacgacaaaaagctccaagctgcagtggatttaaggatgaggctaaaactacctcatactttccttggaagaactaattagctatggtttattgtagggttttgtttgtttgttttttaaagcaaatgatttccatattcctgattgatcttttttgtcatctttgcttcaaaattacataaaaggtgctcctttcccccttcttttatacaagtttcttgttcatattgtgaatagaaaagtttctgaacaacttttttggaacattttctatctatattccaaagcatgtaatatatacataaaaacgatttgttaaactggtccttagtcatttgtataattagaaaatgaaagttggggaaaaaattg

SEQ ID NO: 6258 - DNA, 498 bp, Homo sapiens
  misc_feature (1)...(498): n = A,T,C or G
aggtgccgngnngnnttttaaactgataggctccgtaccgaactgatnatcatgtgtaganccacgcgnncgatggttggttatgcctgtaatctcagcactttgggagtccgaggagtgcagatcacttgagatcaggagtttgagaccaacagggccatcatggtgaaaccccgtctctactaaaaatacaaaaattagccaggcgtggtggtgcatgcctataatcccggctacttgggaggctgagacaggagaattgcttgaacctgggaggcagaggttgcagtgagctgagattgcaccactgcactccagcctgggtgacagagggcgactccatctcaaanaaaaaaaaaaaaaaaaaangggggggggcccttttaaaggaaccttgggggggccaaaatttaccgggggggggaaagaaaattttttttcctttatggggggccaattaaaacccacccgggaatttttggaaaggacccttttttt

SEQ ID NO: 6259 - DNA, 495 bp, Homo sapiens
  misc_feature (1)...(495): n = A,T,C or G
aggtgcgggnngnnatttaaactgatgcctgcgtanngacctgatgtcatcgtgaaanccacgcgtncggaactgtgtggcccctgcctgtgccagccatgggctcgggatggactccctgggccccacccattgccaagccaggaaggcagctttcgcttgttcctgcctcgggacagccccgggtttccccagcatcctgatgtgtcccctctccccacttcagaggccacccactcagcaccaccggcctggccttgcctgcagactataaactataaccactagctcgacacagtctgcagtccaggcgtgtggagccgcctcccggctcggggaggccccggggctgggaacgcctgtgccttcctgcgccgaagccaacgccccctctgtccttccctggccctgctgccgaccaggagctgcccagcctgtgggcggncggccttccctccttcgctccttttttatattagtgattttaaaggggag

SEQ ID NO: 6260 - DNA, 473 bp, Homo sapiens
  misc_feature (1)...(473): n = A,T,C or G
aggcgggtnnnnnaaactgatgctttcgaccgcccgaaactgaaacgtcgaagcgncnggnnanatacgancaagcccggctaatttttggatttttagtagagagggggtttcaccatattggtcaggctagtctcaaacacctgaccttaggttgtctacctgcctcggcctcccaaagtgctgggattacaggtgtgagccactgcacccagcctgcccagctaattttaaacaattttttgtagacactgggtcctgctatattgctcaggctgggcctgagctccttgactcaagcattcgtcctgccttggcctcccaaagtgctaggattataggcctgagccaccatgctcggcataaattggatttttaaagagaaaagtttctttttctgggtgcttccttgaatagaaatcttgtttatctcatgagtcataaagcggggcatctgggctgtaatcatcaag

SEQ ID NO: 6261 - DNA, 422 bp, Homo sapiens
agtgtatcagcattaacatgttggcagataaattgaacatgactccagaagaagctgaaaggtggattgtgaatttgattagaaatgcaagactggatgccaagattgattctaaattaggtcatgtggttatgggtaacaatgcagtctcaccctatcagcaagtgattgaaaagaccaaaagcctttcctttataagccagatgttggccatgaatattgagaagaaacttaatcagaatagcaggtcagaggctcctaactgggcaactcaagattctggcttctactgaagaaccataaagaaaagatgaaaaaaaaaactatcaaagaaagatgaaataataaaactattatataaagggtgacttacattttggaaacaacatattacgtataaattttgaagaattggaataaag

SEQ ID NO: 6262 - DNA, 423 bp, Homo sapiens
  misc_feature (1)...(423): n = A,T,C or G
cccacgcgtccgctttcctgtcccggcctgcgtggtgtgggcttgtgggtctttgagacccgaaaattgagagcgttttggcactccagcggctgctcctggcggctctgcggccgtcaccatgccacagaatgaatatattgaattacaccgtaaacgctatggataccgcttggattaccatgagaaaaagagaaagaaggaaagtcgagaggctcatgaacgttcaaagaaggcaaagaaaatgattggtctgaaggctaagctttaccataaacagcgtcatgctgagaaaatacaaatgaaaaagactatcaagatgcatgaaaagagaaacaccaaacaaaagaatgatgaaaagacaccacagggagcagtacctgcctatctgctggacagagagggacaatctcgagctaaagn

SEQ ID NO: 6263 - DNA, 487 bp, Homo sapiens
  misc_feature (1)...(487): n = A,T,C or G
agcggcgagggttttnctccgaaagtcccgtaggtctngcaaanncncgnnngancangcgtgcgcttgtgaagaaaaggggacttgtactttgataggaccatattcactatgcatttcctgtaaaggaagaagggatgctggagcgcatccaggtcgaactcttctaacaggatgaggttcaaaagggggcctggataagggggacgagatgatccaagaggagctgggacctgggctggtgcaggggcctctgtctcctcttctaaggaggcagactgtttcttcccttctgtctggattaagtctggctggatatcactgctataagtgcaaggtctattatacattgctgacagagcttgcggttattctgcagggcaaaaaaggcctatacatatggaattttggaccattttccttctctgtggttgaagagatctagctataggatagtattatagttgttattttccccagctgactn

SEQ ID NO: 6264 - DNA, 414 bp, Homo sapiens
  misc_feature (1)...(414): n = A,T,C or G
tttgtttataaagttttatggatttttacagtgaagtgtttacagttgtttaataaagaactgtatgtatattttgtacaggctcctttttgtgaatccttaaaaactcaactctaggaagcaactactgtttattatactaaaaggctgaaaaacctccaggccagactgctaagctctgaaattcctgagaggtctcagaccgggattctacttgttccaagaaagggtaaagcttctaaaccatcttattcttgtctccaagcatgaacacaggagcatgttaagaaaatctttactacttcttccatgcggagaaatctacatattttgaattagaaacaccctcacacccacttgaagatttttttcctgggaacattatgtcccgtaaatcagaggtgnggttgtctt

SEQ ID NO: 6265 - DNA, 431 bp, Homo sapiens
cagagttgttcttattggaggaaaacccgatagggttgtagagtgcataaagatcatccttgatcttatatctgagtctcccatcaaaggacgtgcacagccttatgatcccaatttttacgatgaaacctatgattatggtggttttacaatgatgtttgatgaccgtcgcggacgcccagtgggatttcccatgcggggaagaggtggttttgacagaatgcctcctggtcggggtgggcgtcccatgcctccatctagaagagattatgatgatatgagccctcgtcgaggaccacctccccctcctcccggacgaggcggccggggtggtagcagagctcggaatcttcctcttcctccaccaccaccacctagaaggggagacctcatggcctatgacagaagagggagacctggagaccgttacg

SEQ ID NO: 6266 - DNA, 389 bp, Homo sapiens
cagcaaccccatcccagaatcctattttcctgggaagtccttaaagcccctaaccatcccacactcttcactttcctttccaccttattcattctctgtacttaccacagtattttgcacttgattacatatccttcactctcttctcttcatcccatcaccccctaaataggtcaggtgagggaggctgggaagaggtgggaggaggggcagaagtgaaggaagaataggaaggatattacctcttctgttatttttttaagaaacattgtttggtggcagcaatctccctgtccctatcactgttagaggcctaattttatatctataaatatattaaaaagcaagtcaaacttggaaaaaaaaaaaaaaaaaaaaaaaagatatta

SEQ ID NO: 6267 - DNA, 396 bp, Homo sapiens
attttctttctcttttcaaacatatgcatagcctctattatcctacctcatttcttcctgtttcagagaaagaagctagaccatagctattcactttaatttccgcttgattttataattgatttctttcaggttcctaatcatactctcttgtttctgctttttaggatctgctggattttctccctcaagacatctcagatttaaccttttgattctcttaagcaaatgatcttgattccaaacataattacaataattattttttcagaccaaacatcttgtagatgcaagctcttggcttttgtttcattatctataaattaagaaatgcaattatgtaaaatatgccttcacatacgtgtcttgatcagcactttaaaaacagtctgtaag

SEQ ID NO: 6268 - DNA, 398 bp, Homo sapiens
aggaagaccaccaaatccagatagacaacgagcaagagaggaatccatgatgagacgtcggaaaggtcgacctccaaatgttggcaatgctgaattcctagataacgcagatgcaaagttgctaagaaaactgcaagctcaagaaatagccaggcaagcagcacaaataaagcttttgagaaaacttcaaaagcaggaacaggctcgggttgctaaagaagccaaaaaacaacaagcaataatggctgctgaggagaagcggaagcaaaaagaacagattaagattatgaaacagcaggaaaaaattaagagaatacagcaaatcagaatggaaaaagaacttcgagctcagcaaattctagaggctaaaaaaaaaaaaaaaaaaaaagggggggccg

SEQ ID NO: 6269 - DNA, 493 bp, Homo sapiens
  misc_feature (1)...(493): n = A,T,C or G
gtgggtccnattgatcgcgtgcggacatcgacggcctttccgggncgacccacgcgtccggcatggcgtcggtggtgttggcgctgaggacccggacagccgttacatccttgctaagccccactccggctacagctcttgctgtgagatacgcatccaagaagtcgggtggtagctccaaaaacctcggtggaaagtcatcaggcagacgccaaggcattaagaaaatggaaggtcactatgttcatgctgggaacatcattgcaacacagcgccatttccgctggcacccaggtgcccatgtgggtgttgggaagaataaatgtctgtatgccctggaagaggggatagtccgctacactaaggaggtctacgtgcctcatcccagaaacacggaggctgtggatctgatcaccaggctgcccaagggtgctgtgctctacaagacttttgtccacgtggttcctgccaagcctgagggcaccttcaaact

SEQ ID NO: 6270 - DNA, 387 bp, Homo sapiens
  misc_feature (1)...(387): n = A,T,C or G
tatgattcaagacataatttcattcttcattttcatttaaaatttgtcttcacattgatgtgaacaactttcaggagtctaaaaaatagtagtttcagacaacctaaaataaatatattcctagaaaacacttggatgacctgcaaacagatcaaagatatagtcagatattaaagtcagagcagctgtttttagcttcttgtttccttttctaaaacttgaagtagatggcgattaaccttatcatgtttaaacaaccttgacagtataaggtacatgtaccctcaattttcttcatccagtaagacaagtatgcatcttaaagggaaagcttttagttcataacaatatgtttggttgcttttctctgctttcggaacatttacn

SEQ ID NO: 6271 - DNA, 407 bp, Homo sapiens
cttgtgtcctcttctccctgacttactcactatgctgcttaaccaaactctctcaagactactttgtgctggtagtggggcgagcacttggtgggctgtccacagccctgctcttctcagccttcgaggcctggtatatccatgagcacgtggaacggcatgacttccctgctgagtggatcccagctacctttgctcgagctgccttctggaaccatgtgctggctgtagaggcaggtgtggcagctgaggctgtagccagctggatagggctggggcctgtagcgccctttgtggctgccatccctctcctggctctggcaggggccttggcccttcgaaactggggggagaactatgaccggcagcgtgccttctcaaggacctgtgctggaggcctgcgctgc

SEQ ID NO: 6272 - DNA, 483 bp, Homo sapiens
  misc_feature (1)...(483): n = A,T,C or G
cggattgcgccttgaacagctncggaannncncggncgacccacgcgtgcgcggacgcgtggggaagagatcaccatactcgncattgactatggctccatcatgtgcaaagctggttttgctggggacgacgggcctggaaccatgtttccctccactgtcaggtgcccccaacaccagggcatgatggtggggatgggccagaaggtcttctacctgggcgacaaggcccagagcaagcacggcatcctgacgatgaagtaccccatcgagcacatgattttcaccagctgggaaggcatggagaagatctggcaccacaccctacaacaagctgcatgtgttcctggaggagcacctggtgctgctgactgagggccccctgaaccccaaggccaacagaaagaagatggctcacatcatgtttgagaccttcaatactctggacatgtacgtggcagtccaagccatacttctatgctg

SEQ ID NO: 6273 - DNA, 416 bp, Homo sapiens
ctggatggacacatgggccaggggctctgaagcagcctcactcttaacttcgtgttcacactccatggaaaccccagactgggacacaggcggaagcctaggagagccgaatcagtgtttgtgaagaggcaggactggccagagtgacagacatacggtgatccaggaggctcaaagagaagccaagtcagctttgttgtgatttgattttttttaaaaaactcttgtacaaaaaaaaaaaaaggggggggccgttttaaagaacccttgggggggccaagtttaccgggggagggaaagaaaatatttttttccttatggggggccattttaaaccctccttgggatttttggaaagggacctttatttttggggggggacatattgggacaacctccctccggatattaaaggg

SEQ ID NO: 6274 - DNA, 402 bp, Homo sapiens
gaagtccaaggtcaaggtgctgtcaaggagatgtctcaactaagaattttaaaagaaactatgattgctcgcctacaatttttcaatgcagcctggaaaagcagagataatccacttgttctgggacctatagagggaatcctgaaagagaactggcaaaagtccacagaaaaagtagagatggggtttcatcgtgttggccaggatggtctcgatcgcctaacctcgtgattctcccacctcggcctcccaaagtgctgggattacaggcgtgagccactgcatccagccacatgtgtttaattttaaggttctttattttatggtacttgcctaacatatggtaatataaaaatggtgaatagaaaatttaacttgagatgatggctagatttatctaag

SEQ ID NO: 6275 - DNA, 477 bp, Homo sapiens
  misc_feature (1)...(477): n = A,T,C or G
attaatcccgagcgtccgcanntcngtanctaacgnananncnccgnnnaaaangattctttgaggggtaaagaaacttgaccaaaagacagtacaaaaacactgtcacttgaatgttgaaggtcaccgtatgcgcgggattatatatttcggggtagtgcgagcttttaatgtttaagtcatattaaactcttaagtcaaattaagcagacccggcgttggcagtgtagccataactttctgatgttagtaaaaacaaaattggcgacttgaaattaaatcatgccaaggttttgatacacttgtcttaagatattaatgaaacacttcaaaacactgatgtgaagtgtccagattctcagatgtttgttgtgtggattttgtttagctgtgtgcttttttttttttttcagggaagggggggcccatggaactcctaaacatggggttttttttgtggtatggggaaaaacaggg

SEQ ID NO: 6276 - DNA, 489 bp, Homo sapiens
  misc_feature (1)...(489): n = A,T,C or G
ttttaactgatantcgtcgtananacttgagggaccagnaccggcncggaannnngggncgacccacgcgtccgagcgacagtgcccagggctctgatgtgtctctcacagcttgaaaagcctgagacagctgtcttgtgagggactgagatgcaggatttcttcacgcctcccctttgtgacttcaagagcctctggcatctctttctgcaaaggcacctgaatgtgtctgcgtccctgttagcataatgtgaggaggtggagagacagcccacccttgtgtccactgtgacccctgttcccatgctgacctgtgtttcctccccagtcatctttcttgttccagagaggtggggctggatgtctccatctctgtctcaactttacgtgcactgagctgcaacttcttacttccctactgaaaataagaatctgaatataaatttgttttctcaaatatttgctatgagaggttgatggattaattaa

SEQ ID NO: 6277 - DNA, 477 bp, Homo sapiens
  misc_feature (1)...(477): n = A,T,C or G
ttgnaactgacngcggtcggatcgccactgattntcgtgccgacccacgcgtncgcagaaatctgtgataaaaagaaagactaaagaaattttcctaaaggaccccatcatttaaaaaatggacctgagaatatgaagcatcttccttgtgattgtctctgacctttttatctgagaccggaattcaggataggagtctagatatttacctgatactaatcaggaaatatatgatatccgtatttaaaatgtagttagttatatttaatgacctcattcctaagttcctttttcgttaatgtagctttcatttctgttattgctgcttgaataatatgattaaatagaaggtttgtgccagtagacattatgttactaaatcagcactttaaaatctttggttctctaattcatatgaatttgctgcttgctctaatttctttgggctcttctaatttgagtggagtacaattttgt

SEQ ID NO: 6278 - DNA, 487 bp, Homo sapiens
  misc_feature (1)...(487): n = A,T,C or G
nttaaaactgaaantcgtcgtannnnactgantntactngcananncacncnnnnggaaantacaacttacatgattaacttggcaatgtcagacttgctttttgtttttactttacccttcaggatttgttacttcacaacacgggattggccatttggagatttactttgtaagatttctgtgatgctgttttataccaacatgtacggaagcattctgttcttaacctgtattagtgtagatcgatttctggcaattgtctacccatttaagtcaaagactctaagaaccaaaagaaatgcaaagattgtttgcactggcgtgtggttaactgtgatcggaggaagtgcacccgccgtttttgttcagtctacccactctcagggtaacaatgcctcagaagcctgctttgaaaattttccagaagccacatggaaaacatatctctcaaggattgtaattntcatcgaaatagtgggattttt

SEQ ID NO: 6279 - DNA, 495 bp, Homo sapiens
  misc_feature (1)...(495): n = A,T,C or G
atttaactgaaantcgtcgtanaanacgngatggacgagcacccgccncggaannnnngggnngacccacgcgtgcgcccacgcgtccggagccattaatttttgggtttttttaaaatccagaaggtatatagaaaccttttcagattgtgtcatctgatttgttcttgcagatgttcttctatcaaataccttattttaccttacagatatttgttgcacaggcagatactgctgtatttagacatttctatttcagttcattaaaaactgcaaaaccaatctgtatcatgtaccaaactgacttaaaataaatctacatgtttattgaattaaaaaaaaaaaaaacaaaaaaaaaaaaataaacaaaaaaaaaaaaaaaaacaaaaaaaaaaaaaaangggggggcggttttataaatttaaatggggggggaaacctaaagggggggggggtaaattaattttttttttttaatgggggagaaaataaaag

SEQ ID NO: 6280 - DNA, 491 bp, Homo sapiens
  misc_feature (1)...(491): n = A,T,C or G
ttttataccgaaaatcgtcgtannnacttganggaccagaaccgccncggaannnngggncgacccacgcgtncgcccaaacctgttggtaaagtgcccatctggtgctcaagagagcctgggggtctaacagggagcccggctgcctgacctggccacagcctccacaccagatctccacattgtcttgatccagaccagctctgtgatcagaaggaaattgggtccagtgtaggagagagctggtcctgggcctggcaggcaagagtgtgggcatcctttcctggcctttctccactctccctcaagcctgtgctcaggttgccttgaatgtggactctggaagagccaggggcccagaatgccgggggaggcttctgagtggcactcatggaacaccgtccctctgccagccataggccctgcctccagtgtcagggaatggaggctgggctgcgagagtgttgctgccccctgtgtcattcttctaa

SEQ ID NO: 6281 - DNA, 503 bp, Homo sapiens
  misc_feature (1)...(503): n = A,T,C or G
gaagttcccccnnnnttttaacctgagaccatcggtannnactgattatcatgtgaaanncacncgnncgnncangcgtncgttcggctcgtgcgtcgatgaagaacgcagctagctgcgagaattaatgtgaattgcaggacacattgatcatcgacacttcgaacgcacttgcggccccgggttcctcccggggctacgcctgtctgagcgtcgcttgccgataaaaaaaaaagagaaaaaaaagaggaagacgtaaaaaaaagaaagaaaaaaaaaaaaaggggggggccgttttaaagaatccctgggggggccaaagttaacccgggcttgcaacgaaaaatttttttccctaaagggggccgaataaaaaccaacctgggaatctttgggaagaacccttactttgggggggggacatattggaacaacctccctacaaaaattaaaggctttagggaaaaaataaaattttaaggggtaagggggtaaacctaccg

SEQ ID NO: 6282 - DNA, 412 bp, Homo sapiens
agcgatgtctccaccaccgctgctgcaacccctgctgctgctgctgcctctgctgaatgtggagccttccggggccacactgatccgcatccctcttcatcgagtccaacctggacgcaggaccctgaacctactgaggggatggagagaaccagcagagctccccaagttgggggccccatcccctggggacaagcccatcttcgtacctctctcgaactacagggatgtgcagtattttggggaaattgggctgggaacgcctccacaaaacttcactgttgcctttgacactggctcctccaatctctgggtcccgtccaggagatgccacttcttcagtgtgccctgctggttacaccaccatttgatcccaaagcctctagctccttccaggccaatgggaccaagt

SEQ ID NO: 6283 - DNA, 432 bp, Homo sapiens
atggatgggtaacaataatagtaacatcaatactatcagctaacatttagcaagagtttattaagtaccagccaggcgccgtggctcatgcctgtaaacccagcactttgggatgcctaggcaggcagatcacctgaggtcaggagttcaagaccagcctgcccaacatggcgaaaccccatctctactaaaaatgcaaaaaactggccaggtgtggtggcagatgcctgcggtcccagctccttgggaggctgaggcaggagaatcgcttgaacccaggaggcagaggctgcagcgagccgagatcacgccactgcactctagcctgggcgacaagagcaaaactctgtctcaaattaaaaaaaaaaaaaaaaaaaaaaaaaagggggggccgtttaaaaaaacccctgggggggccaaattttacgcggg

SEQ ID NO: 6284 - DNA, 480 bp, Homo sapiens
  misc_feature (1)...(480): n = A,T,C or G
gcgcggttgaaagagtacggggacggtgcgcaaccgctccggaantnccgggncgagccacgcgtccgagataattgatttttaaagtgcatttttcgtattctgttagatgttttaagaagcattttaaatggcactggcaatatgagaaagatttggaaagacgagactgggactatggcttattcagtgatgactggcttgagatgataagagaattctcgaactgcatgtattgtgccaatctgtcctgagtgttcatgctttgtaccaaatttaatgaacgcgtgttctgtaatcaaactgcacatattgtcataaccaacatccaaaatgacggctgctatatataagtgtttgtcatatggaatttaatcgtaagccatgatcataatgttaactaaataactttatgtggcactgcctagtaagggaactatggaaaggtttggatttctccacatctgggagaattttcan

SEQ ID NO: 6285 - DNA, 412 bp, Homo sapiens
  misc_feature (1)...(412): n = A,T,C or G
aaaaacaatcttattccgagcattccagtaacttttttgtgtatgtacttagctgtactataagtagttggtttgtatgagatggttaaaaaggccaaagataaaaggtttctttttttttccttttttgtctatgaagttgctgtttattttttttgtcctgtttgatgtatgtgtgaaacaatgttgtccaacaataaacaggaattttattttgcncaaaaaaaaaaaaaaaaaaaaaaaaaaaaaaaaaaagaaaaaaaaaataaattaaattaataaaaaaaaaccccaggttgctaaaaataaactaaacttataaaacctaaaaaaaggggggcggccccccttgcatttttttttttggtgccctcctccttttaaggggaaaatattttttttcttttcaatt

SEQ ID NO: 6286 - DNA, 404 bp, Homo sapiens
gttatttatgaaattcttatgttgtttaccctgagcaaaatgtcagatcttaaattctcatgtattaatggggaccttcttactcttatttttttatttttgtttttcagccctggtacctgacagtgtaaagaaggagctcctacaaagaataagaacattccttgctcagcatgccagcctttaagattgaattagattgtgttgttgtggttttatttctgaaagtaaaacttgccataaattagaaaacaatttcccaaaataaaatccttttttgtatgatggtatacagttttcagtaatgatgtatacattgtattgatttttttccctaaatgtgttattttaataaatatctcatgaatgagtttgaagtttgcttggattttgaaaaaaaaaac

SEQ ID NO: 6287 - DNA, 417 bp, Homo sapiens
ggttgtccaggtgtggcggtgggcgcctgtgaggcaggcgaatctcttgggcccgggaggcggaggttgcagtgagccgagatcacaccattgcactccagcctgggcagcaggagtgagattccatctcaaaaagaaaccaaaaaaacaaaaaaaaaacatgccgtttgagtactgtgtttttggggttgcccaaggaaaattaaaaacctgtagcatgaataatgtttgtttttcatttcgaatcttgggaatgtattaaatatatcgctcttaagagaaaaaaaccaaaaaaacaaaaaaaaaaaaaaccaataaaaaaaaagaaatattaaagaaggggggggggggtttaaaacggtccctggggggagcccggttccctttcgaaacagtgattgttttttttttttgggg

SEQ ID NO: 6288 - DNA, 415 bp, Homo sapiens
ctcacgggggtcctgtgccaccgtttccatggcctgtggtatatgaaaatgatgtgggcctggctccagggcaaaaggaagcccaggaaagctcccagcaggaacatctgctatgatgcatttgtttcttacagtgagcgggatgcctactgggtggagaaccttatggtccaggagctggagaacttcaatccccccttcaagttgtgtcttcataagcgggacttcattcctggcaagtggatcattgacaatatcattgactccattgaaaagagccacaaaactgtctttgtgctttctgaaaactttgtgaagagtgagtggtgcaagtatgaactggacttctcccatttccgtctttttgatgagaacaatgatgctgccattctcattcttctggagcccattgaga

SEQ ID NO: 6289 - DNA, 464 bp, Homo sapiens
  misc_feature (1)...(464): n = A,T,C or G
gtgcgggngnatttaaattgcagctgcgcgatgacacccaaccccggncgacccacgcgtccgctcaaatttctaggctcaagcggtcctcccgcctcagcctcccaaagtgctaggattattggtgtgagaggaatccctttcaacccttgaaaataaatcaagcggtgatgaactccctgagcttatatttgcctaggaagggctttatttctctttcatttttgaaggacagtttggctggacatagtatgtcttatttggcagtttgtccccttctgcactgtgaatatattatgtcagtcccttctggccatctggcaaggtttctgctatgaaatccactgttttatgaaggatctcttgttcatgacaagttgctttttgattttaaaatgactcaatgtggatgtctttgggctcattctagttggagtcctttggaattctcgaatctggatgtg

SEQ ID NO: 6290 - DNA, 384 bp, Homo sapiens
tccagtcatgtctgcaggtccgagatatgaatatcactgggcagatggtactaatattaaaaagccaatcaaatgttctgcaccaaaatacattgactatttgatgacttgggttcaagatcaacttgatgatgaaactctttttccttctaagattggtgtcccatttcccaaaaactttatgtctgtggcaaagactattctaaagcgtctgttcagggtttatgcccatatttatcaccagcactttgattctgtgatgcagctgcaagaggaggcccacctcaacacctcctttaagcactttattttctttgttcaggagtttaatctgattgataggcgtgagctggcacctcttctataattaatagagaaacttgg

SEQ ID NO: 6291 - DNA, 375 bp, Homo sapiens
cggacgcgtggaggaagtgacatcttctttaaaccctgcgtggcaatccctgacgcaccgccgtgatgcccagggaagacagggcgacctggaagtccaactacttccttaagatcatccaactattggatgattatccgaaatgtttcattgcgggagcagacaatgtgggctccaagcagatgcagcagatccgcatgtcccttcgcgggaaggctgtggtgctgatgggcaagaacaccatgatgcgcaaggccatccgagggcacctggaaaacaacccagctctggagaaactgctgcctcatatccgggggaatgtgggctttgtgttcaccaaggaggacctcactgagatcagggacatgttgctgg

SEQ ID NO: 6292 - DNA, 376 bp, Homo sapiens
ctttaccaattcaggtcgtgttctctacgggccctctgagcaccaaaacacactggaaacaaacagtatttctactggaaaaaccattttcagttaaagcaggtgaagccttgaaaggaaaggtcacagttcacaagaataagaaagatccacgttctctcaccgtgaccctcacgttgaataattcaactcaaacttatggtctccagtgaaacagccataaaagcacactaccttgtagtttttaatgtgggggtagagtgggtcagcaggagggagctggttttatgtgagcagatggatggatgatggaccctttcctaatgagcctcctcaataagagagaagttctcattgtgggaatctgacatagttc

SEQ ID NO: 6293 - DNA, 385 bp, Homo sapiens
aaacacttagttcagaaaccttaaaggatttgaatatttcaaattgcacacgtcactccagcatctctgtaaaataattggaatgaaaatacttcttgcacttaaacactgcacatgccgtactttgaggttagtctgaatcttgaactttaataccaaattaattttgaatgcttttgtttcctaagagataatggcatggtttcatatgttatactttggacagacagagttttaaaaatggaattattttttctttcatgcctcttgtaatgttctgaacaaacttgaatgatgaaagtattaaagagatatcagtatttgaaaaaaaaaaaaaaaaaagaaaaaaaaaaaaaaaaaaaaatttgaacaaaaaaaaggtggg

SEQ ID NO: 6294 - DNA, 271 bp, Homo sapiens
  misc_feature (1)...(271): n = A,T,C or G
cgagtgtcaanaggggagttnaaaactgangatcgtcgactgacntcctcgnananncnnannanngngggnggagtattggttacccaattttttataaggacactgaagcttagaggagtgaaatgttttgagtgttatttcagagagcaaatggcggagactggctgcaaacccatcttcctggacctgaagttcatgctcccagccaccccacccctgagctgaataaagatgatttaagcataaaaaaaaaaaaaaaaaaaggggg

SEQ ID NO: 6295 - DNA, 374 bp, Homo sapiens
ctcagggaatgggagctgggcggagctgggcaagagctgggcaagagccagggccattgggaagaactacagggtgctttcgaatccggaaagcgctggagcccagcggccggatgcagcagcaggtgggtctacacacaccacccgctgcctccctccgtgtctgcggctgagctctgcttctcggcccctcaccacaggagttggactggtgctccaggagctgcgtgacgccggtgtcctgaacgacacactggtgatcttcacgtccgacaacgggatccccttccccagcggcaggaccaacctgtactggccgggcactgctgaacccttactggagtcatccccggagcacccaaaacgctggggcc

SEQ ID NO: 6296 - DNA, 490 bp, Homo sapiens
  misc_feature (1)...(490): n = A,T,C or G
cgaagttccnngatgattaaacctaggangccttcncgaantcntcgnaannccnancanngcggcggttatactatctttttattatctgagccttttcctaatgcagctcataggtgctagctagagctgctgctcagggttgaagactgtacaaggagattagaaatctttggaaaacatatgtgatgaaattgagctatatgatttatcagagatctgattccaaagagcacagaatactgttctcagaccatgaaaccagacaacacatgtattggtttaaactcgataatgacaggaaaattccaaactagagcagtaaattcaaatggtaagatgaatcctacaaggcctctgattgcagcatgttgacaccaacctcacgttacgaacaattcacagagaatttgcctttgtggcaactgaagatggaagtctggggggcacagacaaccttatcaaacaatataaaagccaatataaattg

SEQ ID NO: 6297 - DNA, 383 bp, Homo sapiens
gcaatgataaaaagaatgttgagtactgacaggagattggcttttacactaaaaaagacagaaaatggactaaataggaacataatttcagagtttatgagtcagtttacaatatgccatattagcgatctcatgatgattcagaccacagtctgggttaaagatgtcttgacctctgaggctagcataacatatatgagaatacaacttgcctatttccagaaaatctgtatatttttatagaataactttatttacaatttctatcatccaattactcactaggcattatttgtagtactttttttctctttgaaatctcataggatagtcacacttataaacattcccaatattcggattctagaagaaatgcaattcat

SEQ ID NO: 6298 - DNA, 374 bp, Homo sapiens
gggtctgtatgttgcttcaacagggctaggacggaacagatacgggaactcttttccatcctccgaccgccctacgaattactctccgcttgcaaactccgggaccatattcttagtcatgtgctgcttctgggacctgccaacaacgtatttgtagttagatccttcttgccaaccaaccatgatctcccggatacggcagaattattcctgcgacggggaggcagtcgaaagagcctgggcaatttgtacctgcaggcctcctacacctacctctctctgggcttgtatttcgaccgcgatgatgtggctctggaaggcgtgagccacttcttccgcgaactggccgaggagaagcgcgagggctacgagcg

SEQ ID NO: 6299 - DNA, 420 bp, Homo sapiens
  misc_feature (1)...(420): n = A,T,C or G
agagatttgcctactatacagatgacctttctagtccaccatctgcacttcccacccctcagtttggtcagaggacaacataatccaagaagaaaaagggacacaagggcaaaaattgtattatttcttaaccaagtagtgatgcagagcatttgtttaaaacttagccattaaccgtctgaatcgtttccttttcttccgtaggaaagttgtgaaaatagtttaaagtgctttctttgcccatgtaaatgagaactcaactgctgtttacagtgtcagattaacatttgaaaggtgtgatttctccaatttaccctctttggatggtgccaggtggacgtgacatctcgtgcctgtccggtgcgggtgcgttacagatggacgtanctgccttggttttccagtcctcaagggaatacg

SEQ ID NO: 6300 - DNA, 421 bp, Homo sapiens
attgaacggaactaaagtctgtgacagtggatatagctgctggaccattccatcttatatgtagagaaatctggaattattattttaaaaccatataacatgtgattataatttttcttagcattttctttgtaaagaactacaatataaactagttggtgtataataaaaagtaatgaaattctgagaagagttttatcttaggaaaatacatatatatgcagtgtgtgtgccagtgtggtattaacaagactaatagtgcagtttgatccttaccaatatcattacttaatttgaagtgttcattagcaccccaaaatataccttttctatgtactgttaaaagaaattggcttctgatgcatgaacatttacatgtacattgaaagtagtccataatagaagttagtttaagccaagg

SEQ ID NO: 6301 - DNA, 489 bp, Homo sapiens
  misc_feature (1)...(489): n = A,T,C or G
agatgactgatcgccgtcgagacccccttcggaanncccgggncgacccacgcgtgcgcattggccaagttatcatgtccatccgcaccaagctgcagaacaaggagcatgtgattgaggccctgcgcagggccaagttcaagtttcctggccgccagaagatccacatctcaaagaagtggggcttcaccaagttcaatgctgatgaatttgaagacatggtggctgaaaagcggctcatcccagatggctgtggggtcaagtacatccccagtcgtggccctctggacaagtggcgggccctgcactcatgagggcttccaatgtgctgcccccctcttaatactcaccaataaattctacttcctgtccacctaaaaaaaaaaaaataacgtttacatgctctgttaaaaaaaaaagactactgatgcgttcacctttatttgggcgttgtatgtttaacgatttacaatcttccgttatccactt

SEQ ID NO: 6302 - DNA, 409 bp, Homo sapiens
  misc_feature (1)...(409): n = A,T,C or G
cccacgcgtccgcccgttcccactcggggnctcccttagggccgggaggcacagcggtccctgcttgctgaagggctggatgtacgcatccgcaggttcccgcggacttgggggcgcccgctgagccccggcgcccgcagaagacttgtgtttgcctcctgcagcctcaacccggagggcagcgagggcctaccaccatgatcactggtgtgttcagcatgcgcttgtggaccccagtgggcgtcctgacctcgctggcgtactgcctgcaccagcggcgggtggccctggccgagctgcaggaggccgatggccagtgtccggtcgaccgcagcctgctgaagttgaaaatggtgcaggtcgtgcttcgacacggggctcggagccctttaagccgcttccgttggag

SEQ ID NO: 6303 - DNA, 402 bp, Homo sapiens
cccacgcgtccggtggaatcttttagtattataacagcatcactttagattttgtaagtcaaaattgaaatgaatgcacatagatttatatataaattagcacctgagctaaggttaaggctggtctaaacttattttcactttttgtattatttttgagatgcaggaattactgtaacaaaatatgtatgtccgaagggaaaaagctgcaaggatatatataagaccactgcttatctgtatcttcccattttcctatattgaaaatgtatattatttatataacttaaaaagtaaaaataactatgttttgaaaaaaaaaaaaaaaaaagggcggccgttttaaaggatcccttggggggcccaagtttacccgtgcatgcaaggttttatttttttctg

SEQ ID NO: 6304 - DNA, 555 bp, Homo sapiens
  misc_feature (1)...(555): n = A,T,C or G
tgtactccgtgctgttactatccttaagcgtcttttttttatatacttactcttcccgtctacacaccaggggacgcggnaccnccccattgagagcctgtttgaccgcnctcgaanaccccggncgacccacgcgnncgaaaaaatatctcttggccaggcacctgtaatcccagcactttgagaggccgaggtgggaggatcgcttgagtataggagtctgagaccaacctgggcaaaatggcgaaatctcatctctcttaaaaagaaattacaaaaataaattagctgggcatggtggcatgcgcctgcagtcccagctactcgggaagcctaggtgggaggatcgattgaccctcggaggtggaggttgcagtgagctgagaccgcaccactacattccagcctgggtaacagagcaaggctctgtctcggtacgaaggaccttatataacaaaaaagcatcatcccgggcccgaaatatataatgaggggggggggtttaaaaaaaacccctgggaggggcataaaaccacgggcgggagtaggataatt

SEQ ID NO: 6305 - DNA, 472 bp, Homo sapiens
  misc_feature (1)...(472): n = A,T,C or G
cgcgccttcccaatgaagtcccttagtngtcatcgaaccgcccgaacacgcggcggacatagagctgacccatctgagaaaagttaatgaagacagcacggattatgggaagggctgctctcactgcctgcccctgtacccctcaagcaccaaggggcagacttaactcagtgctcccagagtaattctgtctcttggtagagacctacaatcaaagaatctcacagtaaagagagccttttagaagtcacctagtctaatcttaaccatttcatgagcctcctgtgcagcggccctgagcttgttctacagtagtcacaggggagctcattcccttctaagcctatccattctgttgctggaaagctttgactgtggacagcttttcctttgttaagctgcaatcgctttccttttagcgatcatccatgggtcctagctgtatcctctggatagcatcacacagaacaag

SEQ ID NO: 6306 - DNA, 501 bp, Homo sapiens
  misc_feature (1)...(501): n = A,T,C or G
gcccaggtccccccaggggggttccctttgaacatcctcnctagtnagcactcggaaccgcgccgganataccgggtcgacccacgcgtgcgctccctagtgagtgactcacaccttgtggctgccttcatagcgccacctccagatcagatggggacacacggcccctggatatgtttcattgtcagattttgtgcttgattttaagaatggaattgtgggtatctttcctttttttttaatgtatcttaactgttgcctgtcagtgtttacaaactagtgcgttgacggcaccgtgtccaagtttttagaacccttgttagccagaccgaggtgtcctggtcaccgtttcaccatcatgctttgatgttcccctgtctttccctcttctgctctcaagagcaaaggttaatttaaggacaaagatgaagtcactgtaaactaatctggcattgtttttaccttccttttctttttcagtgcagaaattaaaagtaagta

SEQ ID NO: 6307 - DNA, 548 bp, Homo sapiens
  misc_feature (1)...(548): n = A,T,C or G
cttacatgtatacgcgctatcgatgaccatactaaattgtaccatatcgtccacctcanccncagcgcagcggcgccacccnattgagcgcctgtttgatagcatgcagaaccgcgccggaannaccggggcgacccacgcgtccgaatnacacaccatattactagcatatacattgcagtgctccaatcatgctaacagagaatagatttttctttaagaattttatcaaatatttcactatttggggaaattttagaggaggggaagcctgtattcaggatgatagagggagcagagacttactgtctctcttccacattataaatgaactgcctttccaggtccaacatgctgtcaggttgctttagctcggcgtgaatgtaagtgtggggatcaaacacacacacctatacacatacatattaatatgcagaggattttaaataattgcaaatgtcttgtggctgttttatttctacaaaattctgtgagatgtataccagaaaacataataaagataagctcagttcttcattgggaaaaaa

SEQ ID NO: 6308 - DNA, 543 bp, Homo sapiens
  misc_feature (1)...(543): n = A,T,C or G
tccactcccaatctacaatattcagttttattataattattctaatctctttccctcanacaccggggccccncccccccctttgaaacccttttgatagccctgcaanccccgnncgacccacgcgnccgcccacgcgnccggattcaggaacagcatgnccaaatcgatggggatgtttccaagcctgacctcacggctgccctgcgtgacgtacgtcagcaatatgaaagtgtggctgccaagaacctgcaggaggcagaagaatggtacaaatccaagtttgctgacctctctgaggctgccaaccggaacaatgacgccctgcgccaggcaaagcaggagtccactgagtaccggagacaggtgcagtccctcacctgtgaagtggatgcccttaaaggaaccaatgagtccctggaacgccagatgcgtgaaatggaagagaactttgccgttgaagctgctaactaccaagacactattggccgcctgcaggatgagattcagaatatgaaggaggaaatggctcgtcaccttcgg

SEQ ID NO: 6309 - DNA, 495 bp, Homo sapiens
  misc_feature (1)...(495): n = A,T,C or G
agcaaggcncncnnagcccgttccccccgatggtcagctcagtgggcnctcgganccgcgncganccacgcggncgagggagaggcgttgtctgatanagcgatgccgaccctgagttgcgtcgtcttattcctcctggctgccgccgtcagctgtgcggtcgcgcaggacgcgccgccgtggacagaggactgcagaaaatcaacctatcctccttcaggaccaacgtacagaggtgcagttccatggtacaccataaatcttgacttaccaccctacaaaagatggcatgaattgatgcttgacaaggcaccagtgctaaaggttatagtgaattctctgaagaatatgataaatacattcgtgccaagtggaaaaattatgcaggtggtggatgaaaaattgcctggcctacttggcaactttcctggcccttttgaagaggaaatgaagggtattgccgctgttactgatatacctttaggagagattatt

SEQ ID NO: 6310 - DNA, 480 bp, Homo sapiens
  misc_feature (1)...(480): n = A,T,C or G
gccgctcccaatgaacgcctcatagacggctcgtagtaaccgcgncgacccacgcgtncgggcgggaagatcattgagctcaggagtttgaaaccagtctggacaacattgggagaccccatctctaccggaggaaaaaaaaagggtcaggcctggtggtgtgcgcctgtaatcccagctactcgggaggctgaggcaggacgattacttgagcttgggaaatcaaggttgcagtgagctatgattgtgtggccacactccatcctgggtcacagagtgagaccttgtctcaaaaaagtaacataaggaaaaaagaagccttgctttagcacaggtatgaagccagaagccagcatctcaactgtgcttgtcttatgcagaaatataaagcgatggccaggttggacttcaaaaaaaaaaaaaaaggggggcccgttttaaagaacccttggggggcccaaatttaaccggtctttgaaa

SEQ ID NO: 6311 - DNA, 412 bp, Homo sapiens
gctgcgcgtgcgttgttgagtgttcgggacgccggcctgcaggcgccatggtcttcctcaccgcgcagctctggctgcggaatcgcgtcaccgaccgctactttcggatccaggaggtgctgaagcacgccaggcacttccggggaaggaaaaatcgctgctacaggttggcggtcagaaccgtgattcgagcctttgtgaaatgcaccaaagcccgatacctgaagaaaaagaacatgaggaccctctggattaatcgaattacagctgctagccaggaacatggactgaagtatccagcgctcattgggaatttagttaagtgccaggtggagctcaacaggaaagtcctagcggatctggccatctacgagccaaagactttcaaatctttggctgccttggccagtag

SEQ ID NO: 6312 - DNA, 481 bp, Homo sapiens
  misc_feature (1)...(481): n = A,T,C or G
atagaacgcctgaggnatcgatcaccatttgccgggtcgacccacgcgtccggcactgaggactcatccatctgcacagctggggcccctgggaggagacgccatgatccccaccttcacggctctgctctgcctcgggcccctccccaaacccaccctctgggctgagccaggctctgagatcagctgggggaactctgtgaccatctggtgtcaggggaccctggaggctcgggagtaccgtctggataaagaggaaagcccaccaccctgggacagacagaacccactggagcccaagaacaaggccagattctccatcccatccatgacagaggactatgcagggagataccgctgttactatcgcagccctgtaggctggtcacagcccagtgaccccctggagctggtgatgacaggagcctacagtaaacccaccctttcagccctgccgagtgctcttgtgacctcaagaaaa

SEQ ID NO: 6313 - DNA, 418 bp, Homo sapiens
  misc_feature (1)...(418): n = A,T,C or G
cccacgcgtccgcccacgcgtccgatcttcaagacagtcaatttaaagtgaaggactcagaaatagagcttctaagggctgaaaacattttggtctaatttagacattaaaacgtcaattttaaatattatacaaaaaaactgccttatgtttttccccgttttaattttcagaattattgaagtaaatcaaaatcaaaagcaggtggaacaggatattaaagttgctatatttacactgatggtagaaataaataaaaaaggaaaagctctactgcatcagttagaggtaagtgactgcccatgggatagtatattgattcaacatagtatttcctaaagtactgtgaagtagaaatcatagtgctttttatatagttgtttcattgtgatttaatatttttttttcccactcccan

SEQ ID NO: 6314 - DNA, 411 bp, Homo sapiens
tgttgggcaaggatgctgtcattttttgaaccaaaagacaaacaggttaaaaggaaaaaaagtaatctgaatttcccaagtgcctacgctgcatattccccttgttagatcccattttcatgttactttgtagccttggccagaggctcaaaaaggacacaaccagtttggggaaggggtggctaaggaagatggtataggtgaaggcggctgtgtgaccactttcccccacccttcccaccctctagacaactctctcccttacctgtttttgctatggctgtaaaggtatttttcctctgccccactccctgccatacctttatcctgggatcctattttgggcctggggtgggtatacctggggctggtcttaagagggtgctaggctgcagactgccttgtactccc

SEQ ID NO: 6315 - DNA, 430 bp, Homo sapiens
aaaattctactgaggaggttccaagataccattaactgagcctaacttgcctcttgtgggtgtggcaggggagaactccctgcctgtggtagagtcagttgaaatattcctttcacatgccttataaaaaaaaaaaaaaaaaaaaaaaaaaaaaaaaaaaaaaaaaaaaaaaaaaaaaaaaaaaaaaaaaaaaaaaaaaataaaaaaaaaaaaaaaatgtgtgggggggggttgtaaaaaaaaagctggggggggactaattttccccggggcggaaaaaaaatcctttcttttttttggaggggacaaatttaatttgaggggccagtgtggaaaaaaactcttctttgggggggggataatgtcccacaccccccctcccgatagtagagggcgggggggggatcaacacttatgtgggagggtgggg

SEQ ID NO: 6316 - DNA, 428 bp, Homo sapiens
  misc_feature (1)...(428): n = A,T,C or G
gcgaggaagcaaagctttgtctaaaaacttggggtccgcagaatggaacattaaggtctggccaggcccctcaggaagaaactgagagcaaagaatggaggtcagagtttantccctggtgttcccccttatctgacgtctgtgtgaatccatttggtgggggtctgggtttctgaaaagtagctcaggggcacgtgttaaggatgtctctaggtgactctaacttccctggctattgtttgaaactgttatgaccttcttgcttatcagcttgctggtttccttctcggggcgagctgggtgcctggagttttcggtgaaggaaactcaagattctcctttatttctgtgcttgtgggaatccccctggcacaccccaaagaggggtccctgctccgtctcacagggatctttttgtatatttggcn

SEQ ID NO: 6317 - DNA, 423 bp, Homo sapiens
  misc_feature (1)...(423): n = A,T,C or G
agctttctctgaatcgctaattgtcctttcagttgaaatctaatttatacaatcattctatacttaaaggttaaatacatcttaattaattttttcttaaagtcaatgtaagtcactttgttttgtttttttttaatctacgccatatgcctcatgaaaccagctgttctagaatcagtcctgagaatatggcttaattccatggaaacataactcctatcttgggacctgacataatatctatctatcctggggaactggtaatatgagacttataggttacagcagaaatgctacatgttgacaaaagccttaatcgttccactgggagaactaattgataattgtgttaagattgaagattaaccctgtgttaatctcacttgagtctatcctgacagtagttcagattctggaaaatgn

SEQ ID NO: 6318 - DNA, 52 bp, Homo sapiens
cccacgcgtgcgcccacgcgtgcgcccacgcgtccgctagttctagtcgcga

SEQ ID NO: 6319 - DNA, 432 bp, Homo sapiens
ctgctgttaaaattaatatatcattatctttgctgttattgacagcgatataattttattacatatgattagagggatgagacagacattcacctgtatatttcttttaatgggcacaaaatgggcccttgcctctaaatagcactttttggggttcaagaagtaatcagtatgcaaagcaatcttttatacaataattgaagtgttccctttttcataattactctacttcccagtaaccctaaggaagttgctaacttaaaaaactgcatcccacgttctgttaatttagtaaataaacaagtcaaagacttgtggaaaataggaagtgaacccatattttaaattctcataagtagcattcatgtaataaacaggtttttagtttgttcttcagattgatagggagttttaaagaaattttagtagttt

SEQ ID NO: 6320 - DNA, 487 bp, Homo sapiens
  misc_feature (1)...(487): n = A,T,C or G
agcgggttttaatgagaacctggagccctccgtaacagctccggaanngacggancgagccacgcgtccgctgaaggatgaatatgacgacctggctgagtcagagcattttggcgtggagatgggcactgtgcgccgactgcggcctcgcctcaatgccattctcttcaagctacaattcagcgagcaagtggagaatatcaagccagagattgtgtctgtcactgctgcatgtgaggagttacgtaagagtgagagcttttccaatctcctagagattaccttgcttgatggaaattacatgaatgctggctccagaaatgctggtgcttttggcttcaatatcagcttcctctgtaagcttcgagacaccaagtccacagatcagaagatgacgttgttacacttcttggctgagttgtgtgagaatgactatcccgatgtcctcaagtttccagacgagcttgcccatgtggagaaagccagc

SEQ ID NO: 6321 - DNA, 423 bp, Homo sapiens
  misc_feature (1)...(423): n = A,T,C or G
caatgtgctccctgtgggcaccatgcctgagggtacaatcgtgtgctgcctggaggagaagcctggagaccggggcaagctggcccgggcatcagggaactatgccaccgttatctcccacaaccctgagaccaagaagacccgtgtgaagctgccctccggctccaagaaggttatctcctcaaccaacagagctgtggttggtgtggtggctggaggtggccgaattgacaaacccatcttgaaggctggccgggcgtaccacaaatataaggcaaagaggaactgctggccacgagtacggggtgtggccatgaatcctgtggagcatccttttggaggtggcaaccaccagcacatcggcaagccctccaccatccgcagagatgcccctgctggccgagagtgggtctcattgctgcn

SEQ ID NO: 6322 - DNA, 421 bp, Homo sapiens
  misc_feature (1)...(421): n = A,T,C or G
tcgtgtgggtgccaagtgcttgtgtagaaactgggttctgagcccccttttctggacaccaactgtgtcctgggaatgtatcgctactgggagctgttcccgcctagccagggccatgtcttaggtgcagctgggccacgggtcagctgagccacagtcccagaaccaagctctcggtgtctcgggccaccatccgcccacctcgggctgaccccacctcctccatggacagtgtgagccccgggccgtgcatcctgctcagtgtggcgtcagtgtcggggctgagccccttgagctgcttcagtgaatgtacagtgcccggcacgagctgaacctcatgtgttccactcccaataaaaggttgacaggggannnnaaannannnnnnnnnnnnnnnnnnnnnnnatnaaaaaaggaaaaa

SEQ ID NO: 6323 - DNA, 417 bp, Homo sapiens
  misc_feature (1)...(417): n = A,T,C or G
taaaggtgccctgttgatggaactacaagtaattctggtgtggctgatgtccaggtatgtgaaggacagtggtggggaatggactttggtggggagggagtgggctcccatggacggcactgatggaaaacatgcagaggaggggcacggtgaactcctttttcagctttctcctacagatctcactgagggcagtgggatagggtggaggttggcaggggaggactgatgcanagagacctgcgggtcccacatgcagctgtcaagcggaaagaagatggctgtctagttcaggacctcgggggcaagatcttgaggaaggacttgtttctggacatttgagaggctactggcgtttcatgcttttcaaagtgcatgtctaggacatatttgatctgcacgttggctttgtggtgt

SEQ ID NO: 6324 - DNA, 420 bp, Homo sapiens
tgggagcctcagcttcccagtcgtccgatgagcccgagcagcaccagaaaagtaccactgtaagtcatgagatgtctggtctgaattggaaaccctttgtatatggcggccttgcctctatcgtggctgagtttgggactttccctgtggaccttaccaaaacacgacttcaggttcaaggccaaagcattgatgcccgtttcaaagagataaaatatagagggatgttccatgcgctgtttcgcatctgtaaagaggaaggtgtattggctctctattcaggaattgctcctgcgttgctaagacaagcatcatatggcaccattaaaattgggatttaccaaagcttgaagcgcttattcgtagaacgtttagaaggcctggggctgttggatgtttggggacagctggaaagccttt

SEQ ID NO: 6325 - DNA, 459 bp, Homo sapiens
  misc_feature (1)...(459): n = A,T,C or G
ctccatcggtacngcctcggacttgcacggcntcccgggncgacccacgcgtccgcttttttgggcggggggggtggatatttttagtagagacaaatacttttgtatttttaatacagaaaagtatgcctcggcctcccaaagtgctggaattacagacatgagccactgtgcctggcctgctcactttctgatgctgcttttttgttggtcgtttggttattcgattgttttgagacagagtctctctctgtcaccaagctggaagtgaaatgccctcggcctcccatcatagcgaccttcacctcccaggtgcaatgtgattgcctggctcattctttgtagtagctgttactatttgtgccggccatcccgttcagtaaaataaagaaggttgttattttacacgccgtgatagtgtatctcgcctcatactactaatacatccccggcgcccan

SEQ ID NO: 6326 - DNA, 389 bp, Homo sapiens
cccacgcgtccgagcagaggttgatctttgccggaaaacagctggaagatggtcgtaccctgtctgactacaacatccagaaagagtccaccttgcacctggtgctccgtctcagaggtgggatgcagatcttcgtgaagaccctgactggtaagaccatcactctcgaggtggagccgagtgacaccattgagaatgtcaaggcaaagatccaagacaaggaaggcatccctcctgatcagcagaggttgatctttgctgggaaacagctggaagatggacgcaccctgtctgactacaacatccagaaagagtccaccctgcacctggtgctccgtcttagaggtgggatgcagatcttcgtgaagaccctgactggtaagaccatt

SEQ ID NO: 6327 - DNA, 474 bp, Homo sapiens
  misc_feature (1)...(474): n = A,T,C or G
gcccgtccccctaagcggccgtcaggngtcntcgnanccgcccgaacacgcgtngagagtttgaattctcacagttgcccctcaaagtggagttcctggagtgcattgccaagggtggaacaggggacgtgggctctgctgacatccaggacttggagaaatggctggctaaaattgcctgagaggcagctctaaagcacaagacctggatgtgtgacacacagttttggaaaaaggtctgtggtagtctggagttgatgaggaaggggtacaagatgtggctagaaacatttctttgttctggaaacaaagtactgttgaaaccactaaaaaaaaaaaaaaaaaaacgggggcgcccttttaaaaaaacccttggggggcccaattttacccgggcttgcaaagataatattttttttttataggggggcgaaaaaaaaccctcttggggatctttgggaaggaccctttctg

SEQ ID NO: 6328 - DNA, 470 bp, Homo sapiens
ctcccaatgacacaccccagggacctgcgaaccgcccggaatcccgggcgacacgcgtgcggctcaagcagcctccttggagaaaacctgaaaattcaacttgttcaagagaaggtcttggacgtgcctaaggtctagagcctcctgacgtgagcatggctgagagtgaggaccgctccctgaggatcgttctggtagggaaaactggaagtgggaaaagtgcaacagcgaacaccatccttggagaggaaatctttgattctagaattgctgcccaagctgttaccaagaactgtcaaaaagcatcccgggaatggcaggggagagaccttcttgttgtggacactccagggctctttgacaccaaggagagcctggacaccacctgcaaggaaatcagccgctgcatcatctcctcctgcccaggtccccatgctattgtcctagttctgctgctgggccgctacaca

SEQ ID NO: 6329 - DNA, 473 bp, Homo sapiens
  misc_feature (1)...(473): n = A,T,C or G
ccccgatgagaccagcctaggngnctgncgnanccgcgncgacccacgcgggcgggcgcctgtagtcccagctactcaggaggctgaggcagggagaattgcttgaacttgggaggcagaggttgcagtaagccaggatcgtgccactgcactccagcctgggtggcaccatctaaacacacacacacacacacacacacacacacacacacacacgaaaagtatttgcgtagtgctctagcagaactcccttcgttcatcatatgttaagatagttcaacagttttaagtatgctctgggctgggcgcagtggctcatgcctataatcccaacactttgagaggccaaggcaggtggatcacttaaacctcagagttcaacaccagcctgggcagtgtggtcaaactctgtctatacaaaaaatacaaaaattagccaggtgtagtggcacacacctgtgatcccacccact

SEQ ID NO: 6330 - DNA, 415 bp, Homo sapiens
gcgggaagatcattgagctcaggagtttgaaaccagtctggacaacatggggagaccccatctctaccggaggaaaaaaaaagggtcaggcctggtggtgtgcgcctgtaatcccagctactcgggaggctgaggcaggacgattacttgagcttgggaaatcaaggttgcagtgagctatgattgtgtggccacactccatcctgggtcacagagtgagaccttgtctcaaaaaagtaacataaggaaaaaagaagccttgctttatcacaggtatgaagccagaagccagcatctcaactgtgcttgtcttatgcagaaatataaagcgatggccaggttggacttcaaaaaaaaaaaaaaaggggggcccgttttaaagaatccttgggggggccaaactttccccggcctg

SEQ ID NO: 6331 - DNA, 405 bp, Homo sapiens
taaggggaataaatacagtgctcagggcgagcgacagattccagttcttcagacaaacaggggtccaagggtaacaggattgactactatagcagctcatctagtcaagcaagccaacaaagaatatttgctggggagtactgcagaagaaaaagcaatcgttcagcagtggttagaatacagggtcactcaagtagatgggcactccagtaaaaatgacatccacacactgttgaaggatcttaattcatatcttgaagataaagtctaccttacagggtataactttacattagcagatatactattgtactatggacttcatcgctttatagtgagtatttgtatagttactggctttttttctgtagcgctgagaatgatttttaaaactttgtcttgaat

SEQ ID NO: 6332 - DNA, 493 bp, Homo sapiens
  misc_feature (1)...(493): n = A,T,C or G
ggccagtggcccaggccgtttccccctagnnaggcgttcnangnatcantcgaaaccncnncnngaanangcgggcgaagcagcagaaggaagaagcctagatgattggcagtgtggttgcacgagctgaaggttccccacgtgtgaagggcaacaatgtgatcgagagcgtgcacataaatgggtcactgttgaagaataggctccctgacaaatcatttctcttttgaaaaaaaaaaggccacagtggctgtcttaatatctggaacaggatcgaacctgcaagcacttatatacagtactcgggaaccaaatagctctgcacaaattgatattgttatctccaacaaagccgcagtagctgggttagataaagcggaaagagctggtattcccactagagtaattaatcataaactgtataaaaatcgtgtagaatttgacagtgcacttgacctagtccttgaagagttctccatagacatagtctgcg

SEQ ID NO: 6333 - DNA, 486 bp, Homo sapiens
  misc_feature (1)...(486): n = A,T,C or G
ggtcagtgnncccagcgcgatccccctagggaccagtacgagtancantccaancgcnncgancangcgngcgaaaagggtaggtaagagagggtaaaggaaaatcttgatagagtgctacaaagaactctgcggggcccacagtcttggcaacgaggttgagtctggaatgttgggtggctgtcaaacatgttttggctggaattcagtgaagcagagtcatttcatgctttgtgatcttttattgaagaacactttacattctctgccacctcccacatatctgatctctaagacctgtgtaaatcgtgatcctcttatctggggatcactctccctgtgttctagggcttgtactcagggataacttcaaagtctgaaatgtcttaagtagtaattaagaaggaaaacaaacgaactacgtgtttgaagcagacatttttggggggaaagaaaaataccatcaacagtcctatagaaagagga

SEQ ID NO: 6334 - DNA, 403 bp, Homo sapiens
  misc_feature (1)...(403): n = A,T,C or G
gacgcgtgggagatcaccctactgcagcctgggcaacagagcaagactccgtctcaaaaaaaaaaaaaaaaaaaaaaggggggggccctttaaaaagaacccttggggggcccaaatttaccgggggatggaaagaaaaaattttttttttaaaggggggccaaaaaaaaccctgctggggatttttggaaaaaaaccttttttttggggggggaaaaaatgggaaaaaccccctaaaaaaatttaacgctttaagggaaaaaaaaaattttaaaggggaaaaggggaaaaaaaaacttaaaaagcttgtttgaaaaaaatttganncnncnnncngacaccactctgttggcgggtgaacgtttgggcctactacatacacgacaagacgaccttgtgaatt

SEQ ID NO: 6335 - DNA, 416 bp, Homo sapiens
atattatactgttttcctttttaaattcttataatcttttatattctgaaatttaattttgacattgagtaagacagtaacagcaattgaacgcatattactttggtttttattttcttattttgctaccatatagcaggagggataaggccccattaagtccccatgccaagagatttaggcacctcttgcattcatggcaacctttatcccagtttcagagggataagaggtcctcccttccggttactcagtgttgtcaactcctcctgagaggtggtcacatttcagaaacgtgtgaagtgattccagtgtttatgagacatctgaggaaacttcagggctgacagcaagctgttggcattattcacatttgggtcctgtaagagaaaataagaggcagtcccaatatgtgt

SEQ ID NO: 6336 - DNA, 413 bp, Homo sapiens
agctcattagccactgaatgggtgaaaggaaatacggtggaggaagccttgactatcaaaaacacagatatcgccaaggagctctgccttcctcccgtgaaactgcactgctccatgctggctgaagatgcaatcaaggccgccctggctgattacaaattgaaacaagaacccaaaaaaggagaggcagagaagaaatgagccctccctcggcgaagcctccagcaggccacaccagctgtttcccacctgctgtgcagtcaccttagatgttcagaagccgcttcctctccactgaagagctatgagatacgcacaatacttgctgttcacgttatgactctcatgcaagcaaaatacacagtttcattgttctgaatcctgtggcttctttcagcccacttttatcgcct

SEQ ID NO: 6337 - DNA, 466 bp, Homo sapiens
  misc_feature (1)...(466): n = A,T,C or G
ctggggtttaactgatcctgagcatcgcaagacnnnngggcgaccacgcgtccggctgtatggatgcggctgcctcttgtgctgcggtttctgttctgcaccggccgtcccgacctcacctggcccgtgaagtactcagcgccgcggcggcccacggccaccgccgactacgacaagaagaactacgtctgagggcgctgggcacggccgggcccctcctgccagccacgcctgcgaggcgctggataagcctggggagccccgcatggaccgcggcttccgccgggtagcgcggcgcgcaggctcctcggaacgaccggctctgcgccccgacgcgggtcctggattcgctcctgcctgcgcccgcagctgaccttctcctgccactagcccggccctgcccttaacagacggaatgaagcttccttttctgtgcgcggcgctgtttccataggcagagcgggtg

SEQ ID NO: 6338 - DNA, 417 bp, Homo sapiens
  misc_feature (1)...(417): n = A,T,C or G
cctcagcaagggcgcggtctggtactcgtgcgtcttttatcgcctcagtttccctccgccgactagcgcgcggggcccggttctccatcgcgcgcacggcagcctagcgcaatgaggcgggcagcactgcggctttgtgccttgggcaaagggcagcttactcctggaagaggactgactcaaggaccccagaaccccaagaaacagggaatcttccacattcatgaagttcgagataagttgcgggagatagtaagaagcatccacaaactggagagaccatgtgaaggcaatggaagaaaggaaattacttcatagtttcttggctaaatcacaggatggactgcctcctaggagaatgaaggacagttatattgaagttctcttgcctttgggcagtgagcctgaattacgagn

SEQ ID NO: 6339 - DNA, 383 bp, Homo sapiens
ggaggagtgttttgctgtaggttccttaagtcaggtcatcgctgcggatctggccaattatgcccctgcaaagaacaggaagaagactgctgcaggcagggcatcagtggtttttgtggacagaaccctggatctcacaggagcagttggacatcatggagacaacttagtagagaagatcatttcagcacttccccagctcccaggccacacaaatgatgtgatggttaacatgatagcgctcactgcactccatactgaggaggaaaattataatgtggttgcaccaggctgtctttcacaatccagtgacaccacagccaaagccctatgggaagctttactgaacactaagcacaaagaggcagtgatggaagttcggg

SEQ ID NO: 6340 - DNA, 448 bp, Homo sapiens
  misc_feature (1)...(448): n = A,T,C or G
nttaggataaccnttcgtagaccggccctgaattnccgggncgacccacgcgtncggntgaatctgtcttgagaagcgtcagggcacccccggtccaccatctcttggaacgtctacggcacggcaagtgaacaagaccaagatccacagcgagtcctgagcaccctgaatgtcctcgtgaccccggagctgttggagacaggtgttgaatgcacggcctccaacgacctgggcaaaaacaccagcatcctcttcctggagctggtcaatttaaccaccctcacaccagactccaacacaaccactggcctcagcacttccactgccagtcctcataccagagccaacagcacctccacagagagaaagctgccggagccggagagccggggcgtggtcatcgtggctgtgattgtgtgcatcctggtcctggcggtgctgggcgctg

SEQ ID NO: 6341 - DNA, 495 bp, Homo sapiens
  misc_feature (1)...(495): n = A,T,C or G
cgtagtgtccaagangggtttaaaactgaaaaccgnctcncgacancntagnanannccnannangcgggcggngagttctgtctaagagatcagataagctctggaagcttcatcatctgtacctacatgtaactgtatctggggtacatgggcaggcggtaccaagtcctgctcttcgatggggtggctgagagataaaggttcctgaactctccttgctgtgtatgcaccacatctgtacttcagagaggtggaaaatcatctacaacactgcgtttcttgtggttgtgctgttactggtataaagtcaagtgccttcaatgctaaaggctcagaaatttttcttaaactgatttcatgtcctatgcaagtgttttctacaacctgcataaccagtactttgtaaaacttgtttacgcttcaattgtacatagtgatttttaaagaaatatatagtatttttatttaggtacctccaaacttgaattcgtct

SEQ ID NO: 6342 - DNA, 468 bp, Homo sapiens
  misc_feature (1)...(468): n = A,T,C or G
ataaaanactgataagccctctggaannctgatagccttctcgggnccacccacgcgtccggaaagtttgtgccctgtgttttataatttttttacccataagacatcacattatccctttgtaagctacttatctccaaaaaacttcagaaatagaaaactacattttggcaggaataattgaaaacaccagaaggttgaagtttaattggaaacccagaatatacatactttgctgttttcttccctcaaatattttactatttgttttatttggagttaaaataagagtatcatccatatggtccatcctaattcacagaattaaatgagcttaaatagaaaattcagtattttatgataatcacctcgcttttagtttttaaaatttagattattctataatttaccgtgtttgagtattttctcattcttttcataaccatacctgattatactgtgtaacan

SEQ ID NO: 6343 - DNA, 380 bp, Homo sapiens
  misc_feature (1)...(380): n = A,T,C or G
gcaaataaatgagatagtatgcctgaccataaatgttagttgctttcttcctggttcttttgtaatttactgcccaactttgctctggggacctaaaggtctgacctatggtgagaatctgacctgttctacccttttgggaaaagaggattaggagtgtagagaatagctgggagtggccgggcacggtggctcatccctgtaatcccagcactttgggaggctgaggcagggagatcacaaggtcgggagttcaagaccagcctggtcaatatggtgagaccccatctctactaaaaatacaagaattggctgggtgtggtggcaggcgcctgtattcccagctactcaggaggttgaagcaggagaattgcttgaan

SEQ ID NO: 6344 - DNA, 389 bp, Homo sapiens
ttttgacaaaatgaaattgtcacttgtaatgtgattatggtactgagtgctacagtacaggctcttttcagttcaacaggcatgtactgccatgtactatgtgatgacccaattcaccctgttttctcctattcagactattactttaatttgttcagcacatagtgatgttatttggtcctcatctagcctgaatccatcattcccctattaaaacagcctctgttctccataagccttccaccactaatgtagaactgggccttaacagggaagtcaatacaaatacaaacctaagcactgagatggttctgccaatatttggttttaatacaattatccaaataattcagagcatgaatattattttaaaatgtttcatcaacatg

SEQ ID NO: 6345 - DNA, 472 bp, Homo sapiens
  misc_feature (1)...(472): n = A,T,C or G
gccgctcccaatgaaatcccaangagacccctcgaaccgccccgaatcccggggaccacgcgtccgggatgaagaagacattcacctgtatatttcttttaatcatatgtaataaaattatatcggtgtcaataacagcaaagataatgatattacatatgattagagggatgagacagacattcacctgtatatttcttttaatgggcacaaaatgggcccttgcctctaaatagcactttttggggttcaagaagtaatcagtatgcaaagcaatcttttatacaataattgaagtgttccctttttcataattactctacttcccagtaaccctaaggaagttgctaacttaaaaaactgcatcccacgttctgttaatttagtaaataaacaagtcaaagacttgtggaaaataggaagtgaacccatattttaaattctcataagtagcattcatgtaataaacagg

SEQ ID NO: 6346 - DNA, 473 bp, Homo sapiens
  misc_feature (1)...(473): n = A,T,C or G
tgggcacaaaaataaatcgtatcccttgaatcttagcccctgcaaacncnncacgcgtncgtacttttgacagagtatatacccatgaaaccatcaccacaatcaagataatgaacatatccatcgtgctgaaaagtttctgtggtgccttttgagtatattttccaaattgtaactacaaagaggaaaagactagttctggattaaatagtcttatatttaactagcccataactaaacagagctttcactgtcatttagattcaaatgataatactactaaagcttaagaaagagattctgaaacatgatttgtacggttcctcctgccttcgtattataatgaagaattgagtgttttctcagagatacagagagctgcctgtgacttcttttttctctcttcatttctttgctcaggggccacagttattgataaaccattatgagcctgaaggacattttcagcatat

SEQ ID NO: 6347 - DNA, 489 bp, Homo sapiens
  misc_feature (1)...(489): n = A,T,C or G
gacaggacaaaaaaaatttaacctggaaggccctctnaanactgantatcctcgaaaccgcncccgaantnccgggncgacccacgcgtgcgacccaaactccgaagacttgaacactcactccacaacccaagaatctgcagctaacttattttcccctagctttccccagacaccttgttttattttattataatgaattttgtttgttgatgtgaaacattatgccttaagtaatgttaattcttatttaagttattgatgttttaagtttatctttcatggtactagtgttttttagatacagagacttggggaaattgcttttcctcttgaaccacagttctacccctgggatgttttgagggtctttgcaagaatcattaatacaaagaattttttttaacattccaatgcattgctaaaatattattgtggaaatgaatattttgtaactattacaccaaataaatatatttttgtacaaag

SEQ ID NO: 6348 - DNA, 430 bp, Homo sapiens
  misc_feature (1)...(430): n = A,T,C or G
cccacgcgtccggtcaagttcatcatatatatatatgtagatgtgacttaatatttcaatgagaaacactgaaataaaaaaaaagaaaccaaaaagcatttccaccatccatcagttgctaagtagccatgtgccccacctaatgtaatctaatttatcatgtaattttggtttaagctggacattaagacttgcaaagaaatggcttttgcctaagattaatagtannaaaaaaaacacaaaaaaatttaacccaacaacaaaaacaaatatataaatatgggccannttggggggggtgtttttaaaaaattttctgggggggccccccccccccgggggccggaaaaattatttttttttttttaggggggggggaaaaaaaacccggtttgtttttttggaagaaaccttttttttggggggggaa

SEQ ID NO: 6349 - DNA, 423 bp, Homo sapiens
  misc_feature (1)...(423): n = A,T,C or G
tgtgaatgggaagactttccttgagaaaagatataatgaagatctggaacttgaagatgccattcatacagccatcttaaccctaaaggaaagctttgaagggcaaatgacagaggataacatacaagttggaatctgcaatgaagctggatttaggaggcttactccaactgaagctaaagattacttggctgccataccataacaatgaagtgagtgacaaatgcagaacttcacataagctatctacttaaacatggttaaagtatgttttgttttgcagactttttgcatacttatttctacatggtttaaatcgactgcttttaaaatgacacttataaatcctaataaactgttaaacccaccttccagccttttaggagttgctaaaattttaacagttatttcctgctttttatn

SEQ ID NO: 6350 - DNA, 434 bp, Homo sapiens
  misc_feature (1)...(434): n = A,T,C or G
atttagtgaaaaataggtttgtagtgaaatagttactatttcatgaaagtagatatttttagaatttttgaaataccacagttgttttcctggattataaggaaaggcacattacatttagtcttcctttcgatataaaactctttgaagaaatatgatttttagaaatcagctacccattatagcacaaaatcagccaaagcagaatttttaaaaattggcttttttaggattctttttctccccctcccatcttagtcttaccttgagggaacagtcatatgagaaggaactttgtcacatctaagctgtggtgtcttccccatgtgtgtgtacaacactggtgactccaggaaccattttcacctattaccagtgttccctggggactcctcttaatgtttccaaatgggaaggacagttgatttccaacn

SEQ ID NO: 6351 - DNA, 422 bp, Homo sapiens
  misc_feature (1)...(422): n = A,T,C or G
cctggctgtgaggacccccacccctgccctggctgccttcttcctgtcctcgaaagccggagacccgcagggagccccggagccgtcagtcacggaggggaaatgagtccccactcgggatgggccacccctttccagccggacgactcctccccaccagccctgatcacccccgaagcacccgtcggctccactgaggtctccccacatgctccaccggcgctcagcacacagcaggtgcctaataaatgtcaagtgcctgcnnaaaaaaaaaaaaactttaaaaaattaagggggggggcgttttaaaaatgtctgtggggggcccaggttaccggggggggggagagtaaatattttttcctttaggggggggaataataaaactgcctgggaattttggggaaagaccctttttttgg

SEQ ID NO: 6352 - DNA, 480 bp, Homo sapiens
  misc_feature (1)...(480): n = A,T,C or G
gttggccaacaacttaaacctgatgacctntaaacctganagcctgcgaaccgcccggaatncgggtcgacccacgcgtccgcagaattatcgggggtgaatatgaccaaagaccaacacttccctatgttggagacccaatcagttcactcattcctggtcctggggagacgcccagccagtttcctccactgagaccacgctttgatccagttggcccacttccaggacctaaccccatcttgccagggcgaggcggccccaatgacagatttccctttagacccagcaggggtcggccaactgatggccggctgtcattcatgtgattgatttgtaatttcatttctggagctccatttgtttttgtttctaaactacagatgtcaactccttggggtgctgatctcgagtgttattttctgattgtggcgttgagagttgcactcccagaaaccttttaagagatacatttatagg

SEQ ID NO: 6353 - DNA, 481 bp, Homo sapiens
  misc_feature (1)...(481): n = A,T,C or G
tggggcnaacaaatttaaaactgatgacctctgnaactganggcctcgcaganccacccacgcgtncggactagttctagatcgcgagcggcagtccttttttgttgttttccatctcatttcccttccatctgaaagtggcattcagctgacttgctcatttagactgttcacggagtctgaatctgccaacgtggtgttggaggctccaccttgaaaagggccacagtcagggcaactttccccatacaggaaaacttgaaaattacatcaacagtctacgtcacagccaaattatatttcctttataccaaacaaaactatggagaactaaaagtacatcacacaaaacgtttatagtgttttgcatgtgacctatttcagtatttatataactagattagtgctttctagcaaacggttctgttaattagcgagtcactgttgattctgctgtggtggtaagatgataccgtgtaan

SEQ ID NO: 6354 - DNA, 494 bp, Homo sapiens
  misc_feature (1)...(494): n = A,T,C or G
gacggttttatttgacgnccgtnggttcgaacgcgtagtggtaccggccaccaacgcgtgcgncaggatcctcgttgctatcatctgagagtcagcctgtggcctgtccaagttggctgggtctggctgagctgattggagcggccgacatttttgctgactggagtcatgctatctttgccagtttgctggaatagacacagacaccgattgggtcacgctgaagacattcctgtcttgtgaagcaagtctgtttgtattttaagtttgccaggactaatgaattaaaacatttggactccccacaacttgctgtttatcaatgcctctgacaggaggagggttttcttttgctcttgctttttctagaaagatgacaacatcctggctgttagagaggcaaggaaaggagagaggggttgtgaagggaagcggaagggaagggaagggaggtcccgtgggacgctggggtctggggcagagcaggtagcagg

SEQ ID NO: 6355 - DNA, 425 bp, Homo sapiens
agacaactgattttttgtgaacatgctcaagactatacattgtggaaaggatattctctttaagaaatcatgttgggaaaattggatattcgtatacagaagaatgacactaaactcctatctctcaccatatacaaatatcaattcaaaatgaatttaagaacttaaatatgagactccaaactgtgttactactaaaagaaaacacagaagaaacactttaggacattggtctacattggtctagccaaagattttatgtctaagacttcaaaagcataggcaacagaaacaaaaataaataaatgggattatatgaaactaaaaaacttctgcacagcaaaggaaacaatcaacagagtgaagagatgacttgtagagtgacagaaagtatttgcaaactattaatctgataagggactaag

SEQ ID NO: 6356 - DNA, 424 bp, Homo sapiens
gccagcggccctcccaggcgatcttgtgtctactctaggactgggcccgagggtggcttacctgcaccgttgactcagtatagtttaaaaatctgccacctgcacaggtatttttgaaagcaaaataaggttttcttttttcccctttcttgtaataaatgataaaattccgagtctttctcactgcctttggatagaagagagtagctcgtcctcactggtctacactggttgccgaatttacttgtattcctaactgttttgtatatgctgcattgagacttacggcaagaaggcattttttttttttaaaggaaacaaactctcaaatcatgaagagatataaaagctgcatatgcctacaaagctctgaattcaggtcccagttgctgtcacaaaggagggattgaaactcccaccctcc

SEQ ID NO: 6357 - DNA, 418 bp, Homo sapiens
ttcttttctgaatttcatttcagcaatttatgctgttaaatagaatcccgcatgtctgcattcattgacattcaacttattgtaaatgttgagattttatttagaaatgaattgtctaattaatttatgtagagtccttttttccaaagagctcaaaacactacatccacattattgacttttggaaaccaaccaaattacttaagaaatggaaaagtagtcacagagaaatttagtaatttgcaaaagccaaaacagtagtggaagaattaaaattcataaagtctcatcattctgttggctaaaataatgctctttacaatatgctggctacaaaatggtcttactcttgaattttgcttttggttcatattttggttcttcatattctagtatgttttgttcctgctgaatttta

SEQ ID NO: 6358 - DNA, 490 bp, Homo sapiens
  misc_feature (1)...(490): n = A,T,C or G
tgagtanncccccgccgctcccatgaaatcccagttgagagcgctcggaancccgggncgacccacgcgtgcgatgacgtaccacaccgtgctgcagacctctgctgactttattgactttctgaagaaagcccgacttagggccagtagggtcaccgaaagcatgggcattaacggcagtgcctaccgagtatttccttacagggtgttttatgtcttctacgaacagtacctgaccatcattgacgacactatcttcaacctcggtgtgtccctgggcgcgatatttctggtgaccatggtcctcctgggctgtgagctctggtctgcagtcatcatgtgtgccaccatcgccatggtcttggtcaacatgtttggagttatgtggctctggggcatcagtctgaacgctgtatccttggtcaacctggtgatgagctgtggcatctccgtggagttctgcagccacataaccagagcgttcacggtg

SEQ ID NO: 6359 - DNA, 409 bp, Homo sapiens
cagcgcaggggcttctgctgagggggcaggcggagcttgaggaaaccgcagataagtttttttcgctttgaaagatagagattaatacaactacttaaaaaatatagtcaataggttactaagatattgcttagcgttaagtttttaacgtaattttaatagcttaagattttaagagaaaatatgaagacttagaagagtagcatgaggaaggaaaagataaaaggtttctaaaacatgacggaggttgagatgaagcttcttcatggagtaaaaaatgtatttaaaaaaaaaaaaaaaaaaaaaaaaaaaaggggggggccgtttaaaagaacccttgggggggccaaatttaacgggggaagggaaggaaatatttttttccttatgggggggggatttaaaagct

SEQ ID NO: 6360 - DNA, 416 bp, Homo sapiens
ccacgatgtccggggagtcagccaggagcttgttgaagggaatcgcgcccccggggccggtcccggagggctcgatccgcatctacagcatgaggttctgcccgtttgctgagaggacgcgtctagtcctgaaggccaagggaatcaggcatgaagtcatcaatatcaacctgaaaaataagcctgagtggttctttaagaaaaatccctttggtctggtgccagttctggaaaacagtcagggtcagctgatctacgagtctgccatcacctgtgagtacctggatgaagcatacccagggaagaagctgttgccggatgacccctatgagaaagcttgccagaagatgatcttagagttgttttctaaggtgccatccttggtaggaagctttattagaagccaaaataaagaa

SEQ ID NO: 6361 - DNA, 409 bp, Homo sapiens
cccagttcaaggagatccagaaacttatcaaggattccgccccagacagcggactgctgggcctctggcaaggccagaactccctcctgcactgaactccaaccctgccttgagggaagaccaccctcctgtcacccggacctcagtggaagcccgttccccccatccctggatcccaagagtggtgcgatccaccaggagtgccgcccccttgtgggggggggcagggtgctgccttcccattggacagctgctcccggaaatgcaaatgagactcctggaaactgggtgggaattggctgagccaagatggaggcggggctcggccccgggccacttcacggggcgggaaggggaggggaagaagagtctcagactgtgggacacggactcgcagaaaaacatatag

SEQ ID NO: 6362 - DNA, 489 bp, Homo sapiens
  misc_feature (1)...(489): n = A,T,C or G
ttatgagggccnnagggttccaacgagagcccaggatccccctcgaancccggncgacccacgcgtgcggaacaatttacaagcaaaggaaatggcatcaaatatttgacaccctgcctcccaaggtgtattgattgatgcttttggctcagatctaggtttctccactcaggaaaagaggagaatgtacccatacttgggaaaacaagtttccgatggcacagctttgatcaaacagcaaaattctatccatctatgtattgccatctgacagtatgacaaatggtcccatgtgcgatattcacactgcattgtagtcaaacctgtaagtcaaaggatatgaaataatagtaactacacattaagcacagaagaaaatgaaacaaacaaaaaggttttaaaccaaccaaaaatatgtcttattttggatgttctatatgttcttacattctctcaggtcttttgtgtcgntatgaacacaattctaan

SEQ ID NO: 6363 - DNA, 408 bp, Homo sapiens
  misc_feature (1)...(408): n = A,T,C or G
ctttagtcctcctaaaccttcagctataatctctatgcaatcaacttaaatatatgggggtagtattggccctttctgccaaattccatgtaaaacacttgcctgaattgaattgtttccacaaagttgttttcccctgtggactttgtttatatcactagtttttattttcccaattttccaaattcaagagtgataattataaataggtgtgttcttgtttgttatctttctcactagaacgtatactctaagaaggcaagaaccttgcttgctttattcattgttgtattcctagcttctgttacagtgtctggcacaagagtaagtgctcaataaaaatttaaaatcccccnnnnagaannaaaaaaaaaaaaaaaggccncccactaaaaggccccctcgcgg

SEQ ID NO: 6364 - DNA, 410 bp, Homo sapiens
aaatggaaaaatgttaacaaatgtggcaattattttggatctatcacctgtcatcataactggcttctgcttgtcatccacacaacaccaggacttaagacaaatgggactgatgtcatcttgagctcttcatttattttgactgtgatttatttggagtggaggcattgtttttaagaaaaacatgtcatgtaggttgtctaaaaataaaatgcatttaaactcaaaaaaaaaaaaagggggcggccgtttaaaagaacccttggggggcccaaattttacccgggcatgcaaggaaatatttttttccttatggggagccaaataaaaacctacttgggaatttttgaaaagaacctttttttttgggggggaacatggtgggccaacctccctccagaaattaagcc

SEQ ID NO: 6365 - DNA, 412 bp, Homo sapiens
  misc_feature (1)...(412): n = A,T,C or G
ctgctactcagcctgaggttgcagactggtctgaaggtgtacaggtgccctctgtgcctattcagcaattccctactgaagactggagcgctcagcctgccacggaagactggtctgcagctcccactgctcaggccactgaatgggtaggagcaaccactgactggtcttaagctgttcttgcataggctcttaagcagcatggaaaaatggttgatggaaaataaacatcagtttctaaaaaaaaaaaaaaaaaaaaaaagggggggccgttttaaagaatccctgggggggcccaagtttacccgggcatgcaaggaaaaagttttttccttatggggggccgaataaaaacctacctgggaattttgggaaagaaccctttctttgggggggagacaaaatggaacan

SEQ ID NO: 6366 - DNA, 389 bp, Homo sapiens
taaaatgactaatggcttttctggagctgacctgacagagatttgccagcgtgcttgcaagctggccagccgtgaatccatcgacagtgagattaggccacaacgagagaggcttacagacccatcagccatggaggtagaagaggatgatccagggcctgagatccgtcgagatcactttgtagaagccatgcgctttgcgcgccgatctgtcagtgacaatgacattcggaagtatgagatgcctgcccagacccttcggcacagccggggctttggcagcttctgattcccttcacggaaccagggtggagctggacccaatcagggcattggaggcggcacaggcggccgtgtatacacagaagactatgatgatgacctgtatg

SEQ ID NO: 6367 - DNA, 394 bp, Homo sapiens
gcgctggcttttatttcttcaggaagcagacttccacttaaatgccattttgtgattgtgtcaatcatacacattttatttacttcagagtttgaatagagagtacacatttcttctgcagatttatttcatgatgagtttgagttgcttagcagggcgtgtgggtcccgttgaagtgcagcttgaagcaactgcttctagatggcactctttcaggtggcacaaattgaacctgtatttgtcatctctgttccacacactgcaatgtcaagggatgcagaagtgagtagaattccatccctgcccttgaggatcttgctttaacagatgtaaaactgaacatatggtatttgcagatttaaacgaactgggggaaataatgaacagtgtgatt

SEQ ID NO: 6368 - DNA, 414 bp, Homo sapiens
cccacgcgtccgtatacacacatatatatgtatatatacacatatatatatatgaaatacagcctgtcactgtgtgacacagattgcatatttgggattgcaataagggcttgctgagctgggggaatagtggatatttaatgactacttgttttttaaataatgaacacttagcctttctatgcgcataatggtgtaaaagttatatggttaggtgtttgacaaacagatggttgcaattcagttacagactggggaaatagcccaccgtttgggattaaaactgtcaagactggataggtgttagtcatcactgtctttcgtccagtggggatttaatacatactctcaagcttctggtttgggagtttaaataagtttgatcttggatttgtacatagtgatagctcactt

SEQ ID NO: 6369 - DNA, 490 bp, Homo sapiens
  misc_feature (1)...(490): n = A,T,C or G
ggagagccaggggggnnnnaaactganatcctcgactgangtcctcgnaaancncaaaannngggggagcacgcgggcggcatgttccacttggaaagaaagggaacagagagcctcctccatggacagtgtatgaattggattgggaatcgggctctctcccgcctctatgcctgtctctctttttaaccttactttacataatattatagatgggccaagaaaagaaaagatgacataacattttgatgaatttcacctattccattcttcacgtttcagaattggtcgactttgttagaagataattgaagtagccttgggtcaaaagcaaccttttcaattgtgatcatacctaaaacatataaaaaccctgccgtagattaaaagcaattataaaatcataaaattgaatgtttgcagaatcctggagcagtagatttctttgtctttggcctgcggactagaaagagggcagcagtagtatgct

SEQ ID NO: 6370 - DNA, 378 bp, Homo sapiens
aaaatgctgaagaagcccaagtttgaattgggaaagctcatggagcttcatggtgaaggcagtagttctggaaaagccactggggactgagaaccagagcttgaaattcaaagctgcgatcccttcacagcagtaaaccagctctttggaaccgattccatcaccccaataaaggagctcttcacagcagaaaaaaaaaaaaaaaaaaaaaaaaaaaaaaaaaaaaaaaaaaaaaaaaaaaaaaaaaaaaaaaaaaaaaaaaaataaggggggggggccgttttaaaaaaactcttggggggccccccccttcccccggggaaaagaaatttttttttttttttttggggggggaataaaaagccccgggggggtggg

SEQ ID NO: 6371 - DNA, 385 bp, Homo sapiens
  misc_feature (1)...(385): n = A,T,C or G
aaggacagcacctacagcctcagcagcaccctgacgctgagcaaagcagactacgagaaacacaaagtctacgcctgcgaagtcacccatcagggcctgagctcgcccgtcacaaagagcttcaacaggggagagtgttagagggagaagtgcccccacctgctcctcagttccagcctgaccccctcccatcctttggcctctgaccctttttccacaggggacctacccctattgcggtcctccagctcatctttcacctcacccccctcctcctccttggctttaattatgctaatgttggaggagaatgaataaataaagtgaatctttgcccatnatattaaaaaataaaaatttttataagggggggctttgcggtttg

SEQ ID NO: 6372 - DNA, 394 bp, Homo sapiens
aaagaagagttttaagccacagagtttaagccacaaagacaagaaagctggagagagggggacagcacataagtgtccacaaaatagaaagtaaaacagtatgagggggatggttaattgtcttaacagaaagctgatacatagacttttcatgggaagaatggagttaaaaatctcaagacaggacacataccatcaaaccttagcaagttgagtttggaggcctccattatctgtgaaggcagagatatggggtggttttggaaaacagaattggataaaaatctttagatcctgaacattcctggctgtgggtagaggaaggggagtacccaatgaaagactggagatttacactctaaaatgagtatttgaaccagatttaaactttaag

SEQ ID NO: 6373 - DNA, 373 bp, Homo sapiens
cacggagttacagtgtccggactccatgccctgtcacaaccagcaagtaaactctgcctcaaccccaaggcccgagcagctgcgacctggcgatctgatcctggaccacgcagggggaaacagagcctccagggccaaggtgattctcctcacggggtacgcccattctagcctgccggccgagctggactctggggcctgcggcggctccagcctcaactcagagggcaacagtggtagtggtgacagtagcagctatgacgcaccagctggcaactccttcctagaggactgcgaactctcccggcagatcggggcgcagcttaagctgctgcctatgaatgatcagatacgggagctacagaccatcatc

SEQ ID NO: 6374 - DNA, 493 bp, Homo sapiens
  misc_feature (1)...(493): n = A,T,C or G
cggagttcaacagaggattaaaaactggaaaccttcacttgacntcgtggaangncccgaaanccgggggagcacgcgtgcgcccggtcccgatcaaggtccagatcatttgacagtggcaattaaactgtaaataacttgccctgggggcctttgtttaaaaaacaaaaaccacaaaaattcccaaaccatacttgctaaaaattctggtaagtatgtgcttttctgtgggggtgggatttggaaggggggttgggttgggctggatatctttgtagatgtggaccaccaaggggttgttgaaaactaattgtattaaatgtcttttgataagccttctgctcacattttttggaatgtctgaagaatatagtttgtgtatattgacagagctcttttataactaaagcaaatttaatttttttgtactagaaaaaaatttgaacattttagatcttggttataaaaatgttaattcaaaattagtttaatg

SEQ ID NO: 6375 - DNA, 383 bp, Homo sapiens
cgaggagaatggcctggaggtgctggaccagctcatccagctgcccgagggcgcctctgccgtgggcgagagctctgtgcgcagccaggaggaccagctgtcacggaggttggccgccttgaggaactagccgtgccccgccggtgtgcaccggctctgccccgagatgtgctggaaggctcctgtcctctccccaccgcgtcttgcctttgtgctgaccccgcggggctgcggacggcagccactctgcgtctctcacctgccaggcctgcgtggccttaaggttgctcctgttcttttaggttgggcggtgggtctgtgtcctggtgctgagtttctgcaaacttctgggggtgatttctgtgactctgggcccacagcgg

SEQ ID NO: 6376 - DNA, 408 bp, Homo sapiens
  misc_feature (1)...(408): n = A,T,C or G
aagggttctctgtccacttctggttgccaggagacagcaagcaaagccagcaggacatgaagttgctattaaatggacttcgtgatttttgttttgcactaaagtttctgtgatttaacaataaaattctgttagccagacnnnnaaaaaaaaaaaaaaaaaaaaangggggggcccgttggcgttttaaaaaaaaaaaaagaatttttccccctaagaaaaaatggtttcccacggggtgggggggttcatttttttcttccttggacccttttaaaaaaagggggccccccaaaaagaaattaaagaaaaaggggccccgctccttcccaaaaaaaactttttatggggggaaattcccctccccctttttttaaggaaacccccctttaaaaccctttttttggg

SEQ ID NO: 6377 - DNA, 373 bp, Homo sapiens
tctggtcttatgccaaagcatccaaaagaaccacgagagcctggggctgcactcttaaaattcacacctggagctgttatgctaagagttgggatttctaaaaagttggcaggttctgaactctttgccaaagtcaaagaaacatgtcagagacttttagaaaaacccaaagatgcagacaatctctttgaacatgaattgggggctctcaatatggctgcattactacgaaaagaagaaagagcaagtcttcttagtaatcttggcccatgttgtaaggcgttgtgcttcagacgggattctgcaattcgaaagcagcttgttaaaaatgagaagggcaccataaaacaagcttacacgagtgctccaatgg

SEQ ID NO: 6378 - DNA, 383 bp, Homo sapiens
ggagcggccaggatgctgaatctgctgctgctggcgctgcccgtcctggcgagccgcgcctacgcggcccctgccccaggccaggccctgcagcgagtgggcatcgtcgggggtcaggaggcccccaggagcaagtggccctggcaggtgagcctgagagtccacggcccatactggatgcacttctgcgggggctccctcatccacccccagtgggtgctgaccgcagcgcactgcgtgggaccggacgtcaaggatctggccgccctcagggtgcaactgcgggagcagcacctctactaccaggaccagctgctgccggtcagcaggatcatcgtgcacccacagttctacaccgcccagatcggagcggacatcgccct

SEQ ID NO: 6379 - DNA, 371 bp, Homo sapiens
actttcttgtggacatagaaggggcccacgtaaggccctgagtaggctccttagttgctgctttacctgatgagggccaaagagattaactctgcctcgttgccatgtctcagaaaagttgccatatttcacccagaaggggcttgttttcctcttactcttactttaaccatgtgcctggaggagccattctgggctcttgcacttgcccagcctttctttgccaggggcagagaagggaaagggggtagattgagtgtgccaagggccgtgcaagggcaggcttgctttccacccatctgctgagggagccctctcctctcgctccttgcctctgttcacacctgttgtcttggaagaggatggtccct

SEQ ID NO: 6380 - DNA, 467 bp, Homo sapiens
  misc_feature (1)...(467): n = A,T,C or G
attgagaatccctttcgtgcangaaanggcncggaananngggtcgacccacgcgtccgatctctctaaaattgtagtttggtttgatttaatataattcttagtagaaattttgaaagtatgctttgggattaataattatttttaatttttctggctgaatatcaaattgatagtaacaacagaagcataattttaggaaggctttcgcaaacctagccttttaagagaggtttttaacctgaagcatgagaatatatcacctgtggtttttcctttgagatgaaacgtagtttctagttatatcattacttaaagggcttaaaaagaaaaaacttagcaaacttttgaatctttcttttattgctatttacacatacatacacacatacaaaacctttaaattttgggatctgaatataattctggtaaacagctgtcttcatttttctcctctaaagaactta

SEQ ID NO: 6381 - DNA, 409 bp, Homo sapiens
cggacgcgtgggaaaaaaagaaagtagtccttgaatcctttctgctacaaagtctgccctctggcttcttattctaaggccaaacaggaggagtaactgattccacccgagagagattcagagttgcttggtttctgggctgttggctgttgtggtggatgggcctgtgtgtgccttttgctgtgactacctctttcctgtccttaggcttagagtgggacctgaatgtgcggctgcatggccagcatttggtccagcagctggtcctaagaacagtgaggggctacttatagacgccccagccagaaaaggcccttgctctgtcgttccacggctggtctggcacaggcaagaacttcgtggcacggatgctggtggagaacctgtatcgggacgggctgatgagtga

SEQ ID NO: 6382 - DNA, 416 bp, Homo sapiens
  misc_feature (1)...(416): n = A,T,C or G
ctgccatttgcacctctgtgaggctcatgcctgcaaggcccttctcctgagtgccctcatctctggatgccctggaaaggctgcagttctgaacctgcaagagggaggagcaaccctcaacccacagtggttgcccctggcaactcctccataggacttcctgggccccacgtgggttcctccttgctatcacacctgcaggagggtggctaccctcaaaccatagtaggtctccccataggccctggcctaccctggacctcggtaggaatcaccagtgaggaatgaggagggggtgaggcacggagcagccagaatcttgtctttcacccactgggatgaagcatcacaggcatgagctgataaaccaagagcaaacgcggtgggtcaggctggagagtngagctgcaggggag

SEQ ID NO: 6383 - DNA, 428 bp, Homo sapiens
agactttatttatggaatggaatggaaaaaaaaacagctattttgaaaatatatttatatctacgaaaagaagttgggaaaacaaatattttaatcagagaattattccttaaagatttaaaatgtatttagttgtacattttatatgggttcaaccccagcacatgaagtataatggtcagatttattttgtatttatttactattataaccactttttaggaaaaaaatagctaatttgtatttatatgtaatcaaaagaagtatcgggtttgtacataattttccaaaaattgtagttgttttcagttgtgtgtatttaagatgaaaagtctacatggaaggttactctggcaaagtgcttagcacgtttgcttttttgcagtgctactgttgagttcacaagttcaagtccagaaaaaaaaagg

SEQ ID NO: 6384 - DNA, 414 bp, Homo sapiens
cccacgcgtccgcctagctgagcaggacccagatgaactcaacaaggcctgttccttcagcaagccttccaacagctggttcccagtggaaggcccggctgacatctgtcaatgctgtaacaaaggtgactgtggcactccaagccattccaggaggcagcctcgtgtcgtgagccagtggtccacgtctgcttcccgtaaccgcaggcatgtgacagaagaagcagatgtcaccgtgggggccactgatcttcctggacaggagtggtgaccatgaagtagagcagtgggctttgccttctgacacctcagtggtgctgctgggcgtaggcctggctgtggtggtgtccctgactctgactgctgttatcctggttctcaccaggaggtgtcgcactgcctcccaccctgtgt

SEQ ID NO: 6385 - DNA, 473 bp, Homo sapiens
  misc_feature (1)...(473): n = A,T,C or G
ctggggtttaactggagctagagcatcgcacggaannnnggtcgaaccacgcgtccgcccacgcgtccgcatgaatcacactgtccaaaccttcttctctcctgtcaacagtggccagccccccaactgtgagatgctcaaggaggagcacgaggtggctgtgctgggggcgccccacaaccctgctcccccgacgtccaccgtgatccacatccgcagcgagacctccgtgcccgaccatgtcgtctggtccctgttcaacaccctcttcatgaacccctgctgcctgggcttcatagcattcgcctactccgtgaagtctagggacaggaagatggttggcgacgtgaccggggcccaggcctatgcctccaccgccaagggccttgaacatctgggccctgattctgggcatcctcatgaccattctgctcatcgtcatcccagggctgatcttccaggcctatggatan

SEQ ID NO: 6386 - DNA, 429 bp, Homo sapiens
ctcgtatcactccagaaattgttctgagagtgatcactccagaaatggttttgatactgattccagctggctggaatcacatagctccttatctgactcagaatttcccccaaataataaaggtgaaataaaaacagaaggacaagagctcataaccgtaataaaagcccccacctcctttggttatgataaaccacatgtgctagtggatctacttgtggatgatagcggtaaagagtccttgattggttatagaccaacagaagattccaaagaattttcatgagatcagctaagttgcaccaactttgaagtctgattttcctggacagttttctgctttaatttcatgaaaagattatgatctcagaaattgtatcttagttggtatcaaccaaatggagtgacttagtgtacatgaaagcgtag

SEQ ID NO: 6387 - DNA, 413 bp, Homo sapiens
  misc_feature (1)...(413): n = A,T,C or G
gaggctgaggtgggaggattgcttcaacctgggaggttgaggctgcaggaagccaagactgcaccacagcactctagtctgggcaacagagcaagatgctgtctcanaaaaaaaaaaaaaaaaaaaaaaaaaaaaaaaaaaaaaaaaaaaaaaaaaaaaaaaaaaaaaagaaaaaaaacggggggggggccaaaaaaaaaaaccctcggggggcaaaaaaactcccggggggggaaaaaaattttttttttttttgaagggtaattaaaaaaaaatggttggtgattttaaaaaaaaacaaattttttgtggggggggacaaaagccaaaacaccccccaccagaaaaaggcctctcggaagaaaaaaattctctttggggggggggggggaaaaaacccgcctaagggggac

SEQ ID NO: 6388 - DNA, 401 bp, Homo sapiens
ggacaggggctggcccagggctgcaatgcagcatgttgccctggcacctgtggccagtactcgggacagactaagggcgcttgtcccatcctggacttttcctctcatgtctttgctgcagaactgaagagactaggcgctggggctcagcttccctcttaagctaagactgatgtcagaggccccatggcgaggccccttggggccactgcctgaggctcacggtacagaggcctgccctgcctggccgggcaggaggttctcactgttgtgaaggttgtagacgttgtgtaatgtgtttttatctgtttaaatttttcagtgttgacacttaaaattaaacacatgcatacagaaaaaaaaaaaaaaaaggggcggccgttttaaaggatccctcgggg

SEQ ID NO: 6389 - DNA, 412 bp, Homo sapiens
aagacatgatgctacactcagctttgggtctctgcctcttactcgtcacagtttcttccaaccttgccattgcaataaaaaaggaaaagaggcctcctcagacactctcaagaggatggggagatgacatcacttgggtacaaacttatgaagaaggtctcttttatgctcaaaaaagtaagaagccattaatggttattcatcacctggaggattgtcaatactctcaagcactaaagaaagtatttgcccaaaatgaagaaatacaagaaatggctcagaataagttcatcatgctaaaccttatgcatgaaaccactgataagaatttatcacctgatgggcaatatgtgcctagaatcatgtttgtagacccttctttaacagttagagctgacatagctggaagata

SEQ ID NO: 6390 - DNA, 415 bp, Homo sapiens
ctcacctgctcctctggcccctggtcctgtcctgttctccagcatggtgtgtctgaagttccctggaggctcctgcatggcagctctgacagtgacactgatggtgctgagctccccactggctttggctggggacacccgaccacgtttcttggagcaggttaaacatgagtgtcatttcttcaacgggacggagcgggtgcggttcctggacagatacttctatcaccaagaggagtacgtgcgcttcgacagcgacgtgggggagtaccgggcggtgacggagctggggcggcctgatgccgagtactggaacagccagaaggacctcctggagcagaggcgggccgaggtggacacctactgcagacacaactacggggttgtggagagcttcacagtgcagcggcgagtg

SEQ ID NO: 6391 - DNA, 486 bp, Homo sapiens
  misc_feature (1)...(486): n = A,T,C or G
gccccgttcccaatagaaattccttaattgataggccctcaggaaccgcgtcgacccacgcgtncgctgtttcacatcctattatataactaaatggccctatcatctttctagttgcacaagccagatcatttttgaggcctctctcttccttacttccatatcaattcttcactaagtgctattgattctatttccaaaccatatcttaaatccttccacttgaagacaacattaggatcttcacacatgttaatccctcctcctggaatgatggctcattctcctataattcatctgtcctcattcttactcatcaagtctctactaaaaacacacacacccacacaaaaaaaaaaaaaaaaaggaaaaaagaaaaaaaaaaaaaggggggggcccttttaaaagatcccttggggggcccaaatttacccggggaaggaaaggaaaaatttttttctttaaggggggcggtattaaaaccag

SEQ ID NO: 6392 - DNA, 496 bp, Homo sapiens
  misc_feature (1)...(496): n = A,T,C or G
cggcggggggattanaattgatcgccctgcgnactttgacggcctttccgggncgacccacgcgtccgctccagcaacatttctctagtacttgcacttattatcttttgtctaatttaaccttaactgaattctccgtgtctcctggaggcatttatattcagtgataattccttcccttagatgcatagggagagtctctaaatttgatggaaatggacacttgagtagtgacttaaccttatgtactctgttggaatttgtgctagcagcttgagcactagttctgtgtgcctatgaagttaatgctgcttattgtctcattctgacttcatggagaattaatcccacctttaagcaaaggctactaagttaatggtattttctgtgcagaaattaaattttattttcagcatttagcccaggaattcttccagtaggtgctcagctatttaaaaacaaaactattctcatacattcatcattagacaactgg

SEQ ID NO: 6393 - DNA, 409 bp, Homo sapiens
tgtaagcaactttatgctaccattaatcactactattatgccaggagctgcattaacgcgattaatgccgagctgtctgtctgccttactaagatagcaatttatatattagagctacaggaccgaaacactgcatacatatactatcctttcgctggccaacactatgcatacctgcacgaatatgagatcgctgatgagctctatactaatggagatcctacaaaagatgccatatacatgtacacccaagctggtctctgggaacacgcccacacgctggcgatgaaatgcatgagaccagaagatgtgtcagtgctatacgtcactcatgcccaggaaatggagaagcagggcaagtaccgtgaggctgaaaggtgagccgtgtccccataagaggtgtagaggg

SEQ ID NO: 6394 - DNA, 550 bp, Homo sapiens
  misc_feature (1)...(550): n = A,T,C or G
ctatacctcctgtactagataacaaacctaattgcacgtgattgtaatacgctgttcatttcccccaaaggganccgngagcanccctttgagagcctgtttgatgccntcgaaaaccccggncgacccacgcgnccgagctgtgggggngccttctggagaagagcagagatacacatgccatgtacagcatgaggggctgccgaagcccctcaccctgagatgggagccgtcttcccagtccaccgtccccatcgtgggcattgttgctggcctggctgtcctagcagttgtggtcatcggagctgtggtcgctgctgtgatgtgtaggaggaagagctcaggtggaaaaggagggagctactctcaggctgcgtgcagcgacagtgcccagggctctgatgtgtctctcacagcttgaaaagcctgagacagctgtcttgtgagggactgagatgcaggatttcttcacgcctcccctttgtgacttcaagagcctctggcatttctttttgcaaaggcacctgaatgtggctgcgtccctgttagc

SEQ ID NO: 6395 - DNA, 469 bp, Homo sapiens
  misc_feature (1)...(469): n = A,T,C or G
ggcgtcccataaaaaccgcccaggggcctgcgaaccgcccgancacgcgtncgactgccggactaacacctgtaataaatatggagttagtggatatccaaccctgaagatatttatagatggggaagaagcgggtgcttatgatggacctaggactgctgatggaattgtcagccacttgaagaagcaggcaggaccagcttcagtgcctctcaggactgaggaagaatttaagaaattcattagtgataaagatgcctctatagtaggctttttcgatgattcattcagtgaggctcactccgagttcctaaaagcagccagcaacttgagggataactaccgatttgcacatacgaatgttgagtctctggtgaacgagtatgatgataatggagagggtatcatcttatttcgtccttcacatctcactaacaagcttgaggacaagactgtggcatatacagag

SEQ ID NO: 6396 - DNA, 427 bp, Homo sapiens
  misc_feature (1)...(427): n = A,T,C or G
ctaggtttctggttcccccacagtaggtgttttcacataagattagggtccttttggaaagaatagttgcagtgtttataggatagttgtggtaagaatctagtttattttgcatttggctaattggtctgtgctgcatggttatatactcctggattatagattaaaagtctctgtagacatctctgtgaagagcaagctatcattaaacatgtctgtttatcanaaaaaaaacaaggaaaaaacaaacaaacaaaaacattnnnnnnngggggggggcgttttaaaatttttttggggggggccatatattcccgggggggggaaagaattttttttttttttaggggggggttaaaaaaacccctttggggtttttggggaaaaaacccttttttgggggggaaaaaaaagaaaaaaccccccg

SEQ ID NO: 6397 - DNA, 353 bp, Homo sapiens
agatctagttgtttcttcctagactcaggaagccagtgccccaagggttcacacctggtaagtgtaagcgtgcttggatatgggctgtagaggaacagtttgaatccaggtgccgccatctaatagctatgtgacagcaaatttcttaatctgagccctggtagcctcatttaaattggacataatgccacctacctgaggatttgtaaaaggaaaagagaataaatgtctgttacatcataaaaaaaaaaaaaaaaaaagggggggccgttttaaaggatcccttggggggccaaagtttacgcgggatggggaggtaaaatttttttccttttagggagtcttattataac

SEQ ID NO: 6398 - DNA, 408 bp, Homo sapiens
gtcccgcgggtctgtctcttgctttatacagcgccagtacggaacacatccggggactctgttccagcctgggaccgccctccgatttcctctgcgcttgcaacctccgggaccatcttctcggccatctcctgcttctgggacctgccagcaccgcttttgtggttagctccttcttgccaaccaaccatgagctcccagattcgtcagaattattccaccgacgtggaggcagccgtcaacagcctggtcaatttgtacctgcaggcctcctacacctacctctctctgggcttctatttcgaccgcgatgatgtggctctggaaggcgtgagccacttcttccgcgaactggccgaggagaagcgcgagggctacgagcgtctcctgaagatgcaaaaccagcgg

SEQ ID NO: 6399 - DNA, 390 bp, Homo sapiens
aaatggaaaaatgttaacaaatgtggcaattattttggatctatcacctgtcatcatagactggcttctgcttgtcatccacacaacaccaggacttaagacaaatgggactgatgtcatcttgagctcttcatttattttgactgtgatttatttggagtggaggcattgtttttaagaaaaacatgtcatgtaggttgtctaaaaataaaatgcatttaaactcaaaaaaaaaaaaaaggggcgcccttttaaaagatcccttagggggcccaatttttccgggggggggcaaggaaaaatttttttccttatagggaggcaaataaaacccaccttgggaattttggaaaggaacctttattttgggggggaaaaaaaaaagaacaa

SEQ ID NO: 6400 - DNA, 400 bp, Homo sapiens
gcgcgcacgcgtacgcccacgcgtccgcccacgcgtccgcccacgcgtccgacgacgtgcagaaatggcacctggaaaggggaaggaaaagaaggaagaacaggtcatcagcctcggacctcaagtggctgaaggagagaacgtatttggtgtcggccatatctttgcatccttcaatgacacttttgtccatgtcactgatctttctggcaaggaaaccatctgccgtgtgactggtgggatgaaggtaaaggcagaccgagatgaatcctcaccatatgctgctatgttggctgcccaagatgtggcccagaggtgcaaggagctgggcatcaccgccctacacatcaaactccgggccacaggaggaaataggaccaagacccctggacctggggcc

SEQ ID NO: 6401 - DNA, 485 bp, Homo sapiens
  misc_feature (1)...(485): n = A,T,C or G
tggagggccgagaaaacttaaanattgatacccctgctggangtgatggccttcccgggnccacccacgcgtccgggcacaaaatgggcccttgcctctaaatagcactttttggggttcaagaagtaatcagtatgcaaagcaatcttttatacaataattgaagtgttccctttttcataattactctacttcccagtaaccctaaggaagttgctaacttaaaaaactgcatcccacgttctgttaatttagtaaataaacaagtcaaagacttgtggaaaataggaagtgaacccatattttaaattctcataagtagcattcatgtaataaacaggtttttagtttgttcttcagattgatagggagttttaaagaaattttagtagttactaaaattatgttactgtatttttcagaaatccaactgcttatgaaaagtactaatagaacttgttaacctttctaaccttcacgattag

SEQ ID NO: 6402 - DNA, 505 bp, Homo sapiens
  misc_feature (1)...(505): n = A,T,C or G
cgtggggagttttntaatgatcccctcggtaccgaatggagaatcatcgggacgacccacgcgtccgggctcctgacctggcctttggctaccataccaagaagagagggctgggcggggaggagctgctactgctgctaccgaggctgtgggcctcatccttcactcagttgtgaaataaaccgctccttgccccgaaaaaaaaaaaaaaaaaaaaaaaaaaaaaaaaaaaaaaaaaaaaaaaaaaaaaaaaaaaaaaaaaaaaaaaaaaaaaaaaaaaaaagaaaatagggggggggggggataaaaaactttactggggggcgaaataaaccgctgcttggggggggaaattttttttttttttaggaggactaaaaaaaaagctgtctggttttttgggaaaaaaatattttttttggggggaaaaaaaaaaaaaaaacctcccccaagaattatattctgtttggggaaacaaacaaattttggggggggggggggggcg

SEQ ID NO: 6403 - DNA, 418 bp, Homo sapiens
cgatctcactacttctattcaacacaggatttgaagtcaggctggtcacagtggctcacacctgtaatcccagcacttttggaggtcgaggcaggtggattacatgaggctatgagtttgagaccaccctggccaacatggcaaaaccccatctctacttaaaaaaaaaaaaaaaaaaagggggggccgttttaaaggatccctgggggggccaaactttacccgggctggcaacgtaaaagttttttccttatagggggccgatttaaaacctacctgggaatcttgggaaaggacccttacttttggggggggacatattgggacaacctccctacagaaattaaaggctttagggaaaaaataaaattttaaggggtataaggggtaaaactaccggcataggctggcggctggg

SEQ ID NO: 6404 - DNA, 421 bp, Homo sapiens
tgggccctgccgggaccctgctcacaggcaggcttttcctccaacctgtggcgctgcagcagggcaggaaggggaaacacagctgatgaactgtggtgccacatgacccttgtggcacagatgcccacgtatgtgaaacacacatggacatgtgtcccagccacagtgttatgctctgtggctggctcacctttgctgagttccggggtgcaatgggggagggagggagggaaagcttcctcctaaatcaagcatctttctgttactgatgttcaataaaagaatagttgccaaggctgaaaaaaaaaaaaaaaaaaaagggcggccgttttaaaggatccttgggggggcccaagtttacccgggcatgcaaggaaataactctttccttatagggagccgaattataagctagctgggg

SEQ ID NO: 6405 - DNA, 387 bp, Homo sapiens
ataaaacccactggattaaagagctcttggtttgtcatcaggattataattcatatcttactttgagaagatctttgagtaagaaaatgcagtgtttgaacctgaggaaaagttaaagtgtagaaaatattgtcttgccgaaggattttgcagtcctctgtcagtaacttccattgattaggcagacatattcaggtaaaccctaatcattaaaaaaaaattatcaatgtagaaagtaattcccttttttctctctgagatatacctcaatcacacacttccccacccccacttgaaacagacctcttcacttgtgtttttttttttttcctgaggggaagttttgccctgttgcccaggttgaagggcaggggaatatttttggtt

SEQ ID NO: 6406 - DNA, 426 bp, Homo sapiens
  misc_feature (1)...(426): n = A,T,C or G
tagagccttcagtcactggggaaagcagggaagcagtgtgaactctttattcactcccagcctgtcctgtggcctgtcccactgtgtgcacttgctgttttccctgtccacatccatgctgtacagacaccaccattaaagcattttcatagtgaaaaaaaaaaaaaaaaaaaaagggggggccgttttaaagaacccttgggggggccaaagtttacccgggctggcaacgtaatacctttttccttatagggggccgaattataacctacctgggaatctttggaaagaacccttattttgggggggggacaaattgggccaacctccctacaaaaattaaaggctttagggaaaaaaaaaaattttaaagggtaaaaggggtaaaacaacctccataccctggctggcttaaaaattnnnnnn

SEQ ID NO: 6407 - DNA, 396 bp, Homo sapiens
ccaagatcaatgtgtgcatgtgtgtgtgtgtatatgttgtatgtgtaaaaccttgagcaaatagtgaaggataggataaacataaaaagtaagctaagtaaacccattgtaatagtaattacaaaatatatatgtacgtgtgtgtgtatgtgtgtgtgtgtgtatatatatatatgtagttctcttggtttcaaaaatttgctagcacaatttagccaaatatatgaaaataaaattaacattttatcacaaggtcaaaatataaggagtaaagggtttatggggggggtaataaaaatggtctagatctataaaaaaaaatataaaaaaaaataggggggggggccgtttataaaaatccttgggggggccaaaatttaagggttatattatttt

SEQ ID NO: 6408 - DNA, 425 bp, Homo sapiens
  misc_feature (1)...(425): n = A,T,C or G
gcgcccataacagatcggctctcatctctaagtgcctcattgagttcccagcatctggccaacgagcctggtgatactgttgacagtacctccagctctgctgcttcaacaacagtgacttgctctacaatgccatacagcgattcggtgaaaaggaggtgctctgtaccaaaaactgagctccgcgtggctggatctcaaaggttgtctcatgtctctttttctgtcctaggtggatacactagatgcaggacttgttagcagatgtttaattttttttttaacaacattaacttgtggcctctttctacacctggaaatttactcttgaataaataaaaactcgtttgtcttgtcttctgcanannnnnnnnnnanannnnnnnaaaaaaaaaaaaaaaaannnnnaattttnntntnnnccn

SEQ ID NO: 6409 - DNA, 407 bp, Homo sapiens
cggacgcgtgggttctgatatctgaggccagtaactattaatgtctagttctcagagcatttggaaaggtgatcttaaatggctacctaaattgaaatccttttcagaaaaaatataattgcaaataggtaggagtggcctaaattatctaatgtaataaagtcagacaaaatgcatactttatagtttcaagattttcagtacataaaatctgtcctttcctacctggacatgtcccattaaaaagtgggagattttaaataatttctttacagatgttttatttaagcaggtagcacaatctactaatgttgtttgatctgtgtttgttatactggttgtaattaatttttttaattcatgaactatcggaaaatttattaaattaactattaaccacattcacg

SEQ ID NO: 6410 - DNA, 423 bp, Homo sapiens
tgtccctgcttcgagctggttgtcttgtgcgtgggacatgggccttcctatctgtgttttctcaaagtcaggagctgaccaggagcacactaaggtgtggtcatgcatcataaccaacattcactcatctgggacattcttaagatacatttataaatcatttcagcagtagtactttgtatgtgttgagagtttacagagctctttgacatacgcgatcttagtctttacaaataaggaaaacagctcagtttgggaagtatcagagatgggattcaaacccagatcctctggtccaagttgtatgtgcactgaactaatcaggcaggaaaaaagcccagccactgtctcacagattgttttttgtatattgtagcaaaatcctgaaacaatggggtccttccagtctcatcatacaaaatg

SEQ ID NO: 6411 - DNA, 426 bp, Homo sapiens
gcgcacgctgcttcacctcttcgccggcgggtgtggaggcacagttggtgctattttcacttgtccactagaagtcattgagacacggttgcagtcttcaagattagctctccggacagactactatcctcacgttcatctggggaccattagtggagctggaatggcgagaccaacatccgcgacacctggactctttcacggtctgaagtcgatcttggagaaagagggaccaaagtcactttttagaggctcgcgtccaaatttggttggagttgcaccatcaagggctgtatactttgcatgttactccaaagccaaagagcaatttaatggcattttcgcgcctaacagcaatattgtgcatattttctcagctggctctgcagagtgaggggctctaagcagatgaatacactgcagtgg

SEQ ID NO: 6412 - DNA, 432 bp, Homo sapiens
cccacgcgtccgatcggtacaaaacgtttccagatctgagacttagatggatcttttaaggtgaaaggagaatgccaggttctactgaaataatatctgaaaggaacaaagagccatttgccatgtgctttttctaagtgcccatgctggaaaaaattttctcaataatatgaagatgctggtacaacttttcctattaaacaatgtcttacacaaccacatgcgttacatttatagacagatttacaatttggaaggaaaaaaagttctgtcttaataaaattagttttttttacaaactgtagtccaactaaagttctctgtctcctcacgcagcagaggcattatctccataaggtgtgtgtggtccaggaaaacacttccccgagcagatcctgccagatttggttcattccatgatgtcgactctgc

SEQ ID NO: 6413 - DNA, 431 bp, Homo sapiens
gaccatcacactggggaccggcttctctgctctcccgttatgggggtcggtggaatgatgggtcaagggtcttccgaagaaagcgagaaaggaacaggcgccttcaaaagcccacttggcgatgggttacagtaagagtttcagagtgctggccacaccaaagcatcagccctggctctaaactccgttacagtaaggaattacaaatcctgtgtttgtactccaggaagtctgcattatcacgaggagcttggaaaggaggtaacacactcaaggcaaatttcaagtaactcatcctggaggcagctgcctactctgcagctgtggttctccaccacagagagaagaaaagggagggagatggagtgcgcaggtctgagaaggctttcattctggagcatctgcaggagcctgcaccatggcccagtagc

SEQ ID NO: 6414 - DNA, 423 bp, Homo sapiens
gccatgaagccggtggaaacccacagttttcagatgctcttcacgatcctgtccactggctccgcactgaaagcgcagagctacgaggatgcctacaggtgcatcaagagcagcatcctcctgggctccatctcaggaggcaccgacatcatctcctgcttcatgggccacaatccttctcttcctgtgtataaaggggagattcaggcccggaacctgggcatggccgtggaagcgtggaacgaggaatgaaaggcgggctggggagagagcggcgagctggcgtgtactaagccgatcccttgccagcccacacacttctggaacgatgagaacggcaacaagtacaggaaggcgtatttctccaaattcccaagtatctgggctcatggcgactactgaagaatcaaccccaagaccggg

SEQ ID NO: 6415 - DNA, 431 bp, Homo sapiens
agcaaatctagcttttttgtacagacttagaaattatctaaagatttcatctttttacctcatatttcttaagaatttaatggttatatgttgtctttttttcctatgtcttttggctcaagcaacatgtatatcagtgttgactttttctttcttagatctagtttaaaaaaaaaaaaaccacataacatttctttgaaaaagggaggggattaaataatttttttccctaacacttttttgaagggcaggggctttatttatgaaaaagtagtaaatagttctttgtaacctgtgtgaagcagcacccacccttaaagaagcccattcttgctaatggttaaaacagggaatactaggggaatggttggggctgcttttagtttctcttaatcaaaattactagatgatagaattcaagaacttgttac

SEQ ID NO: 6416 - DNA, 433 bp, Homo sapiens
agctttcatcacacagcattcaacgtattatgaatgggcatgacatataagtgctagccaactgcagatgatagccacaagtgccccctaagccaagggatagtgaaaactggtagaaaatgcttccaaacaccgtgctaatttttatggaaatatcatccttaagcaaaatcctaaactatctattttgttgaaaaatcatgggttaacttgctaatattgcctataaaatggaggaggcagcgtgcagacagccatcctataacattactgggcagcagttactgcttcccagaggagagaggagatgaatccttccaaaagccatgagcgagtgagcacacaaacaaatcagtggggaaagcaaaaggattcagcagaattcagtgtttgtagtaacaaagagatgctgttttatagccacagtaaaagg

SEQ ID NO: 6417 - DNA, 427 bp, Homo sapiens
  misc_feature (1)...(427): n = A,T,C or G
gcgcttcttttcctgactgcagctcttttcattttgccatccttttccagctccatgatggttctgcaggtttctgcggccccccggacagtggctctgacggcgttactgatggtgctgctcacatctgtggtccagggcagggccactccagagaattaccttttccagggacggcaggaatgctacgcgtttaatgggacacagcgcttcctggagagatacatctacaaccgggaggagttcgcgcgcttcgacagcgacgtgggggagttccgggcggtgacggagctggggcggcctgctgcggagtactggaacagccagaaggacatcctggaggagaagcgggcagtgccggacaggatgtgcagacacaactacgagctgggcgggcccatgaccctgcaacgccgaatccagcctn

SEQ ID NO: 6418 - DNA, 414 bp, Homo sapiens
agtgtcattgcgagggttcaggaagccccggcctgtgatcgtgagcggaaacccctcctggagtttccccaaagccatggacagccctagtcttcgtgagcttcaacagcctctgctggagggcacagaatgtgagacccctgcccagaagcctggcaggcatgagctggggtcccccttaagagagatagcctttgccgagtccctgaggggtttgcagttcctgtcaccgcctcttccctccgtgagcgctggcctgggggaaccaaggccccctgatgttgaggacatgtcatccagtgacagtgactcggactgggatggaggcagccgtctttcaccatttctaccccacgaccacctcggcttggctgtcttctccatgctgtgttgtttctggcccgttggcatcga

SEQ ID NO: 6419 - DNA, 231 bp, Homo sapiens
aagatggctgtgcctctgcctgtctcccccaccaggctgggagctctgcagagcaggaaacatgactcgtatatgtctcaggtccctgcagggccaagcacctagcctcgctcttggcaggtactcagcgaatgaatgctgtatatgttgggtgcaaagttccctacttcctgtgacttcagctctgttttacaataaaatcttgaaaatgcctaaaaaaaaaaaaaaagg

SEQ ID NO: 6420 - DNA, 423 bp, Homo sapiens
  misc_feature (1)...(423): n = A,T,C or G
ctaataagtattgcctcaagaactttccactatagaattctttttttatttaaaacatgtatgtatttaaaactcaactggtgacttgtgattgggaaattgataacacttggatgcattcttgctctcacagaattggtgacatgctttgagagttttgtcacatgttgacatgccaatgttcttataaaccttttataaaggaatatatttttaaagtaaatatattgtaatgtactgtgaacttgtagggtgcttttcaacagtctttgtacagtgtaaatagatcatggaaataaaattacttattcaatattaanaannaanaaananaaaaaaaaaaaaaaagggggggggcccttttaaaggaatctttgggggggcccagtttacccggggttgggagagttttagtttttctct

SEQ ID NO: 6421 - DNA, 410 bp, Homo sapiens
  misc_feature (1)...(410): n = A,T,C or G
gacattaaaacaccataagattgtaataattggttgttcctatgtttgagggatttacctttatgctctgtgtcgccagtgatttactagtgttagctgtttaacacattatctgtatttagtagtgattatttatttacaagttggtggtaattcagcagtcaggactctaagcttttatagttgaattgaggaaatctcgctttattcatttagctggcaactgcctttattgcagacctctggtgcttggctttcaaggaagcctatgagatgccaaaatcacacctttagagagcaccttgctctaataggtgatgcatgatcaaacagtgagatttgaaggggttntaacataatttagaatgtgaaaaaaatatcaattcatatctttcaagtactaacccctt

SEQ ID NO: 6422 - DNA, 422 bp, Homo sapiens
  misc_feature (1)...(422): n = A,T,C or G
agactgtaccagaacttctatgcacacctacctgagagtctggtaaccttcaccgctgacctgtgtgagatgtgcccagcaggcatttatgacaccacatatgctgctgagcttcatgcccgcttcgtggcctactacttagaatatgccttgcggagatgtgaacgggataatgggaagcatctggcagctggcagcccacaccttaccctggagttctgcaactatccttccagcatgagggaccatattgattaccgctgatgcctgcccccagcaacccaccgtnctcatcccaccagcatatgtgacaacttctcggcttatggctggtgccccctgggaccacagtgtcctcagtctcacgatattgaccttatcattgacactgatgaggctgctgcagaggacaagcggcgacn

SEQ ID NO: 6423 - DNA, 406 bp, Homo sapiens
aaattggctcagagatggacaacctggcaactgtgagtccctgcttcccgacaccagcctcatggaatatgcaacaactcctgtaccccagtccacggtgttctggcagcagggacacctgggccaatgggccatctggaccaaaggtggggtgtggggccctggatggcagctctggcccagacatgaatacctcgtgttcctcctccctctattactgtttcaccagagctgtcttagctcaaatctgttgtgtttctgagtctagggtctgtacacttgtttataataaatgcaatcgtttggaaaaaaaaaaaaaaaaaaaagggcggccgttttaaagaatccttggaggggcccaagtttacgcgggcatgcaaggttttagttctttccttatagggaa

SEQ ID NO: 6424 - DNA, 414 bp, Homo sapiens
aataagttcgaagctccgtgagtgaaccatcattataaacgtgatgatcagctgtttgtcatagggcaggtggaaacggcctcctagggaaaagttcatagggtctcttcaggttcttagtgtcacttacctagatttacagcctcacttgaatgtgtcactactcacagtctctttaatcttcagttttatctttaatctcctcttttatcttggactgacatttagcgtagctaagtgaaaaggtcatagctgagattcctggttcgggtgttacgcacacgtacttaaatgaaagcatgtggcgcgtgtccatcgtataacacattatgaatacagggcatgcattttgcagcagtgagtctcttcagaaaacccttttctacagttagggttgagttacttcctatcaag

SEQ ID NO: 6425 - DNA, 402 bp, Homo sapiens
  misc_feature (1)...(402): n = A,T,C or G
gcggcggcggtggccatcgcggcggcgccttccgtattctccgggctgcggaggggttgccatgaggggactcctgatgtcctatctccaggctgcggtgactgcactttccctggagtggaagctgctggaaggcggaccggccgccatgtccacgttcaggcaggaggacgtggaggaccattatgagatgggggaggagctgggcaacggccagtttgcgatcgtgcggaagtgccggcagaagggcacgggcaaggagtacgcagccaagctcatcaagaagcgccgcctgtcatccagccggcgtggggtgagccgggaggagatcgagcgggaggtgaacatcctgcgggagatccggcaccccaacatcatcaccctgcacgacatcttcgagan

SEQ ID NO: 6426 - DNA, 424 bp, Homo sapiens
  misc_feature (1)...(424): n = A,T,C or G
accactgattaagagtggaagaacggtctcagaactgtttgtttcaattggccatttaagtttagtagtaaaagactggttaatgataacaatgcatcgtaaaaccttcagaaggaaaggagaatgttttgtggaccactttggttttcttttttgcgtgtggcagttttaagttattagtttttaaaatcagtactttttaatggaaacaacttgaccaaaaatttgtcacagaattttgagacccattaaaaaaagttaaatgggagaaaaaaaaannaaaaaaaaaaagggggggcccttttaaaagaatccttgggggggccaaattttaccggggatggcaaggtaatgtttttttccttaaggggagcctaattaaacctcacctggggatcttttggaaaggaacctttattttggg

SEQ ID NO: 6427 - DNA, 420 bp, Homo sapiens
  misc_feature (1)...(420): n = A,T,C or G
tgccccacatggagcttgaataaaactattattggttgtatgattagataattgtgtttcctcggcagaatcaaactcaagtcaaatgtgtggttaccgggattaagaacagaaagaatagaggggactcctgagtgagtttcactttctctctctttttgntattgctggtcatttgttttgttaatagaaagatcaatatagctatagagcatttaaaataaaaggatttgggccaggtgtggtggcgaatgcctgtaatcccaacactttgaaagactgaggtgagaggattgcttaaagccaggagttcaagaccagcctgggcaacaaagcgagatgccatctctacaaaaaatgatttaaaaattagtggggtgccttggagcacgcctgtggtcccagctattcaggaggctg

SEQ ID NO: 6428 - DNA, 414 bp, Homo sapiens
gcatcaagtatcggaagaatgaggtgttcttgcacgttatcgagtctgtcaacctcttggtcagggccaagcggaatgtcctgcgcagcgagagcgtgggctccatcaagatgcgagtcttcctctcgggcatgcccgagctgcgcctgggcctcaacgacaaggtcctctttgacaacacgggccgcggcaaaagcaaatccgtggagctggaggatgagaagatccaccagggtgtgcggctatcacgcttcgagaatgaccgcaccatctccttcatcccacccgacggcgagttcgagctcatgtcctaccgtctcaacacccacgtcaagcctttgatatggatcgagtcggggatctagaagcactcccacagccgcatcgagtacatgatcaaggtgcgtgggccga

SEQ ID NO: 6429 - DNA, 404 bp, Homo sapiens
agaccaggtagcacctggccccatcatgatgcatgggttttggggacctggaaggaaggtgatgaggcagtgagtcagaaaaaccagaacggggtccccggatctgctgggaaggcttctgaggggctgccctgagagcattcagttcacatgtcacagggtatggtgtgacagggtgcctgtggacacatgaatcacttctaacctgcctccctgtcagcctccaggctgccagctggctgaggccagggactgggtcaggctcatctgtggcgcctcagagggtcagcatcattggtgaacagatgcaggcgctgctggaccatctggggagagtgacagtccatgtcttcaccagggagccatttgagtgctgagcgacaagaggctcagagggcatgacc

SEQ ID NO: 6430 - DNA, 402 bp, Homo sapiens
cggacgcgtgggtcacatttcagctccaactttgcattctgagaacacttaaacgtttctgcaggtccattttatacaacttgaaagaccgtaaaactttctggttgccacaagcatatctttcttttctgctcatccaataaacagctgtgccctactgtgatagattttccaaacaaaaatacctggagcagcagtttagcaaaatatgccttcagtggcattcaacaaatggagtttccccaagcacagttctgtaagaagtgcgtgtgagagtgtgtgtatatgtgagtatgtgtattttaagttattatttgtattgagcaaaaatttttttttgatcttggggattctggctgtgaatttggtgcacgacaattatggtaaaaaaacatttgcttg

SEQ ID NO: 6431 - DNA, 478 bp, Homo sapiens
  misc_feature (1)...(478): n = A,T,C or G
tgccaggccngggccgtgcccactgaagactangacntgcgaacagcncncganngacgcacccagccacgcgtgcgaaaaaacaacaaagttcatgaacctgcaagaatgggcttaaactgacagacatagcctccattgggtggatgatcacgttctgcgatgccatccacaataccatggatggactggcagactggcgcttcctgcaccttgtctctccttcaaggactcagtacttccatagcaatcctatgtgaggagtttccccacgagttaggagactttgtgatcctactcaatgcagggatgagcactcgacaagccttgctattcaacttcctttctgcatgttcctgctatgttgggctagcttttggcattttggtgggcaacaatttcgctccaaatattatatttgcacttgctggaggcatgttcctctatatttctctggcagatatgtttccagagatgn

SEQ ID NO: 6432 - DNA, 481 bp, Homo sapiens
  misc_feature (1)...(481): n = A,T,C or G
gttggaactgatagcctcggnactcgccactgattaccgtgtcgacccacgcgtccgcttacatcaagggacactggtccaattattatcgcttatataagcactcctataaattctgaaaaattttatacatgcaacaaaacattcctacatttgaagacattaagaaaaatcacaggtgactcatctgatcattctatatattaataaatattatgacatatatgtgaacacatcacaaatcatattggtgtaccaagaggcaatttatgcctctcttaagtatgtactgacataacctaatatactaaaatgggaaggggcttttagtcactgaaatatgcatcgtgtaacaaagatgaagaaaatacatggcttgtgcccatcataaaaaaagattcagactgaaggcttagctttggttttttcaattaaattgttaaactgtgcacagtgatttttttttagaacttgagacatt

SEQ ID NO: 6433 - DNA, 461 bp, Homo sapiens
  misc_feature (1)...(461): n = A,T,C or G
gtgcgggnnatttaaaggaaagctgcggactagacaccactccacgnncgaccacgcgtgcgtgtattttatgcttttccgaattgccttgtaatttctgattggctgccaaccatgtgaattttaccttgttggggacaggatacctgtgcattccttaaatatttttgagatacaattaagtcacttggaaacagcttgatcctttaaaggctagtctaaggctaattttgcactattactaattttgccccactgctaaggcaataccttcctgagtacactatgagataccccatgcattatacagttttcccacaattcccagtcctgtgtgactgctagggattatcctggctgcccccttccagtggttctttccccagattctggtagttttcccatccacatgtactcatcagctgagaagtccaagggggaactgtgacaaatcccctgag

SEQ ID NO: 6434 - DNA, 431 bp, Homo sapiens
  misc_feature (1)...(431): n = A,T,C or G
gcagagctgagattgggcaaaaggcccatgctcttaatcactgcaccatagtgcttcataaatcctccactgagataagttaataacttgcctacgatcccacaactgttatatggcctggatgggatataaaatctattctctccttccacaaacaccctgtttaaccactttgttatttttctatgtcagaggaaaagatccaattgcagtttcatttaataacaaaagtgaaaaattataggtgtttttagcagcaacaattgggatatggtattgcaactcatttaatatcagatggtattgcaactcatttaatattagatggcttgactatcgngcaggaaggaggactagttggaactagcagacattcattgtatcacacttactcaatttttatttttaactcccttttgaaactccaaaaa

SEQ ID NO: 6435 - DNA, 487 bp, Homo sapiens
  misc_feature (1)...(487): n = A,T,C or G
gtgggggttttaatgagngcctcgtaccgactgaaatnctcgggaagacccacgcgtncggtggggcagtgcttggcccaggagtttggccagaagtcaaggcttaaaccctcatgctgccaatatcctaataaaaaggtgaccatctgtgccgggaaaaaaaaaaaaaaaaaaaaaaaaagggggggccctttaaaaaaaacccttggggggcccaaatttaaccggggagggaaagaaaaaatttttttctttaaggggggcgaaataaaaacccccttggaaattttggaaaaaaacctttttttgggggggggaaaaaattggaaaaacccccccaaaaaaattaaacctttaagggaaaaaaaaaatttttaaggggaaaagggggaaaaaaaacctaaaattcttggtttttaaaaaatggggnnnnnnnnnaaaaacacccccttattttgggatggtattagcacccccttctctatag

SEQ ID NO: 6436 - DNA, 496 bp, Homo sapiens
  misc_feature (1)...(496): n = A,T,C or G
gaggggagttttgatgatcgctctcggtaccgatcgataatcctcggaagacccacgcgtncgtggagagtgttaatcttttctgtgactaaatagcaataataagtggaaaattagaaattatttccaggtattatatttgtcacaggccattgtaaataccaagtatattgtgtctgccataatttttaaaaatacattcattgtcttcagtcatacagcaagacacatgagacatagattagaaaacatgttgtacaattttaatttacaactgttggaaataaaaatcacttaatttttttccagtgcttctccctcatctggttattcaagaaaacaaaacagtctctgagatatttagcttttcaaactgtaaatagatgctctagtgttatttatttttttaatcccacttgtattattttacctctagagcatcttgtattaggacatgttatatttatgccagtgggaaataagttatggccaagtg

SEQ ID NO: 6437 - DNA, 417 bp, Homo sapiens
  misc_feature (1)...(417): n = A,T,C or G
tggggcagtgcttggcccaggagtttggccagaagtcaaggcttagaccctcatgctgccaatatcctaataaaaaggtgaccatctgtgccgggaaaaaaaaaaaaaaaaaaaaaaaaggggggggccctttaaaaaaaacccttgggggggccaaatttaacccgggggggaaaggaaaaattttttccttaaaagggggggaaaaaaaaaccaccttgggaattttggaaaaaaacctttttttgggggggggaaaaaatgggaaaaacccccccacaaaaattaaacccttaagggaaaaaaaaaatttttaaggggaaaagggggaaaaacaaccccaaaagcctgggggtaaaaaaagtggggannncncnnaaaaaaccctattttttggggggggagaaaaattaaaag

SEQ ID NO: 6438 - DNA, 392 bp, Homo sapiens
aaaacttatgtcaaatatgaggccccaggattcctggcgaggtcctcctccccttttccagcagcaaaggttggacagaggcgttggggctgaacctctgctcccatggaaccggatgctgcaaacccagaatgcagccttccagccaaaccagtaccagatgctagctgggcctggtgggtatccacccagacgagatgatcgtggagggagacagggatatcccagagaaggaaggaaataccctttgccaccaccctcaggaagatacaattggaattaagcttttgtaaagctttcccaaatcctttcatcattctacaggtttatgctatttgtggaaagatttctttctcaagtagtagtttttaataaaactacagtactttgtg

SEQ ID NO: 6439 - DNA, 485 bp, Homo sapiens
  misc_feature (1)...(485): n = A,T,C or G
ggcagtggccccaggcgttccctctatgaccctcangtagacccctccannnncccnannangcgggcggaccttggaggacagcagccctgttctanaacgtatgtttagcgtatgtttagcagcattcctggcctctggctacccgaggccagagcatgctccccctgcaggcatgacaatcaaaaaatgtctccagacattgtcaaaagcctcctggggggcagtatttctcaagcacttttaagcaaaggtgagtattcatacaagaaatttagggggaaaaaacattgtttaaataaaagctatgtgttcctattcaacaatatttttgctttaaaagtaagtagagggcataaaagacgtcatattcaaatttccatttcataaatgatgtacagacaaggtctatagaatgtggtaaaaacttgactgcaacacaaggcttataaaatagtaagatagtaaaatagcttatgaagaag

SEQ ID NO: 6440 - DNA, 496 bp, Homo sapiens
  misc_feature (1)...(496): n = A,T,C or G
agggagtgtgccgaggnngtttcccccagagatccatgcactgagaggccctccagaacccgcnncgacccacgcgtncgccgctccgagcccgtccggactcccccgatcccagctttctctcctttgaaaacactaagaataatgtcactgcatcagttgttactagagccaatcacctgtcatgcctggaacagggatcgtactcagattgccctcagtcccaataatcacgaagtgcacatctataagaagaacgggagccagtgggtgaaagctcatgaactcaaggagcacaacggacacatcacaggtattgactgggctcccaagagcgaccgcattgtcacttgtggggcagaccgcaatgcctatgtctggagtcagaaagatggtgtttggaagccaaccctggtgatcctgagaattaatcgcgcagctacttttgtgaagaggtcccccctagagaacaaatttgctgtgggaagtggagcac

SEQ ID NO: 6441 - DNA, 416 bp, Homo sapiens
ttacgtgcctggcccctctctgagctgtggtgcctcgagaggcagctgtgacctactggccttcacatctccccatggaggggacattgttacaggcgccttgagcagcctggggaggggagtgggggccgggaacctggaaggggaggagggtgccccaggcctcggggcacagtgactccctcgccccacagacatccagtaccaggagaacttctatgcctggagcgccccgggggtcggccggtttgtggcctccatggccgcctcagggtgcgcctacctcatcctgctcttcctcatcgagaccaacctgcttcagagactcaggggcatcctctgcgccctccggaggaggcggacactgacagaattatacacccggatgcctgtgcttcctgaggaccaagatgtag

SEQ ID NO: 6442 - DNA, 407 bp, Homo sapiens
cccacgcgtacgatgatggatctgtatgtttctgcggccccccggacagcggctctgacggggttactgagggtgctgctcacatctgtggtgcaagtcaatgccactccagacaaataccttttccagggacggctggaatgctatgcgtttaatgggacacagcgcttgctggagagatacatctacaaccgtgaggagaccgcgcgctttgacagcgacgcgggggagttactgtcggcgactgagctggcgcggcctgctgcggaggactggaacagccagaaggacatcctggacgagaagcggccattgccgcacaggatgtgcagacacatctactaactgagcgggcccatgaccctgcaacgccgagtacatcctatggtgaatgattccccctccaa

SEQ ID NO: 6443 - DNA, 489 bp, Homo sapiens
  misc_feature (1)...(489): n = A,T,C or G
agcagggccccaggggttcccattgagccccatcactgaggatccctcaaacccgcgncgacccacgcgtccggactgttcaaggccatgccgctgcagccctccatcctgcgggaggtcagcgaggagcacaacctgctcccccagcctcctcggagtaaatacatacacccagatgacgagctggtcttggaagatgaactgcagcgtatcaaactaaaaggcaccattgacgtgtcaaagctggttacggggactgtcctggctgtgtttggctccgtgagagacgacgggaagtttctggtggaggactattgctttgctgaccttgctccccagaagcccgcacccccacttgacacagataggtttgtgctactggtgtccggcctgggcctgggtggcggtggaggcgagagcctgctgggcacccanctgctggtggatgtggtgacggggcagcttggggacgaaggggagcagtgcagc

SEQ ID NO: 6444 - DNA, 417 bp, Homo sapiens
tctggcccactgagccaccgcgccctcctgcctacgggaggacaatcaataactctctacaggaatatattttttaaacgaggagacagaactgtccacatctgcctcctctcctactcagctgcatggagcctggaactgcatcagtgactgaattctgccttggttctggccaccccagagtgggagaggctgggaggttgggaggctgtggagagaagtgagcaaggtgctcttgaacctgtgctcattttgcaattttatcagtaatttgacttagagtttttacgaaacctcttttgttgtccttgccccactcctctccaccagacgccttcctctctggatactgcaaaggcttgtggcttgtagagggtattcgtggaaactgtcatagggattgtccctgtgttgtcc

SEQ ID NO: 6445 - DNA, 408 bp, Homo sapiens
aaaggccaacctcgcacttggctccagtcaccagtgtgagagagaaaggtgctggcataggatctgcccagaagagaaaatgacccatgcgcagttgggctctggatacggcgctgtctatagcaagttggccagtctggcctcctgttcctctgctggacctggggtaggctgcaggggtgggcagaagcccctcttaaattgtggttgccatggtaccgagggactcattcctggggctcgctgggacctccctaaacccttcctggaagaaaactggaaccaactctgccctacctccctgcactaaccagctttgaggatggcactgaagaacccttggagcaaacatacctcccttgtgactcccacatcaaccattaaagttatttaacagcagccttcacc

SEQ ID NO: 6446 - DNA, 407 bp, Homo sapiens
atctttcatctgaccatccatatccaatgttctcatttaaacattacccagcatcattgtttataatcagaaactctggtccttctgtctggtggcacttagagtcttttgtgccataatgcagcagtatggagggaggattttatggagaaatggggatagtcttcatgaccacaaataaataaaggaaaactaagctgcactgtgggttttgaaaaggttattatacttcttaacaattctttttttcagggacttttctagctgtatgactgttacttgaccttctttgaaaagcattcccaaaatgctctattttagatagtttaacattaaccaacataattttttttagatcgagtcagcataaatttctaagtcagcctctagtcgtggttcatctcttt

SEQ ID NO: 6447 - DNA, 403 bp, Homo sapiens
  misc_feature (1)...(403): n = A,T,C or G
aaaacagtgccgattgtgaaaggaggggaggcaacatgaatggaggaaggagaagtatatgcaattgaaacctttggtagtacaggaaaaggtgttgttcatgatgatatggaatgttcacattacatgaaaaattttgatgttggacatgtgccaataaggcttccaagaacaaaacacttgttaaatgtcatcaatgaaaactttggaacccttgccttctgccgcagatggctggatcgcttgggagaaagtaaatacttgatggctctgaagaatctgtgtgacttgggcattgtagatccatatccaccattatgtgacattaaaggatcatatacagcgcaatttgaacataccatcctgttgcgtccaacatgtaaagaagttgtcagcagaggan

SEQ ID NO: 6448 - DNA, 393 bp, Homo sapiens
cccacgcgtccgggcgatctggaaagaattcacaggaagatagtgaggactcagaagacaaagatgtgaagaccaagaaggatgattctcactcagcagaggatagtgaagatgaaaaagaagatcataaaaatgtgcgccaacaacggcaggcggcatctaaagcagcttctaaacagagagagatgctcatggaagatgtgggcagtgaggaagaacaagaagaggaggatgaggcaccattccaggagaaagattccggcagcgatgaagatttcctaatggaagatgatgacgatagtgactatggcagttcgaaaaagaaaaacaaaaagatggttaagaagtccaaacctgaaagaaaaaaaaaaaaaaaaaagggcggccgctctg

SEQ ID NO: 6449 - DNA, 383 bp, Homo sapiens
acgctactatgtgtcttctgcatttacactcgcagctaatatcatagcaaagaaagttgttgaaaatgataaatttccctctggagtagaaaaaaccggaagtgatgaaccagccttcatgtattatatgaatgatggtgtttatggttcttttgcaagtaaactgtctgaggacttaaataccattccagaggttcacaagaaatacaaggaagatgagcctctgtttacaagcagcctttggggtccatcctgtgatgagcttgatcaaattgtggaaagctgtcttcttcctgagctgaatgtgggagattggcttatctttgataacatgggagcagattctttccatgaaccatctgcttttaatgattttcagaggc

SEQ ID NO: 6450 - DNA, 390 bp, Homo sapiens
caagccagaaatccttgattatttacagtgcataagagttcttacatgctgtgggtaaaagagtgcagggcatggaacctgtttattttatgcagttcaagaaaactcattgattattgagtacatgttcgttctcatgatattcatttgaccctgatataaaaattgttcatctttcttactctgagaaagccattaagaagtttctaagccccaaactactgttacctgtatctaaaaatagctggtattggtattataaagaaactgttgacaattttgtggtcccctcagtctctgagacttcagtaccaaattgttgttaacctgatacactgtaaatataagttatgattatgagctcttatctgaactgcaattcactacatt

SEQ ID NO: 6451 - DNA, 511 bp, Homo sapiens
  misc_feature (1)...(511): n = A,T,C or G
atcggtggccctccganggctcggtatacctcgtancaacgcgnacgntttaangcaacatggcggccctgagacctggcagaggtttggaatggcacaacagtttggctacagaggcagcgtggcatctgggacggggtgagaaggctgctactcacctcgttctacttcacattcaggggaggaggccccgctgcattcacttcgagggcccaacactgggaacatcatcccaaactctgacagggacacagggctgggcagatccaggctgccaggcctcacaaccgcagggaactggtcaggcatctcagacgggcttgttggtcctgaactaaagctggacacggactgggtttccgagtcatcttcagacacaaagttgctacagctgtcatcttcaaaggcctccgaggccactaagttgagagagaacaccagtcacatgggttctgtcacctcctcaaacaccacaagtgcttgctgctggcaggcaactagacacagcatg

SEQ ID NO: 6452 - DNA, 379 bp, Homo sapiens
tgggaaaagtctctacttcttcaaacgtaacataaatctattatgaagcttgtcccctagtatgccattataaagaaaaaattcttcgatggtatgcagtgtatctattctgtttgtaaaagatcatgtcaaaatgttctgcctctataatgataatagatggttttgtctttcaggatatttatccacctactgtcttctttgccttaaagggacacttggccatcatttttaggctcgaacttaacactgttaagaaataactgaaatatgatggtatttacattaatttttgaaattcaatggtgggatagaattaggtcaggaaatggaagttgttccaatggtgtgagaactaggagacaagatgattcacttt

SEQ ID NO: 6453 - DNA, 388 bp, Homo sapiens
  misc_feature (1)...(388): n = A,T,C or G
tggggagttggcanaatccccatacctcgcagatttgctgagtctgtcttgtgcagatggccagagaatggcttatgggggcccaggttggatggggaaaggctaatggggtcagaccccaccccgtctacccctccagtcagcccagcgcccatcctgcagctcagctgggagcatcattctcctgctttgtacatagggtgtggtcccctggcacgtggccaccatcatgtctaggcctatgctaggaggcaaatggccaggctctgcctgtgtttttctcaacactacttttctgatatgagggcagcacctgcctctgaatgggaaatcatgcaactactcagaatgtgtcctcctcatctaatgctcatctgtttaatggaga

SEQ ID NO: 6454 - DNA, 380 bp, Homo sapiens
  misc_feature (1)...(380): n = A,T,C or G
cccacgcgtccggagagattactgggaagcagtgagccaacataattgtcctttcctctacagaatagctgtgcagaaggggaccaccacacttaggaccagtgccaggtgacaatctttccgtcatgctgctgcagcattttgcaccttgagagacaggaaaaaaaatgggggtgagggagtggaagatgatgaaactatttctcttttatgtctacatccttactcctcaaaatactttaagctcactcagaccccatataccctgcccacaatactaacacatgtactttgcataagtaaattgttgattaaataagagcaaaactatattcttatgtgtagattaaccaaggctaatttcctggagtttaatacan

SEQ ID NO: 6455 - DNA, 376 bp, Homo sapiens
taacttctgaatttaaaaagttatacaatgccagtttgcaatagttgattttgatgcctttgtagaatattttttctgaatccttatgctcttttaaagccaatgattcccactctgttctctgccttgtctctctttgtcttaaaatgctttagtttccatcaggttcaagttcttgactattattctcttataagtagtaggcgtaaataatcaggagttagaattctctcagaagggtctatgatcagtattactttattaagaattacctctcattttctctttatgttattctttcacttttgtagattacatttaatagcttgttacctgtgattttattttaaaatatttattttgatatgatgcttaa

SEQ ID NO: 6456 - DNA, 374 bp, Homo sapiens
agggtgcacggccggccctggtcaggcggtagccttggagctgtggcgccaatgcacccactggctcatccagtgccgggtgctgccgcccagccaccgcgtgacctgggatggggctcaggtgtgtgaactggcccaggccctccgggatggtgtccttctgtgtcagctgcttaacaacctgctaccccatgccatcaacctgcgtgaggtcaacctgcgcccccagatgtcccagttcctgtgccttaagaacattagaaccttcctgtccacctgctgtgagaagttcggcctcaagcggagcgagctcttcgaagcctttgacctcttcgatgtgcaggattttggcaaggtcatctacaccctgtctg

SEQ ID NO: 6457 - DNA, 427 bp, Homo sapiens
  misc_feature (1)...(427): n = A,T,C or G
taggcgtagtccttccttaatttcaactcaataaaaaatgctttatagtttatggcagtggaaggaaggctggcgtcaaaatgttttgatcaaaaaggatgacaatgtaaaggctcagttgtggcagacagttttttgaaagtaacttgtaaagcatttaccatatcctagatttgcactctttgcagacttgtgcacatatattccgctttcagaatagttatgcaaattgtacacatacacacaaacaggtggaagctttttaataaagaacatgcatttataaatgatcttgattagaatataataaatctccagttatagtcgattactacccatgttgacatcagataccttctatcttagttgttaataaagggctacacaactcacaagaaaaaaaaaaaaaaaaagaagggggcccgtn

SEQ ID NO: 6458 - DNA, 459 bp, Homo sapiens
  misc_feature (1)...(459): n = A,T,C or G
cggcgggnnattcctacggcagctcggantgacagcatcgcaggncgaccacgcggcggagggcaagcttctttcttgtagcatcacggggaggcattgcaggagagaggggcaggngcactggctttgcgttaggaaagcccagtagctcttagacttgctaaccgtgtgacccagcctcagtaagctttagtccccccatctgtaaaatgggagcagtgagagtttcttgaccacagtgttgttgtgaatgcagggcctcacttccttatatgaaactcgggccatatgctgtggatttcgcaatagccctgggagttctgaacagcatcctatagtaaagcacattaattattttgcagtcaactgtatgaatattcatgctgggataaagaaagagtataaatgggtttacatcagttcaggtcaaacttttcaaccaaatgagttcaagtctgg

SEQ ID NO: 6459 - DNA, 409 bp, Homo sapiens
  misc_feature (1)...(409): n = A,T,C or G
tagacagagacagaccgagaaggaagggagagacagagggggcgcgcgcacaggagcctgactccgctgggagagtgcaggagcacgtgctgttttttatttggacttaacttcagagaaaccgctgacatctagaactgacctaccacaagcatccaccaaaggagtttgggattgagttttgctgctgtgcagcactgcattgtcatgacatttccaacactgtgtgaattatctaaatgcgtctaccattttgcactagggaggaaggataaatgctttttatgttattattattaattattacaatgaccaccattttgcattttgaaataaaaaactttttataccgtcnggaaaatgacaacacttaaagaaaaaaaggggggccccttttataggatccttg

SEQ ID NO: 6460 - DNA, 478 bp, Homo sapiens
  misc_feature (1)...(478): n = A,T,C or G
nttttactgatagcctcggaccgcctttgatttcgtgtcgacccacgcgtccgcatttattaaggtctgtatatctatatattctcatatttatagatctccatattgtttgagaaaaggaatgaaatacctctaaaatatgggcctcatatttttagaaaagtgtttgaaatcttttataaacttcatattttgtttgctcctttatattctgtattacttaaatatgctcagaaaagcagtggtaaacagctatttaggaattgaggctgttactcctgacttccatgtgagactgccacagaactcatattgaaaatatgtcattttatccactaggttttgtttcctactttttaaatttgtgttaagaaagggaaaaaaatcacaagtttgtctaactcagtagaaaaatcgacaaagcatttgcagacaacttggcaagggtacagagaaacggatgtactgtttttcagtg

SEQ ID NO: 6461 - DNA, 213 bp, Homo sapiens
tttttttatttttatacacatgacaagattttacatcaagaatagtcagttaaatagtacaaatttacattcatgaggaatgttaaaaaaaattcaactaaaaaacccactttttcctgtgacccataatcccacattttacagtgcaggggagaaggggattagggggcatccaaaacaagtctctcccaaaaagaaaaaaaaaaaaaaagg

SEQ ID NO: 6462 - DNA, 407 bp, Homo sapiens
acgtcgatgaactgatcttcatgctgagcgacagccctggggtcatgtgccggccttcccgagtcaagcggatgtttgcctccagagcctgccggaagtcggtgatgattgggactgctcttaacacaagcgagatgaagaaactgatcacccacatgggggagatggaccacccctggaactgtccccatggaaggccaaccatgagacacatcgccaacctgggtgtcatttctcagaactgaccgtagtcactgtatggaataattggttttatcgcagatttttatgttttgaaagacagagtcttcactaaccttttttgttttaaaatgaaacctgctacttaaaaaaaatacacatcacacccatttaaaagtgatcttgagaaccttttcaaaccagat

SEQ ID NO: 6463 - DNA, 479 bp, Homo sapiens
  misc_feature (1)...(479): n = A,T,C or G
tttgaccgacagcgtgcggatcgccactgaatttcgtctcgacccacgcgtncgcagatatcagatagatattagtaatccagacatttctctgcttaaaactttgtaatggttccatatttctctgtcttttttcttttgtttggagacagggtcgcactgtatcccctgggctggagtgcagtggcatgatcactgctcactgcagcctcaacctgtcaaatggtcctcccacctcaacctcccgagtagttgcgactataggcatgtaccaccatggccagctaatttttaaatttttcgtaaagatggaccctccctgtgttgctcaggctggtattgaactctggggctaagtgatcctgccacatgagcctcccaaattgctggaattatgggcatgagccaccatgcccagctgccccatatggctttcagataaaaagcccagagcctttgggagaccactacttcgcttg

SEQ ID NO: 6464 - DNA, 479 bp, Homo sapiens
  misc_feature (1)...(479): n = A,T,C or G
tttgactgatcgcgtgcggatcgcaactgagttcgtctggacccacgcgtncgccgatatggctcaatgaagtgaagtgcaaagggaatgagtcttccttgtgggattgtcctgccagacgctggggccatagtgagtgtgggcacaaggaagacgctgcagtgaattgcacagatatttcagtgcagaaaaccccacaaaaagccacaacaggtcgctcatcccgtcagtcatcctttattgcagtcgggatccttggggttgttctgttggccattttcgtcgcattattcttcttgactaaaaagcgaagacagagacagcggcttgcagtttcctcacgaggagagaacttactccaccaaattcaataccgggagatgaattcttgcctgaatgcagatgatctggacctaatgaattcctcatgaggccattctgagccacactgaaaaggaaaatgggaatttataaccccg

SEQ ID NO: 6465 - DNA, 483 bp, Homo sapiens
  misc_feature (1)...(483): n = A,T,C or G
gtttgaactgacngcctgcggatcgccactgagatgtcgtctcgacccacgcgtgcggcctctgcagagctctgcggggaggtgcctggcttctccggcctccaccctggcccagagctgcctcctgagcagcggatcccaacctgcctgcccctggggctgggtctccagcagtcaggactgagttgctgctagctgctgacaggtgtggggcgaagggggcgcatttgccgcatgtccccattggcagcatctccacgccttcccttgtgacacctccaaccagaatagagcaggtatgtgggagcccgcacctgctcccccagcgccccggggtcgtcttctgcctgctccttctgtcctccacactgaagagtgtgctccagctggggatgggcatgtgtgacgctggggaatggatacctgtgaaatggtggagtgtgcatcaagtctaaatagccgctcgcaggatctgggggcttt

SEQ ID NO: 6466 - DNA, 393 bp, Homo sapiens
agattattaagttagcttctttccacagtaatagatcataacagattattaaaaccaaaccttaaatctgatgagcgagcgggcaggtaaggggatggcctttctttaagagaaagcttgtttcaaaactttacaactcatctagaaaccagacatagatgggagaatacccaatttcagcaacccaatcaagatcttttaactggtcgtttctctccggtcttcctaatatcgattgtactgtgacattacgagactgagccaccttggatgatggatgtgcttgtcaccctgatatgatcactacacattacatggattgcatcatcactaggagccccataaataataacaatatgtttggatcaattaaaaatctttttaaagaaactg

SEQ ID NO: 6467 - DNA, 412 bp, Homo sapiens
gcgcacagttctcagacaatctgattcggacgctcctcatccacatcatgtctgtgcctgctctggtgactcatgtgagcacagtgacccctgagcgcctcactgttttagaatcccatgacatgcttcgtaaattcatcatatttttaagagaccaagatcgatgccgtgatgtatgtgaaagtttagaaggatgccatacgctttgtctaatgggcaacctcctacacttgggctccctcagccccagagtgttagaggaggagacagatgggttcgtgagtttgctcacccagacgctgtgctactgtcagaagtatgtgtcctctaccagacctcgctgacaactctcacacagattcggctgcagatactcacaggtctcacttaccttgatgacctgcttcccaaa

SEQ ID NO: 6468 - DNA, 489 bp, Homo sapiens
  misc_feature (1)...(489): n = A,T,C or G
nttttatccgttttacctcggaatngnctccggattatactngcgaccacgccggaagttcaggctcgacccacgcgtccggccacgcgtccgcccacgcgtncggtcagcggctgcagcgctctcgtcttctgcggctctcggtgccctctccttttcgtttccggaaacatggcctccggtgtggctgtctctgatggtgtcatcaaggtgttcaacgacatgaaggtgcgtaagtcttcaacgccagaggaggtgaagaagcgcaagaaggcggtgctcttctgcctgagtgaggacaataagaacatcatcctggaggagggcaaggagatcctggtgggcgatgtgggccagactgtcgacgatccctacgccacctttgtcaagatgctgncagataaggactgccgctatgccctctatgatgcaacctatgagaccaaggagagcaagaaggaggatctgggtttatcttctgggccccga

SEQ ID NO: 6469 - DNA, 412 bp, Homo sapiens
cggacgcgtggggggaagaggctttccttctgggatggcggcggctggtagacacctttgctttctctagccctcctgggctgggcttgggcacaaatccccaggcaggctttggagttgtttccatggtgatggggccagatgtatagtattcagtatatattttgtaaataaaaaaaaaaaaaaaaaaaaaaaaaaaaaaaaaaaaaaaaaaataaaaggggggggcttttttaaagatcccttgggggggccaatttttcggggggggggaaagaaaattttttttcctttatggggggggatataaaaccccccgggggatttttggaaaaaaacccttttttggggggggggaattttgggcaccccccccccccaaattttaagcccttgggggaaaaaaaaattt

SEQ ID NO: 6470 - DNA, 480 bp, Homo sapiens
  misc_feature (1)...(480): n = A,T,C or G
atttaaactgaaatactcgtaaanactgacgnactagnanagccncnaatnnngggtngacacgcgtgcgattatcgtaaagccgtcggacatctttggaagagaggatagattccttaattctttggcaagtatgcatcggtgtggtcctataccccttggttccttgggctggaagacagttaaacaaccagtatatgtcgtagatgtatccaaaggaattgttaatgcagttaaggatcctgatgccaatgggaaatcctttgctttcgttggtcccagtcggtacctccttttccacctggtgaagtacatctttgctgtggctcacagattgttcctcccattccccttgctgctttttgcctatcgatgggtagcaagagtctttgaaataagcccatttgagccctggataacaagggataaagtggagcggatgcacatcacagacatgaaattgcctcacctgcctggctt

SEQ ID NO: 6471 - DNA, 478 bp, Homo sapiens
  misc_feature (1)...(478): n = A,T,C or G
cccagctcccactgagatcccnctagntagtctgagaaccgccccggaattcgggtcgacccacgcgtccgtatttctgtttctcatatggtctaccagtttgctgatgtccctagaaaacaatgcaaaaggtttgaggtagagcaggatttctaatcaaaagggaaaagaagatgttgaagaatacagttaggcaccagaagaacagtaggtgacactatagtttaaaacacattgcctaactactagtttttacttttatttgcaacatttacagtccttcaaaatccttccaaagaattcttatacacattggggccttggagcttacatagttttaaactcatttttgccatacatcagttattcattctgtgatcatttattttaagcactcttaaagcaaaaaatgaatgtctaaaattgttttttgttgtacctgctttgactgatgctgagattcttcaggcttcctgcn

SEQ ID NO: 6472 - DNA, 489 bp, Homo sapiens
  misc_feature (1)...(489): n = A,T,C or G
agtggcgngngnnatttaaactgaaggcttgtanngacttgagntctgcgaaannccncggnnggagaatggatttcctgggctttcttctaggactcttatggtttgaggtcttacatttaaaccttaatccatggtgaatgaatttttgtgtatggtgatagataggggtccaattttattctgcatatggctagccagcaccatttattgaatagggagtcctttctccattacttactttgttgactttgttgaagatcagatggtgttaggtgtgtggtttcatttcttgaggtctctttcacaacttctcaactctgccctattactcaagagcagccataaacaggacctaaacaaatgatcatgactatgttccaaccaaacgttattcgtggacactgaaatttgaacttcatatacctcacaaagtatgatttcttgttttataaccattttaaaatgtaaaaaccattcttagcttgg

SEQ ID NO: 6473 - DNA, 408 bp, Homo sapiens
cccacgcgtacggagccattaatttttggggttttttaaaatccagaaggtatatagagaccttttcagattgggcatctgatttgttcttgcagaggttcttctatcaaataccttattttaccttacagatatttgttgcacaggcagatactgctgtatttagacatttctatttgagttcattaaaaactgcaaaaccaatctgtatcatgtaccaaactgacttaaaataaatctacatgtttattgaatttagacctggatggcccttacaacaaatttataagggctgataatttcacctccaagatatgggtggggggggggtgatttaattttaccggagccggcccaaggaaaacgcgaggggtaaaatgttttcttttgttttggaacctgtgtggg

SEQ ID NO: 6474 - DNA, 495 bp, Homo sapiens
  misc_feature (1)...(495): n = A,T,C or G
agtggccggngnnatttaaacttaaggcttgtanngnactganatcctgngaaanccacgcgngngangaggtagagccccatcctgttggcaaatgaagntgtatagttgttgagacttcattttctaagcaatatatgggtactcatttaatcctgacataaatctttgagaaaatactaccataagctccattttgtagagcagcaaactagaacatacaaagattaagtaacttgcccaagatcctagagatactgagcggagggatccagaattcaaacttaggctgtgtagtttcagagtcttacgttctaaaccagtacaccatactgccgatccaaatatgtacctacataccagtgtgcagtatgaacatataatatccatgtggtacaggaatctcaagccaaggaattaaattaaaatgtacactgcaacttgggagcctgaccttgtgaatttcgaagcagtagcaaatgtgaactgctcttg

SEQ ID NO: 6475 - DNA, 496 bp, Homo sapiens
  misc_feature (1)...(496): n = A,T,C or G
aggtgccggngnnatttaaactggaggctgcgtacngactgatggtcctgngaaancccgcgtgcgatggttgcttatgcctgtaatctcagcactttgggagtccgaggagtgcagatcacttgagatcaggagtttgagaccaacagggccatcatggtgaaaccccgtctctactaaaaatacaaaaattagccaggcgtggtggtgcatgcctataatcccggctacttgggaggctgagacaggagaattgcttgaacctgggaggcagaggttgcagtgagctgagattgcaccactgcactccagcctgggtgacagagggcgactccatctcaaaaaaaaaaaaaaaaaaaaaaaaagggggggcccttttaaaagaacccttggggggccaaaattttacgggggagggaaagaatatatttttttctttaaggggggccatataaaacccacctggggaattttggaaaggaacctttttttgggg

SEQ ID NO: 6476 - DNA, 416 bp, Homo sapiens
  misc_feature (1)...(416): n = A,T,C or G
cttgaagaacagagaccagaaagagtaaaaccttttatgacaggggctgcagaacaagatcaagcacatccttgctaatttcaaaaactaccagttctttattggtgaaaacatgaatccagatggcatggttgctctattggactaccgtgaggatggtgtgaccccatatatgattttctttaaggatggtttagaaatggaaaaatgttaacaaatgtggcaattattttggatctatcacctgtcatcataactggcttctgcttgtcatccacacaacaccaggacttaagacaaatgggactgatgtcatcttgagctcttcatttattttgactgtgatttatttggagtggaggcattgtttttaagaaaaacatgtcatgtaggttgtctaaaaataaaatgcattn

SEQ ID NO: 6477 - DNA, 391 bp, Homo sapiens
caaaaattagccaggcgtggtggtgggcacctgtactgtggaggtgcccacccatctgctggttaggctgaggcaggataatcgcttgaacctgggaggcggaggttgcggacagctgagatggtgccactgcactccaccctgggcgaaagagcgactctgtctcctggaggacagacattaggagaggacgcccacacccacacataagaaagccatgtggcggcagaggcatatatgggagtgatgcggacggacacaaactaagggatgccaccatgcctagcacaggcgacagacaccagccttcatgatacaggcctgggacgggctctccctcacagccttcaaagggaaccagacctgccaccaccttgaccctggacttatg

SEQ ID NO: 6478 - DNA, 473 bp, Homo sapiens
gtgcggggggatttaccttgacgccctgcggatcgacccctatttcccgggccgacccacgcgtccgcggacgcgtgggcgacaaatggcaacagaggccggtatttgggggcatgggaaaccgggcagcacatatgccatctagagggatgcctgactgctttggtccagtgcactgatgctacatgggaaggaaggcctggctggtgttgtcaaatcttctcaccctaaaaaaaaaaaaaaaaaaaaaaaaaaaaaaaaaaaaaaaaaagaaaaaaaaaaaaaaaaaaaaaaagggatgcccgtcaagcaaaaaaacagggggcgggcgctttataaaaaaaaaaagggggggcgcccttttccaatcttttggcccttttttttttttttttttttaggggggggaaaaaaacaccctgggggtttttttagaaaaaaatttttttttggggggggaaaaaaaaaaaaag

SEQ ID NO: 6479 - DNA, 464 bp, Homo sapiens
  misc_feature (1)...(464): n = A,T,C or G
gtgcgggnnatttcattgaagcctgcggactgacagtctntgaaggnncgacccacgcgtgcggtcatttgagttttcaaaaccttgcgaaatggtcaggaattatcaccttaatcgtcaggaattaccaccttgagtatacatatgagatctgtggttcagtcaagcatctgatgtgattagtcagttgcagaggtgattgattcttgctagttattctaaccgtatgctctatcccagaaaatgtttgaaggtttagtaaaacagttttaagttgtctaaccttaaagccaatacatattttagaaattatgaagtccactgtacagatcaagaaactggtacttaggaggactaaacagcttagcttagctgttgttgtgacataaccatgaccagaaccagactgctcataaaatggctttttcagttatttcaaaattgtcaatatagtataaattaag

SEQ ID NO: 6480 - DNA, 472 bp, Homo sapiens
  misc_feature (1)...(472): n = A,T,C or G
gtgcggggggattcctacggacagctaccgtacagacagtcatatgaacnnncccgnaannngggggagacccacgcgtccgcggacacatataagaccctggtcacacctgggagaggaggagaggagagcatatcacctgcagcaagatggatgtgggcaggaaagaggtcctgatggagagcccgccggactactccgcagctccccggggccgatttggcattccctgctgcccagtgcacctgaaacgccttcttatcgtggtggtggtggtgggcctcatcgtcgtggtgattgagggagccctgctcatgggtctccacatgagccagaaacacacggagatggttctggagatgagcattgtggcgccggaagcccagcaacgcctggccctgagtgagcacctggttaccactgccaccttctccatcggctccactggcctcgtggtgtatgactaccagcg

SEQ ID NO: 6481 - DNA, 471 bp, Homo sapiens
  misc_feature (1)...(471): n = A,T,C or G
gggcgggnnggtcccactgaatgccgcctgangagtcctcggaanccccggncgacccacgcgtncgnggacgcgtgggcggacgcgtgggctgtggtcctttgggactcatcaaagccttggtttagcattttgtcagttttatcttgagaaattctctgcgattaagaagataatttattaaaggtggtccttcctacctctgtggtgtgtgtcgcgcacacagcttagaagtgctataaaaaaggaaagagctccaaattgaatcacctttataatttacccatttctatacaacaggcagnggaagcagtttcagagaactttttgcatgcttatggttgatcagttaaaaaagaatgttacagtaacaaataaagtgcagtttaaaacccaactcttactcttaatttgttcctaatacgtatttttggcagggagagggaacggtccatgacatctttatgtgat

SEQ ID NO: 6482 - DNA, 393 bp, Homo sapiens
  misc_feature (1)...(393): n = A,T,C or G
tgcttatttaaatgttgaccaaattgtctgatatatctgattaatcatgatttcacttcgtttcggaagaagaattatccatatcatttttaaagacgcaaatgactttggatttttgcatagagtacaatagacacttcaaacaatagattctaacattctctgaaacacttgagatgtttgagctaccatttatatgggttatttatatttagtctaagtaacacatacatgtttaattgattctgttttcatggatagattcaactaagtcttccaagcaattaattttttgttcgtcgtcgtttttccttcatacgttatctagttatgcagcactggaaacagactgaagatcataaaccagttttatcagacctatgtgtaataagn

SEQ ID NO: 6483 - DNA, 390 bp, Homo sapiens
aaaagttttttatatcttgagacagtgcactattggggtatgaatgatatacatgcccttctttgaacattgagagaaaggcatttataaaagggagggtaggaatgcagaactcacatgatagccaggccacaaacaaattattaggtagatcatttttaagaagcactgaatatgcagattaaggattcagatgctgattccttagaactatgtgcataccatagttttatgtaatacttggaaagtgttcaatttatcccaggagtaagtataatccagcttgaagaccactgctgtatatcaccgaattgattttatatagtgccacctctactaattagtggaatagaaggaaattacctcaatattttaaaaaccatgtgtgaa

SEQ ID NO: 6484 - DNA, 329 bp, Homo sapiens
tcttactaatttaaagatgctgtcggcaccatgtttatttatttccagtggtcatgctcagccttgctgctctgcgtggcgcaggtgccatgcctgctccctgtctgtgtcccagccacgcagggccatccactgtgacgtcggccgaccaggctggacaccctctgccgagtaatgacgtgtgtggctgggaccttctttattctgtgttaatggctaacctgttacactgggctgggttgggtagggtgttctggcttttttgtggggtttttatttttaaagaaacactcaatcatcctaaaaaaaaataaaaaaaaaaaaaaaag

SEQ ID NO: 6485 - DNA, 471 bp, Homo sapiens
  misc_feature (1)...(471): n = A,T,C or G
gagacgggggnttccctaccgaattcctaagtgagtctggcaaccncgnncgacccacgcgtncggagtgagtctttgtgagtgggtatggctgtcagtgcactgagaacaacacttcttgcctctcaggattttgaagcaagagcaccccgagttggcagtcctcgcagactcggttgaccttcaggagtccacagggatagcttccgacagctccagcgactcttccagctcctccagctccagttcgtcagactccgactcagagtgcgagtctggatccgagggcgatgggacagtgcaccgcaggaagaagaggaggacgtgcagcatggtgggaaacggggacaccacctcccaggacgactgtgtcagcaaagagcgcagctcctccaggtgacccagcaaggctgttgtctgtatggaaggacacgctcgcggcaagggcagggcctggggagggtggcctgn

SEQ ID NO: 6486 - DNA, 482 bp, Homo sapiens
  misc_feature (1)...(482): n = A,T,C or G
tgtgccggttttcccgggagtttcgnanagnancnncncnaannnngggnngacccacgcgtgcgggcagcacgcgcctgcttcccgtctgcgcgagtccacgcagctccccaggcccttcaccagcacagcaggagcaggcatggcagcaagcgtggagcagcgcgagggcaccatccaggtgcagggccaggccctcttcttccgagaggccctgcccggcagtgggcaggctcgcttctctgtactgctgctgcatggtattcgcttctcctccgagacctggcagaacctgggtacactgcacaggctggcccaggctggctaccgggctgtggccattgacctgccaggtctggggcactccaaggaagcagcagcccctgcccctattggggagctggcccctggcagcttcctggcggctgtggtggatgccttggagctgggccccccggttgtgatcagtccatcactgagtg

SEQ ID NO: 6487 - DNA, 478 bp, Homo sapiens
cttgaccccttcggtcgagcgcgtaaggcacggccgacccacgcgtgcggacccgggcatccaggaatgctacgaccgcaggcgcgagtaccagctctccgactctgccaagtactacctgaccgacgttgaccgcatcgccaccttgggctacctgcccacccagcaggacgtgctgcgggtccgcgtgcccaccaccggcatcatcgagtaccctttcgacctggagaacatcatcttccggatggaggatgtggggggccagcggtcggagcggaggaagtggatccactgctttgagaacgtgacatccatcatgtttctcgtcgccctcagcgaatacgaccaagtcctggtggagtcggacaacgagaaccggatggaggagagcaaagccctgttccggactatcatcacctacccctgggtccagaactcctccgtcatcctcttcctcaacaagaaggacctgctggag

SEQ ID NO: 6488 - DNA, 462 bp, Homo sapiens
  misc_feature (1)...(462): n = A,T,C or G
ggcggggttcctcagtngtcctcgctagtgatctagcaccggccgaccacgcggcgcggacgcgggggggagtcttttcatttgcttccacctgccatatctccattgtccctccaaccgaactgtggtttgcatagaggacctaaaagaatcagccaggcgcagtggctcatgcctgtaatcccagcactttgggaggccgaggtgggtggatcacaaggtcagaagatcgagaccatcctggctaacacggtgaaaccgcatctctactaaaaatacaaaaaattagccgggcatggtggcaggtgcctgtattcccagctgaggaaggagaatggtgtgaacccaggaggtggagcttgcagtgaaccgagatcacaccactgcactctagcctgggtgacagagcaagacttcgtctcaaaaaaaagaaaagataaattggaaaaggtgtctgggacn

SEQ ID NO: 6489 - DNA, 411 bp, Homo sapiens
  misc_feature (1)...(411): n = A,T,C or G
aagatgcacctgaaaaactttccagagcatctgatatgaaggacacacagctcctcaagaaaataaaggaagcaattggtaagatccctgctgccaccaaggagccagaggaacaaactgcatgtcatggcccatcaggttgtcttagcaacagccttcaagtgaaaggcaatactgtctgtgatggtagtgttttcacttctgacttgatgtctgactggagcatctcttcgttttcaacgttcacttctcgtgatgaacaagacttcagaaatggccttgcggcattagatgccaacatagctagactccagaagtctttaaggactggtcttctggagaaatgaattcagaagaaaactcatcaggtgcttctttttaaaactagaacttggctatattgaatgtgtn

SEQ ID NO: 6490 - DNA, 416 bp, Homo sapiens
aatcgttaaaaaatcatatttgtgtgtcttaagattcatatttatatgttctctcaaatgtatgtctcttacgtaacatactctaagaatgaaactgtcaccacaggtaaatccttgttagcaaggaatctgtctgctccagtctactcctagtttgatccttggatgtaagaaccaagtcattacatgtcaaattcaatttttctgccttaagaatgaatgtccttcataaaatattggatgcagtgtaacactatccaaggcagtgacttcagctttatatacatataaaatatagttagttttaaaattattgacatttatttaaacttttagattggattgtttgctattgctctgtgtgaggatacataatctttcagtaaactgtatttttaacttttccataagctgat

SEQ ID NO: 6491 - DNA, 412 bp, Homo sapiens
  misc_feature (1)...(412): n = A,T,C or G
agtcatcctaccatcatattgagcctttttgcaagctgactggatattctcatgaaatctatgtcgatcctgagagagaaatttataaaagattgggaatgaaaagaggtgaagaaattgcttcctcaggacagagcccccacataaaatcaaatctactctcaggaagccttcagagcctgtggcgggcagtgactggccctctctttgattttcaaggagacccagctcagcaaggtggaaccctcattttaggtccaggtaacaacatccattttatacaccgcgataggaataggttggatcacaaacctatcaactctgttttacagcttgtaggagttcagcatgtgaactttacaaacagaccttcagttatccatgtgtgacttanaatgcactcagtcacttt

SEQ ID NO: 6492 - DNA, 419 bp, Homo sapiens
tcaaatccaaaagtacataatttagaggtctatttcaaagtaatcatttgagcatagtttctccactgtcagagacgactgttattttattttcaatcaaattaaaacttgtttttatgccaaaaaaaaaaaaaaaaaaaaaaaaaaaaaaaaaaaaaaaaaaaaaaaaaaaaaaaaaaaaaaaaaaaaaaggggggggggcttaaaaaaaaaactgggggggggcaaaaattaattggggatgaaaaaaaaaattttttttttttatgggggggaaaaaaaaaaaccccggggggttttttggaaaaaaaattttttttggggggggggatattcggacacccccccccccaaaaaaataagcttttggagaaaaaaaaaaatttttgagggggggggggggaaaaacccctcttggg

SEQ ID NO: 6493 - DNA, 491 bp, Homo sapiens
  misc_feature (1)...(491): n = A,T,C or G
aggaaggtggcccaggcgttccctttgagcccccgcttagacggtcntccaaancccgcgncgacccacgcgtccgcccacgcgtccggtgtattcggacttcctgctctacaagtcaggagtgtaccaacacgtcaccggagagatgatgggtggccatgccatccgcatcctgggctggggagtggagaatggcacaccctactggctggttgccaactcctggaacactgactggggtgacaatggcttctttaaaatactcagaggacaggatcactgtggaatcgaatcagaagtggtggctggaattccacgcaccgatcagtactgggaaaagatctaatctgccgtgggcctgtcgtgccagtcctgggggcgagatcgggagaatcacgtcctggaactgcatgttcttgcgactcttgggacttcatcttaacttctcgctgccccagccatgttttcaaccatggcatccctcccccaat

SEQ ID NO: 6494 - DNA, 406 bp, Homo sapiens
aagcccctgaaacagcccaagaagcaggccaaggagatggatggggaagataaggttggttttttgttggtgttgtttgtttgtttgcttgtttgtttttgagacagagtctcactctgtcgccaggctggagtgcagtggcgtgatactggctcactgcaccctccgcctcctgggttcaagcaattctcctgcctcagcctcccgagtagctggggttacaggcgcgcaccaccatgcccagctaatttttgtatttttagtagagacgggatttcaccatgttggccaggatggtctcgatctcttgacctcatgatccgcccatctcagcctcccaaagtgctagaattacaggcatgagccaccacgcccggctggaagatacattttttaaacaaaaaga

SEQ ID NO: 6495 - DNA, 411 bp, Homo sapiens
atcagtatcattagtgaaaaagaaacaaattgtttgttatcatctctttagacagataagctgaatggtgggctttaaataataaaaacatacacatagttgacttgtgtatgagctactcttggattcttgttattatagacttgtatttagttcatattttgtcaaaagcaaaacaagaagatacatcacttttcattgaaaagaaaagtgtagagcatgactgaattgctcatcattctgggagtttccatgtagtggctatgcagtgtggaaagtgagaaaaacctccattgtggtgaggagaatacttcaatgtcccttgtccttgttctcattaattcagctaaaggtggatttgaccaaaataatgctggttaaatttgtagaaatgttgaaattggctgtgtt

SEQ ID NO: 6496 - DNA, 419 bp, Homo sapiens
  misc_feature (1)...(419): n = A,T,C or G
agcagatcgacctgagcacagtggacctgaagaagctccgagttaaagagctgaagaagattctggatgactggggggagacatgcaaaggctgtgcagaaaagtctgactacatccggaagataaatgaactgatgcctaaatatgcccccaaggcagccagtgcacggaccgatttgtagtctgctcaatctctgttgcacctgagggggaaaaaacagttcaactgcttactcccaaaaaaaaaaaaaaaaaaaaaaaaaacaaaaaaaaaaaaaaaaaaaaangggggggggccctttaaaaaaaatccggggggggcccaattttatccgggggaaaaaaatttttttttttttttttaaaggggggcaaaaaaaacactcccggggatttttggaaaaaaaacttttttttgg

SEQ ID NO: 6497 - DNA, 412 bp, Homo sapiens
cccagctaatttttgtatttttagtagagatggggtttcactatgttggccaggctggtctcgaactcttgacctcaaatgatccacccgcctcggcctcccaaagtgctgggtttacaggcatgagccaccatgcccagccctcatttagcaaagttttaaacataaaaagtgcttattagaggatatcagtgcctggcccacatgagagaacagatccatacacactttgaaaaactttgttcacttttaggaaatataattttgaaaaatcatttacatacaagaggtccactgaggcattgcttttaatggcaaaatattgcaatgtacttgaatgtccttcacattagattggtaagataaattttagtatgtgcatgtactggaatattatatagccagtaaacag

SEQ ID NO: 6498 - DNA, 416 bp, Homo sapiens
  misc_feature (1)...(416): n = A,T,C or G
gagttgtggaagggagagcattagtaaaactagctaatgcatgctgggcttaatacgtaggtgatgggttgataggtatagcaaaccatcatggcatatgtttacctatgtaacaaacctatcacaccccatcctaaaaaaaaaaaaaaaaaaaaaaaaaaaaaaaaaggggggggcctttttaaagaatccttgggggggccaaaatttaccggggggggaaaggaaaaatttttttctttaaagggggggaaataaaaaccaaccggggaattttggaaaagaaacttttttttgggggggggaaaaattgggccaacccccccccaaaaattaaaccctttgggggaaaaaaaaaattttaagggggaaagggggaaaaacaacctttttttgttggtgggttaaaaatgncn

SEQ ID NO: 6499 - DNA, 411 bp, Homo sapiens
  misc_feature (1)...(411): n = A,T,C or G
agggcgagttgtcgcaggtggacttcttgcaacaggttaacgtgtatggcgtgtgcgtgccaggttgtgagggtaaggtgggcatggctgctgtgcagctagcccccggccagactttcgacggggagaagttgtaccagcacgttcgcgcttggctccctgcctacgctaccccccatttcatccgcatccaggacgccatggaggtcaccagcacgttcaaactgatgaagacccggttggtgcgtgagggcttcaatgtggggatcgaggttgaccctctgtttgtactggacaaccgggcccagtccttccggcccctgacggcagaaatgtaccaggctgtgtgtgagggaacctgcatgctctgatcacctggccaacccactggggtagggatcacagccagcn

SEQ ID NO: 6500 - DNA, 417 bp, Homo sapiens
  misc_feature (1)...(417): n = A,T,C or G
atttctaaagacatactgtttatctgcttcatatgctttttttaatttcactattccatttctaaattaaagttatgctaaattgagtaagctgtttatcacttaacagctcattttgtctttttcaatatacaaattttaaaaatactacaatatttaactaaggcccaaccgatttccataatgtagcagttaccgtgttcacctcacactaaggcctagagtttgctctgatatgcatttggatgattaatgttatgctgttctttcatgtgaatgtcaagacatggagggtgtttgtaattttatggtaaaattaatccttcttacacataatggtgtcttaaaattgacaaaaaatgagcacttacaattgtatgtctcctcaaatgaaaattctttatctgaaattctaan

SEQ ID NO: 6501 - DNA, 490 bp, Homo sapiens
  misc_feature (1)...(490): n = A,T,C or G
ggaagatgccgngtggccccnaagtttcgangaangtcncggcncggaannnccgggncgacccacgcgtgcgcctctccagtgtatccacagccccgacctttgatgagaactcagctgtccagaaaaagacaccgtcctttaaagtgctgcagtatggccagacgtggtggctcacacctgcaatcccagcaccttatgaggccgaggcaggaggatccttgaggtcaggagttcgagaccagcctcgccaacatggtgaaaccccatttctactaaaaatacaaaaaattagccaagtgtggtggcatatgcctgtaatcccaactactcataaggccgaggcaggagaattacttgaacgcaggagaatcactgcagcccaggaggcagaggttgcagtgagccgagattgcaccactgcactccagcctgggtgacagagcaagactccatctcagtaaataaataaataaataaaaagcgctgg

SEQ ID NO: 6502 - DNA, 374 bp, Homo sapiens
ctgtactactgctgctagcaaataaccagcaaaatgtagaaaatgaaaaaccaattttctgtagacaacctggagaaaagagtgcctgcccctgacttagcggggcagagaatgacaatttttaaagtttgccttttctgaaggttgcttttagcccagtgctgcctcagcagcaaggggcaagcagagtcattgcgcatgtggcgcttccagctctacctgtggagctggcctgggctcagataatcccctgtgactggccattggagcggcggagctcctgaggctagttcacagcacccagaggtctcttacagtcaacagattgcatactgttgacagactgcaatccgtctgtgttccccacaccaact

SEQ ID NO: 6503 - DNA, 493 bp, Homo sapiens
  misc_feature (1)...(493): n = A,T,C or G
atgtccagggttggcnnnnnnaaggtccccagnanagnacncggcncggaantncngggncgacccacgcgtgccgtccatgcagtctgtctcatgattcgcatctcttaaccatgagtatgctactactcaaactgaattggcctataagaggctgctttgcaagtgtgattgaagttttgtaaactttgctttcactgatttatgaagagccacattggcccaaggagagaaggtgggtttgtgaaagcttatcattgtaacagtcctgctggccactcatgacctcagggatcagcaactctttcagccctgatgctgggaacaagaaaaaaaaaaaaaaagggggggccgttttaaagaatccttgagggggccaaatttaacgcgcgcttgcaaaacaaaatgtttttcctttagggggcgctttttttaacctacctgggaacttttggaaaggacctttatttggggggggtaaaataatggaaat

SEQ ID NO: 6504 - DNA, 415 bp, Homo sapiens
ctttcttaatggttaaataggattgttagcaactatgggtttgcagttttctgagtaggtgagttttgaatatgggtaaatcagaataatgagacaacttgttaatctctttaatactaaaaataaattactcttctatttcagggacttaggtaatttaaaataaaccttcaatttatggtcttctgttttgaagctcatgggaaaattgtgatcaaaagggctatgggaagggcagaccccgccaatgatttctcttcacctgtcttaagattaaataaaaaagagtgtcctggcagttatcttgaggtggggaaggaggtgatgaaacattagtttgtgaaatccaaggccctggctttctttctttcttttttttttttttttttaaaaacaagtttttttttgcccccag

SEQ ID NO: 6505 - DNA, 386 bp, Homo sapiens
  misc_feature (1)...(386): n = A,T,C or G
cccacgcgtncggtaatttgaaatgatgcctatggtttcctaacattttgtcttagtgttgattaaagacataataatgtgaaataatatggtaatactaaggaatgagaaagtggccttacaggtgggcaatgtaaactttcctgtagaaggattgaaagtaaatagatgtaagactagaaagtgaaacaattctgtactgtaagagcaatgttggctgtgttaaataactcgttcccaaacatcagatccacctggggagcccaaatatttacctacatttttggagttcttaggggctgaaacttacgcttgtgattttgtagtaacctattctagagaggagccaaatttgtgatactcaagagcttgtatgatttctgctt

SEQ ID NO: 6506 - DNA, 379 bp, Homo sapiens
  misc_feature (1)...(379): n = A,T,C or G
cctcctactcctcattgtacccattctaatcgcaatggcattcctaatgcttaccgaacgaaaaattctaggctatatacaactacgcaaaggccccaacgttgtaggcccctacgggctactacaacccttcgctgacgccataaaactcttcaccaaagagcccctaaaacccgccacatctaccatcanaaaaaaaaaaaaaaaattaaaaaaaaaaaaaaaaaaaaaaaaaggggggggcccctttaaaaaatcccctggggggcccaaatttaccgggggggggaaaaaaaaaattttttcctttaaggggggggaaataaaaaccccttggggatttttggaaaaaaacctttttttggggggggaaaaaaaa

SEQ ID NO: 6507 - DNA, 482 bp, Homo sapiens
  misc_feature (1)...(482): n = A,T,C or G
nttttatatcgacnctcctcggaactgcctaggtgtttcggttcgacccacgcggncggntggatttgtcttgctgtatgtgtcaggaaatttatacctattacattttccattttctcaaaatttaaggggcatgactaatatttaggtggaactttcctcataacaaatagtgtcatgaagaatgttgtagtgtgaagtttgtacatttcagggtcagatatacaatatgaactcttaatctacaggaatgagaatggaggatcattgaaggccatgatataaacaaatttgcatgttgaagcctgtataaaacatggtacagtgagtgaatatacccccatccccaagaacactttatacatattaaatggatatatgattactgtgcaaaaattcattctggaaatgaacatatatttgagcactaatatgtaatgtacacctgccctaaggagaaaataaattataaaactttttag

SEQ ID NO: 6508 - DNA, 465 bp, Homo sapiens
  misc_feature (1)...(465): n = A,T,C or G
gtgcggcgnnatttcattgaaagcttgcggaggatcagtcatcgaggnncgaccacgcgtgcgcataattatgctgttagtggacctctacctcttctcttccctctcccaatcacagtatactcagaatccccaggccctcgcatacattgtgtcggttcacattactcacagtaatatatggaagagttagacaagaacatgcagttacagtcattgtgagacgtgactctccagtgtcacgaggaaaaaaatcatcttttctgcaaacagtctctcatctgtcaactcccacattactgagtcaaacagtcttcttacataacaatgcaaccaaatatatgttgaattaaagacccatttataattctgctttaaatacatctgcttgctaagaacagatttcagtgctccaagcttcaaatatggagatttgtaagagggaattcaatattattctaattt

SEQ ID NO: 6509 - DNA, 489 bp, Homo sapiens
  misc_feature (1)...(489): n = A,T,C or G
atgtccagngttggcnccccnaagttttcagnagangncncggcncggaantnccgggncgacccacgcgtgcggagcatcaagactcgggatgaactggaaagaagttttgattgttgtggcttattcaacctcacaaccctggatgagcaagattatgatttctgcactgcaatctgcaagagccagagccccacatgccagatgtgtggagaaaagtttcttaagcattcagacgaagccctgaaaatcctagggggtgttggactcttctttagctttacagagatccttggtgtttggctagcaatgagatttcggaatcagaaggatcctagagccaaccccagtgcctttctatgagactttggatccttctgacttttgttctgatctctctaagctttctcttcctcccttatggaatatctagggtctgtaaccgttttggtttgagaaaaaagaaaggccccttgtcacatcctctaa

SEQ ID NO: 6510 - DNA, 483 bp, Homo sapiens
  misc_feature (1)...(483): n = A,T,C or G
aggggtggttttnnaaggccgtagagnaccgacncgacttnccgggtcgacccacgcgtgcgatttaaaatactatgttttgaaagtatatatcttgtatagttatctttttatatgaaaatgaactctaatacatatctttctttcagtgttcatatcacaaagctcaattaaatggtcctggaaaaaaaaaatcgttccatgttgttccaggtcccgttcaagaagttcttccagttcgcagtcaagatctcgttccagttccagagaacgttcgagatctcgtgggtcgaaatcaagatccagctccaggtcccacaggggctcttcttccccacgaaaaagatcttattcaagttcatcatcttctcctgagaggaacagaaagagaagncgntctagatcttcttcatctggggatcgcaaaaaaagacgaacaagatcacggtcacccgaaaggtgattggtgaaaacactaaacat

SEQ ID NO: 6511 - DNA, 410 bp, Homo sapiens
atcgcgcaagaggggctgctgtgcggtggcagtgctggcagcacggtggcggtggccgtgaaggccgcgcaggagctgcaggagggccagcgctgcgtggtcattctgcccgactcagtgcggaactacatgaccaagttcctgagcgacaggtggatgctgcaaaagggctttctgaaggaggaggacctcacggagaagaagccctggtggtggcacctccgtgttcaggagctgggcctgtcagccccgctgaccgtgctcccgaccatcacctgtgggcacaccatcgagatcctccgggagaagggcttcgaccatgcgcccgtggtggatgaggcgggggtaatcctgggaatggtgacgcttgggaacatgctctcgtccctggcttgccggaaggagcagcc

SEQ ID NO: 6512 - DNA, 385 bp, Homo sapiens
tcagccatgaagcacatggtcatcttgttcactcgcaaagaagagttggagggccagagcttccatgacttcgtagcagatgcggatgtgggcctaaaaagcatcgtcaaggagtgcgggaaccgctgctgtgcctttagcaacagcaagaaaaccagtaaggcagagaaggaaagtcaagtgcaggagttggtggagctgatagagaaaatggtgcagtgcaacgaaggggcttacttttctgatgacatatacaaggacacagaggaaaggctgaaacaacgggaagaggttttgaggaaaatctacactgaccaattaaatgaagaaattaaactagtagaagaggataagcataaatcagaggaaaaaaaaaaaaaagggc

SEQ ID NO: 6513 - DNA, 415 bp, Homo sapiens
  misc_feature (1)...(415): n = A,T,C or G
ctctaacccaggaggagcgtggggaaaggggctgtgggcctctcggggagcgagctgcgggtagcggcgcactgggtacaggcgcgcgcttggctgtcgcctctgccgctgtgtttgggaggactcgaactggcgccaggaaatattaggaagctgtgattttcaaagctaattatgaaaacatttatcattggaatcagtggtgtgacaaacagtggcaaaacaacactggctaagaatttgcagaaacacctcccaaattgcagtgtcatatctcaggatgatttcttcaagccagagtctgagatagagacagataaaaatggatttttgcagtacgatgtgcttgaagcacttaacatggnaaaaatgatgtcagccatttcctgctggatggaaagcgcangacactctt

SEQ ID NO: 6514 - DNA, 477 bp, Homo sapiens
  misc_feature (1)...(477): n = A,T,C or G
agtgatgaagacaatgagggtctnngaanncncgnncgacccacgcgtncgcctggatgctgggaaagatgaagatgaccttctgcttgagctatcagaaatgattgatagctgaaggtggtagtgaggacactgtaaaaaaaaaaatcgccaaaaagactggacttagtttcatctattgtaacatttacctgagatgatcatttctttagtctagaatttgccccaaatcagaagtatacctctgaattatctgaatgtgtcctggattccttggggtcagatttttaaagttactttataaccattttgtccatttgatgccattgtttatcatcttttgagaaaaaagttttgacatacccttctctccacaaaaaagagactgagagggagatcaagtgaaagggtgcaagcgaacttagtgactccttgaggtgtttgtcagttttggctttttttcttctttgccgaatn

SEQ ID NO: 6515 - DNA, 483 bp, Homo sapiens
  misc_feature (1)...(483): n = A,T,C or G
gcaggccaacacaacttaactcggtaggcccttggaatcggtnngacctgcgaacngcnccngaangnncgggncgacccacgcgtgcggnggcctgaacattctcctggaagtcagaggccaaattatctttccattttcttagattttagtaagaagttcgcaaatgacaagtgataacaaaggcagcaggatttttcatttctctgtaaataatggataaaatatgtgaacagaactatatctttcatctaaggccagttcaatttattaaaaataaaactaatgccttttaaaattgatcaaacctttgatacttgaactaaattttgcattagagactttttaaaaattgttcgcttttgctgaataaattgcaaatagagaagcttcattgacagtcagtccctctctgcttaatgcagatatgggtcctttcgtttatggcaaatgacttacctgacaagagttaattttgcctcg

SEQ ID NO: 6516 - DNA, 475 bp, Homo sapiens
  misc_feature (1)...(475): n = A,T,C or G
gaagccaaaaaaattaacctgaaagcgtgtggannttagngccntccggannccacccacgcgtccgtgccagacctggactaaactgcaccaaggaaacacccagcagggtctcctgtgagccggggaccatgcaggccgaaacctccaggcactgcgcccggcaggagtcaggagccagggactgtgcagcctggaacctccagtcactgtgcccagcagggtgggctgtgcccagcaggagtcaggctaagaaacgccaggtctgcctgttcttgctgggcaatggctgatggctgccagtttctgctgatacacaggtaggatgggacccttcatgaatatctgactttaataaggtgggaaggatatatttttttgtctatgttctgtttcaacttatgtagattattataaattgatgtaaaccacgtgagaggaaaatggtaataaaaaatgcaaagccccatcattn

SEQ ID NO: 6517 - DNA, 540 bp, Homo sapiens
  misc_feature (1)...(540): n = A,T,C or G
agtttttnnnnnaggaggccnngnannnnnnnaaattgatgcctgtggacgccactgatacgctcgaaccaccgtncggacagagngcaagacaatgactggcaaaaggacgcagctggaacgcaacatacagaccatcatcaacaccttccaccaatactctgtgaagctggggcacccatacaccctgaaccagggggaattcagagagctggtgcgaaaagatctgcaaaattttctcaagaaggagaataagaatgaaaaggtcatagaacacatcatggaggacctggacacaaatgcagacaagcagctgagcttcgaggagttcatcatgctgatggcgaggctaacctgggcctcccacgagaagatgcacgagggtgacgagggccctggccaccaccataagccaggcctcggggagggcaccccctaagaccacagtgggcaagatcacagtggccacggacacggtcacagtcatggtggccacggccacagccactaatcatgaggccaggccaccctgcctctacc

SEQ ID NO: 6518 - DNA, 444 bp, Homo sapiens
cttccaacttcagatctaactttggctacaacattccactaaaacatcttgcagacagagtggccatgtatgtgcatgcatatacactctacagtgctgttagaccttttggctgcagggttattggggctgtgccatcggcaaagccaggcaagctgcaaagacggaaatagagaagcttcagatgaaagaaatgacctgccgtgatatcgttaaagaagttgcaaaaataatttacatagtacatgacgaagttaaggataaagcttttgaactagaactcagctgggttggtgaattaactaatggaagacatgaaattgttccaaaagatataagagaagaagcagagaaatatgctaaggaatctctgaaggaagaagatgaatcagatgatgataatatgtaacatttactccagcatctattgtattgtaaatttct

SEQ ID NO: 6519 - DNA, 412 bp, Homo sapiens
aaatagctagcagagaagaattcaaatgctcctagcataaagaaaagacaaatatttatctttgaattatgtgaatgtgttaaatttttatgggtacactgaaactgtgtacatctgttacgcagtaataaaaattattattattatttttttgagacggagtcttgctctgtcaccaggctggagtgcagttgtgcaatcttggctctctgcaacctctgcctccctggttcaagcgattctcctgcctcagcctcccgagtagctgggattacaggcatgcaccaccatgcccagctaatttttgtgtttttagtaaagacggggtttcaccacattggccaagatggtcttgatctcctgacctcatgatccgcccacctcggccttccatagtgctgggattatcagg

SEQ ID NO: 6520 - DNA, 466 bp, Homo sapiens
  misc_feature (1)...(466): n = A,T,C or G
gaaaaaaatttgcttagagcgtctgaaccgcccggaattncgggtcgaccacgcgtccgaacccaaagaggatcgccaaggccgtgaacgataatttctgcaactgcctcctgctcaaagtcaaccagattggctccgtgaccgagtctcttcaagcgtgcaagctggcccaggccaatggttggggcgtcatggtgtctcatcgttcgggggagactgaagataccttcatcgctgacctggttgtggggctgtgcactgggcagatcaagactggtgccccttgccgatctgagcgcttggccaagtacaaccagctcctcaaaattgaagaggagctgggcagcaaggctaagtttgccggcaggaacttcagataccccttggccaaattagctgtgggcaagcaagccctttcggcacctgttggctcacagaccctcccctcgtgtcagctcaggcagtg

SEQ ID NO: 6521 - DNA, 393 bp, Homo sapiens
gaaatagaacctctaggcaccctcctcagtgtgggtgggctgagagttaaagacagtgtggctgcagtagcatagaggcgcctagaaattccacttgcaccgtagggcatgctgataccatcccaatagctgttgcccattgacctctagtggtgagtttctagaatactggtccattcatgagatattcaagattcaagagtattctcacttctgggttatcagcataaactggaatgtagtgtcagaggatactgtggcttgctttgcttatggtttttttttcttattcaagaaaaaagaccaaggaataacattctgtagttcctaaaaatactgacttttttcactactatacataaagggaaagttttattcttttatggaacactt

SEQ ID NO: 6522 - DNA, 515 bp, Homo sapiens
  misc_feature (1)...(515): n = A,T,C or G
naaattgaaggctntcggnaccggccgactgaagncgtccgaaccacccgtccgnggacgcgtggggtaaaacctgtagtgagttcttcagtcagtcaacactaaacctgttttgtaaatttgatgctagtattacactggactttctcaaaatgaagtacacctatatatgcatatagtatatgagcatgcgtatttgtacaaaagcccttcaaaaggagttcagcttttataaacaccaaaacactctctgcctgtaaaatgtttttgctgaaatttgtatcattaactctcaaatttacatcttcatgtttgagatacgcttttaggactgtctatgcatgtagactttggtcaactctctcctcctccctcaataaatcagttaacttaaaaaatatattgtgaccatttttataaaatacatgttcataaaacagatcaacatatttagcttatacagaaataaaattaagtcaatccactcacaaagaatttctattntgtaaaaatgg

SEQ ID NO: 6523 - DNA, 442 bp, Homo sapiens
gattcgcctgggccattacggcttccccaatcctgagtggtcagaagtctctgaggatgccaagcagctgatccgactcctgttgaagacagaccccacagagaggctgaccatcactcagttcatgaaccacccctggatcaaccaatcgatggtagtgccacagaccccactccacacggcccgagtgctgcaggaggacaaagaccactgggacgaagtcaaggaggagatgaccagtgccttggccactatgcgggtagactacgaccaggtgaagatcaaggacctgaagacctctaacaaccggctcctcaacaagaggagaaaaaagcaggcaggcagctcctctgcctcacagggctgcaacaaccagtagctcatggtgccttggaggagcctggcctctcagcctgcataacagactgaaatgtgctcaggc

SEQ ID NO: 6524 - DNA, 299 bp, Homo sapiens
cgcgaacgctcgaggtggccgcgcgcaggtgtttcctcgtaccgcagggccccctcccttccccaggcgtccctcggcgcctctgcgggcccgaggaggagcggctggcgggtggggggagtgtgacccaccctcggtgagaaaagccttctctagcgatctgagaggcgtgccttgggggtaccggaaaaaaaaaaaaaaaaaggggcggccgttttaaaggatccctgggggggcccaagttaacgcgggcatgcaaaagaaaagctctttccttatagggaggggaattataagca

SEQ ID NO: 6525 - DNA, 483 bp, Homo sapiens
  misc_feature (1)...(483): n = A,T,C or G
gtggggttttacccaggtgggccgnatcgacaggaannnngggnganccacgcgtgcgggcgcctgtcacccaggaactctactggcagattggcattgaagagttcctcatcggcggccaggcctccggctggtgtgctgagggttgccaggccatcgtggacacaggcacctctctgctcactgtgccccagcagtacatgagtgctcttctgcaggccacaggggcccaggaggatgagtatggacagtttctcgtgaactgtaacagcattcagaatctgcccagcttgaccttcatcatcaatggtgtggagttccctctgccaccttcctcctatatcctcagtaacaacggctactgcaccgtgggagtcgagcccacctacctgtcctcccagaacggccagcccctgtggatcctcggggatgtcttcctcaggtcctactattccgtctacgacttgggcaacaacagagtag

SEQ ID NO: 6526 - DNA, 489 bp, Homo sapiens
  misc_feature (1)...(489): n = A,T,C or G
agggtggttttnccncccagctccccgcaccgtcncgacccccngggnnganccacgcgtccgtgccagcacaggggccagggactcctggagcaggcacatagtgagcccgggcagccctgcccagctcaggcccctttccttccccattgaggttggggtaggtgggggcggtgagggctccacgttgtcagcgctcaggaatgtgctccggcagagtgctgaagccataatccccaaccatttcccttggctgacgcccaggtactcagctggcccactccacagccaggcctggccctgcccttcaccgtggatgttttcagaagtggccatcgagaggtctggatggttttatagcaactttgctgtgattccgtttgtatctggaaatatttgttctatagataagatacaaataaatattatccacataaaaaaaaaaaaaaaaaaaaaaaaaaggggcggccgctttaaagagaccctcgg

SEQ ID NO: 6527 - DNA, 494 bp, Homo sapiens
  misc_feature (1)...(494): n = A,T,C or G
gcgggggttttgatgatnccntcggtaccgactgaaatcctcggacgacccacgcgtccgatcattttcttggcagtgaaggactccagctgaggccactgctgcaggtgacttcagctccctcaacgtgcagatggtgccgcatgaagcacacagctctgggccaggggcgccaagtacagtcatttaactgaacaatgtacaactctatttttattttttccagcagagcaaagaaagactcagaaattcatcctcataactccatttcccagtagaacactccacattacgaaaacttcaagtatgtaattattttgttaagtgtgaaagtgcttgaaatccagacttcaggagaagagacagaaaacagcaccaagaatataagcctaaagcccatagcatttcactcatcagtttgtagtggttgaagccacacccaaagcaagaaccacagtgagctgatggatattttacaggaaaacttcaggttn

SEQ ID NO: 6528 - DNA, 494 bp, Homo sapiens
  misc_feature (1)...(494): n = A,T,C or G
ggggacgatcgcnggttgnnnnnnaagccccnagnangnaccggccnncngggnnganccacgcgtgcgagagaccagcccacccccgtgtccactgtgacccctgttcccatgctgacctgtgtttcctccccagtcatctttcctgtgccagagaggtggggctggatgtctccatctctgtctcaactttatgtgcactgagctgcaacttcttacttccctactgaaaataagaatctgaatataaatttgttttctcaaatatttgctatgagaggttgatggattaattaaataagtcaattcctggaatttgagagagcaaataaagacctgagaaccttccagaatctgcaaaaaaaaaaaaaagggggggcccgttttaaagaacccctggggggccccaatttaacgggggatggaaagttattacttttttccttaaggggagccctttaatagccaacctgggaatcttagcaaaagaccct

SEQ ID NO: 6529 - DNA, 488 bp, Homo sapiens
  misc_feature (1)...(488): n = A,T,C or G
atgcnnggtggnnnnnnaaaatcccannanagncncggcncggaannncngggncgacccacgcgtgcgggaggaattaatcactcagcaagtcccctacccgtaaagcaacactaaaacaggcaattatcaaaaacaaccatggccaggccctggaaattgccaaggcatacactaaattgagagttgttattcattttaaaaaaccttgaactttgggtaagaacagtggaagtccatggtgttcttagctagaactgctcctatcctccacctcagtctgcattgagagaattactatgctgaccacctcaagcttggtcagcacagtaatttctctcagggtggagaagatagtgaaaagcagcagctttgctgccagagggggctgacttgatagggagcagagcgtggaaaaacctcatgtccagtagcattgtcagtaacagtagtcatcttggtggcaacaaacagagaccagtggctca

SEQ ID NO: 6530 - DNA, 484 bp, Homo sapiens
  misc_feature (1)...(484): n = A,T,C or G
atgcntggttgnnnnnnaagttttnagagngncncgacnnnnngnnnngannangcgtgcgagaagtggattatccacataatcaaagcttatctttttaagcactaaaacttacttcattgtaactatttgaaagggaggtagttctttaaaaatatttctctacttttaaaacaagatacttaatatttttaatgttttttaaagcattaatggacatcatcattaatttcacctattatattgtacccacatattgatgtctccaggggctaataaagagtatttaccacttcactaaatgaccccaatttgccattttcaaacctatgtctcataccttttctgtcacctgaacttactgtcaggttggttggtaatgtgcctgcctcagccagttcactttcttaggtaattcactgcaggttaagaatccacacaaccaagttcatgggaattttgtgtaaaataaaagataacatgn

SEQ ID NO: 6531 - DNA, 489 bp, Homo sapiens
  misc_feature (1)...(489): n = A,T,C or G
atgctnggtggnnnnnnnaaattccccnaangtancggcncggaannnnngggnngacccacgcgtgcggatggttatgaatgttaatcaaagctatgacgcattcccttcaacatataggcatggaccaccaagctggtgtgggacattccatcatagtagggtgcactatatgtccggtgctatcttcgcactttccacagggtgaatatctagtacttttgacttgtctatgacaataggcacaccttcaagagcagtaagtaaacatgtaatcaagagaaagcaatactgtagcaggatggtcctccacctcatgttcaggcaggtaaataatttttatctcctttttacagatgagacaactgagatccagagaggtaagaaggttaagaatgttaattaaagctaagttggattcccttcaagatataggcatggaccaccaagctcttctaaaacaatttgatcacctaaaccacctgaatc

SEQ ID NO: 6532 - DNA, 487 bp, Homo sapiens
  misc_feature (1)...(487): n = A,T,C or G
atgctgggttgnnnnnnaagccccnagnancggcncgacttnccgggtcgacccacgcgtgcggaaggttaagaatgttaattaaagctaagttggattcccttcaagatataggcatggaccaccaagctcttctaaaacgatttcatcataataaagtccagtatctggtggttctatcttcgcactttccacagggtgaatattttgtacttttgtcttgtctatgtcaataggcacagcttcaagagcagtaagtaaacatgtaatcaagagaaagcaatactgtagcaggatggtcctccacctcatgttcaggcaggtaaataatttttatctcctttttacagatgagacaactgagatccagagaggtaagaaggttaagaatgttaattaaagctaagttggattcccttcaagatataggcatggaccaccaagctcttctaaaacaatttgatcacctaaaccacctgaatcctga

SEQ ID NO: 6533 - DNA, 484 bp, Homo sapiens
  misc_feature (1)...(484): n = A,T,C or G
atcgcggttgccccnaaaangtcananagncncgacncnaannnnngnnagacccacgcgtgcgggaagacgtgcgcccgagccccgccgaaccgaggccacccggagccgtgcccagtccacgccggccgtgcgggggggccttaagaacccgggaacctgtgccttcttccctcttccactcggagtcgcgcttcgcgcgccctcactgcagcccctgcgtggccgggaccctcgcgcgcgaccgccgaatcgctcctgcagcagagccaacatgcccatcactcggatgcgcatgagaccctggctagagatgcagattaattccaaccaaatcccggggctcatctggattaataaagaggagatgatcttccagatcccatggaagcatgctgccaagcatggctgggacatcaacaaggatgcctcgttgttccggagctgggccattcacacaggccgatacaaagcaggggaaaag

SEQ ID NO: 6534 - DNA, 422 bp, Homo sapiens
gaaagtgctgctgctgggtctgcagacgcgatggataacgtgcagccgaaaataaaacatcgccccttctgcttcagtgtgaaaggccacgtgaagatgctgcggctggatattatcaactcactggtaacaacagtattcatgctcatcgtatctgtgttggcactgataccagaaaccacaacattgacagttggtggaggggtgtttgcacttgtgacagcagtatgctgtcttgccgacggggcccttatttaccggaagcttctgttcaatcccagcggtccttaccagaaaaagcctgtgcatgaaaaaaaagaagttttgtaattttatattactttttagtttgatactaagtattaaacatatttctgtattcttccaaaaaaaaaaaaaaaaaaggggcggccgttttaaag

SEQ ID NO: 6535 - DNA, 495 bp, Homo sapiens
  misc_feature (1)...(495): n = A,T,C or G
tgcaggncccnagcncgttccgctgagntccttactgagagctatgcgaaccgccccggaatccgggtcgacccacgcgtccgcccgagcagcactagtcctgcctggtggccctgggagccaggatgggaccaaagtcaaggcctggggcatggctgagtaccccagacgtctggtccagggcagacacattcctctcagaagcccgtgtctcagtgcaggtggagccgtggggacagcgtgaaggtgtctccagccaggccccaggcactgggaggccctgggtctccccccagccacacccagtaggtgtggaggataaaggcttctgtggaaaaaaaaaaataaaaaaaaaaaaaaaaaaaaaaaaaaaaaaaaaggggggcggcgttaaggagttttcagtcggggcccacgcactgggaggggccgggggtccccccacccacacccaaaagggggggaggataaaaggttctgtggaaggaaacaaaa

SEQ ID NO: 6536 - DNA, 509 bp, Homo sapiens
  misc_feature (1)...(509): n = A,T,C or G
atacggaagccgtccgacgcctcggataccgtcggancacgcgtncgagggcggnttctccgacttctacaagctccggtggctgtaggccattctcagctgtttgaaacagcaggaaggatgcttcggggagcctgatgctgaagatgaagaatcatctaaagctattcaatatcagcagcatttttcgaggagagtgaagaggcgagaaaaacaatttccagatggctgctcctcccacaacacagccacagcagtggcagccctgggtggcttcctatacatcctggcagaataccccccagcaaacagagagccacacccatccacaccgccaccaccaagcagccgctgagacggacggttccatgccagctgcctggaggaggaacagacccctttagtcctcatcccttagatcctggagggcacggatcacatcctgagaagaaggcatctggaggataagcaaagccaccccgacacccatcttggaagcctgagtaggg

SEQ ID NO: 6537 - DNA, 272 bp, Homo sapiens
cccaggcagtctgtctcatgagtcggagctcttaaccatgagtatgctactactcaaactgaattgtcctatagatgctgctttgcaagtgtaattgaagttttgtaaactttgctttcactgatttatgaagagccacattggcccagggagagaaggtgggtttgtgaaagtttatcattgtaacagtcctgctggccactcatgacctcagggatcagcaactctttcagccctgatgctgggaacaagaaaaaaaaaaaaaaaggggg

SEQ ID NO: 6538 - DNA, 482 bp, Homo sapiens
  misc_feature (1)...(482): n = A,T,C or G
agggcgggtgnnnaagggttangagnactgaccggcttnngggtcgacccacgcgtgcgggagaacttccagaattatggcgaagtccgggctgaggcaggacccgcagagcacagctgcagccactgtgctaaagcgggcagtagaactagattcggagtcgcggtatccgcaggctctggtgtgttaccaagaggggattgatctgctcctgcaggttctgaaaggtaccaaagataatactaagagatgtaatctcagagaaaaaatttccaaatacatggacagagcggaaaacataaagaagtacttggaccaagaaaaagaagatggaaaatatcacaagcaaattaaaatagaagagaatgcaacaggtttcagttatgagtcactttttcgcgaataccttaatgagacagttacagaagtttggatagaagatccttatattagacatactcatcagctgtataactttcttc

SEQ ID NO: 6539 - DNA, 407 bp, Homo sapiens
  misc_feature (1)...(407): n = A,T,C or G
acacaggatcctcatctcaagttgctttgaggacaagaccactttcttgggcccctctgcacgtgggcagtccttccatgatgacagctgccctgttatggtgggattactttggagggtggatgtggcccagggaagtgtgtactctcagtgggcaggccttctgttttgatcattttgtagcccagcatctaacacaaggtgctcgtgactcaagaccttatgtaaagagggagggatgaacacaaggaagaaagttccccagaaatccttccttacacctgaaccgattccttcctatatgtcctcagcttgagtcattttctgtagctccctcttatttccatcagatacttggatacattntaaattgtatcccccaaatatcagtgagagaaatcacatcc

SEQ ID NO: 6540 - DNA, 406 bp, Homo sapiens
atttccttcaggctgaaaaacattctatagcatctcttataatacagatctgctggcaacaaattcttttttctttttaattggaaaatatctttgttttgtcttccatgtagcaggtactttttactagatattgaagtctgggtacacaggattttttttcttttagtcttttaaaaatatcactatagtattcctgcagttattgtttctgaaaaaaaaaaaaagggggggccgttttaaagaacccctgggggggcccaagtttacgcgggctggcagaggattagctttctccctatagggagccgttttataacctacctgggaatcttgggaaaggacccttccttcgggggggtgacataatggaacaacctccctacaaaaattaaaggctttaggg

SEQ ID NO: 6541 - DNA, 409 bp, Homo sapiens
gattcagttaatatagaaaaatatgtttggatcaatacttggcacaggatggtactgtcctgggagctgggcctgaaaataagctgtagaaggaaacataagacctctccttttgcaataacaagaaaccattagataaatcaaaatcaaacactcttgtgaaattgttgacacccataatgtgtaaaaagctaaattccagaagaaccagcccttcctgcgtgatcaagggccagttgttgaggttgaggcccagcaaggaaaagagcaagccccccgcagaggccagtcttcgccaaatcaaggagaaagcaggcaaatgttgccagtcagccaggcttgtgtgtgggtttggctgtggaggaactccagtgtgctaagggttctgtctgcctctctcctatgggaa

SEQ ID NO: 6542 - DNA, 471 bp, Homo sapiens
  misc_feature (1)...(471): n = A,T,C or G
ggaggtttttcttcatcctgcgtagaacnnagcaannnangggncgacccacgcgtccgttcacatattcaacacctttaaatgttgtaatcttattatgttaagcgtgcctctgcaagatactaacacagaggtcatgttaagaaaacagttgaggactcanaagtcacttgaaaatgcactttcctaacagcgaattcacaaccctgaacagcagcatttttggaaggcaaactgctcgtgatggtacaatgtaaatggggacttctgtaaagttctcactttcggtccatgtggcttatctttacattttgaacatcaaagaagtctttacaacctgaatccaggtctaaaacacactagagtagctggtgactataaataatatttaaaaatgctgtgtctacaccatcaagactgtgtctacactatcttggctgaacgagaagagatgtacatgctgggtggccn

SEQ ID NO: 6543 - DNA, 433 bp, Homo sapiens
  misc_feature (1)...(433): n = A,T,C or G
tcgtctctgcaagcttggacgccctgggatggattcctactcctcttcctccgcggcgggtttgggtgcaggggacccgcagttgcatcatttcatcgaggtagagactcaaaagcagcgcttccagcagctggtgcaccacatgactgaactttgttgggttcctgtggcctagccggatgggagaagggtgactccgcttctctggggactgtcattccggacctcggctttgttggtgtagaggactgtgtatcaaagaagacttatgccactggacacccagcactttcaggcacccgaggttgaagctgcctagtgctggtcaccaagactgatcggagcccccagtactgggattttatttttggcagcccgagtccccaaagtcagtgaatcantgaatctgctattcctggactcctcgggattn

SEQ ID NO: 6544 - DNA, 408 bp, Homo sapiens
ctctaccccacatgacttcacttggaataacgaggtccccaggctgccttcctaggtcaaaaggaggaaaaggaggctctctcccccatgctgtcttggacacaaatgtcagggcctatagctgacctgtcacctgtgagagggggtttgattctgtcccgaggcctctggacaccactggggttcagggtgtggctttggaccttggagggtgggcaggtgtcatgggagctcctggcagaaggggtcggaaccctcaaagatggtttgaggaatgcagctggtgatggtctgactgggccgaaggggaggatgaggccacagatgctgagagtgattctctatcagccggcggggccgagggctcttcagacaaggctctggccacagagccaaaaccactgctca

SEQ ID NO: 6545 - DNA, 261 bp, Homo sapiens
aagagggggtgctggtttgagggccgccactgcagttctgctaggtctgcttcctgcccaggaaggtgcctgcacatgagaggagagaaatacacgtctgataagacttcatgaaataataattatagcaaagaacagtttggtggtcttttctcttccactgatttttctgtaatgacattatacctttattacctctttattttattacctctataataaaatgatacctttcatgtaaaaaaaaaaaaaaaaaggggg

SEQ ID NO: 6546 - DNA, 438 bp, Homo sapiens
  misc_feature (1)...(438): n = A,T,C or G
cgaacttctggaaatgggagtgctcagtctgtgcaagtcagaatccttgaaactgggccttttctaagtctgtgtcctaatgaagattccagttttcacagtagaagttgcatcttatttaatgactctgatacattgcaagcactcagtaaatatcagcaaatagtttatgttaattgtgtcaacagatggatcactggaatgtggggattctgaaacagaaatgaaactgtccttttgacaactctcttatataataaagtatcaccggcttgtgtatganaaaaaaaacctcaaaaataaaaaaaaacaactaaaaaaaaattaaaaaaaaaaatnnaaaaggggccggtttttaaaaatttctcgggggggaccccgccctcccggcggctcacaaatattatttttttttttaggggggggtattaaaaagaa

SEQ ID NO: 6547 - DNA, 428 bp, Homo sapiens
  misc_feature (1)...(428): n = A,T,C or G
ctctgtgcttcctgagagtgcccatcggctgaagtcaagcatcgggctgatcaatgaaaaggctgcagataaggtgggatctacccagatcgtgaagatcctaactcaggacactcccgagttttttatagaccaaggccatgccaaggtggcccaactgatcgtgctggaagtgtttccctccagtgaagccctccgccctttgttcaccctgggcatcgaagccagctcggaagctcagttttacaccaaaggtgaccaacttatactcaacttgaataacatcagctctgatcggatccagctgatgaactctgggattggctggttccaacctgatgttctgaaaaacatcatcactgagatcatccactccatcctgctgccgaaccagaatggcaattaagatctggggtcccagtgtcatn

SEQ ID NO: 6548 - DNA, 416 bp, Homo sapiens
tagctaggactacaggcgcccgctaccacgcccggctaatttttttgtagttttagtagagacggggtttgcaccgtgttagccaggatggtctccatctcctgacctcgtgatccgcccgcctcggcctcccaaagcgttgggattacaggagtgagccaccgcgcccggccggtcacagtgtccatgtaactaactcctggttaagaggatatggatagaaggcacatgttcaacttctggcttctgtccttgaaaagagtgatgattccatcctttgctgtcttccttcccgctgactggaatgtggacttggtagtgagctaccttggactatgtggatgaagacaaagataaaaggaaccaaggactctgatgattctgtagagaagaggaaccgtagctgctcaaacgtt

SEQ ID NO: 6549 - DNA, 432 bp, Homo sapiens
tgaagatctctaccatttaattaagaaagcagttgctgttcgaaagcatcttgagaggaacagaaaggataaggatgctaaattccgtctgattctaatagagagccggattcaccgtttggctcgatattataagaccaagcgagtcctccctcccaattggaaatatgaatcatctacagcctctgccctggtcgcataaatttgtctgtgtactcaagcaataaaatgattgtttaactaaaaaaaaaaaaaaaaaaaaacgaaaagataaaaaaaaaaaaaaaaaaaaaaaactccctcccaaaaggaaaaaaaaaaaatataaaggcctatttcctgggggggggggttttttttttttcctttggggggggcgcgaccgtcttcctggggtgaaaaataatttttttttttttatggggggggaat

SEQ ID NO: 6550 - DNA, 432 bp, Homo sapiens
  misc_feature (1)...(432): n = A,T,C or G
ctgttttgtttcttgtctttgtgttctgtggtacttgctgagagaaaagaaaagtgagccaagcagaaggaggtgggaaaacggacccaaaccccagtgtgccctgccccatgcctttcctttagtggtgggaaacccttatcttgcaaagtgaatgtgtccccttccccaccctctagtgtatttcacagaaaacaaaacctcccaataaaacggttgaaacctgaaaaaaaaaaaaaaaacaaaaaggacatgaaacaaaaaaanngggggggggcgttaaaaaaatttcttgggggggccaaaatttcccggggccaacaaataatattttttttccataaagggggccaaaaaaaaaacccgcggggactttttaaaaaaaaacctttttttggggggggaactaatggggccaaccccccccaagaa

SEQ ID NO: 6551 - DNA, 445 bp, Homo sapiens
  misc_feature (1)...(445): n = A,T,C or G
ctttgatgaaatttcaggaaccatagccattgaaatggatgagggaacctatatacatgcactcgacgatggtctttttaccctgggagctccacacaaagaaggggaaaatggctttgttggcctcaaatggctgctttattagatgcaatgaagcaggggacatagaagcaaaaagtaaaacagcaggagaagaagaaatgatcaagattagatcctgtgccnnnnnnnnnngnnnnnnacacaaaaaaaaagaaaaaaaaaaaaaaaaaaaaaaaaaggggggtttattaaaaaaaataaaaaaangnnacattttgggggggggggccatcaaaaggagtcggggggggggacaaaatattgatgctggggcgatatattttttttttttttagagggggttttaaaaaaaccggcgggggtgttattgaaaaaaaacttt

SEQ ID NO: 6552 - DNA, 408 bp, Homo sapiens
aaaaacaaaaacaaaaaacaaaaaaacacaaaaccctggagatcaagttctagctcactcatgacccccagcaagagactttgcctgtttgtgtctctatttcctcatctgtgaaatggggagaatagtacttatctcataggcttgtttttacatccagtgatttaattcttgtaatgggtttagaacaaggcctggcacttagtatgtgctcaataaggtgatgatgatcttaataatgatgataataatgctttattggcatttaaatgaaagagtttccatataagttaaaaagctagccaggcatggtggctcatgcctgtaatcccagcgctttgggaggctgaggcaggaggatcacttgagcccaggagtttaagaccagcctgggcaacatggtaacac

SEQ ID NO: 6553 - DNA, 407 bp, Homo sapiens
cggacgcgtggggcatatttgatagatttcattccactcaagatggtctcattcgtgctcaaattttctcctcctttactcatggaaggctcttaaatttagcaaagttcttttgacactgctctggtagtcttttggagagcctccacactatctggcatgacaaggtgtcccaggcctaggctgtatatctactgccctggaccaggaatcaggcatttgtctgaagtgaactgattaactgattacttttagtgggaaattgtatctgaacaccataaattgggttcaaggtatgctcattagtactgtattgatctttgcttccagacattttagaaagcagagccagaaaaataatagatacatgaaagatgatagatagagataaatggatgaaataagta

SEQ ID NO: 6554 - DNA, 440 bp, Homo sapiens
  misc_feature (1)...(440): n = A,T,C or G
aataaagaaaaaaaagagaggtggaagaagcaaggtgtgctggcattagttgaataagaaggccataaattacgagcaagttgaggaactcaagatgtattttgatctagaagcaatagtgtgggttaccatgccatatcacgaaagactacctagttcattatgcattattaaaaatagctaacatttttgatcattaattttgaaccaggcagcatgccaagtaccttacattcataatctttttaaaaacaaccttggtgtataatttacataaactgtattcatttaaagtacacaatttgatgacttttgacagatgtagacactcactgaaccataatcaagatccagaaccttcccacaccccagtagcaggttacgccatgtcaccgagccccattgatttccagagggtcttagtcctgganagtcaggcn

SEQ ID NO: 6555 - DNA, 453 bp, Homo sapiens
  misc_feature (1)...(453): n = A,T,C or G
gcgcggtttttactgaacgttacctccgcaangcnngaannncggacaccacgcgtcggtgaagaatatgcctaaatattactagatcttttttttaagagctgatatcccttaacatgttctgccttacctgattgagatcttttttgcgtaaaaattactggccttatgctttctgcataattatagagagccaaaacctgttttaggttaatcacctctggcaaaataaatgataaaagcatatcttttgtaagcagaatgatattacagaagttaacttataaatctaagtgtattaaagacacttaggaaatttatgataatgctgggtcagcattacagttttaactttttacagcttttcatatgctttttttgtgattttgctgaagaaaattaacagttggcatttggcttatgtcaagtataaagctggtgacaagtatatat

SEQ ID NO: 6556 - DNA, 437 bp, Homo sapiens
  misc_feature (1)...(437): n = A,T,C or G
acgaagtgaacacatgctgttggaaaaatggtgttgatagattagctcaaccatcaattaataaaaaacacattttctgtgaagcacatagggaggccaataaaatgagggatgcctgtatgtagcttctggaataaatctctaatcctggaaaagacaatcaaaatacagataatacataattaattaatctttttagctttagtgtcctttgttaatgaatttcctattttacagatgagaaggtaaatgatatgaagataatacactaaaatggtaaaactagaattctatccccagtcacgttacttgaaagtacagtagtatttctattatgcttgcctgtctcctataactttattttgctaaagttatttttgatatttcataatattgaagccctttcataaatcaataaagcaaaacaaaacagaaan

SEQ ID NO: 6557 - DNA, 417 bp, Homo sapiens
  misc_feature (1)...(417): n = A,T,C or G
gccgcgcgcgggaagccgcggaactgcgccggaaagtcccccggctctggggccccggtgacccagagtaagcctccaagaaggaggaggaggagagaaaggcggctcttcccgtgcccctaccagaggcttcggtgggcccaccttgtgacctccgcggccggcccctcagtggaactgcgtcccacgcggggggcgtcccgaccgtgggggccgcggcccgcgctgaccctggacgtcgccgcgcagcccctggttccccaaggcagaggaaataccctggtggagccctccttccatagaaccagagatggcatctgtggatttcaagacctatgtggatcaggcctgcagagctgctgaggagtttgtcaatgtctactacaccaccatggataagcggcggcgtttgctgtn

SEQ ID NO: 6558 - DNA, 478 bp, Homo sapiens
  misc_feature (1)...(478): n = A,T,C or G
tggggggttttnnaagggttangagnanctggcncgacttnnngggnnganccacgcgtgcgagcacgcatttggctctgtgccctttggctatggggtccgggcctgcctgggccgcaggattgcagagctggagatgcggctactcctcgcaaggctgatccagaagtacaaggtggtcctggccccggagacgggggagttgaagagtgtggcccgcattgtcctggttcccaataagaaagtgggcctgcagttcctgcagagacagtgctgagctgagtctccgccttgctggggcttgtcctataggctccagctctggcacagtggttcctggctgctgccatgtctcagatgaggagggagagaaggaggccgccagactcgagaggtgggaggaactccttgcacacaccctgagctttttgcacttctttcatgttgagcaactccctctcactaaaangcacccctt

SEQ ID NO: 6559 - DNA, 398 bp, Homo sapiens
cagaagcagagttctggggtgtctccatcatggcctggacccctctctggctcactctcgtcactctttggataggttctgtgatttcttctgagctgactcaggaccctgctgtgtctgtggccttgggacagacagtcagaatcacatgccgaggagagagcctcagaagttattatgcaagttggtaccagcagaaggcaggacaggcccctcttcttgtcttctataggaaaattaatcggccctcagggatcccagaccgattctctggctccagatcaggagacagatgttccttgaccatcactggggctcagccggaagatgaggcggactattattgcacctctcgggacagtcatgtggacccctgggtgttcggcggagggaccagg

SEQ ID NO: 6560 - DNA, 464 bp, Homo sapiens
  misc_feature (1)...(464): n = A,T,C or G
cagagcggttccctcaggggcattgcagtggtcgtcgaancgcncgaccacgcgggcgttcctccgacggaagaggggccggacgccaccttccccaggaccattcccctgatccaacagttgctagaggccacggagctcacgcaggacccggccgcctactcccagctggaggccgtgctggtctacaccgccgagcgggccaagttcgccaccggggtagagcggcaggactggatggagctgttcattgacacctttaagctggtgcacagggacatcgtgggggaccccgagaccgcgctggccctctgctaaagcctgggcacccgcccagccgggctgggccctccctgccacactagcttcccagggctgcccccgacaggctggctctcagtggaggccagagatctggaatccggggcagcggggctacagtccttccaggggctctgaggcag

SEQ ID NO: 6561 - DNA, 481 bp, Homo sapiens
  misc_feature (1)...(481): n = A,T,C or G
cgatgagcggttccctccaggcnccctgcgcaagtgagtctggagaaccgccccggaaancccggggcgacccacgcgtccgcccacgcgtccgcacccacccggactcagaatctcctcagacgccgagatgcgggtcacggcgccccgagcgcctcctcctgctgctctggggggcagaggccctgaccgagacctgggctggctcccactccatgaggtatttccacacctccgtgtcccggcccggccgcggggagccccgcttcatcaccgtgggctacgtggacgacacgctgttcgtgaggttcgacagcgacgccgcgagtccgagagaggagccgcgggcgccgtggatagagcaggaggggccggagtattgggaccgggagacacagatctgcaaggccaaggcacagactgaccgagaggacctgcggaccctgctccgctactacaaccagagcgaggccgggtctcn

SEQ ID NO: 6562 - DNA, 408 bp, Homo sapiens
aagatggcggagtaaggcgtgccgctgcaaactggcctctgggccgggggcgaacaagccccgggggggcgattgcatctgttggaccgtgcgaggagaaaaaaaaaaatatcggccagaggagaggaactaaccgaacattcttcctccctaccttatagaggggagtgggcatctacactaaagcaaagtgttaggcgcgtccgtgcgaagagaccaccaaacaggctttgtgttccttatcacaggaagaaaattttccttgacctttaggtgcttttatattcatctcaaaaacaaaattctgaactcatgacttggcaagctgaagtgcaatggggcagtctcgggtcactgcaacctccgcctcccgggttcaagcgatttttctggctcagcctcctagtg

SEQ ID NO: 6563 - DNA, 462 bp, Homo sapiens
  misc_feature (1)...(462): n = A,T,C or G
ctttgaacgcttanggngagtcctcgaanaccccggncgacccacgcgtgcggacattcagccttccccgcggagggcccggagcagccagaacatccccgtgcagcaggcctggagccctcactccacgggcccaactggggggagctctgcagagacggagacagacagcttctccctccctgaggagtacttcacaccagctccttcccctggcgatcagagctcaggtagcaccatctggctggaggggggcaccccccccatggatgcccttcagagccccagcgcgcccctggccctggttctgtcccagctgatggatggcttctccatgctggagaagaagctgaaggaagggccggagcccggggcctccctgcgctcccagcccctcgtgggagacctgcgccagaggatggacaagtttgtcaagaatcgaggggcacaggagattcacag

SEQ ID NO: 6564 - DNA, 344 bp, Homo sapiens
cacatgtcactgatggtcagattccaaagtcctttctttatactgttgtggacaatctcagctgggtcaataagggcaggtggttcagcgagccacggcagccccctgtatctggattgtaatgtgaatctttagggtaattcctccagtgacctgtcaaggcttatgctaacaggagacttgcaggagaccgtgtgatttgtgtagtgagcctttgaaaatggttagtaccgggttcagtttagttcttagtatcttttcaatcaagctgtgtgcttaatttactctgttgtaaagggataaagtggaaatcatttttttccgtggaaaaaaaaaaaaaaagg

SEQ ID NO: 6565 - DNA, 472 bp, Homo sapiens
  misc_feature (1)...(472): n = A,T,C or G
cggagcggtttcctcaggggtcctctctatgcgtctgagaaccgcnccggaatccgggtcgaccacgcgttcggagacagcaggtatagagaagacgtaactgagacccatattggtggaacctcttgtctgaggtctctcctgcgtgaaggagtgtgttcacgagttcagtccaagatggtcaggctccgaaccctacttctgcggggggacatgatgccgagctgtacttattcctgcagatgcatccgcggccccaacgtggaggatggcaggtggaatggggtccgttcctacctgcgcttcttgtatgaggattgtgcaggcactgctctcagcgacgaccctgagggacctccggtcctgtgcccccgccggccctggccctcactgtgttggaagatcagcctgtcctcggggaccctgcttctgctgctgggtgtggcggctctgaccactggctatgcagtcn

SEQ ID NO: 6566 - DNA, 406 bp, Homo sapiens
cttggctgtctgtcatgtgttgaagtccatggttgggtcttgtgaagtctgaggtttaacagtttgttgggctggagggattttcttacagcgaagacttgagttcctccaagtcccagaaccccaagaatgggcaagaaggatcaggtcagccactccctggagacacagccttctggctgggactgacttggccatgttctcagctgagccacgcggctggtagtgcatccttctgtgaccccgctgtggtaagtccagcctgcccagggctgctgagggctgcctcttgacagtgcagtcttatcgagacccaacgcctcagtctgctcatccgtaaagtggggatagtgaagatgacacccctccccaccacctctcataagcactttaggaacacacagag

SEQ ID NO: 6567 - DNA, 465 bp, Homo sapiens
  misc_feature (1)...(465): n = A,T,C or G
cggcggnggttttaaaggacgcctgcggaactgacacccatcgacggnncgacccacgcgtncgggatatcagacagtcctcccctgaccctcccccttgaagatatcacttcccaaacagagccgaatactctatatgtatagacacagccctgtacagcatttttcataagttatatagtaaatggtctgcatgatttgtgcttctagtgctctcatttggaaatgaggcaggcttcttctatgaaatgtaaagaaagaaaccactttgtatattttgtaataccacctctgtggccatgcctgccccgcccactctgtatatatgtaagataaacccgggcaggggctgtggccgtctttgtactctggtgatttttaaaaattgaatctttgtacttgcattgattggataataattttgagaccaggtctcgctgtgttgctcaggctggtctcaaactt

SEQ ID NO: 6568 - DNA, 417 bp, Homo sapiens
tgacagggaatggattccaaacaccagtgtgtaaagctaaatgatggccacttcatgcctgtattgggatttggcacctatgcacctccagaggttccaagaagtaaagctttggaggtcacaaaattagcaatagaagctgggttccgccatatagattctgctcatttatacaataatgaggagcaggttggactggccatccgaagcaagattgcagatggcagtgtgaagagagaagacatattctacacttcaaagctttggtccacttttcatcgaccagagttggtccgaccagccttggaaaactcactgaaaaaagctcaattggactatgttgacctctatcttattcattctccaatgtctctaaagccaggtgaggaactttcaccaacagatgaaaatggaaaa

SEQ ID NO: 6569 - DNA, 492 bp, Homo sapiens
  misc_feature (1)...(492): n = A,T,C or G
ggggatacggagggccctcgtanntacagagtgngactagnancngncncnnannnnngggnnganncacgcgtgcgggcggcagtcggctccctcgttgaccgaatcaccgacctctctccccagctgtatgggcaaaatgtcgctttgtaacaagctgacgctggacaagctggacgttaaagggaagcgggtcgttatgagagtcgacttcaatgttcctatgaagaacaaccagataacaaacaaccagaggattaaggctgctgtcccaagcatcaaattctgcttggacaatggagccaagtcggtagtccttatgagccacctaggccggcctgatggtgtgcccatgcctgacaagtactccttagagccagttgctgtagaactcaaatctctgctgggcaaggatgttctgttcttgaaggactgtgtaggcccagaagtggagaaagcctgtgccaacccagctgctgggtctgtcatcct

SEQ ID NO: 6570 - DNA, 472 bp, Homo sapiens
  misc_feature (1)...(472): n = A,T,C or G
catgcgcggttccctcaggggctctctgcaatngctagcagcanccgccncgacccangcgggcggtccgaaaggggagccgcttccctgaagctctgagattggcattgatgctcaatgacatggagttggtagaagacatcttcggctcctgcaaggatgtggtagtacagaaacagatggcattcatgctaagccggcatggggtgttcctggagctgagtgaagatgtcgaggattatgaggacctgacagagatcatgtccaatgtacagctcaacagcaacttcttggccttagctcgggagctggacatcatggagcccaaggtgcctgatgacatctacaaaacccacctagagaacaacaggtttgggggcagtggctctcaagtggactctgcccgcatgaacctggcctcctcttttgtgaatggctttgtgaatgcagcttttggccaagacaagctgcn

SEQ ID NO: 6571 - DNA, 345 bp, Homo sapiens
acctacgcacacgagaacatgcctctcgcaaaggatctccttcatccctctccagaagaggagaagaggagacacaagaagaaacgcctggtgcagagccccaattcctacttcatggatgtgaaatgcccaggatgctataaaatcaccacggtctttagccatgcacaaacggtagttttgtgtgttggctgctccactgtcctctgccagcctacaggaggaaaagcaaggcttacagaaggatgttccttcaggaggaagcagcactaaaagcactctgagtcaagatgagtgggaaaccatctcaataaacacattttggataaaaaaaaaaaaaaaagg

SEQ ID NO: 6572 - DNA, 394 bp, Homo sapiens
gaggaaaagcaggcctggcctcattggtcccctggagatgtctgtagcagtcagctccagcttgggcctggggaagcagcctgaccaaggcgctcaggtgtgcctgttacaagaagaacctgcagaacgataattcgcgcatggagctgtgataacactaatgatgattctattttttttttacacagcctcaaaaatgtggccgaagggagttgaattttttcgcacatccttaagctttacttaagggggaatggatttccctctggggggaataggaaaaaaacaggaaggtttttattgtcgaacaaaaaacttcctcccttataaaaatataaccctcatgaatttatgcctaaggaaacctgccttttaaaaagctttcttttgttgc

SEQ ID NO: 6573 - DNA, 491 bp, Homo sapiens
  misc_feature (1)...(491): n = A,T,C or G
ggccccttttgaagcccttggtacggagttgncgaggaagggtccgaccanncgtgggnccacgcgtggggatgctatgaagcactatcagggggttccaccactgatgtcttttaagacttcaccggaggcattgctgaggggtatgagttgaagaagccccctcccaacctgttcaagatcatccagaaagctctgcaaaaaggctctctccttggctgctccatcgacatcaccagcgccgcggactctgaggccatcacgtttcaaaagctggtgaaggggcacgcgtactctgtcaccggagccgaggaggttgaaagtaacggaagcctacagaaactgatccgcatccgaaatccctggggagaagtggagtggacagggcggtggaatgacaactgcccaagctggaacactatatacccagaggagagggaaaggctgaccacacagcctgaagatggagaaatctcgatgtctttcaatgn

SEQ ID NO: 6574 - DNA, 415 bp, Homo sapiens
cactaagcacttggtatttggccatctccattctgagcaccaaacggttaacacgaatgtccactagaactctgctgtgtgtcacccttaaatcagtctaaatcttccagacaaaagcaaatggcatttatggatttaagtcattagattttcaactgacattaattaatccctcttgattgattatatcatcaagtatttatatcttaaataggaggtaggatttctgtgttaagactcttatttgtaccctataattaaagtaaaatgttttttatgagtatcccttgttttcccttcttaaattgttatcaaacaatttttataatgaaatctatcttggaaaattagaaagaaaaatggcaaggtatttattgttctgtttgccataatttagaactcacacttaagtatt

SEQ ID NO: 6575 - DNA, 407 bp, Homo sapiens
  misc_feature (1)...(407): n = A,T,C or G
gggacagtggcccaagcaaggcctcactcgcagttacttcttcaagagctgcctgcacactgtctgggagcatctgccttgtgcctggcactctgccggtgccttgggaaggtcggaagagtggactttgtcctggccttcccttcatggcgtctatgacacttttgtggtgatggaaagcatgggacctgtcgtctcagcctgttggtttctcctcattgcctcaaaccctggggtaggtgggacggggggtctcgtgcccagatgaaaccatttggaaactcggcagcagagtttgtccaaatgacccttttcaggatgtctcaaagcttgtgccaaaggtcacttttctttcctgccttctgctgngagccctgagatcctcctcccagctcaagggacaggtc

SEQ ID NO: 6576 - DNA, 413 bp, Homo sapiens
gaatctcaccatggcctggacccctctcctgctccccctcctcactttctgcacagtctctgaggcctcctatgagctgacacagccaccctcggtgtcagtgtccccaggacaaacggccaggatcacctgctctggagatgcattgccaaaaaaatatgcttattggtaccagcagaagtcaggccaggcccctgtgctggtcatctatgaggacagcaaacgaccctccgggatccctgagagattctctggctccagctcagggacaatggccaccttgactatcagtggggcccaggtggaggatgaagctgactactactgttactcaacagacagcagtggtaatctttgggtgttcggcggagggaccaagctgaccgtcctaggtcagcccaaggctgccccct

SEQ ID NO: 6577 - DNA, 399 bp, Homo sapiens
gcgaccgtggggatcgtcaatatttaaatagatcacatcatgcgtgagtacaagctagtggtggttggttcaggaggcgttgggaagtctgctctgaccgttcactttgttcagggaatttttgttgaaaaatatgacccaccgatagaagattcctacagaaagcaagttgaagtcgattgccaactgtgtatgctcgaaatcctggatactgccgggacagagcaatttacagcactgagggatttgtatatgaagaacggccaacgctctgcactagtatattctattacagctcagtccacgtttaacgacttacaagacctgagggaactgattttacggcttaaggacacggaagatgttccaatgattctggttggcaataaatgcgacctg

SEQ ID NO: 6578 - DNA, 417 bp, Homo sapiens
caaggttgggagattgagaccatcctggctaacacagtgaaaccctgtctctactaagaaaatacaaaaaattagcttggcgtggtggtgggcgcctgtagtcccagcagcttgggaggctgaggctggagaatggtgtgaacccaggaggcggagcttgcagtgagccaagatcgcgccactgcactccagcccgggtgacagagcaagactccgtctcaaaaaaaaaaaaaaaaaaagggggggccgttttaaagaatccttgggggggccaaagttaacgggggcatgcaaggtaaaatttttttccttatggggggccgtattaaaacctacttgggaattttggaaaagaacctttattttggggggggaacaaattgggacaacctccctacaaaaattaaaagttttagg

SEQ ID NO: 6579 - DNA, 485 bp, Homo sapiens
  misc_feature (1)...(485): n = A,T,C or G
atttatcccgatccgtccgtacngtcccganctccctgaaanncacgcgnncgctttgggatggtcttagaatatttttctgataacttgttccttttcctgactcctccttgcaaacaaaatgatagttgacactttatcctgatttttttcttctttttggtttatgtctattctaattaaatatgtataaataaagttacattttagtctgtcnaaaaaaaatataaaaaaaaaaaaaaaaaacaaaaaaaaacctacccccaaaaaaaaaaaagaaactctgttggggatctcttactaaaaaggggggggggctctttaccattcttgggggggaaaaaaataaccccttctttgtggtggggaagtccttttttttttgggggtggtttttataagcaacttccccctctgtttagggaacctatacttcggggaacataaaaagggtaaaatctccacccataatttaaattttctgg

SEQ ID NO: 6580 - DNA, 414 bp, Homo sapiens
atttctctgctcagtaagaagggataacccatcagcaaggtaccaggtgttcttgaggtgggttgtttagaaaccttcctcctggtgctgcagaattctaaccctgttcaggactttatgtcctctgtttaagactcagaatgtatcttcttatggatgatgtgacctgaatatctgacaggacattttagggggatgggctgcaatggggaacagggtactgtcatcacagtatctttggagcaagatctaagattaaaatgtggcttctcatactgactgtgtgaattcagacgccttacttaaattttaaattctctgagctctgggaatttataaaatggaaataatggcacaaacgcatagcttggttgtaattgcattattctccctgtattccgacttctgtttcaa

SEQ ID NO: 6581 - DNA, 491 bp, Homo sapiens
  misc_feature (1)...(491): n = A,T,C or G
nnnnaacaggtagcctngtaaaacatgtagcgatcgnnanagccncnaannnnngggnngacccacgcgtccgcccagggggtccccagcaaccaggcctggcctcctggtgtttgcggtcacagtgggccctgggcatgggcaccgaggctgaccctgaggtgctgctgctgggtctgtcttggctctggggtgtgctgggagggtcaccaagtcccttttccttcctgtgccctctgaaagctaagtgtctgtgtggctgtggagctcgagggtctgtgaataaaggcggcggcactgggaaaaaaaaaaaacttaaaaaaaaaatacaaaaaactgataaacaaaaaaaaaatacctgggaacattctatatatcttttcgaagtaggggactgttataatagtgactgtggtcttggggtgtcgggcccccctttatgagcgtttgaaggtgctgtacctttactttattactgtatattatttttt

SEQ ID NO: 6582 - DNA, 487 bp, Homo sapiens
  misc_feature (1)...(487): n = A,T,C or G
nnnttcaagacncncctcgtnatgacggtacgtatcagnacngccnnnaannnnngggnngacccacgcgtccgagaaactttacattttggagacaaacctgtgtgagttttttattggtacaaacgttgtatttaacactagggggtttgtacagttttttgccttttctactanaaaacaatgtaaagtgatttcacaatgtgaagagaaaaaaaaattgccactatgaccaaacgcacagtctgttctgcagcaacaacgggattcaatcaactcagtcgtgattcagccgtagaaatgcttttcctttatcttgtttgagcttttcctttctttcctgttttgatttgcaaaagaaaatgtcttttttgtgtgaacttgtgttgtactctgtagaaaattatggattttactttaatggtttaaaaaaaggcaaggagagcccttgtcgcttttcttacctaatcacagagtttgtgtagtg

SEQ ID NO: 6583 - DNA, 390 bp, Homo sapiens
cccacgcgtccggacagactggagcctaacttagaataaaacaataatcaacctatttcaacaggtgtttattaggtgcccatttttaccttcaggttgttctaagtactaggaaagtgaggaagttgcaaaaagaagcttaatgtgcagccccgccttttagaaaatatgaagcatgtcatttctgttacaaggaaaagagctcattcctctatgtcttacttctgggctgtgtgtgtgtgtgtgtgtgtgtgtgtatacaataaactgaggaaaaaaaaaaaaaaaaaaaaagcaaacccaacaattaaaaagggggggggctttttttaattttttttgggggggccaaaattatcccgttgggggaaaaaaaaatttttttcttaa

SEQ ID NO: 6584 - DNA, 485 bp, Homo sapiens
  misc_feature (1)...(485): n = A,T,C or G
ntttttaccgaaatcgtcgtaaataccgacgtgcgagnacagncnnnaannnngggnngancacgcgtgcgcgcaggtcgcgcggccccgcctccttccccgcccagcgaagctctctgaccacccgtcttttctagagttctgcctcgcttcccggcgcggacgcagccctcancccacttaggataatggcgacagctgaggtactgaacattggtaaaaaattatatgagggtaaaacaaaagaagtctacgaattgttagacagtccaggaaaagtcctccttcagtccaaggaccagattacagcaggaaatgcagctagaaaaaaccacctggaaggaaaagctgcaatctcaaataaaatcaccagttgtatttttcagttattacaggaagcaggtattaaaactgccttcaccagaaaatgtggggagacagctttcattgcaccgcagtgtgaaatgattccaattgaatgggtn

SEQ ID NO: 6585 - DNA, 480 bp, Homo sapiens
  misc_feature (1)...(480): n = A,T,C or G
attaaacgatacnatccgnanntaccgaactatcgcacanncacnnggnngaanngnngagccagtcacctgtgttccaggagccgaatcataaatgtcatcctcaggcacgccagacttacctgtcctactcaccgattggaagattcaatatactaagatcttcataaacaatgaatggcatgattcagtgagtggcaagaaatttcctgtctttaatcctgcaactgaggaggagctctgccacgtagaagaaggagataaggaggatgttgacaaggcagtgaaggccgcaagacaggcttttcagattggattcccgtggcgtactatggatgcttccgagagggggcgactattatacaagttggctgatttaatcgaaagagatcgtctgctgctggcgacaatggagtcaatgaatggtggaaaactctattccaatgcatatctgaatgaattatcaagctgcatcaaacn

SEQ ID NO: 6586 - DNA, 485 bp, Homo sapiens
  misc_feature (1)...(485): n = A,T,C or G
attaatccgaaatctngtantatctggagtacgagnacanncncnnnnnnnnnggnnnganccacgcgtgcgcgtgcacattcaggcgggccattgcgggaaccagatcggtaccaagttttgggaagggatcatcgatgagcacggcatggacccggccggaggctacgtgggagactcggcgctgcagctggagagaatcaacgtctactacaatgagtcatcgtctcagaaatatgtgcccagggccgccctggtggacttagagccaggcaccatggacagcgtgcggtctgggccttttgggcagcttttccggcctgacaacttcatctttggccagacgggtgcagggaacaactgggcgaaagggcactacacggagggcgcggagctggtggacgcagtgctggacgtggtgcggaaggagtgcgagcactgcgactgcctgcagggcttccagctcacgcactcgctgggcggcg

SEQ ID NO: 6587 - DNA, 478 bp, Homo sapiens
  misc_feature (1)...(478): n = A,T,C or G
ggnaagggcgcgggggtttcaaatgatcccactgagaccgtccggaatcccgggcacccacgcgtccgcgtccggggcctgtgacccggaggcgctggggctgtcctgggtcgtcatgcgagaaatcgtctcaccccagccagtgtgacggagtgagagcaaaagaaagttttgatagcagcgtacgatttatattcagctgtatgctgggcaggtccaacttggcatttcttggctgtatctctgaaggaaagtcatcttaatctctatgagcctccatttcctcagctgtaaaatgggaagatcttcctcacactgctgtgacatttagtgagtgcctgctgtgtgtcatccattgtgacagtgttgggaacacggagatgaataaaacaaggcccctgtcctgggagagccgagaggccacctgtcagctgacatcttagggaggacaccatctacatccaaccctgactactga

SEQ ID NO: 6588 - DNA, 404 bp, Homo sapiens
  misc_feature (1)...(404): n = A,T,C or G
tggaaccactggcttggtggattttgctagatttttctgatttttaaactcctgaaaaatatcccagataactgtcatgaagctggtaactatcttcctgctggtgaccatcagcctttgtagttactctgctactgccttcctcatcaacaaagtgccccttcctgttgacaagttggcacctttacctctggacaacattcttccctttatggatccattaaagcttcttctgaaaactctgggcatttctgttgagcaccttgtggaggggctaaggaagtgtgtaaatgagctgggaccagaggcttctgaagctgtgaagaaactgctggaggcgctatcacacttggtgtgacatcaagataaagagcggaggtggatggggatggaagatgatgctn

SEQ ID NO: 6589 - DNA, 404 bp, Homo sapiens
tcactttggcacaggtgtcgtggaatatgatgcagaaggctttacaaaactcactctgctgctgatgtggaaagatttttgttttcttgtacacattgacctgcctctgtttttccctcgagaccagccaactctcacatttcagtccgtttatcactttaccaacagtggacagctttactcccaggcccaaaaaaattatccgtacagccccagatgggatggaaatgaaatggccaaaagagcaaaggcttatttcaaaacctttgtccctcacttccaggaggcagcatttgccaatggaaagctctaggaaacaccagtcttgagaggtggccagccagactgcctgtccacatgcgtgtcagcacatacagccgcttcctggaagccgcctggaatgt

SEQ ID NO: 6590 - DNA, 414 bp, Homo sapiens
agtccctgtactattatatccagcaagacactaagggcgactaccagaaagcgctgctgtacctgtgtggtggagatgactgaagcccgacacggcctgagcgtccagaaatggtgctcaccatgcttccagctaacaggtctagaaaaccagcttgcgaataacagtccccgtggccatccctgtgagggtgacgttagcattacccccaacctcattttagttgcctaagcattgcctggccttcctgtctagtctctcctgtaagccaaagaaatgaacattccaaggagttggaagtgaagtctatgatgtgaaacactttgcctcctgtgtactgtgtcataaacagatgaataaactgaatttgtactttagaaaaaaaaaaaaaaagggcggccgttctatatgatc

SEQ ID NO: 6591 - DNA, 483 bp, Homo sapiens
  misc_feature (1)...(483): n = A,T,C or G
attaatccgaaanactgntganntaccgtatgatctgcgaaancacncgggnngagaaggtagctccgagggaggacttctggcatgagatctcggcacggcaagcccagcatcgcctcagcccagacaggctccaccaggagatcaagcaagggctgcctttcaggagtcacctcctgagccacttcagagttctggaagtgaccacggaccagggtggaggaatagacttctagttcattctgggacacttgagccagagagttgaaagcttggaaagaccagataagaaacctgccctttgtctccctagggacatgagacaccacattccatttgtgctagaaaaacctatccactgatgagtctaactgttccaaacgcctcccacctggtgtgcacagctgcctgggtccattgtcacttgggtgcatcaggttgtcctccgatttttagattgagtttcctgtctagagatgtccn

SEQ ID NO: 6592 - DNA, 492 bp, Homo sapiens
  misc_feature (1)...(492): n = A,T,C or G
ggcnnaagggcagcggggggcttcncnatagatnatcctagagaaccgtgcgggaantctcgggaagacccacgcgtacgactttgaggtgctcctctcattccccatttaatttgtggagatccccaactgacccctccctacacttccagggcactgaggagggagggcccgctgaaggagccccgaattatctctaggccaggtcaggagccattagtgtcccctcccctgacagcatcctcctccttctggggtgcaagnnggcacctttacctgaggacaacattcttccctttatggatccattaaagattcttctgaaaactctgggcatttctgttgagcaccttgtggaggggctaaagaagtgtgtacatgagctgagaccacatgcttctgaagctgtgaagaaactgctggaggcgctatcacacttggtgtgacatcaagataaagagcggaggtggatggggatggaagatgatgctc

SEQ ID NO: 6593 - DNA, 496 bp, Homo sapiens
  misc_feature (1)...(496): n = A,T,C or G
ggggnggtnnaagcnnagggccttcgcccttgaacgccattgataaccgtcccggaccgctccggaagacccacgccgacccacgcgtccgggcttgcaggcttccgctgttctgcagaacacggtgacgaacgcaccagcttgaattgggcgcttccctgagctgttaccccatggggcttggcagcacccttggccagatgtgggtccagcctgggcatagctgcttaccacataacctaaaatttcctgtctcagccattcgagagcatataatcctgcggtgttgaggacattcacagggtcatgtgagcaccacctcaagccacctccttaactttttcatcacccctaaaagaaacctgtccccacagcagccacctgccgtctccccctccctgagccctgacggccaggaatgcacttcccatctctggacttgcctgttgtacactgttgtagacgcttaaagaaacggatgcattcaccgtgcccc

SEQ ID NO: 6594 - DNA, 508 bp, Homo sapiens
  misc_feature (1)...(508): n = A,T,C or G
aggtnnnnnnnnnnagnnnnncgnnccggnngggccttnnnaattgatnccccttgaaaacngtcgcgaaanncccgggnnganccacgcggacgcccacgcgtgcgccgnctgattctaatagagagccggattcaccgtttggctcgatattataagaccaagcgagtcctccctcccaattggaaatatgaatcatctacagcctctgccctggtcgcataaatttgtctgtgtactcaagcaataaaatgattgtttaactaaaaaaaaaaaaaaaaaaaaaaggggggggccgttttaaaggatccttgggggggcccaacttaaccggggattggaaggaaatagttttttccttatggggggcggaattaaaacctacctgggaatttttggaaagaacctttacttttggggggggacataatgggacaacctccctacaaaaatttaaggctttaggggaaaaataaaattttaaagggtatagggggtaaaactacct

SEQ ID NO: 6595 - DNA, 404 bp, Homo sapiens
cggacgcgtgggctgaccaaggccatgtacagccggcgctcgaagatgaaccctttgtggaacaccatggtcatcggaggctatgctgatggagagaggttcatatgaatacaaataacttatttcctttaccacccaacctagtacctgtgtagtatctcttctgtctcttctccccaagtgaatcccactttaactcagaccccatggtccccttcttcagctaagatgaacctaaggtgaaatgagttttgacccattgtgtcctgttagcttcctcggttatgtggacatgcttggtgtagcctatgaagccccttcgctggccactggttatggtgcatacttggctcaggtaagtagtaagtctagaggtgggggaaagggaagacaaaaggaaatgg

SEQ ID NO: 6596 - DNA, 468 bp, Homo sapiens
  misc_feature (1)...(468): n = A,T,C or G
cgcgccttgatnccttagataaccntccgggaccgccccggaagacccacgcggacggagcctgcagccttgctcttgtgagactgatgtgaggcaaaggaatgatggagaatctagtgtagcagcctccaggcaggattcagcacaacactggggagtcacccttccctcgggcctctgcctaccaacaactgggcttatcactgggaaaacacaaaaaattacacaacccagcaacaacaaaagaactagtcctcttagaatttcttgcgctttgatttttttagggcttgtgccctgtttcacttatagggtctagaatgcttgtgttgagtaaaaaggagatgcccaatattcaaagctgctaaatgttctctttgccataaagactccgtgtaactgtgtgaacacttgggattttctcctctgtcccgaggtcgtcgtctgctttcttttttgggtttcttt

SEQ ID NO: 6597 - DNA, 410 bp, Homo sapiens
ttggtgagcacacgtctggcctacagaatgcggcctctgagacatgaagacaccatctccatgtgaccgaacactgcagctgtctgaccttccaaagactaagactcgcggcaggttctctttgagtcaatagcttgtcttcgtccatctgttgacaaatgacagatcttttttttttccccctatcagttgatttttcttatttacagataacttctttaggggaagtaaaacagtcttctagaattcaaaaaaaaaaaaaaaaaaaaaggggggggggccttttaaaggacccctgggggggcccaaattaaccggggtttggaaaggaaaaattttttcctttttgggggccgaaaaaaaacccccggggggatttttggaaaggaacccttctttggggggggaaa

SEQ ID NO: 6598 - DNA, 171 bp, Homo sapiens
acctgcaggctcccctcggtaccagttggtgtagcttacaggggtcccatctgagtagaggaagtctccagggctgggaccctcagtcaggcctacataggcatatgtgttgtacttcttcacgaagcttgcaatggcctcattttcctctggattccttgggacagcaat

SEQ ID NO: 6599 - DNA, 390 bp, Homo sapiens
tgcccaaaagcaagctggaagtgaacatattataaatagacatacagatgtaacctcggtgtcaacagcagctggttctaccttcatgagggagccaaattttccctgtccagagctgtcaaggaagggtttctgagggccgcatcatcgagtgcacacactgtggctgtcgtggctgctctggctgaggctggcgcgctccaccctggactctggacttcgcaggatcctgcctgtcacgccacccccttcctgggagcagcgagcagtgccccaggcccgagttggagcacggactctatggggaaggcttcgctgtctatcagctgtgatttgtaaaaataaaatctttaaatctcaaaaaaaaaaaaaagggccgcccgctcaaag

SEQ ID NO: 6600 - DNA, 472 bp, Homo sapiens
  misc_feature (1)...(472): n = A,T,C or G
gggggcgcggcnttttaaactagagtctgatgaccgcnncgaatttccggtcgacccacgcgtccgcttcacatgaagcccctggcatttgctggggaagggactggcctggtacttgctgttagggcaggaaggggcaaaaggaagacttgggtagtaatctgggggttcagatgggtagcactaagccagctggcctaaagatgcaataagttcctaggtagtctacccttaccttgaggaatgggaaaatgaacctcagcccattaggcaggaaaagttgatatttaataaacaaggaaagagtgaactgagaccccaaaaaaaaaaaaaaaaaaaaaaaaaattaaaaaaaaaaanggggggggggccttttaaaaatttcttggggggggccaaattttaccggggggggaaaaaaattatttttttctttttgggggggctttttaaaaccccctggggatttttg

SEQ ID NO: 6601 - DNA, 389 bp, Homo sapiens
aaaaataagggcaaggtagcacgtttctgataaaattaatttcattcagtatcaagtccatgattttgagatgaggccttttacactttttttaggattaaaatattctttattttacataatgatatttaaagtagtattcgttctcttattggtgctaacttgacataacaagctagcaaaccatatagtggtccccacaaatttttggcccctgacatctaaatgtctggaagtactgatctgttctcttagtatgttttagttatgtaaagaaaatagaactacatagaagtagaagtaatgagactatacctagggctctcaggagagacatttaattgtggctaatttttagggaaggagcaccgaagaaaattaaaacctaa

SEQ ID NO: 6602 - DNA, 468 bp, Homo sapiens
  misc_feature (1)...(468): n = A,T,C or G
gagcggggnttcccaatgaaagcccactgacagcctcgaancccccncgacccacgcgtccgcgctactgctctgtgactacccaggcagatgggagggttgtgcttgtggggggtcgctcacgtaggggtaaaaagcggggtcccccaggcagcaaagactgggggacagcactgaaagggtgtgatgactacttgcttatagagttcttgaaaaggtgtcttcactgggacccctctgcccgcttgaccccagctcaagcattaagacacccttggattagcaagtctgtgcccagacctgtcaccaccatagacaaggtgtcagggaaacgggtagttaatcctgcaagtgctttccagggattgggttctaagctgcctccagttgttggaatagccaataagcttaaagctaacttaatgtcagaaaccaatggttgtatacccctatgcagtgtattgccan

SEQ ID NO: 6603 - DNA, 415 bp, Homo sapiens
  misc_feature (1)...(415): n = A,T,C or G
gaaaaaaggcgggagaagccccggcaggtttgaagctgcttcttcgaatttgcaattcaatatgaaaatcacctcggagctggtaaaaagaggcctaacccctgtctttagatttacagtccaatgcttcactcagccattttacctcacccccanaaaaaaaaaaaaaaaaaaaaaaaaggggggggccttttaaaagattctttggggggcccaaatttacccggggggggaaaggaaaaatttttttttttatggggggcgaattaaaaccctcctggggatctttgggaaggaacctttcttttgggggggggaaaaattggcccaccccccttccaaaatttaaagctttgggggaaaaaaaaaatttttaaggggaaaagggggaaaaccaaccctattttctttgttn

SEQ ID NO: 6604 - DNA, 414 bp, Homo sapiens
  misc_feature (1)...(414): n = A,T,C or G
tgcgtcgccagccgagccacatcgctcagacaccatggggaaggtgaaggtcggagtcaacggatttggtcgtattgggcgcctggtcaccagggctgcttttaactctggtaaagtggatattgttgccatcaatgaccccttcattgacctcaactacatggtttacatgttccaatatgattccacccatggcaaattccatggcaccgtcaaggctgagaacgggaagcttgtcatcaatggaaatcccatcaccatcttccaggagcgagatccctccaaaatcaagtggggcgatgctggcgctgagtacgtcgtggagtccactggcgtcttcaccaccatggagaaggctggggctcatttgcaggggggagccaaaagggtcatcatctctgccccctctgctgn

SEQ ID NO: 6605 - DNA, 478 bp, Homo sapiens
  misc_feature (1)...(478): n = A,T,C or G
atgtccggttncccccaaggttttccagagnancggcncnaannnngggcgaccacgcgggcggcatcttccgtatctcccaggcatgacactaccaagtttgtttgttttctttccaatttgggaatttatgctggagtatggtttcaacgcaggtatgcttccagagaacatctagaagtggctggaaaccagaagctggggattccagggaccccacttagtgctctatttcctttataggttttatttctggtcatagagagagaaggacctttgactttttcttcgttgaggcttctgaggaggaaaaacaaacctaaaatagaaatacagtcagcctttcaaatccatgggttctgtgtccgtggattcaaccaaccttggatcaaaaatatttgaaaaaaaatctacaaagtttcaaaaagcaaaacttgaatttgctgcatgccaagaagtatgttgaattcatgtaaan

SEQ ID NO: 6606 - DNA, 478 bp, Homo sapiens
  misc_feature (1)...(478): n = A,T,C or G
gcccgctcccaatgagcgcagcatagagggtcatcaanacccgcgncgacccacgcgtncggtcaagcacagaggcaggttccacagttgcaggagcagccctcagacccagccatcattcccagcgttccagtctctctggggatgaagaggatcataaccctgtcttcaagaacactgggatttcagcagcaagttggaagaaggactggtaggttcccctccaagccagtcacctgtaagagtcctgtcctctgccagactttttaatctcttcattaactctcagactgacctgggagccctcctctacctgaatccagtgctcaactgtgccccggcaacaagacctgggctgaggtctccctggtagaactaagggagattacaccatctaaatcccagtgcagtcaacagcctggcctatagtcctgggacatgtatcttcttctttgccttaaatctgatacaagaggtg

SEQ ID NO: 6607 - DNA, 474 bp, Homo sapiens
  misc_feature (1)...(474): n = A,T,C or G
gggcgggncggtcgcaatgaatgccgatganggtcntcgaannccccggncgacccacgcgtccgcggacgcgtgggggagtcttttcatttgcttccacctgccatatctccattgtccctccaaccgaactgggatttgcatagaaaacctaaaagaatcagccaggcgcagtggctcatgcctgtaatcccagcactttgggaggccgaggtgggtggatcacaaggtcagaagatcgagaccatcctggctaacacggtgaaaccgcatctctactaaaaatacaaaaaattaaccgggcatggtggcaggtgcctgtagtcccagctgaggaaggagaatggtgtgaacccaggaggtggagcttgcagtgaaccgagatcacaccactgcactctagcctgggtgacagagcaagactccgtctcaaaaaaaagaaaagaaaaattggaaaagttgtctgggagcgct

SEQ ID NO: 6608 - DNA, 409 bp, Homo sapiens
agcccaaaagcttcaattacccattgctcagtttgaaattcagctaacccagcagctacagtcccttatccccaacaacaatgtgagaaggctcatttctcatgttatccggaccttgaagatggactgctctggggcccatgtgcaagtgacctgtgccaagctcatctccaggacaggccacctgatgaagcttctcagtgggcagcaggaagtaaaggcatctgagatagaatgggatacggaccaatggaagactgagaactacattaatgagagcacggaagcccagagtgaacagaaagagaagtcgcttgaggtgaggaccacacagaaacatgagacccagatttcccatcatttagcatatcccaggaaagtgcccacacagaagaatctgggactccca

SEQ ID NO: 6609 - DNA, 483 bp, Homo sapiens
  misc_feature (1)...(483): n = A,T,C or G
gcggcncggccttgcactgaganccctgactgtctgtggaaccgcccggaatcccgggggacccacgcgtccgcggcggccaccggaccctcgttttggctggggaatgaaaccctgaaggtgccgctggcgctggttgccttgaaccggcagcgcctgtgtgagcggctgcggaagaaccctgctgtgcaggccggctccatcgtggtcctgcagggcggggaggagactcagcgctactgcaccgacaccggggtcctcttccgccaggagtccttctttcactgggcgttcggcgtcactgagccaggctgctatggtgtcatcgatgttgacactgggaagtcgaccctgtttgtgcccaggcttcctgccagccatgccacctggatgggaaagatccattccaaggagcacttcaaggagaagtatgccgtggacgacgtccagtacgtagatgagattgccagcgtcctgacgtcn

SEQ ID NO: 6610 - DNA, 482 bp, Homo sapiens
  misc_feature (1)...(482): n = A,T,C or G
tgccctggttganccccgaaagttccgnanngnacagacnnnnngggnngancacgcgagcgggggcctgtcacccaggaactctactggcacattgccattgtagagttcctcatccgcggccatgcctccggggggggggctgagggttgacaggccatcggggacacaggcacctctctgctcactgtgccccagcagaacatgagtgctcttctgcaggccacaggggcccaggaggatgagcatggacagcttctcgggaactgtaacagcattcagaatctgcccagcttgaccttcatcatcaatggtgtggagttccctctgccaccttcctcctatatcctcagtaacaacggctactgcaccgtgggagtcgagcccacctacctgtcctcccagaacggccagcccctgtggatcctcggggatgtcttcctcaggtcctactattccgtctacgacttgggcaacaacag

SEQ ID NO: 6611 - DNA, 414 bp, Homo sapiens
  misc_feature (1)...(414): n = A,T,C or G
ggcccagggctgactctctgtgccaagggctgtgctgccatcctggatacgggcacgtccctcatcacaggacccactgaggagatccgggccctgcatgcagccattgggggaatccccttgctggctggggagtacatcatcctgtgctcggaaatcccaaagctccccgcagtctccttccttcttgggggggtctggtttaacctcacggcccatgattacgtcatccagactactcgaaatggcgtccgcctctgcttgtccggtttccaggccctggatgtccctccgcctgcagggcccttctggatcctcggtgacgtcttcttggggacgtatgtggccgtcttcgaccgcggggacatgaagagcagcgcccgggtgggcctggcgcgcgctcgcactcgcggn

SEQ ID NO: 6612 - DNA, 483 bp, Homo sapiens
  misc_feature (1)...(483): n = A,T,C or G
gcgcctgggtgannnnnaaactttgngaancggaccgncnnnnngggnngacccacgcgtgcgcggacgcgtgggatgagactgatcctgagttcgtcattgaccacatggacgcaaacaaggcagggcgctatcagggccggtataggatagggcactgcaggttccggtacagtgacaccctggagctggtagtgacaggcttgtatggcaaacccttcctctctgcagatcggggtctggtgttgatgccaggagagaatatttccctcacgtgcagctcagcacacatcccatttgatagattttcactggccaaggagggagaactttctctgccacagcaccaaagtggggaacacccggccaacttctctttgggtcctgtggacctcaatgtctcagggatctacaggtgctacggttggtacaacaggagcccctacctgtggtccttccccagtaatgccttggagcttgtgg

SEQ ID NO: 6613 - DNA, 482 bp, Homo sapiens
  misc_feature (1)...(482): n = A,T,C or G
agcggcgaggggctttaaatgaaaggcatcgagatctngcgaancccgnncgacccacgcgtgcgaacgctcgctctattgaccagaccccttatccctgacctggctcttgcagccagggcacgagccctccttctatacctgctccccttcccccagtggggactgagttatgggagaaggggacatatttgtggccaacatgatactaaccaaaggggcttccttgtcctggcctggtggagttggtgggtcatcggggctcactgcctcctgcccttctctcctgtctgacccccacttagcccttctctccttgcagcctagcagtttatagttctgagatggaaagttgaagggggcaagcaagacctctcctcagcccatgcccagctgtcaggagagaggtgcagggaggaaggccttgtgctgggacaacctctctcttgccttacctcagagagggactatgccctgacccc

SEQ ID NO: 6614 - DNA, 478 bp, Homo sapiens
  misc_feature (1)...(478): n = A,T,C or G
atgcgtgggtgnnnnnnaagtttgnngnactgncnggcannnngggnngacacgcgtgcgggacgcgtncgaatgaaaatgatggcctaattttaagatggaagatgtgtaattgttggtcaaagtgctttacggccggaaatatgcatcaacctatatttgtctaccataaatggctgcagaggtgagagagaagagttccttacatctaacacaggactggacagtccttggataaccagaaagttcaacaatcaagagtgccctgatttcttaagcatgctggttaaaagagctgctttactggggtacatctaagcatttctcatcatgattcccacggagctacaggctccttgggccttctactttttcctttctacagggggtgtgccctagaaacgattaccaccttgggcaggggcactcaggcctcacgatgggccttttggaggaaagctgtatattgaagttcttg

SEQ ID NO: 6615 - DNA, 492 bp, Homo sapiens
  misc_feature (1)...(492): n = A,T,C or G
agagtgcgaggggnttttaaactgaaagcccatcgannaactnncggaanncccggnncgacccacgcgtgcgagcaaacaaagtgtattccacaaaattctttaggcacagtctggttagatagctgccagaaagaacagaaggagttgtcctttatctcttgtgagtacaatctctgaaagctgaatgagggcatctctttctggggatggtccaagattactgatctctcttattgcttcatggcactactgctgagcgaggtagattgcttgttgcacaccatcactctataagatacagaactaaacagaacagatgcctgtcactgactgaatcagcgttttaacttcctgctataataaatgaacacatagttttgagatcacatgagctgaggattacagttaacacgcaaactacatctctaatgttcttttcccgactcatagagctaacttcctttaggcctttttctcatattgaagcag

SEQ ID NO: 6616 - DNA, 479 bp, Homo sapiens
  misc_feature (1)...(479): n = A,T,C or G
ntttttaccgagntccgtcgnantgcctcngtagaatcgtcgcanccacgcgggngnncgnttntgagaccagggcaaacaggacaaggcctgtcgcttactcgcggcccagaatggggcctaccccatgatcttcactgcctggaggcgggccactgcaggtgaccagggccttctgctccagtccctcaatgccctgtcggtgctgactgatggacagccagacctcctggatgcccagggcctgcagctcctagtggccacgctgacccagaatgctgatgaggctgacctgacctgctctgggatccgctgcgtgcgtcacgcttgcctgaaacatgaacagaatcggcaagacctggtgaaagctggcgtgctgtctatgctgactggtgccatcacccatcatggccaccacactgacgtggtcagggaagcctgctgggccctgcgtgtcatgaccttcgatgacgacatcn

SEQ ID NO: 6617 - DNA, 410 bp, Homo sapiens
tgagggtgggagatttagacacctgaatctgggcgtggagagaagagccgttgctgtttggtgtttgggaagagcttttaaagaatgcatgtttttttcctggttggaattgagtaggaactgaggctgtgcttcaggtatggtacaatcaagtgggggattttcatgctgaaccattcaagccctccccgcccgttgcacccactttggctggcgtctgctggagaggatgtctctgtccgcattcccgtgcagctccaggctcgcgcagttttctctctccccctggatgttgagtctcatcagaatatgtgggtaggggctggacgtgcacgggtgcatgattgtgcttaacttgtgtgtatttttcgatttgacatggaaggcctgttgctttgctcttgagaata

SEQ ID NO: 6618 - DNA, 420 bp, Homo sapiens
gcgaggaccaggaggtgaacttccaggagtatgtcaccttcctgggggccttggctttgatctacaatgaagccctcaagggctgaaaataaatagggaagatggagacaccctctgggggtcctctctgagtcaaatccagtggtgggtaattgtacaataaattttttttggtcaaatttaaaaaaaaaaaaaaaaaaaaaaaagggggggcccgttttaaagaacccctggggggcccaaagttaacccgggatggcaaggtaaaacctttttccttatagggggccgaattaaaacctacctgggaatttttggaagggaccctttttttgggggggggacatattgggacaacctccctccaaaaattaaagcctttagggaaaaaaaaaaattttaaaggggataaggggtaaa

SEQ ID NO: 6619 - DNA, 479 bp, Homo sapiens
  misc_feature (1)...(479): n = A,T,C or G
atgagtggttttnnaaggccgtagngnaccgaccgacnnnnngggngancacgcgtgcgcccacgcgtacgcccacgcgtccgctatctcagagggccaaagtgaatcacaccagtttctgaaggtcctaaaagaaggtcagatgtcctaatgaacatgcacctacatttaataggagtacaataaaactgttgtcagcttttgttttacagagaacgctagatattaagaattttgaaatggatcatttctacttgctgtgcattttaaccaataatctgatgaatatagaaaaaaatgatccaaaatatggatatgattggatgtatgtaacacatacatggagtatggaggaaattttctgaaaaatacatttaaattactttatcttgaaggagaggtgggctgatggctgacttgtatgttactaacttggccctgactggttgcgcaaccattgcttcatttctttgcaaaan

SEQ ID NO: 6620 - DNA, 492 bp, Homo sapiens
  misc_feature (1)...(492): n = A,T,C or G
cggggcggggggttttatacggaaactcncgaatacccctccgaanncccggnncgacccacgcgtgcgaaaaccgaaacagaatattcaagaactgtggggaaactacacaaggtgtaagataggtataatatgaatactagaaaaagaagagagaaaggaacagaagaaatatttggaagaaatatttgaaaaataatgactgataatttccccaaattaatgtcagataccaaactacaggtatgggaagctcaaagaataccaagaaggataaatgccaaaatctacactaggcctatcatattcaaactgcagaaaaccaaagataaagaaaaaaaattctgaaagaagccagaggaaaaaatacttagcctatagaggaacatagatatggatatttgaggaaaaaaaagaaatgttagagataaaaacactgtaacatgtgaggagtgtttgatgggcttaatagtagactggatgaggctgagg

SEQ ID NO: 6621 - DNA, 479 bp, Homo sapiens
  misc_feature (1)...(479): n = A,T,C or G
atgcgcgggttttccccaaaagtttccagagnancnncnnnaannnngnnnngancaggcgtgcgagacctgattctggaaaccctcttgacactgcgttaaaggttttggacattttaggtaagaactttccggttggtgagaactcaaagggttacacgttgctgccaccttatcttagagttattcaaggggatggagtagatattaataccttacaagagattgtagaaggcatgaaacaaaaaatgtggagtattgaaaatattgccttcggttctggtggaggtttgctacagaagttgacaagagatctcttgaattgttccttcaagtgtagctatgttgtaactaatggccttgggattaacgtcttcaaggacccacctgctgatcccaacaaaaggtccaaaaagggccgattatctttacataggacgccagcagggaattttgttacactggaggaaggaaaagga

SEQ ID NO: 6622 - DNA, 394 bp, Homo sapiens
ctgtcttgcgtccccacccgaaaggcgcagttgcagctcctgggtgcggtctgcatgctgctggcctccaagctgcgcgagaccacgcccctgaccatcgaaaaactgtgcatctacaccgaccacgctgtctctccccgccagttgcgggtgcgtgtgtaactccccccacccccgacacgtattgtctccccactttccaggaaaaggaaagcttgagatatcagaggctttctgccccctggagaggaagcaaggggatcaggacctttgggaaaggaattggggtggaacaaacgatggggcattgtggtgtgatggttagtatcactcccgcccaggcttgagctgcaggcaggcattaaaccccctcctcctgacctccaggggatgc

SEQ ID NO: 6623 - DNA, 423 bp, Homo sapiens
  misc_feature (1)...(423): n = A,T,C or G
tgatctgttaaatgttcctcggttaacattttaatagctacattttacagagttacttagggaaggaactattgttagggtagtatttgagaaagttgggattattaacagaatttgaattaagaagcctcatcattattaaagcattagttagaatgagatggtcaagctaacctattatggttgctttcatcagaagaatgaaacagtcatgttaaactagacacacggaaaatggaataatttttatgaaatagaaatttatagttaccgacaatgtttcttttttttttttttttttttttgggaaggggccctcaaaaaagaggccctttttggggggaaggaacccccacccccttctnaaatattttcangggaaggggggaacttttatgcactcgagggggaaagtcgccggcc

SEQ ID NO: 6624 - DNA, 456 bp, Homo sapiens
  misc_feature (1)...(456): n = A,T,C or G
tcccttagaggacctcgaatnggtnggacctccgcaaaacccaccacncgtncggncatgtcagtctgtcggagtctgtcctcggagcaggcggagtgaagggacttgagcgagccacttgccggagtattctatttgcgcctccctctctcccgccccgtatctcttttcacccttctcccaccctcgctcgcgtagccatggcggagccgtcggaggccactcagtcccattccatctcctcggcgtccttcggagccgagccgtccgcgcccggcggcggcgggagcccaggagcctgccccgccctggggacgaagagctgcagctcctcctgtgcggtgcacgatctgattttctggagagacgcgaagaagactgggtttgtctttggcaccacgctgatcatgctgccttccctggcagctttcagtgtcatcagtggggcttctcacg

SEQ ID NO: 6625 - DNA, 484 bp, Homo sapiens
  misc_feature (1)...(484): n = A,T,C or G
cccacactgaaagcactcggattcgacngcatnnccagggncgacccacgcgtccggctggtggagacccacatgaaaaagttggagatcaaatttcggcactttgtttagctggagactatcatggaccgggagcgagaagcactggagtatcagaggcagcagctcctggccgacagacaagccttccacatggagcagctgaagtatgcggagatgagggctcggcagcagcacttccaacagatgcaccaacagcagcagcagccaccaccagccctgcccccaggctcccagcctatccccccaacaggggctgctgggccacccgcagtccatggcttggctgtggctccagcctctgtagtccctgctcctgctggcagaggggcccctccaggaagtttgggcccttctgaacagattgggcaggcagggtcaactgcagggccacagcagcagcaaccagctggagccccccagg

SEQ ID NO: 6626 - DNA, 414 bp, Homo sapiens
caggttgtattagccattgaatttcaaaaaactgatatttacttgcttgttttttaaaaattacatattaaaaatgcccttggcataaggcagcatggtgtggcagttaagagatgggctgtgcagcccatcctgagctccagtcctgagtttgctacttacttctgtggcctctggaaccttatccaacctcttggtgcttcagtttcctcatctgtgaaattagaatttataataattgcacctacctcccaggggtaactaaatgaataaatataataaagtacttacagtggttcctgacacagactcagcactccgtcagtgttgccatgactatttttattatcattattaatgattacttagatcaattatttagcagtggactaatggaagctacagagcagggaa

SEQ ID NO: 6627 - DNA, 415 bp, Homo sapiens
  misc_feature (1)...(415): n = A,T,C or G
tctagctacattttaatttcaaattcaaaaggaagaacatttgatgaaataactgctgttaagtgcatggtaggttggaacagataaaccccttctcttgttaaaaccttgttctcaaaacaagcaaaatccttgtttctttaaaatattttatttcatactcccctgagatttaagacttgcttgttttcctagattttacagtcaagaactttgtctttaacgaggcacctctggaatatctcggaatgtgctgtgattctgggggctgcccagttcacaaattgttcattgctcaattaaaactcttttaaattaaaaaaaaataataataaaaaggctgggcgctgtggctcatgcctgtaatcccancactttgggaggctgaggtgggcggatcacctgaggtcaagag

SEQ ID NO: 6628 - DNA, 429 bp, Homo sapiens
  misc_feature (1)...(429): n = A,T,C or G
agctggccaaagtcacttccccaagatctgccagacctgcatggtcaagcctcttatgggggggtttctatctctttctttctctttctgtttcctggcctcagagcttcctggggaccaagatttaccaattcacccactcccttgaagttgtggaggaggtgaaagaaagggacccacctgctagtcgcccctcagagcatgatgggaggtgtgccagaaagtcccccctcgccccaaagttgctcaccgactcacctgcgcaagtgcctgggattctaccgtaattgctttgtgcctttgggcacggccctccttcttttcctaacatgcaccttgctcccaatggtgcttggagggggaagagatcccangaggtgcagtggagggggcaagctctgctccttcagttctgcttgctcccaagcc

SEQ ID NO: 6629 - DNA, 490 bp, Homo sapiens
  misc_feature (1)...(490): n = A,T,C or G
tggccagangtgncaaccccngggtttcagnagangnacncggcncggaannncngggncgacccacgcggccggaaggttaagaatgttaattaaagctaagttggattcccttcaagatataggcatggaccaccaagctctgctgggacaatttcatcataataaagtccagtatctggtggttctatcttcgcactttccacagggcgaatattttgtacttttgtcttgtctatgtcaataggcacagcttcaagagcagtaagtaaacatgtaatcaagagaaagcaatactgtagcaggatggtcctccacctcatgttcaggcaggtaaataatttttatctcctttttacagatgagacaactgagatccagagaggtaagaaggttaagaatgttaattaaagctaagttggattcccttcaagatataggcatggaccaccaagctcttctaaaacaatttgatcacctaaaccacctg

SEQ ID NO: 6630 - DNA, 480 bp, Homo sapiens
  misc_feature (1)...(480): n = A,T,C or G
atgccgggtttcnnnnaagcctttanganggaccggcnnnnngggnngannacgcgggcggagggttaagattgttaattaaagctaagttggattcccttcaagatataggcatggaccaccaagctcttctgggacggtttcatcataataaagggcaggatctggtggttctatcttcgcactttccacagggtgaatattttgtactttcgtcttgtctatgtcaataggcacagcttcaagagcagtaagtaaacatgtaatcaagagaaagcaatactgtagcaggatggtcctccacctcatgttcaggcaggtaaataatttttatctcctttttacagatgagacaactgagatccagagaggtaagaaggttaagaatgttaattaaagctaagttggattcccttcaagatataggcatggaccaccaagctcttctaaaacaatttgatcacctaaaccacctgaatg

SEQ ID NO: 6631 - DNA, 406 bp, Homo sapiens
  misc_feature (1)...(406): n = A,T,C or G
agtgtctcaaaatagattattaattcatccatacgtctgaggntcttctcattctcatctataatcgagccactaccaagagagatttctgtgtcttaaatgatttggtgcatattttgcaacattgagagaaaactgcccccatctcaagcaagaatggcgttggtttcttccatttcaaactaatcagcattctccagcaatgacaaagtgccagagtgtatatatgaaagctaaggaaagcacaaaacaatggttcagagataaattggctaatttgtttaacagttggagactgtgcaatgtacgacttggaggagtttgtttggcataatgattttgtaggtctgtcagcattttgatatattgtggattagccaggtgaatgatccttgaaacatctctt

SEQ ID NO: 6632 - DNA, 415 bp, Homo sapiens
  misc_feature (1)...(415): n = A,T,C or G
ctgaccagcaccatggcggttggcaagaacaagcgtcttacgaaaggcggctaaaagggagccaaaaagaaagtgggtgatccattttgtaagaaagattggtatgatgtgaaagcacctgctatgttcaatataagaaatattggaaagacgctcgtcaccatgacccaaggaaccaaaattgcatctgatggtctcaagggtcgtgtgcttgaagtgagtcttgctgatttgcagaatgatgaagttgcatttataaaattcaagctgagtactgaagatgttcatggtaaaaactgcctgactaacttccatggcatggatcttacccgtgacaaaatgtgctccatggtcacaaaatggcagacaatgattgaagctcacgttgatgtccagactaccgatggttactagn

SEQ ID NO: 6633 - DNA, 406 bp, Homo sapiens
  misc_feature (1)...(406): n = A,T,C or G
aatttacattgtgctttgcatgtgtgtttggaagtttactaataggataaatatatatgtgtgttcggtaaagaaagaaaaaacatccagtggtacagacaggcaggcacacatagaaaatgttaatatttgtatggtacactgtggtcaactgataagattgattgatgactgtcacagagcagactgctttaggcctcaaatggcaactgcagaggctgaggatgtgttatctctgtacagctgtatccaaactaggtatattatcactatgttgtggaactcctaatgggaactctggcacccattgaaattagagattgctaactcctgggtcatggcctgaacttgacctgcataatgttttaaaattttgacccaacagttaattaaaagtccagatttn

SEQ ID NO: 6634 - DNA, 413 bp, Homo sapiens
  misc_feature (1)...(413): n = A,T,C or G
ctcctgtccagcagcctgacatgacagagcacagctgcccaaatacaaagttctttagagcactgaaagaaacacaaagccagccaggaggaacagtaactcttccttcgggtggaagctttcatcgagttgaacaggacttaaacgaatcatcagggacctgatatttcttatttctcatttggattcttaaccttgaatccaaagtgtctgcaatggacaacaattgaaggagtggcaaacttacttgtattgagagcacacgcaattcctactggtgaaattactgtttctgtttctaataaaatagaagggattccaaataaaatagaagggattccaaattttncaaantnnnnnnaatanacaaaaaaaaaataaaaaaaaaaaacttcttgcatgtggagggcgcg

SEQ ID NO: 6635 - DNA, 481 bp, Homo sapiens
  misc_feature (1)...(481): n = A,T,C or G
gggggttncccaaggggtttcctatgagagcataagagcccntcgaancccggncgaccacgcgtgcggtaaagactactaccagacgttgggcctggcccgtggcgcgtcgtacgaggagatcaagcgggcctaccgccgccgggcgctgcgctagcacccggacaagaacaaggagcccggcgccgaggagaagttcaaggagatcgctgaggcctacgacgtgctcagcgacccgcgcaagcgcgagatcttcgaccgctacggggaggaaggcctaaaggggagtggccccagtggcggtagcggcggtggtgccaatggtacctctttcagctacacattccatggagaccctcatgccatgtttgctgacttcttcgggggcagaaatccctttgacaccttttttgggcagcggaacggggaggaaggcatggacattgatgacccattctctggcttccctatgggcatgggg

SEQ ID NO: 6636 - DNA, 473 bp, Homo sapiens
  misc_feature (1)...(473): n = A,T,C or G
agagagtttttctgggatgcaactacagaaccngcaaaggaannnccgggncgacccacgcgtgcgctgaaattttgttctttagtacttttcatgcatttgatctgaacttggggctggtttggtttttgacgccggatatgcgaacgctatgtgctaaatttgtcaccgtatcatatgtgcatttaccatgtatattgtacacattcactcccttgatgtcatgttaaaatgtcccctgcagtggttcaatcgtgactcggaagcatgtgtgtgttgcaaaggtcagtctctggcgtgggccgcacgccaaccgctcatttctgtgttgcctttggaagcatctttctgtgctcagcgtgagtctgaagcatgcgccatggcctctggtgtacggggcttcaacctgcttgcttgtggtggctgtctgtggtgcttcagcctgacttgccgtggtggctgtccatgctgcc

SEQ ID NO: 6637 - DNA, 410 bp, Homo sapiens
  misc_feature (1)...(410): n = A,T,C or G
ccaggggcccaagccctgggctaacccgcaggtgcctctgactgcatcacactcagagtaagataaccagcaaggggctggagggaacggccagccgagtccagacatggatttggcctgcggaggagcttaggatcctcgttttctgggttttggtgatgttggaggagtaccccccagcccaccgccccgattcctttttgcttctggtttggagctccggaccaggaccttcgtcctggtcagtttttaaataattatttagcagtgtaacttttagacctgcgtgacatctacaaagcgcccaataaagaaagaggaagccacggtccctantnnaaaaaaatattttaataattaaaaaaaaaaaaaaaaaaaaatattttnttntaaatttttatatatttatt

SEQ ID NO: 6638 - DNA, 141 bp, Homo sapiens
tgggttttgttgtttttctatttgaaaaggactagatgaacttactagttacagcgatgatgaaagaaggttaaaatttgttttgcattcgttgtattccattcttgttctttcaggggtccttcacgttctagatcgcga

SEQ ID NO: 6639 - DNA, 406 bp, Homo sapiens
ggggctgagcgcagaagcggctcgaggctggattatgatcctgggcgccgccaggttctgtggacagtcacaatgggaatccaaggagggtctgtcctgttcgggctgctgctcgtcctggctgtcttctgccattcaggtcatagcctgcagtgctacaactgtcctaacccaactgctgactgcaaaacagccgtcaattgttcatctgattttgatgcgtgtctcattaccaaagctgggttacaagtgtataacaagtgttggaagtttgagcattgcaatttcaacgacgtcacaacccgcttgagggaaaatgagctaacgtactactgctgcaagaaggacctgtgtaactttaacgaacagcttgataatggtgggacatccttatcagagaaaacag

SEQ ID NO: 6640 - DNA, 409 bp, Homo sapiens
atggagagcccgccggactactccgcagctccccggtgccgatttggcattgcctgctgcccagagcacctgaaacgccttcttatcgtggtggtggtggtggtcctcatcgtcgtggtgattgtgggagccctgctcatgggtctccacatgagccagaaacacacggagatggttctggagatgagcattggggcgccggaagcccagcaacgcctggccctgagtgagcacctggttaccactgccaccttctccatcggctccactggcctcgtggtgtatgactaccagcagctgctgatcgcctacaagccagcccctggcacctgctgctacatcatgaagatagctccagagagcatccccagtcttgaggctctcactagaaaagaccacaacttccaga

SEQ ID NO: 6641 - DNA, 495 bp, Homo sapiens
  misc_feature (1)...(495): n = A,T,C or G
gggcggganggnttttnaactgacnccgtgcggaccgccttgagatccctnggcgacccacgcgtccgtcatggcgccacctgtgagatactgcatccccggcgaacgtctgtgtaacttggaggagggcagcccgggcagcggcacctacacccgccacggctacatcttttcgtcgcttgccggctgtctgatgaagagcagcgagaatggcgcgcttccagtggtgtctgtagtgagagaaacagagtcccagttactgccagatgtgggagctattgtaacctgtaaggtctctagcatcaattcacgctttgccaaagtacacatcctgtatgtggggtccatgcctcttaagaactcttttcgaggaactatccggttgaaatttataagagtttccgcccaggtgacattgtcttggccaaagtggtatcctttattcccagcagacttctggtcctttgtcaaaagaagagaaggaggccgggtgtg

SEQ ID NO: 6642 - DNA, 493 bp, Homo sapiens
  misc_feature (1)...(493): n = A,T,C or G
gggcgggannnatttttctgatngcgtcgaatnnctctgaaggcactgcgaacgcccggaatnccggtcgacccacgcgtccgataatataaacgtcttattcatttagtcttcagcattttaagtattcgacacgaacattaaagatttggtggtgaatttaataaattacaccaaaaagtctcagtagccaattcactaacatcttttgatttggtaatcttcacagaatcaacaactgttaacacttctgtgcaaataaatttcagttgtgcttatatattataatattcactttaggaatccacctgtcaatttgcaattcaattataaggtatattttaagtgatatctatgtattgtatacacatattccattgaaaggtgagaataattagaaagtagtaatataaaaatgtgtatgaaataagaactttcttaaaagacctactttagctaaatatatgacaatataaaatgtctgcccaatgtt

SEQ ID NO: 6643 - DNA, 426 bp, Homo sapiens
gtcgccgctgcgaagggagccgccgccatgtctgcgcatctgcaatggatggtcgtgcggaactgctccagtttcctgatcaagaggaataagcagacctacagcactgagcccaataacttgaaggcccgcaattccttccgctacaacggactgattcaccgcaagactgtgggcgtggagccggcagccgacggcaaaggtgtcgtggtggtcattaagcggagatccggccagcggaagcctgccacctcctatgtgcggaccaccatcaacaagaatgctcgcgccacgctcagcagcatcagacacatgatccgcaagaacaagtaccgccccgacctgcgcatggcagccatccgcagggccagcgccatcctgcgcagccagaagcctgtgatggtgaagaggaagcggacccgcccc

SEQ ID NO: 6644 - DNA, 487 bp, Homo sapiens
  misc_feature (1)...(487): n = A,T,C or G
ggcgggnnggttttaatgagtgcctcggaccgcnttgaattccctgtcgacccacgcgtccgctgttttgttcctcatctggaaatatttctctggctagtccatttttcccttgatctcttagtccctgtgattcaggaaattgtattaatgaatttatggtcaatactactgactaggatgctttcaataacatagtttaaaatgtagtcacacttatagctagaatggtgaaacaaaagtttgttctccttaaagatttaccttgttaagaaatagtttctgatggctcggcacactggctcacacctgtagtttcagccttttgggagaccaagacaggaggattgcttgaggacaggaattcaagaccagcttgggcaacattgcaagaacccatctctacaaaaatttaaagaacaaaacttagccaggtatggtggtatgcgcctatagtcctagctactcaggagggagaggagggagg

SEQ ID NO: 6645 - DNA, 404 bp, Homo sapiens
gcgaaataacccagacttaatcttgaatgatacgagtatgcccaatattaagtaaaaaatataagaaaagggtatcttaaatagatcttaggcaaaataccagctgatgaaggcatctgatgccttcatctgttcagtcatctccaaaaacagtaaaaataaccactttttgttgggcaatatgaaatttttaaaggagtagaataccaaatgatagaaacagactgcctgaattgagaattttgatttcttaaagtgcgtttctttctaaattgctgttccttaatttgattaatttaattcatgtattatgattaaatctgaggcagatgagcttacaagtattgaaataattactaattaatcacaaatgtgaagttatgcatgatgtaaaaaatacaaac

SEQ ID NO: 6646 - DNA, 462 bp, Homo sapiens
  misc_feature (1)...(462): n = A,T,C or G
ctttgaacgcctgatgatccgccntcgaannccccggncgacccacgcgtccggaaacaggaagagaactagaactggaagtaaagcattgaagatgtgactgaattgctgcaatctcatgatcaaatttgaatggatgaggagttgctttttagggatgagcaaagaaagtggtttctcgagatggaatctactggttgctccttgagggcaggacagttcttatggctttatccgttgcgtaagcacagagaggtctgcgaggtcaaaactattgtcatgatagcaagatgcctgtctttttcatttattctcacggcgtgcagaggctacatgatgtgtgatgacatcctcattgatgttaatgaatggtgctatacttgaattttctaaggtgtcattagcaattctcctgcctcagcctcctgcataactgggactacagggaagcaccattttccc

SEQ ID NO: 6647 - DNA, 411 bp, Homo sapiens
caattattttctttttttcccccactgaaccttcccatttaccctctcccgcccactccacccgggcgggaattgtttccacgatgaaatgagtgaaaacctgagtgatcctgtgtctcccgtggtgcgaaagaaaaagtcagcactttttgaagtgtctgaggttataccagtcatgacaaataattatgaagaaaatatcctgaaaggtgtgcgagattccagctattccttggaaagttccctagagcttttacagaaggatgtggtacagctccatgctcctcgatatcagtctatgagaagggatgtaattggctgtactcaggagatggatttcattctttggcctcggaatgatattgaaaaaatcgtctgtctcctgttttctaggtggaaagaatctgatgg

SEQ ID NO: 6648 - DNA, 403 bp, Homo sapiens
  misc_feature (1)...(403): n = A,T,C or G
cccacgcgtncggcagtctataggagtagggtaaaggtgggaaggagattatggaggagggtgacacttttaaagacagagaaggtgattgtttgagcaaaggacaagagtctaatgtggcaaggccctgaagtgggccttccagagcccaaagctggtctggtggctaggtagatcctgttgcagacatagtgactttgttttagtccaagtgaaatgatctctcaccctttttctccccccccaagacggagtctcgttctgtcgcccaggctggagtgctgtggcgtgatcttggctcgctgcaatctccgccttctgggttcaagctattctgcctcagccgcctgagtagctgggactacaggcacccaccaccatgctcggctaatttttgtatttt

SEQ ID NO: 6649 - DNA, 402 bp, Homo sapiens
ttgagaaacatctaaagtgtattaacagtgcatgcttttactttgtaaatgtggtgccaaatccctgtttgccatcgtttttactgtaccgatgttaactgtagtaatccttagccagtatgttcttttgctgaaactgttgcattttgggacttttttccactttgtcatgtgtacatttttaatctgttatagttggcggcagtattaaaatggtgagtaaagaaaaaaaaaaataaataaaaaaaaaaaaaaaaaaaaaaaaaaaaaaaaataaaaataaaaccattaaaaaattattttatttgttctcttaagaaaagggattcattgcttttgtctctgcatgtattttaatacaataacctcatttcctttatttaaggtgaaaaaaatttttct

SEQ ID NO: 6650 - DNA, 408 bp, Homo sapiens
gtctctgttcaaatgagtttggagaatgcttgacttgttggtctgtgtaaatgtgtatatatatatacctgaatacaggaacatcggagacctattcactcccacacactctgctatagtttgcgtgcttttgtggacacccctcatgaacaggctggcgctctaggacgctctgtgttcactgatgatgaagaaacctagaactccaagcctgtttgtaaacacactaaacacagtggcctagatagaaactgtatcgtagtttaaaatctgcctcgcgggatgttactaaactcgctaatagtttaaaggttacttacaatagagcaagttggacaattttgtggtgttggggaaatgttagggcaaggcctagaggttcattttgaatcttgggttgtgacttta

SEQ ID NO: 6651 - DNA, 401 bp, Homo sapiens
gactgcctgggcagggtctgcccctcccacccctctctgccctgggagccctacactccacttgggagtctggatggacacatgggccaggggctctgaagcagcctcactcttaacttcgtgttcacactccatggaaaccccagactgggacacaggcggaagcctaggagagccgaatcagtgtttgtgaagaggcaggactggccagagtgacagacatacggtgatccaggaggctcaaagagaagccaagtcagctttgttgtgatttgattttttttaaaaaactcttgtacaaaaaaaaaaaaaaaaaaaggggggcccgttttaaagaatccttggggggccccaacttaacgggggatggcaagggaaaagttttttccttatgggggggg

SEQ ID NO: 6652 - DNA, 492 bp, Homo sapiens
  misc_feature (1)...(492): n = A,T,C or G
nggggtacttgtagctctcgtannatctaggtgnatcctgnacnancncnnnnnnnnnngnngannnangcgtgcgggcagtgcagaattccagggaatggctggcccagcagctgagatcacagtgagtgggggccctgggactgatggcaaggacagtggtgagctcagttcactcccactgggcccaacaacactggacacccggccactgcagtcttctgccctgctggacagcagcagcagcagcagcagcagcagcagcagcagcagcaacagtaacagcagcagttcgtccggacccaacccttctacctcctttgagcccatcaaggcagaccccacaggtgttttggaactccccaaagagctgtcagaaatctttgatcccacacgagagtgcatgagctcggagctgctggaggagttgatgtcctcagaagtggttgcccctctgcttcgtctttctccacccccgggagaccacgatta

SEQ ID NO: 6653 - DNA, 403 bp, Homo sapiens
  misc_feature (1)...(403): n = A,T,C or G
cctggagctgtggtttcaaaatgttatttgaagatcacccataaaaaatacctagggacattgttttaaaaaacagacttctgagcgccactccagaaatattaggcagaatcgctagggaagaggtccaggaatctatatttttaacaagtctgcctggtaactgttatgcccatggtctttgaaccccatgttggtcctctgccctggacctgtgacattctggactatttctgtgtttatttgtggccgagtgtaacaaccatataataaatcacctcttccgctgttttagctgangaattannaaaaaaaaaaaaaaaaaaaaaaaaaaaaaaaaaaaaataaaaaccaaaaaaaaaaaaaanccnnttcntttttccccattttttaaaaccccccc

SEQ ID NO: 6654 - DNA, 471 bp, Homo sapiens
  misc_feature (1)...(471): n = A,T,C or G
aggacgggngnttcccactgaatgccgctganngcctcgcanccccgncgacccacgcgtccgggtggcttcaacttctatgcggggctgaagggccaggtgctggtgctgcggacaacttcaactgtctacaattatgattacatttgggactttatcttctaccccaacggggtgatggaggccaagatgcatgccactggctacgtccacgccaccttctacacccccgaggggctgcgccacggcactcgcctgcacacccacctgattggcaacatacacactcacttggtgcactaccgcgtagacctggatgtggcaggcaccaagaacagcttccagacactgcagatgaagctagaaaacatcaccaacccctggagcccaagacaccgcgtggtccagccaactctggagcagacgcagtactcctgggagcgccaggcggccttccgcttcaaaaggaag

SEQ ID NO: 6655 - DNA, 424 bp, Homo sapiens
cccacgcgtccgaagatttacaaaagaagctctgtcgaaagagatgtataaatcaattactctgtaaattgcccacagattcagagttggctcctaggagctgatgctgccattgtcgacatctgatatttgaaaaaacagggtctgcaatcacctgacagtgtaaagaaaacctcccatctttatgtagctgacagggacttcgggcagaggagaacataactgaatcttgtcagtgacgtttgcctccagctgcctgacaaataagtcagcagcttatacccacagaagccagtgccagttgacgctgaaagaatcaggcaaaaaagtgagaatgaccttcaaactaaatatttaaaataggacatactccccaatttagtctagacacaatttcatttccagcatttttataaactaccag

SEQ ID NO: 6656 - DNA, 406 bp, Homo sapiens
atttgtcatacctatgaaaattcttcagttattaaataactttgtcagtgctacctatggtaggccggaaacaatgtaaattaggaagtttcatgaaaattaacttttggggctatggagaaacagttaagtatcttaagttactaaacatttccactgaatttttggagtgagccaaggttactataaaatactttggaagatgaattctctacctggagttagtttcgagagtaagcgtagcttttaacagaaataactgcagattttaagctcataatttgcaaaaaaaatcttttattggcatgaaaataatgttgtaaatggcaccaaatattccacttaagtgcttatacagtattagagtcaaaaactattttatccctttgtgctggttttccccctt

SEQ ID NO: 6657 - DNA, 459 bp, Homo sapiens
  misc_feature (1)...(459): n = A,T,C or G
ataaatctgaanccgtgtgaatcttatggccttcgcgaancgccccacgcgtccgcgcttgagcccaggagttctgggctgtagtgcgctatgccgatcgggtgtccgcactaagttcggcatcgatatggtgacctccggggagcgggggaccaccagggtgcctaaggaggggtgaaccggcccaggtcggaaacggagcaggtcaaaactcccgtgctgatcagcagtggcacaatctcagctcactacaacctctgcctcccgggttcacgccattctcctgcctcagcctcctgagtaactgggactacaggcgcctgccaccccgcctggctaatttttttatatttttagtagagacgggtttcaccatgttagccaggatggtctcgatctcctgacctcgtgatctgcctgcctcggcctcccaaagtgctgggatcacacccggctatg

SEQ ID NO: 6658 - DNA, 431 bp, Homo sapiens
  misc_feature (1)...(431): n = A,T,C or G
gagaatcctcgggcagctatgggcccaatgctccccgcactcactgggcttatggctctccccctgggagcaggcccttcactgctcatccctttatgctttgcagatgaatgggacccggccaggcatggcctccaccaagctcagcccttgggacaagagcagccactctgcccaccgcgtcgacctgtcagccgtgtgagccgggaggctgccaaccaggccaggctgcgctcagaacacaccccccccaaacagaatgaaatgccccacctttgcccatggaccctctccttgctgcttgagaactgtgnnnnnnnnnncccnanacagntgtcctcccctgtgactctggctgtcggagcacactgctcagcccagcaacctgatgcccaggccagcgtgggccactctgccttgcatacacccgg

SEQ ID NO: 6659 - DNA, 427 bp, Homo sapiens
  misc_feature (1)...(427): n = A,T,C or G
aaattacagagagggcagacatgctcagcaacctgaaattccacctgatccagagagcctttcctgattagttagaagagtggccagttcactggctctcccctgcctgttgtgttcactgtctgctctcaggtgaggaaactgggacacagagaggttacatgtggtgacagtttggtgccatgaagattgattgaaagatctagggctgtctagcctgaagaagattcaagggaatgtgggcctcttgtcttcagacttctctcagagtccaagagaacaggtgtatttgtacatggccactgagggcagagctggaacccaagagtggaagcatatctggacttaatgaaaggaaaaaatctgcnnnnnaaaaaaaaaaaaaaaaaaaaatattatttaaaaggggccccctttttaaataccc

SEQ ID NO: 6660 - DNA, 429 bp, Homo sapiens
  misc_feature (1)...(429): n = A,T,C or G
gcgatcaggctttttaaatgatgtaattcccactgtaatagcatagggattttggaagcagctgctggtggcttgggacatcagtggggccaagggttctctgtccctggttcaactgtgatttggctttcccgtgtctttcctggtgatgccttgtttggggttctgtgggtttgggtgggaagagggccatctgcctgaatgtaacctgctagctctccgaaggccctgcgggcctggcttgtgtgagcgtgtggacagtggtggccgcgctgtgcctgctcgtgttgcctacatgtccctggctgttgaggcgctgcttcagcctgcacccctcccttgtctcatagatgctccttttgaccttttcaaataaatatggatggcaagctcaaaannnannnanaaaanaaaaacaaacaaaaccta

SEQ ID NO: 6661 - DNA, 340 bp, Homo sapiens
ttaaaaataaaaaatatatttggcttatttttcgcaggagcaatccttttataccatgaatattacaaaaaaattgtcagattctgaatatttcttctttgtagatttttggaatcattatgagtaaaagtttgttactttattttactatttaaaagatgttattttaccatgtgttaccaagatgaaactgtatgggtagcttttttgtttgctttttgttttgcttttgcttttgtttttgtttttagttgtaggtcgcagcggggaaattttttgcgactgtacacatagctgcagcattaaaaacttaaaaaaattgttaaaaaaaaaaaaaagg

SEQ ID NO: 6662 - DNA, 433 bp, Homo sapiens
  misc_feature (1)...(433): n = A,T,C or G
ctcagtgtgaatgcaaacatccacaaaatatgatcttcgtttatattctgtgatgttgtttataaatgaatgcctcagttctctgctacccttttcacagctttgtactgtttgccttatattctatttgtgcttttaaagtgtgtctgttgggaaaacaaaatgtgtaggtggcttgtaagtgaataatttttatttcttcttgtattaaaattttgtttttttctctactttgggagatgtttatttacattgtcagactattcacaaaacagattctaaaatttgtttgctcgtatgctgttcccttcaatgtgatatcagagattactatgaatgttagtttcattccgtgaaacattacttccatataaagacagatctcttaataagtgaatctagtggaagaacataggtatcattctaattccan

SEQ ID NO: 6663 - DNA, 434 bp, Homo sapiens
  misc_feature (1)...(434): n = A,T,C or G
ccacgggtgcgcgcccacgaccgccagactcgagcagtctctggaacacgctgcggggctcccgggcctgagccaggtctgttctccacgcaggtgttccgcgcgccccgttcagccatgtcgtccggcatccatgtagcgctggtgactggaggcaacaagggcatcggcttggccatcgtgcgcgacctgtgccggctgttctcgggggacgtggtgctcacggcgcgggacgtgacgcggggccaggcggccgtacagcagctgcaggcggagggcctgagcccgcgcttccaccagctggacatcgacgatctgcagagcatccgcgccctgcgcgacttcctgcgcaaggagtacggnggcctggacgtgctggtcaacaacgcgggcatcgccttcaaggttgctgatcccacaccctttcatattcn

SEQ ID NO: 6664 - DNA, 415 bp, Homo sapiens
ctatatattgcatccctgctgctccactgcggggctgggcgggctgactccctgcttcctccaagctgctgcctcccctgcagccagggtctgggcagggtgcagccggtcctcggggcacgcagcttccttcaagtacactgtgtgtgcttcccggacctgcggcgatgccacgggcctgccttttctatgcgcctcactagcttaccaccctgtgcaggtaatgcaactgactttgtctcatcagtctttttctttccctgccaccctttatttatcaagcgtaatgttacactttaaaggacagcaaataagaactttgtagaatcccaccaggactttgctaacaataatgtttggaaataaagaagtgctctgaaaaaatatcagccaccaaaatagttatgttggcact

SEQ ID NO: 6665 - DNA, 386 bp, Homo sapiens
gacccactggatagatgttattcgactccttcaggttatcttgaactgcctgacttatgccagccctacagcagtgctgtttactcattggaggaacagtaccttggcttggctcttgacgtggacagaattaaaaaggaccaagaagaggaagaagaccaaggcccaccatgccccaggctcagcagggagctgctggaggtagtagagcctgaagtcttgcaggactcactggatagatgttattcaactccttccagttgtcttgaacagcctgactcctgccagccctatggaagttccttttatgcattggaggaaaaacatgttggcttttctcttgacgtgggagaaattgaaaagaaggggaaggggaagaaaagaag

SEQ ID NO: 6666 - DNA, 226 bp, Homo sapiens
agggcaccacctccctgggtgaggtgcggacccccagccagctgtctgacaacaactgcaggcagtaggcccgcagggccgagaagatgctgggcacccacccagcacccccatctaccaacaccagcggctgggggcgggggcggaccttgtgaggctcagttgacccgttacttgcaacctgaaaacaaatcatgtttttgacttaaaaaaaaaaaaaaggggg

SEQ ID NO: 6667 - DNA, 416 bp, Homo sapiens
agcccaccgggaacgaaagagaagctctatctcccctttatgagctcagctatgaactccttctccacaagcgccttcggtccagatgccttctccctggggctgctcctggtgatgcctgctgccttccctgccccagtacccccaggagaagattccaaagatgtagccgccccacacagacagccactcacctcttcagaacgaattgacaaacaaattcggtacatcctcgacggcatctcagccctgagaaaggagacatgtaacaagagtaacatgtgtgaaagcagcaaagaggcactggcagaaaacaacctgaaccttccaaagatggctgaaaaagatggatgcttccaatctggattcaatgaggagacttgcctggcgaaaatcatcactggtcttttggagtt

SEQ ID NO: 6668 - DNA, 418 bp, Homo sapiens
  misc_feature (1)...(418): n = A,T,C or G
cacctggcgctggcgctggaagcgctgcaggcgcatgtgcaggcggcgccgccacagggcgccctggaggaactgcgcacagagctgcaagaggtgcgcgcccagctctgcaatcccggccggtccgcttcccacgcagtgcctgcgtccaagaaataggagcttgctggatggaacctgaatttggacatggcctatgtacctaacgtggccttcttcccgcaccacccttgcctgcgctggcccagtggaaaccaccaggatcttgatgcaacttggcatttggttacccctgctgataagagcagccattacctgccactgggaccagcaggtgaagcgttgcaacatagccccctccatcatccttcacctcctatcccccactccaaaccaggacgacctgcaaggtcccagn

SEQ ID NO: 6669 - DNA, 411 bp, Homo sapiens
  misc_feature (1)...(411): n = A,T,C or G
ctagaattattgtccgttcctctgaagtaattcccagaatacggtccttcctaaaccccagaaattgcctttttcagagtttatttctcatgtgcactgctgaagatgaatatccctaatccttcataaagaatcagctagagttgtcatgataaagtcagcacacacaaaaaggcttcttacacatacctgtcttaaaccatgtgtagagctttaaaaacagaaaaaaaaccccatatacttatgaccatcttaaatcaagaaaattgcatatttccattctggtctttctgggccagatttttatattggttttcaggaaatgtctatctataatatttcattatagagnccagtagcttaatactgacactgacttgatacagcatgaagtttctagtgccacacacc

SEQ ID NO: 6670 - DNA, 501 bp, Homo sapiens
  misc_feature (1)...(501): n = A,T,C or G
gagtgccgngncagctccctttgatcgccctagatagatcnccgtatttcccgggccgacccacgcgtgcggatgcccaccgcattctccagcttcaggcctcaagccctgtagccgagaaggcgaggcctaatgttacaccaccggccaaggaggcggatttggtgcggccactccaaggccaaagcgagaaaatcttactgcgcacgcgcaatagacagccgatggagccaccgatggagccgtccggaggggagcaagagcccggagccgtcaggttcctggacctgccctgggaagacgtgctgctcccacacgtcctgaaccgggtcccgctgcaccagctgctccggctgcagcgcgttagccgggccttccggtcgctggtgcagcttcacctggccgggctgcgtcgcttcaatgccgcgcaggtgggtccgcagatcccgcgggccgcattggcccggctgctgcgggatgccgaggggctgcaggagcttg

SEQ ID NO: 6671 - DNA, 419 bp, Homo sapiens
cggagagcgtggcggcaaaggatctaaaggctcccagggcccaagggcccccccggccctcctggcccatcaggagcggtggtgcccctggccctgcagaatgagccaaccccggcaccggaggacaatggctgcccgcctcactggaagaacttcacagacaaatgctactatttttcagttgagaaagaaatttttgaggatgcaaagcttttctgtgaagacaagtcttcacatcttgttttcataaacactagagaggaacagcaatggataaaaaaaacagatggtagggagagagagccactggatcggcctcacagactcagagcgtgaaaatgaatggaagtggctggatgggacatctccagactacaaaaattggaaagctggacagccggataactggggtcatggcc

SEQ ID NO: 6672 - DNA, 413 bp, Homo sapiens
  misc_feature (1)...(413): n = A,T,C or G
acttgggaaacagagaaccctgtgggggtggctgtgggggaggtccctgccagtgtttagaagagcctgactgtgttcagtgccttggagcagaaagccagggtcctgagtggctgaaataaaagcctctggtagaaaaaaaaaaaaaaaaaaaaaaaaaaaaaaccctgggggggggctttaaggggagcccttggggccccatattaaaaccgcggaggaaatcaattacttttttgcttaaagggacggttattagaggctttttggaattcttctgaaatgactcttttttttggggggggaaaatatccccactttctcttcacggaatttggggcttttaggaaaaaaaaaaatttttgggggaaaaagggttaaaatccctcttatatgtcgcttttgaaattnnn

SEQ ID NO: 6673 - DNA, 425 bp, Homo sapiens
  misc_feature (1)...(425): n = A,T,C or G
cccacgcgtncgcccacgcgtacgattcttttagtgaaattgtcattgttttatcagtgctaatgtgtgcaagcagttttttgattttgcttttctcctggcatcagaaagtggtggcgttttctgtactggattgcaccaaggaagcttttggggaggaaggaaggacattaaattctttccctggtaatgaaaagagccctttatcaatacagtgctgcaatttctggatatcagctacactttgtttttaagtttgtttttgacatgtttatttggcaaattttataatgaagttttaagttgaaaataaaatgtagcaacattttgatcannnnnaaaagaaacttttaaaaaaaaaaangggggggggcctgtttaaaagattctctggggggcccaaatttttcctgttgtgaagaaat

SEQ ID NO: 6674 - DNA, 414 bp, Homo sapiens
agaaagagcgaggcagtctgacgctgttgctctgtggagagtgtggccttgtctcggccttggaacaggctttccagcatggatttaaatcgccccggctcttcaaaaatgtcttcatttgggatttcctggaaaaagcacaaacctattatgagacattagagaagaatgaagtagtccctgaggaaaactggcatacaagagcccggaacttctgccgatttgtcactgcaatcaacaatactccccggaacatcggcaaggatggcaagtttcagatgctggtgtgcttgggagccagggttatcatgaagattaaatctcttatgtcagtgccagcacatgctgagtgttatgtgagagatcacctcctacaccactggattgccctgctggctgactgccccatcactg

SEQ ID NO: 6675 - DNA, 487 bp, Homo sapiens
  misc_feature (1)...(487): n = A,T,C or G
tgggtctttggagcccgtggtgacttgaggactttccgggncgacccacgcgtccgcccgcacctccgtcttccccgcaacacatatacacaatcacccggaccctaggtcccccagagcccgaaggccacgcagggggcgggcagcgacctgcactactgggtcgggaagcaggcgggtgcggaagcgcagggcgctgcggaggccttccagcagcgcctacaggacgagctggggggccagaccgtgctgcaccgcgaggcgcagggccacgagtccgactgcttctgcagctacttccgcccgggaatcatctacaggaagggaggcctagcatctgacctcaagcatgtggagaccaacttgttcaacatccagcgactgctgcacatcaaagggaggaagcacgtgtctgccactgaggtggagctctcctggaacagctttaataagggtgacatcttcctgctggacctaggcaagatgn

SEQ ID NO: 6676 - DNA, 415 bp, Homo sapiens
tgccctggccttcttcaacagctgcctcaaccccatgctctatgtcttcatgggccaggacttccgggagaggctgatccacgcccttcccgccagtctggagagggccctgaccgaggactcaacccaaaccagtgacacagctaccaattctactttaccttctgcagaggtggcgttacaggcaaagtgaggagggagctgggggacactttcgagctcccagctccagcttcgtctcaccttgagttaggctgagccacaggcatttcctgcttattttaggattacccactcatcagaaaaaaaaaaaaagcctttgggtcccctgatttggggagaataaacagatttgagtttaaaaaaaaaaaaaaaaaagggggggcctttttaagaaaccctttgagggccccag

SEQ ID NO: 6677 - DNA, 428 bp, Homo sapiens
  misc_feature (1)...(428): n = A,T,C or G
cccacgcgtccgctcctaatgtctttttgtagtttttacttagagatcttacatatttgttattatatttactcctaggtacttgggattctctaagattattgaaaatgctgtcttctttttaattacattttcaggtatttgtcattggtataaagaaatgtatttgacaataatcttatattcaccttaaattctcttatttctaataaattgtactttttttggttttctacaaaaatgatcatatctaaaaataaagttagatttgtttattcttctgcatcattttgaattcagtttattatttcatgtgctattagaacctttaatttagtattatttattttttgatttgtaaatcggaatgcttttattatcttttcatttaggatgatgtttactgtaggttacttagatacgctctn

SEQ ID NO: 6678 - DNA, 415 bp, Homo sapiens
cacacacaagcgcagccgccagaaagctgccgaggaccatgccggcgcccaagggcgcgggcgccagcgcggatttcgattctgagattcaccctttcttccccgccctaacgctgggcttctctggcgccctcccggcgcccgggctgctttgggccgctaggcactcagcttccagccgggttcgtcggcctcagggcggaaagagatggccacagccgcgcgcccgcagcctgggagtcctgagctggggccaggagccccgggccgcggcgagctcactttcagcagcagggctggcacctggagaagaacagcctctccccgctgccgtccggagtaccactcatcatccgcgccaggtctcaggacgtccaggctgccctctttccagcggggcgggagagggtgcatc

SEQ ID NO: 6679 - DNA, 420 bp, Homo sapiens
attgttgtaaacaaacaagttaagggcaagattcttgccaagagaattaatgtgcgtattgagcacattaagcactctaagagccgagatagcttcctgaaacgtgtgaaggaaaatgatcagaaaaagaaagaagccaaagagaaaggtacctgggttcaactaaagcgccagcctgctccacccagagaagcacactttgtgagaaccaatgggaaggagcctgagctgctggaacctattccctatgaattcatggcataataggtgttaaaaaaaaaaaataaaggacctctgggctacaaaaaaaaaaaaaaaaaaaaaaagataaaaacaaaaaaaggggggggggtgtttttaaaaaattccggggggggcccaattttacccggtttgtaaaaaattaattttttttttaag

SEQ ID NO: 6680 - DNA, 414 bp, Homo sapiens
tagcattctaagatacacagaggagcaaggaatcccatcatatccatgttatttcctaactgcgtatattggaaatagtgaaatagaagaaaagtgaaagtatgaatgatggggaaacctggccgtgcacagaagcctaactattctctggataccatggataaaagcagcttgaactagtaccaaaatgagcattacaaacactgcaggtgtctctcaaatcgagccctcattttccaagcaattaatgctgatttcaagccaataggacaataacaaggggctacacctagaagagcctgctgtttcatacaactgtgtttgctaaaacagttcagccacaaatcctgaacaagagatctcctgcggagtgtgagcagcatggaggagccataatcccgctatctctctcag

SEQ ID NO: 6681 - DNA, 462 bp, Homo sapiens
  misc_feature (1)...(462): n = A,T,C or G
gtgcggaggttttatccgaagctgcggtacagtacatctacgcagnncnaccanncgngcggngaccaaaagcaagctggaagtgaacatattataaatagacatacagatgtaacctcggtgtcaacagcaggtggttctaccttgatgagggagccaaattttccctgtccagagctgtcaaggaaggctttctgagggccgcatcatcgagtgcacacactgtggctgtcgcggctgctctggctgaggctggcgcgctccaccctggactctggacttcgcacgttcctgcctgtcacgccacccccttcctgtgagcagcgagcagtgccccaggcccgacttggagcacggtctctatggggaaggcttcgctgtctatcagctgtgatttgtaaaaataaaatctttacatctcaaaaaaaaaaaaaaggggcggcccttaaagagagcccttag

SEQ ID NO: 6682 - DNA, 413 bp, Homo sapiens
  misc_feature (1)...(413): n = A,T,C or G
tcgagccactgctgcccgggctgttgtttttgctgctgtatctaggggagaatgcaccgaggccttacggaatcggatcagagaactagaagcatagggcaagaagctcacgatggacatgaaggtgaaagaagaccaaatcagagaactagaactaaaagtccaggagcttcggaaatataaggaaaatgagaaggacactgaggtgttaatgtcagccctctcagccatgcaagacaaaacacagcacctggagaacagcttaagtgcagagacgagaatcaagctggacctgttctccgcactgggcgatgcaaagcggcagctcgagattgcccaaggacaaatccttcagaaagatcaggaaatcaaggacctaaaacagaagatagccgaagtcatggccgtcatgn

SEQ ID NO: 6683 - DNA, 493 bp, Homo sapiens
  misc_feature (1)...(493): n = A,T,C or G
agatggccnagcccgttcccngttgagatgtnagtagatcngccctcggaaancccggggcgacccacgcgtccgcccacgcgtgcgcttacaagagtaactttccatggacatttaacattcttccaattttattcacatataatgggaaattttgaattgccagtttgaagactgttctcctaaagtgttcaacctgcacttcttacaaccaaggtagtttgtatcattttcaaaagtacacattattagggtctagttgcccctggtccttagcttgctcagctgcaaaataagcgtgctaaattaaattgtcttaaggtttttccacttcattttgtgactttgtgtggttcgaatttctcagtattttaaccagtgtgttgatgttaaagtcaaaggctgcagtatgtctatattcttgctgtactcattggtagtttcagtatatgtaatgtgagtttaaatagtgaaattgtatctcatattaacc

SEQ ID NO: 6684 - DNA, 406 bp, Homo sapiens
cttactaccggagcgagcgctctacaggatcatgttatgcgccctggatcacgccatcgtgctacgcgagggctttttccatatatagtgcggcatgataggcgacctgcgcaccctgagcaagaaagagctacattgagctggtgccaaaagatgctcaccactagcctacgaaacatgtagaggtttaaagtgcatagctgatggataactgggacctgagcaaagaccactacgtgaacttgctggaggatagtaccgtcctgggggccttggctttgatctacaatgaagccctcaagggctgaaaataaatagggaagatggagacaccctctgggggtcctctctgagtcaaatccagtggtgggtaattgtacaataaattctttttggtcaaatgtaa

SEQ ID NO: 6685 - DNA, 419 bp, Homo sapiens
gtagtatttatgaagattcatgtgctagtcatggtccaatgagtttgggagaattggagttggagcgcaaattctaagctggttcttcgcacaacacttctgacagcacaagaaaatgatgttaatttaccagtagccgctgaagatttttcccagtaccaactaaagcaaaatcaggatgttaagcaagttgaacacaaaccatcacaaagttacctacgtgttagaaataaatctgatattgcaccttcacagcaacaagtttcaccaggtgatatggatcggacacaaattgagcttaatccgtacctcacatgtgtattttcaggtttgggggtacatgtgaagaaggtttcctgtataggtaaactcgggccgtggaggtttgtcatacagattatttcatcacccaggtggga

SEQ ID NO: 6686 - DNA, 384 bp, Homo sapiens
agaaaattcacccgtgtggcagaatcctaccccaatgttgttgacagacagcgtgaatctctaactcaggaaggtctgtgttggaattccacctcactagctaaatattcttgggactatatgtgtatgtatatatatagatacacatatatacacacacacaaatatatacttatatatatagtgtgtgtgtgtatatatatatatgtgtgtgtgtatatatagatatatacttttttttttttttggagaaagggttttttttttttgcccaggttaaaaggcagggggggaacattggttaattgcaccctaaaactctaaaactaaggggattccccggcctcaccctttacggggggggaacccacggggggacccccc

SEQ ID NO: 6687 - DNA, 404 bp, Homo sapiens
  misc_feature (1)...(404): n = A,T,C or G
aggaaagaaggacgcggcgtctggggagcacccatttttcaagacggggcccgggctttcgacagtggggagtgtgacgcgcttgggaaaggcaggagcgccagcggtcgggctgctcttggctaacgagaggagtccgaggcggcggcgaggggcgaacgacccgacgcaagatggcgagtaaagagatgtttgaagatactgtggaggagcgtgtcatcaatgaagaatataaaatctggaagaagaatacaccgcttctatatgacctggttatgacccatgctcttcagtggcccagtcttaccgttcagtggcttcctgaagtgactaaacctgaaggaaaagattatgcccttcattggctagtgctggggactcatacgtctgatgagcagaatcan

SEQ ID NO: 6688 - DNA, 404 bp, Homo sapiens
cttgtatttgatgatagatgtcagtgacatttcatagtttcaaaagtccttgctgctctgaaaagtgtagattctagtgaaaattacatagtcataagagaaatgtgtttttgtttttgtttttgtttcatttttttaaagttgtggtattattggttctatgctccctggaatattactgctttgtgaaagtccagactgaacgcagcaccctctgtgtacctagtacagttataaacctgggtctctcactacttgatatttttgcattagttaagacagaaatttgatagctcggttagaggggaggggaaatctgctgctagaaatgtctgaactaagtgccatactcgtctgggtaagatttgggaaacataacctctgtacataaaaaaaaaaaaatc

SEQ ID NO: 6689 - DNA, 404 bp, Homo sapiens
cggacgcgtggtgcaccattagtggggagattctgtttatgaatgcggagggactagtattaatcctgaggttctttctttccccttttttctttttcagcgaatcatctacagcctctgccctgggcgcataaatttgtctgtgtactcaagcaataaaatgattgtttaactaaaagaaaaaaaaaaaaggaacggggccccccctcaaaagaacccttcggggggccaaacttaacggggggggggaaggggaaacattttcccttatagggggccggatataaaagtgcttgggagttttggggaggaaccctttttttgggggggggacatattggaccaaacccccaccaaaaattaaaggctttagggaaaaaaaaaaatttttaggggcttagggg

SEQ ID NO: 6690 - DNA, 407 bp, Homo sapiens
  misc_feature (1)...(407): n = A,T,C or G
gaagtgtctggaaagggcacgagagagtcttccaggtactgatcctgtttcttgctctgagtgctagctagccagctgtgttcacactgtaaacattcatcaagctgtacatttggtgcacttttctgtgtcataccacaataaaaaaaaacctatcatcttacaaaaacaagacacccaagtccaggcccaaggagtaaggacaaatattcctgtttctgaaccattactgtaattggctcttaaggcttgaagtaaccttataggttactcataaggcatatacaaataaacttgtttgttttcttttttcaaaaaaaaanacgggggggaaaaaaaaaggaaaaaaccccaaaaaaaatnnnannngggggggggcgccttttaaaaaataccgcggggggccc

SEQ ID NO: 6691 - DNA, 404 bp, Homo sapiens
cggacgcgtggggcaccattagtggggagattctgttaatgaatgtggagggactagtattaatcctgatgttctttctttccccttttttctttttcagtgaatcatctacagcctctgccctggtcgcataaatttgtctgtgtactcaagcaataaaatgattgtttaactaaaaaaaaaaaaaaaaaaaaagggggcggccgttttaaaggatccctgggggggcccaactttacccgggcagggaaggaaatacttttttccttatgggggggcgaattaaaacctacctgggaatctttggaaaggacccttcctttgggggggggacatattgggccaacctccctccagaaatttaaacctttagggaaaaaataaaatttttaagggtaaaaggg

SEQ ID NO: 6692 - DNA, 375 bp, Homo sapiens
ggggtgcctcggggcgccccctgcccaaagcccagcctgggcaccgcagctacaaccttcaggagaggaggcgcatcgggagcatgactggggctgagcaggcactgctgccccgggtccccacggatgagattgaggcccagacgctggccacggccgacctagacctcatgaagagtcaccggtttgaggacgttcctggggtgcggcggcacttggtgcggaagaatgccaaaggttccacacagagtggccgagaagggcgggagcctggccccacacctcgggcccgaccccgggccccccacaagccccatgaggtgtttgtggagctgaatgagttgctcctggacaaaaaccaggagccccagtggg

SEQ ID NO: 6693 - DNA, 404 bp, Homo sapiens
tgttaatatttgaagttttgctcacttttatttttcctagtagagcaggataaaaggagagacttagggtcttatttatttctttatacagatctgatagatagattcatttattattattattttttaactgcaagggtaattgtaaaatcatagtgtaaagtttgtgtggtgtttctgctttttgtaatgtttggaacttgcctctgcaggtaaaatcccagaggaatccaaagccctctctttattggctcctgctccaaccatgacaagtctgatgcctggtgcaggattgcttccaataccgaccccaaatcctttgactactgtaagtactataagctggcttatgaaagaggtgaatgttcaactgtgtgaccagttgaatagagagcttcagatta

SEQ ID NO: 6694 - DNA, 125 bp, Homo sapiens
ccagccctggagacttccgctactcagatgggaccctcagtcaggcctacataggcatatgtgttgtacttcttcacgaagcttgcaatggcctcattttcctctggattccttgggacagcaat

SEQ ID NO: 6695 - DNA, 478 bp, Homo sapiens
  misc_feature (1)...(478): n = A,T,C or G
gaggcangaagaataaattcctaggctccgtatcggcgngaanaccngnaganncagcgtgcgggtctcactgaggccgagctatgtcctcagcagctgtttttgttgtttcgttattatgcccacaacaaaaaatcattccttagaaactcaccaagtttatctactgtgtaaatttatattattgttactaccaggtctcatcttttgtcaatgtcattgaataaatttcatgagagttattctcagtgtgaattttaaggctaatgccagatcctgcaaaaatctatgctaaccaggctgtagtacacactgttataaagaattttacttgtgtctaaaactacagtaattttgcttaagtaattgtgcttacctatggagcacaggaaggctcttaggttttgttcctacaagattctttgaattttggagtaaaatgaagtgtctgtctgtctgtcatctatctgccctatag

SEQ ID NO: 6696 - DNA, 483 bp, Homo sapiens
  misc_feature (1)...(483): n = A,T,C or G
gggcgcgaanaaataaaatcctaaagacgtgataagctnncgaannnccggncgaccacgcgtgcgcccacgcgtgcggtgatatttacatcattaatgacaaaaattctagagctatataaggaaaatcactaattaatgtaaaaattagacacaggatgcaattaaactgtttaacaagaggaatttgaatggacaagtctttgaagagagtcttctcagcattgcttttaggtagagagtaacatttaaattaccatgcaatctctttcttcttcattttaaccacgtcttaccattagactttcaggatcaagctatctgttgctaagaaacaaaagcaaaattgcctttttctcaacagatttaagtgaaaatcagtagtcagttcaggtgtgactctaagaagacacattggagagtatgctgggcttacatgaagctagccacgtgtgttggctcacacatctatcttgcattggt

SEQ ID NO: 6697 - DNA, 471 bp, Homo sapiens
  misc_feature (1)...(471): n = A,T,C or G
tggatccgaaaatcattgaactggcagcacngncncggaanacngggncgaccacgcgtgcggctgggtgatgtgggcatggcggagctgtgcccagggctgctccaccccagctccaggctcatgaccctgtggatctgggagtgtggcatcactgccaagggctgcggggatctgtgccgtgtcctcagggccaaggagagcctgaaggagctcagcctggccggcaacgagctgggggatgagggtgcccgactgctgtgtgagaccctgctggaacctggctgccagctggagtcgctgtgggtgaagtcctgcagcttcacagccgcctgctgctcccacttcagctcagtgctggcccagaacaggtttctcctggagctacagataagcaacaacaggctggaggatgcgggcgtgcgggagctgtgccagggcctgggccagcctggctctgtgctgcgggtg

SEQ ID NO: 6698 - DNA, 484 bp, Homo sapiens
  misc_feature (1)...(484): n = A,T,C or G
ggggaaanccttgatngccgtaggcctgatgcacatctgacgggtcgacccacgcgtccgtaaacagagacaaaatattttaagtcctaccctcctcgtctgccaagaataatcctggtgttctctggaactcactgccttcatggccatcctgtactttgtatctgcaaatgtctgccctggaaaaagccatccactggtttcaagataatccacaggctttaaataaacacaagactccttgaaacagagccctgctctggaaatagagcgagaggccatttcagtccaaggagaagagagactgatggctaattacactccaagaagagccttttaaaatagcatttcaatttcagttattgaatcgagctacgattatctagcacacgccccttttaatgtacgctttacactgggaaacagtaggaactgattttgagtaattacctttatggctgtattctatgcagggaaatgtgtg

SEQ ID NO: 6699 - DNA, 474 bp, Homo sapiens
  misc_feature (1)...(474): n = A,T,C or G
atcctgagaatctcgtaacaacctgtgaaangncnnggaananncgggncgacccacgcgtccgaaaggctcagggaccggctgttctactctggagcccaccagcctctcagagcctccggtgactggcctgtgtctgcccctggatggacatgtggacggcgctgctcatcctgcaagccttgttgctaccctccctggctgatggtgccacccctgccctgcgctttgtagccgtgggtgactggggaggggtccccaatgccccattccacacggcccgggaaatggccaatgccaaggagatcgctcggactgtgcagatcctgggtgcagacttcatcctgtctctaggggacaatttttactttactggtgtgcaagacatcaatgacaagaggttccaggagacctttgaggacgtattctctgaccgctcccttcgcaaagtgccctggtacgtgctagccggag

SEQ ID NO: 6700 - DNA, 499 bp, Homo sapiens
  misc_feature (1)...(499): n = A,T,C or G
ggggnagggccccaggnggttcccaatgagcgcccgctcagataggccctncaaacccgcgncgacccacgcgtccggagaagcactctgcccagagagcacctgccctgcctgcatctggagaattgcctctacctggaccttttggctcacacagcagtaccctgacctgctgtgcaccttacattcctagagagcagaaataaaaagcatgactatttccaccatcaaatgctgtagaatgcttggcactccctaaccaaatgctgtctccataatgccactggtgttaagatatattttgagtggatggaggagaaataaacttattcctccttanaaaaaaaaaaaaaaaaaaaaaaaaaaaaaaaaaaaaaaaaaaataaaagggggggggcgtttaaaaaaaacctggggggggccaaaattaaccgggggggaaaaaatatttttttttttttgagggggggggaaataaaaccgccggggggggattggg

SEQ ID NO: 6701 - DNA, 489 bp, Homo sapiens
  misc_feature (1)...(489): n = A,T,C or G
gagggaagaaaanatgnatctggagactatcgtaaccggccgnannnncnnnnaaannngggctctgtgggagaatttttgttttttctcttggtacaattaaactctgtgatgacaaaagcatttggtactaataaagcattgataaatgcttaataagtaccttgccaagcactttccacactattttgtttagttcttaatggtcttttgaggaagaggcagagattgagtatctcacgcaggattataggggaatgaagactcggatctctattttgtgcccagactctgagctgctttatgaacacctcaattaaattacttcattggagtgatttgagtaatctatctatagtgtaatattttctatgaataattttctgtaaccttatttcataagttaatatctaaaaagtgtttatttccaaattgccaaataaaaggttttatattagttaaaaaaaatataaactagtataattacgt

SEQ ID NO: 6702 - DNA, 490 bp, Homo sapiens
  misc_feature (1)...(490): n = A,T,C or G
cgggggtcnaattgatcgcgtgcggaccgtcgaggactttccgggncgacccacgcgtccgcatgtatttagagtgaatttggagttcagtgttagtaagttggtaagtggcacagggagacattactccgtgactaaatgacatcactctgtggtgatgggacttcgtgcatttgcaatgttggggacatagacttttcaactgtacaggatggggatccactctccacccttctgtatcctgctttttgcctccagagactgacccacatggacctcagtgggtatagccaaatggagaacttcgacaagagactggaggaagtgaagagaggaaggatagagtatcaatttccttgactatcctcctactgggtatccttgggctgcctgttttgcccaagaaggccttctctacagaaaagcttcttacaatatctgtggctaaggcccagcttgctttccttatttgcaatttatcaatagctgg

SEQ ID NO: 6703 - DNA, 416 bp, Homo sapiens
tcgctgtcatgtcccatcctttggccagattgactggggatgtccggacagatgcctgcatgggtggtgagggccacatctgcacacgagccagtggctgcttgcaattcactgctgtgatgccaaagtgtgttcaaaggcgactctcctgctcttatggactcttatctcaagcaagaaaggctgcaggctgcctgctatgtgatgcctgagcacaaagccaaggaactgaactaagtctttatgttaagtcctgagtttgtcattggcaggtttacttgtggccagctctctctgcccttgggtgtctgagcaggcagaccagaagaccaggcactggacctgcatgccaaagggactggtcatctcctgaggacctgtacatgaccctgtggactgtccgcacgatccggaac

SEQ ID NO: 6704 - DNA, 429 bp, Homo sapiens
tgcttcaaagcatggcatagttggattcacacgctcatcagcgttggctgctaatcttatgaacagtggggtgagactgaatgccatttgtccaggctttgttaacacagccatccttgaatcaattgaaaaagaagaaaacatgggacaatatatagaatataaggatcatatcaaggatatgattaaatactatggaattttggacccaccattgattgccaatggattgataacactcattgaagatgatgctttaaatggtgctattatgaagatcacaacttctaagggaattcattttcaagactatgatacaactccatttcaagcaaaaacccaatgaacagcttatgtgttagccatagctgaaaataagcacaaatagcttatattcagatcctatcttcatttgaatatagcttttaa

SEQ ID NO: 6705 - DNA, 484 bp, Homo sapiens
  misc_feature (1)...(484): n = A,T,C or G
atggcctgggtggcnnnnnnaaagttccccanagnancgncncnannnntnggnnngacccacgcgtgcgaaaatagagattctctaaccattttttgggtgtctccttaccgtctgtaccaaagcaagctatgtaggaggctggttttttcaaaaggtgcatttaagtatgttttaagaattgaggtatatcccaccaagctcgtgtatttattcaagaagcatttatctcctgttatatgcttggcattgtgctggagttctggaggtggctaagacagtccttcctggagctcacgggggagcccaaggagccctaatatcatgtgatctgtgctataacaaggactataaacacagagggctgaggcagcacttggagagggttgtgcctatgaggttcttgataaatgctgaataagctgaattcagggccttctcaaggtgagtgaatcacctttgtgtattgcaaaggaaaactaag

SEQ ID NO: 6706 - DNA, 414 bp, Homo sapiens
  misc_feature (1)...(414): n = A,T,C or G
aaatctgggcttttgaataaataaaatgctctctgtcttagcaggagaatggcccaaacctgacatggacaagcattgtttggaaagttcaagaagcaatacagtgtaacatgtcacttgtgctttaaaattagtctgtatcaccatttattacagttataattttggagtttatttttcaaatcatgttcttgtcccagagttctttaggttaacactagggactgcgtccatgtactagtataacagcttgggtttgttagaatttgggcaacattttgattataatgacaacttcattttcacatgttactcagttccctaataggatggtgctcttttgttgaacctgtattgatttttttttttttttaactatattgattcgtttactaaaacagtctaattggggcn

SEQ ID NO: 6707 - DNA, 481 bp, Homo sapiens
  misc_feature (1)...(481): n = A,T,C or G
agcgcgtggttgcnnnnaagccccnagnancgaccggcttnnngggncgaccacgcgtgcggagacaagaaaaaatgtaaaaactcctttcaaatgtacttcctgtataagagagtagctctggccaagcatggtggctcatgcctgcagtcccagtgctttaggaggctgaagtgggaggactgcttgaggccaagggttcaagaccagcccgggcaacatagtgagaccttgtctctccgaanaaaaaaaaaaaaaaaaaaaaaaaaagggggggcccgttttaaaatttccttggggggcccaaattttcccggggaagggaaggtatagcctttttccttttggggggggaaataaaaccccacctgggatttttgggaaagaacccttcttttggggggggaacaaatgggaccaacccccccccaaaatttaaaggctttagggaaaaaaaaaaattttaaggggttaagggggg

SEQ ID NO: 6708 - DNA, 489 bp, Homo sapiens
  misc_feature (1)...(489): n = A,T,C or G
gcgggtccgattgatcgcgtctgnaccatgacgaccntccggancgacccacgcgtccgcccacgcgtccgagggcagcttgggaggacagcggccttccgaggtgtggccccttatctaggccttctctgcttgttgacatcctgagagtttccccctcccacccactgactggtcccaaagtcagggtgagaattggagttgccacttcagagtttgctagggcttgggccctggttatcagagataccagcacactccattttgccacagctgctcaggttgaggtatttatgttaaggttgagcaagagggtgaccttgcgggtagagggggtactccttggaagaaatatcctgtgcttgagtggtcccatttaagttgctcatctgagtgggtgcactgtaacttccatgctttggggtgacagggcagacacatacaataaagatgatacttgaagttctagtggaggtgactgagcacagn

SEQ ID NO: 6709 - DNA, 414 bp, Homo sapiens
agacaagaaaaaatgtaaaaactcctttcaaatgtacttcctgtataagagagtagctctggccaagcgtggtggctcatgcctgcagtcccagtgctttaggaggctgaagtgggaggactgcttgaggccaagggttcaagaccagcccgggcaacatagtgagaccttgtctctccgattaaaaaaaaaaaaaaaaaaaaaatatgggggggcccgtttaaagatacccctggggggcccaatcttaaacgggcatgggaaaggaaaactttttccttttgggggagctaataaaaacccccctggggatttttggggagggacctttcttcctgggggggaaaatggggaaaaaaccccccaccaaaaataaaaggtttcggggaaaaaaaaaaattttaaggggtgtgg

SEQ ID NO: 6710 - DNA, 482 bp, Homo sapiens
  misc_feature (1)...(482): n = A,T,C or G
agcggctggttgcnnnnnaagcctttagnagaggcncggcnnnnngggnnganccacgcgtgcggtgccgatctacgaggggtatgccctcccccatgccatcctgcgtctggacctggctggccgggacctgactgactacgtcatgaagatcctcaccgagcgcggctacagcttcaccaccacggccgagcgggaaatcgtgcgtgacattaaggagaagctgtgctacgtcgccctggacttcgagcaagagatggccacggctgcttccagctcctccctggagaagagctacgagctgcctgacggccaggtcatcaccattggcaatgagcggttccgctgccctgaggcactcttccagccttccttcctgggcatggagtcctgtggcatccacgaaactaccttcaactccatcatgaagtgtgacgtggacatccgcaaagacctgtacgccaacacagtgctgtctggcg

SEQ ID NO: 6711 - DNA, 413 bp, Homo sapiens
cccacgcgtccgtgagaatataaagaacagtgccttagaagacagtgaaaggtaagctctagcttaatgtctatgatttgttctttgacattaaggaaggtaaggattggtcagaggatgtaacttgatgtgagcagtagtaaacctgttttagatatcatactgttaatattttattgaaaatttatttcagagcggagaaacttaagctaaagtctgttatacagaattgaaagccttcgtatcttgaacctcccaacatttttcttatggctgttgaaaagtatagagctaaattgatttaattacactttcctttgtactttaaaaaaaagtatgctagcactattgtaccttgaaaggatttccaccagactgtcttgagtagtgacttctttggtgaggcaagaagg

SEQ ID NO: 6712 - DNA, 489 bp, Homo sapiens
  misc_feature (1)...(489): n = A,T,C or G
ggggnggagcggctggttttnnnnggaaatttgagnancggcncgacttncngggncgacccacgcgtccgctgataatggtactatgattctgttttaagagtctttcatacattctgaaatgtttatgagtgaaatggtatgtcagggatttttcgtaaaacaactttcaagaggggcatagagaaagcttatgggctacaaaagcacaatgatcataaactgaactgccaaagctggatgacaaggacatgagaagttatttctatttgtataagttataaatttttcctaatacaaatgaaaagaaaataactactgttagtaataagtactagcaggatttaactactgctaaagttagtgaaaaaagtagaagctaaggttcagtgccttacatatatgctacacatctaagtgctttgtaagactttatcaccaggcgcggtggctcatgcctgtaatcccagcactttgggaagccacggn

SEQ ID NO: 6713 - DNA, 492 bp, Homo sapiens
  misc_feature (1)...(492): n = A,T,C or G
ccgggtcgnattgacngcctctgnactaggatgaccnttccgaacgacccacgcgtccgattaaaaagtgggcgaaggacaagaacggacactttttaagagaagacatacatgcaccaagaatccatgagaaaaagctcagcatggctgatcattacagaaaagcgaatcaaaaccacaatgagataccatctcacaccacactattattacaaagtcaaagaataacagatgctggcaaggaaaaaggagcacttatacactgaagtgctccttttacacacaagttacacacaagtgaaaaaggagcacttatgcactgttggtgggagtgtaaattagttcagccattgtggaagatggtgtggtgattcctcaaagacctaaaaacagaaataccatttgacccagcaataccattactgggtatatactcgaaggaacagaaatcattctattataaagacatatgcacatgtatgttcatcgcag

SEQ ID NO: 6714 - DNA, 419 bp, Homo sapiens
ctggagacaagcatgatcttgagccttcaggactagttccaaagtacatcaataaaaaggattatggtgtcgacacctgaatacatatgtaagcgaaacgaggaaataaagaaagcccaagaagactatgatcgttatatccaggaaaaccttaagaaagcagctatgaaaaggctctccgatgaagaaagggaggcagttttgcaggggctgaaaaagaactgggaagaggtgcataaagaattccagtccctctcggtctttatagattctataccaaagaagatccgcaagcagaggctggaagaagaaatgaaacaactagaacacgacattggcataattgaaaagcacaagattatttatattgccaataagtaagaatggatctttaaagtataacaatttcaatgtagggg

SEQ ID NO: 6715 - DNA, 406 bp, Homo sapiens
  misc_feature (1)...(406): n = A,T,C or G
gatccatgacatggatccttccctatatttatactactgggacctggggaagaggttagcatgaacttacggattgttttaagtaatcctggggaatgccagtcattaaaggactttgcccttctacatcaaattacatccttttcacaaatccccatttctgtaataactggtgcaaacctaaaggtgctttatagttttactactttgcagatttgcaatgctgcatataatgcagaagagcattaaaaacttttgtaaaaactcatgattttgatacttttaaagtagcgtttatatgtaaatagaactacacatggcacacacacttgcacaagggcttcagaaaaacgtgcaatataggtgagaaaaatgtctattgaaactttctcacaggctgcccttn

SEQ ID NO: 6716 - DNA, 405 bp, Homo sapiens
  misc_feature (1)...(405): n = A,T,C or G
acctttgttctctagaaggaggcgagagggaagagatgaatcttcaaggatacctacctctgatacgtgatctagatctcatatttttagaagagaatcaaatgaagtggttcaccttgaagcacagaatgatcctcttggagctgctgccaacagaccacaagcatctgcagcatcaagcagtgccacaacaggtggctctacatcagattcggctcaaggtggaagaaatacaggaatatcagggattcttcctggttccttattccggtttgcagtccccccagcacttgggagtaatttgaccgacaatgtcatgatcacagtagatattattccttcaggttggaattcagctgatggtaaaagtgataaaactaaaagtgcgccttcaagagatccaan

SEQ ID NO: 6717 - DNA, 475 bp, Homo sapiens
  misc_feature (1)...(475): n = A,T,C or G
gcccgctccctaagagatcctttcaatangcattcggaaanncggcncgantacgcgggcgagaccgtgcttgcgaaactccttacctatcagatgttttcggctattgcatgccccctctgtacccggagacggggggcccaccatactacacaccgggcctgcngatgttccctgagactaagggtaccacaggttgtgcccaaccacctgcagtttccttccttccccgccccttccctagtgacccgtatggagggcggggctcctctttccccctggggctgccattctctccgccagccccctttcgggcgcctcctcttcctgcatccccaccgcttgaaggccccttcccttcccagagtgatgtgcatcccctacctgctgagggatacaataaggtagggccaggctatggccctggggagggggctccggagcaagagaaatccatgggtggctacagcagcgt

SEQ ID NO: 6718 - DNA, 410 bp, Homo sapiens
  misc_feature (1)...(410): n = A,T,C or G
gttgttcaacagtgttgtgccagcctacaggaggaaaggccagactcacagaagggtgttcatttagaagaaagcaacactaatgattcaaacagcttcctgaattttaattttgtgttgtctcacagaaagccttatcataaattccataattctaattaatttaccaagataatgtaattacatttggttttgtaaggtatacagcagtaatctcctattttggtgtcagtttttcaataaagttttgattatgggcnnnnnnnannnnnnaaaaaaaaaaaaaaaaaaaaaaaaaaaaaaaaaaaaaaaaaaaaaaaaaaanaaannnnnnnnngggggggggggggggtataaaaaaatttggggggggggcccccacccccccgggggaaaaatgtttttttttt

SEQ ID NO: 6719 - DNA, 401 bp, Homo sapiens
cagatatgttaagttctatggccgctgcagggtctgtgaaggcggcgttgcaggtggccgaggtgctggaagccatcgtgagctgctgcgtggggcccgagggacggcaagttttgtgtacgaagcccactggcgaggtgcttctcagccggaatggaggccgcctcctggaggcgctacacttagagcatcccatagccaggatgatagtggactgtgtttccagtcatctcaaaaaaacaggagatggtgcaaaaacatttattatctttctttgccatttgcttagaggacttcatgcaatcacagacagagaaaaggatcctttgatgtgtgaaaacattcaaacccatggaaggcattggaaaaattgttctcggtggaaatttatttcccaggct

SEQ ID NO: 6720 - DNA, 469 bp, Homo sapiens
  misc_feature (1)...(469): n = A,T,C or G
cggcgggggatttcaatgaagcctacggactgncgncatcggnnaccgcccggaatccgggtcgacgcacgcgtccggctgtcccagaaccagggaggcaagaccttcattgagggagaccacatctccttcgctgactacaacctgctggacttgctgctgatccatgaggtcctagcccctggctgcctggatgcgttccccctgctctcagcatatgtggggcgcctcagtgcccggcccaagctcaaggccttcctggcctcccctgagtacgtgaacctccccatcaatggcaacgggaaacagtgagggttggggggactctgagcgggaggcagagtttgccttcctttctccaggaccaataaaatttctaagagagctactaanatnaaagactatnatgggctaacctgaagacatgaacctttccctcaaatccaaagggggccctcttttaataatg

SEQ ID NO: 6721 - DNA, 413 bp, Homo sapiens
agttttatttcgaagccaaaaatctagagctttcccaagatcctgttgccttaggcacatcacacttcaacagtgcacactatccaacagtgcacactattcaacagtgcacactattcaaaagcgtagactatttttttgcatgttcaagatatttgttttggtcttatgtgtgtgtgagagagagagattcctttgacattaaggagcatcaatgagaaaagatgatgaggcaggaattaataaagaaatgaagtcgtgtgtgtttggttgcctgtcagagggcacacaatttcataaacaccatgcctggacaatttgatattaatatttaacacctctgcatcttttcttaaaaaagaatatgggccagatacagtggctcacatttgtaatcccagcactttggggag

SEQ ID NO: 6722 - DNA, 417 bp, Homo sapiens
atctgtgaaaatgggtcgctattcacttgacccggagaaccccacgaaatcatgcaaatcaagagggtccaatcttcgtgttcactttaagaacactcgtgaaactgctcatgccatcaagggtatgcatatacgaaaagccacgaagtatctgaaagatgtcactttacagaaacagtgtgtaccattccgacgttacaatggtggagttggcaggtgtgcgcaggccaagcaatggggctggacacaaggtcggtggcccaaaaagagtgctgaatttttgctgcacatgcttaaaaacgcagagagtaatgctgaacttaagggtttagatgtacattctctggtcattgagcatatccaagtgaacaaagcacctaagatgcgccgccggacctacagagctcatggtcggat

SEQ ID NO: 6723 - DNA, 417 bp, Homo sapiens
cccacgcgtccggttttggatgagcttttatatatggaacttactccaacaggactgagggaccaaggaaacatgatgggggaggcagagagggcaagagtaaaactgtagcatagcttttgtcacggtcactagctgatccctcaggtctgctgcaaacacagcatggaggacacagatgactctttggtgttggtctttttgtctgcagtgaatgttcaacagtttgcccaggaactgggggatcatatatgtcttagtggacaggggtctgaagtacactggaatttactgagaaacttgtttgtaaaaactatagttaataattattgcattttcttacaaaaatatattttggaaaattgtatactgtcaattaaagtgtttttgtgtaaaaaaaaaaaaaaaaaaaagggg

SEQ ID NO: 6724 - DNA, 417 bp, Homo sapiens
aagaagagtaaagacaagagtgttggaccagtattgcagttctgtagtgtcatttcttataaaaaacaaaacaacaacaataatttatcaaaattggcatatttaaagcctaacattctaataaaggcacaaatttctttttaaaaaaaaaaaaaaaaaaaaaaaaaaaaaaaaaaaaaaaaaaaaaaaaaaaaaaaaaaaaaaaaaaaaaaaaaaaaaaaaaaaaaaaaaaaaaaaaaaaaggggggggggggtttttttaaaatatttgggggggggcccaaattctttggggggggaaaaaattttttttttttttttaggggggaaaaaaaaaaacccccccctctttttaaaaaaaaaactctttttttggggggggaggttttggccccccccctccctctaatttttttt

SEQ ID NO: 6725 - DNA, 417 bp, Homo sapiens
  misc_feature (1)...(417): n = A,T,C or G
ccaggactccttgttctgctctggcaagagactactctgcctgaacactgcttctcctggaccctggaagcagggactggttgagggagtggggaggtggtaagaacacctgacaacttctgaatattggacattttaaacacttacaaataaatccaagactgtcatanaaaaaaaaaaaaaaaaaaaaaaaggggggggcctttttaaagaatccttgggggggccaaattttaccggggaggggaaaaaaaaatttttttctttttgggggggcgtataaaaacctacttgggaatttttggaaagaaccttttttttgggggggggacaaattgggccaacccccctccaaaaattaaagcttttagggaaaaaaaaaatttttaaggggaaaagggggtaaacctaccggct

SEQ ID NO: 6726 - DNA, 412 bp, Homo sapiens
ccaggactccttgttctgctctggcaagagactactctgcctgaacactgcttctcctggaccctggaagcagggactggttgagggagtggggaggtggtaagaacacctgacaacttctgaatattggacattttaaacacttacaaataaatccaagactgtcataaaaaaaaaaaaaaaaaaaaaaaaaggggggggcctttttaaagaatccttgggggggcccaattttaccggggctgggaaagtaaaatttttttccttatgggggggcgtataaaaacctacctgggaatttttggaaagaaccttttttttgggggggggacaaattgggacaacctccctacaaaaattaaaggctttaggggaaaaaaaaaattttaaagggtaaagggggtaaacctac

SEQ ID NO: 6727 - DNA, 417 bp, Homo sapiens
ccagcactttgggaggctgaggtgggtggatcattttgaggtcaggagttcaagaccagcctgggcaacatggtgaaaccctgtctctactaaaaatacaaaaatcagctggacatggtggtgggcgcctgtaatcccagctactcgggaggctgaggcaggagaatcgcttgagcccgggacggaggttgcagtgagcggagatcgtgccactgcactacagcctgggaggcagagcgagactctgtctcataaaacaaaacaaaaaaataaaaataagtaaaaaaataaataagaaatatcctcattcacatcttacctaaatgcatgaataatacagtgaaaaaaatccaaggttttataaacatattatttatttgaaattatctggctcatgttattggggagaagcaatat

SEQ ID NO: 6728 - DNA, 411 bp, Homo sapiens
ctgctactcagcctgaggttgcagactggtctgaaggtgtacaggtgccctctgtgcctattcagcaattccctactgaagactggagcgctcagcctgccacggaagactggtctgcagctcccactgctcaggccactgaatgggtaggagcaaccactgactggtcttaagctgttcttgcataggctcttaagcagcatggaaaaatggttgatggaaaataaacatcagtttctaaaaaaaaaaaaaaaaaaaaaaagggggggccttttaaaagaacccctgggggggccaaatttaaccgggggggggaaggaaaaagcttttcccttaaagggggccgaataaaaaccaccctgggaactttgggaaagaaccctatttttgggggggggaaaaaatggaaag

SEQ ID NO: 6729 - DNA, 412 bp, Homo sapiens
  misc_feature (1)...(412): n = A,T,C or G
ttttcacagggcgggtttctcaacggtgacttgtgggcagtgccttctgctgagcgagtcatggcccgaaggcagaactaactgtgcctgcagtcttcactctcaggatgcagccgaggtgggcccaaggggccacgatgtggcttggagtcctgctgacccttctgctctgttcaagccttgagggtcaagaaaactagtctcactcttgttgcccaggctggagtgcagtggttggatctcagctcactgcaaccttcacctcccagattcaagcaattctcctgcctcaccctcctgagtagctgcaattacagctttcacaatcaacagtgttgacatgaagagcctgccggactggacggtgcaaaatgggaagaacctgaccctgcagtgcttcgcggatgtcacn

SEQ ID NO: 6730 - DNA, 505 bp, Homo sapiens
  misc_feature (1)...(505): n = A,T,C or G
aggcggtggnnatttancctagggacctaccgtaaancctagntgngctangcaccgccncnnaatnnngggnngacccacgcgtccgagtaatttgaaaatgagatattaggaaaaaccaattcttcttaaatttagttcatcgttctttaaaagaacattaaatgtaaccattttgtcagatccatgtattttggagcataaaatgtatgctgttgtgaccaataaatataaaatatggtaattggaattaactccacaccatagtatgcattgttatacatactgtgtacctaattatgtatagcagtgtagtctcaattatatctgaaagtaattgtgactaacaagtatgctttgccttatttccacatttaaactacctgttaatataagggatttgtagtatcagcttgttgagcaatgactttgaatctagttttcagtgatcagaagcagcagttatttgagtgtatgaatggaatgatgatcactgtgctataan

SEQ ID NO: 6731 - DNA, 508 bp, Homo sapiens
  misc_feature (1)...(508): n = A,T,C or G
ggcggtgnnnatttacctagcnangctancgtaanannctagcttngcttcganaaanncncnnaannnnngggnngacccacgcgtncgacacacctggccttctccatgctcggaataacttcctgcagcgaccaacaggctagagagggggaagggatccagcaccggctcctcctccggcaaccacggtgggagcggcggaggaaatggacataaacccgggaactctgagacgtctcctgggatgtttaactttgacactttctggaagaattttaaatccaagctgggtttcatcaactgggatgccataaacaagaaccaggtcccgccccccagcacccgagccctcctctacttcagccgactctgggaggatttcaaacagaacactcctttcctcaactggaaagcaattattgagggtgcggacgcgtcatcactgcagaaacgtgcaggcagagccgatcagccgggtgcaggatggcaggaggtggcagctgtn

SEQ ID NO: 6732 - DNA, 407 bp, Homo sapiens
aaggctggcttgaggccacacagctggggcggggacttctgtctgcctgtgctccatggggggacggctccacccagcctgcgccactgtgttcttctcttaagaggcttccagagaaaacggcacaccaatcaataaagaactgagcagaaaaaaaacctacttactgagacttaaaatatagtaaaacaaaaaaaaacttgaaaatgcctaaaaggggggggccctgtttagagctttttggggggccccccaagggccccaggtttacccgtaaattcttttttttttattggggccctaaaaaaacccctttttggctttttttgggaaccttttttttgggggggggcttctggggggccccccccccgcccaaattacttacggttatgggaagctttaag

SEQ ID NO: 6733 - DNA, 407 bp, Homo sapiens
gaggagtaccagctgcacaatcctaaagctgtctgaaatcttagggaactttggaacaaagggtctctggccaagctccgatttacctccaatcctcttcttgcctggtgattccaggaatgttctttccccattcaaccttagagataatctagttaaatcctcctcgtcattttccaaatatgaaaaccaaggcacagagagggatgaacctgtgcagggacaaaagggggtgtcagtgttacagctgggtcattagcaaggtcattttgaccctaaagcccatacatttaggctgtaaatatataggccaaagatcatgccccaaaaaaaaaaaaaaaaaaaaaaaaaaaaaagggggcccccttttaaaaaaatccctggggggccccatttttccccggttt

SEQ ID NO: 6734 - DNA, 490 bp, Homo sapiens
  misc_feature (1)...(490): n = A,T,C or G
aggaggggccgagcggttcccaatgagaccctnatgatagcccctcaaancccgcgncgacccacgcgtccggcaatggcataatctcagctcactgcaacctccacctcccagtttttcctgtctcagcctcctgaatagctgggagtataggtgcacgccaccatgcccggctaattttttgtattttaacagagatggattttcactgtgttgcctagcctggtcttgaactcctgagctcaggcaatccacctgccttggcctcccaaagtgctgggattataggcaagagccactgtgcccagctaccatgtttttttcacctcagcacctttgctcaagctctttcttcaatgcagaatgtacttcatttacctgcgtttgtctcattctaacttaagacttggcctagacatcctgtcagaaagacttcttttctcattctttagtgcacccacccaattttgtactctctgtcattgtatta

SEQ ID NO: 6735 - DNA, 407 bp, Homo sapiens
tgcagttatacacattaaagcagatctggagtctgaagtagctataaagcagctataaaacagaaatacatgcatagctgcagaaaccatgataggtagaggacttttcttttggttttgttttgttttgttttgttttgtttttggttttacagagaagagatttttattacaaagaaaaaaattccagtgaattgtgcagaaatgctggtttttacaccatcctaaagaaaaactttacaagggtgttttggagtagaaaaaaggttataaagttggaatcttaaattgtaaaattaaccattgagtgtcaaagttctaaaagcagaactcattttgtgcaatgaacataaggaaagactactgtataggtttttttttttttttctcttttaaaaggaaaaaag

SEQ ID NO: 6736 - DNA, 413 bp, Homo sapiens
  misc_feature (1)...(413): n = A,T,C or G
aagagggcggcgcaacagcgggactgcgggggttctgcgcacctggcggggccggcggcggaggctgaccccctgggacgcttcacgtgtcccgtgtgcttagaggtgtacgagaagccggtacaggtgccctgcggacgtcttttgctctgcatgcctgcaggaatgtctgaagccgaagaagcctgtctgtggggtgtgtcgcagcgctctggcacctggcgtccgagccgtggagctcgagcggcagatcgagagcacagagacttcttgccatggctgccgtaagaatttcttcctgtccaagatccggtcccacgtggctacttgttccaaataccagaattacatcatggaaggtgtgaaggccaccattaaggatgcatctcttcagccaaggaatggtccaaacn

SEQ ID NO: 6737 - DNA, 405 bp, Homo sapiens
  misc_feature (1)...(405): n = A,T,C or G
gagagcatagcacctgcagcaagatggatgtgggcagcaaagaggtcctgatggagagcccgccggactactccgcagctccccggggccgatttggcattccctgctgcccagtgcacctgaaacgccttcttatcgtggtggtggtggtggtcctcatcgtcgtggtgattgtgggagccctgctcatgggtctccacatgagccagaaacacacggagatggttctggagatgagcattggggcgccggaagcccagcaacgcctggccctgagtgagcacctggttaccactgccaccttctccatcggctccactggcctcgtggtgtatgactaccagcagctgctgatcgcctacaagccagcccctggcacctgctgctacatcatgaagatagctn

SEQ ID NO: 6738 - DNA, 416 bp, Homo sapiens
aggagctgggctatgggaaatgatttgaataatggagctgggaatatggctggatatctggtactaaaaaagggtcgtttaagaacctacttcctaatctcttccccaatccaaaccatagctgtctgtccagtgctctcttcctgcctccagctctgccccaggctcctcctagactctgtccctgggctagggcaggggaggagggagagcagggttgggggagaggctgaggagagtgtgacatgtggggagaggaccagctgggtgcttgggcattgacagaatgatggttgttttgtatcatttgattaataaaaaaaaatgaaaaaagtgaaaaaaaaaaaaaaaaaaaaggggcggccgttttaaagaatccttggaggggcccaacttaacgcgggcatgcaactttt

SEQ ID NO: 6739 - DNA, 404 bp, Homo sapiens
taaagtaccgatgttattgatcttgttctaggaatggacaatgggtatagattgagcacattctagaatgtccatccagtggagctgtttttcagtgatgggacttttctccttgggcctcacaaataaccctgtctaaaaatttacccaagtctcctatttggtgattgtaatgaaaagacttgtaatttttactatgggaggttttacattttattaatgatgccttgtccttcaaagatagcactgccattgctatttagtattgttcttgaggaattgtcctctagtaacttaaggctttgtgtcacctgactcaggctcttttacctggtttactatgggatcagcgccatctgatttgatgagtattctgttactatggaaggagtttatttttcctg

SEQ ID NO: 6740 - DNA, 402 bp, Homo sapiens
catggctctctcaagccatgaccacactggagtaatggtttttattgtcaaccttaacacccatgaccaaatcggtaatttcagggtctaaaaaaagtcagcatgttttaactttgttgttttactatcctcaggcatccattccaatcaagaaatgatggtgctctgcatcagtggttcagagcctggttatacatatagatcactcagggagctttggaaaaataaagatttgtcagccctatctcaaacttgaatcaaaatttctggggtgtgggcacaataatctgtaattttctttgtttatacttcccctgatgccactggttccgatgccactggctggggggcctgctttgaaatgcttgtctgcagagtcacagcagccatgaaaaccttatg

SEQ ID NO: 6741 - DNA, 402 bp, Homo sapiens
gcttctctgataaactggatttccttgagggagatcagaaacctctggcacagcgcaagaaggcaggagccaaaggccagcagatgaggaaggggcccagtgctaaacgacggtataaaaaccagaagtttggttttggtggaaagaagaaaggctcaaagtggaacactcgggagagctatgatgatgtatctagcttccgggccaagacagctcatggcagaggcctcaagaggcctggcaagaaagggtcaaataagagacctggaaaacgaacaagagagaagatgaagaacagaacacactaaatagcatctttgaatacaaagaaccaagaaaaaggaatgaagactcgcaatttcacgacacactttgatcccttctgttggtgtcatgacagaa

SEQ ID NO: 6742 - DNA, 462 bp, Homo sapiens
  misc_feature (1)...(462): n = A,T,C or G
cccctattgaacctagagcntccgcaanggcannncngggnngacccacgcgtccggtctatgacatgaacaatgtgtgggataatgtcattaatatatcctaaattaacctaaacgtatttcactaactctggctccttctccataaagcacattttaaggaacaagaattgctaaatataaaaacataaataataccataatacatggctatcatcaaaagtgtatagaatattatagtttaaaagtatttagttgattacttttcagctttgttttgttttttgagacggagtctcgctctgttgcccaggctggagtgcagtggcaccatctcagttcactgcaacttctgcctcccgagttcaagcgattctcctgcctcggcctcccgagtggctggaattataggcgtgcaccaccacgcccggctaatttttgtatttttagtggagacagggg

SEQ ID NO: 6743 - DNA, 407 bp, Homo sapiens
ttagtatcaaaataatggctgtccagaaatactctgatactagctatggtcagcaacatttaatgaaaacgcttatgttaaaaataaacccctgcctcctggcttcaagcgattctcctgcctcagcctcctgagtagctgggagtataggcacgtaccaccacacccagctaattttttgtatttttactagagatgggtttcacagtgttagccaggatggtttcgatctcctgacctcatgatccgcccgcctcggcctcccaaagtgctgagattacaggcgtgagccactgtgcccggcctcaaaatcttaagaaaaggttcttttggtgcatggagttttacatggaataaattagtgcctctgcaatttaaatattttttacacagatttgatgctgtgc

SEQ ID NO: 6744 - DNA, 403 bp, Homo sapiens
  misc_feature (1)...(403): n = A,T,C or G
agcctggcgagctgaaacccgagctcccgctcagctggggctcggggaggtccctgtaaaacccgcctgcccccggcctccctgggtccctcctctccctccccagtagacgctcgggcaccagccgcggcaaggatggagctgggttgctggacgcagttggggctcacttttcttcagctccttctcatctcgtccttgccaagagagtacacagtcattaatgaagcctgccctggagcagagtggaatatcatgtgtcgggagtgctgtgaatatgatcagattgagtgcgtctgccccggaaagagggaagtcgtgggttataccatcccttgctgctggaaagatgagaatganngtgactcctgcctgatccacccaagctgtaccatctttgaaa

SEQ ID NO: 6745 - DNA, 410 bp, Homo sapiens
aaagccccagaaacaaagacttcacggacaaagtcccttggaaccagagagaagccgggatggaaactgcggacaccacagaggactatgacacgaccacagagcttgactatggggatgcaactccgtgccagaaggtgaacgagagggcctttggggcccaactgctgccccctctgtactccttggtatttgtcattggcctggttggaaacatcctggtggtcctggtccttgtgcaatacaagaggctaaaaaacatgaccagcatctacctcctgaacctggccatttctgacctgctcttcctgttcacgcttcccttctggatcgactacaagttgaaggatgactgcgtttttggtgatgccatgtgtaagatcctctctgggttttattacacaggcttg

SEQ ID NO: 6746 - DNA, 503 bp, Homo sapiens
  misc_feature (1)...(503): n = A,T,C or G
ccgggggtggnttttnnaccttgagcgccggtcggaactcgcccattgatntcccgcttgcgacccacgcgtccgaatagttgagccccaagtcctgaagaggcgggccagccaggcgggctcaaggaaagggggtcccagtgggaggggcaggctgacactgtgccctggtggagaaagcactgacctgtcatgcccccctcaaacctccttttctgacgtgccttttgcacccctcccattaggacaatcagtcccctcccatctgggagtccccttttcttttctaccctagccattcctggtacccagccatctgcccaggggtgccccctcctctcccatccccctgccctcgtggccagcccggctggttttgtaagatgctgggttggtgcacagtgatttttttcttgtaatttaaacaggcccagcattgctggttctatttaatggacatgagataatgttagaggttttaaagtgattaaacgtgcagactn

SEQ ID NO: 6747 - DNA, 479 bp, Homo sapiens
  misc_feature (1)...(479): n = A,T,C or G
ntttataattttcgtctcgaaattgcattcattcccgggncgacccacgcgtgcgaaagctattatgagtttccaagagggacaattaatgcattttcataccaaatgcgaatatttaggtgatcacgtgcatcttttcttgtatggatggaaaaatcaagaattgtacactgtttaatgagttctccatattcctttaggagatatttgctttgcaattacatgttacaattagaataattacaattaaaataatattacatgttacaattagattaatagtgatgagagggaaaaaagacacccttctgtttttttctctcaagccagtctaaaaacttgaagagccatttaaaattaaatgtcactatacttgtattataaatcaatacataagtttaaacctgttatatactcagtgcaacagaaaaacccatatggaggttcaaccactgatgtattttgaatgatcctaaatn

SEQ ID NO: 6748 - DNA, 379 bp, Homo sapiens
tgtccacacaatgtcttcacttgccgctgattattacattctgatcaatgcctgcatgctccaaagctccacactacaggttcaagagaagagtaatacgtggtcctgggggattttgaagatgttaaagggaaaagatgacagaaagaaaagtatacgagagaaacctaaagtctctgactcagacaataatgaaggttcatctttccctgctcctcctaaacaattggacatgggagatgaagtttacgatgatgtggatacctctgatttccctgtttcatcagcagagatgagtcaaggaactaattttggaaaagctaagacagaagaaaaggaccttaagaagctaaaaaagcagaaaaaaaaaaaaaaaagg

SEQ ID NO: 6749 - DNA, 416 bp, Homo sapiens
  misc_feature (1)...(416): n = A,T,C or G
agaagacccgtgtgaagctgccctccggctccaagaaggttatctcctcagccaacagagctgtggttggtgtggtggctggaggaggccgaattgacaaacccatcttgaaggctggccgggcgtaccacaaatataaggcaaagaggaactgctggccacgagtacggggtgtggccatgaatcctgtggagcatccttttggaggtggcaaccaccagcacatcggcaagccctccaccatccgcagagatgcccctgctggccgcaaagtgggtctcattgctgcccgccggactggacgtctccggggaaccaagactgtgcaggagaaagagaactagtgctgagggcctcaataaagtttgtgtttatgccananntnaactataaacgacaaaaaccagggggggcct

SEQ ID NO: 6750 - DNA, 420 bp, Homo sapiens
  misc_feature (1)...(420): n = A,T,C or G
gggattgttaagtgctgccttagttgctagtttattatccttactgtgaaggaataattaacattgtttcagacttttgtttgtgtgcttgcgttgatgacttttttaacttcaagataaatcaaagtaataagtttaacgtatattaaacctgttgaaatgataattatgtaaagataaatattctaggttagtcaagatttctcttaagatttaagtgcataaagaatagtaatttagaagtatccgtgaaaagttgataatgaaagaaatttgatgaaggtgaatattttataaattagaatctccactacttatccaatggtgttttatttcattaaggtagaacttgagaactcaagtttaaattgtcccccaccaccttcttctataaatgcaaacttaagaggaaaataatgn

SEQ ID NO: 6751 - DNA, 417 bp, Homo sapiens
  misc_feature (1)...(417): n = A,T,C or G
gcgcccacgcgtccgcccacgcgtccgatagtgtgttactagagaagtttctctgaacgtgtagagcaccgaaaaccacgaggaagagaggtagcgttttctcctgagcgtgaagccggctttctggcgttgcttggctgcaactgccgtcagccattgatgatcgttcttctctccgtattggggagtgagagggagagaacgcggaaaagaaaaaaaaaaagaaattgagtaaaaaaaaaaggagaattatcatagataaagaaaataattaaagaaaatatgattgataaaaaacaaaaaccgctggtgaatgggtatttttttcttggtggggggatataaggttgcgaacccgcccaaataatctttttctaatatgggggtgaaaaaaacgaggtggtgtttttttgtgtn

SEQ ID NO: 6752 - DNA, 442 bp, Homo sapiens
agggctcttaagaacgaacggcttgggcgcggactggtatccggggactgtgacttgcagggtccgccatggagccagagcagatgctggagggacaaacgcaggttgcagaaaatcctcactctgagtacggtctcacagacaacgttgagagaatagtagaaaatgagaagattaatgcagaaaagtcatcaaagcagaaggtagatctccagtctttgccaactcgtgcctacctggatcagacagttgtgcctatcttattacagggacttgctgtgcttgcaaaggaaagaccaccaaatcccattgaatttctagcatcttatcttttaaaaaacaaggcacagtttgaagatcgaaactgacttaatgggaagaacagaagaatttagttgctactgtagatttacatgattaagaggcagctttaattgccatg

SEQ ID NO: 6753 - DNA, 402 bp, Homo sapiens
gactggacagttccctctggactatactagatatgtaggcacagagcctactttcggttacctaataaatgggcagacagttgtgttattggcactattaagccatcctttttcttattacccataaaaatgggtgagctgctaggtttctctgtctacgcctcccgagaaaagaaaggcatagttataggaaactggaaagataatgagtggccccgtgaaaggatcattcagtattatgggcctgccacatgggcacaagatggctcatggggataccgaacccatctacatgctcaattggatcatacggttgcaggccatcttagaaataatttctaatgaaactggcagagctttgactgttttagcttggcaagaaacccaaatgaggaatgctat

SEQ ID NO: 6754 - DNA, 425 bp, Homo sapiens
  misc_feature (1)...(425): n = A,T,C or G
tgtctgtgagtttcttcaattacaaatgggcatttagtatagttatattgactataacatgtaagtaaatagctttctactgaccctaagttatcaaggtgaaaaaaaaacatgcaattcagtaattgaaaatgtggtgaaaagctgcagctgtcatcatcaaaacaactcataacatactttaaaatgttcaggtagcagtgagcattgttcatatgagaatggcggctgggtgatctctttgctgaattaatgagttcttaacatgtggacccaactgcctgtgtgagatctgtgtcttaaaacttactggaatggaaatctatgaattattgcaaattgtaatgctggaaacaaaaaataaatcctttgttaaagggttaaaaaannnnnnnnnnnnnnanaatntttaaaaaaggggggcg

SEQ ID NO: 6755 - DNA, 444 bp, Homo sapiens
ctgtaatcgataaaccccgatcaacctcaccacctcttgctcagcctatataccgccatcttcagcaaaccctgatgaaggctacaaagtaagcgcaagtacccacgtaaagacgttaggtcaaggtgtagcccatgaggtggcaagaaatgggctacattttctaccccagaaaactacgatagcccttatgaaacttaagggtcgaaggtggatttagcagtaaactgagagtagagtgcttagttgaacagggccctgaagcaaaaaaaaaaaaaaggggcgcccttttaaaagaatccttgggggggccaaatttaacgggggctggcgaggttatatttttttctttatggggggcggaataaaaaccaacttggagatttttgaaaagaacctttatttttggggggggacatattggcacaaccttcttccagaata

SEQ ID NO: 6756 - DNA, 419 bp, Homo sapiens
taggtgtagaccttccttaatttcaactcattaaaaaatgctttatagtttagggcaatggaaggaaggctggcatcaaaatattttgatcaaaaaagatgacaatgtaaaggctcagttgtggcatacagttttttgaaagtaacttgtaaagcatttaccatatcctaaatttgcactctttgcagacttgtgcacatatattccgctttcagaatagttatgcaaattgtacacaaacaaacaaacaggtggaagctttttaataaagaaattgcatttataaatgatctgtattagaatataataaatctccagttatagtcaattactacccatgttgtacaacagataccttctattttagttgctaataaagggctacacaactcataaaaaaaaaaataaaaaaaaaaggg

SEQ ID NO: 6757 - DNA, 497 bp, Homo sapiens
  misc_feature (1)...(497): n = A,T,C or G
aggtggtngccgcccgctcccgatagagatgtnagtagatcagcgtttcgaaacccggccgganaccccgggtcgacccacgcgtccgagctgcctgaagtgttattctaagatagcagaagtttcatcatttgcacactccttggagatcacacgccttaaccctgactttttttgctccactttttcagaagaagtgaagtcaagatgaagaaccatttgcttttctggggagtcctggcggtttttattaaggctgttcatgtgaaagcccaagaagatgaaaggattgttcttgttgacaacaaatgtaagtgtgcccggattacttccaggatcatccgttcttccgaagatcctaatgaggacattgtggagagaaacatccgaattattgttcctctgaacaacagggagaatatctctgatcccacctcaccattgagaaccagatttgtgtaccatttgtctgacctctgtaaaaaatgtgatcctac

SEQ ID NO: 6758 - DNA, 411 bp, Homo sapiens
cataattcccttgagatccatccaaggctttggatgtatcactagtttgttcctttttattgttgagcatatagtgcagatatatcacttagttttaacagctaaggtatctatttaaagatatcatcttaaaactaaatgttacacaaattcatgcaactttcatataagcattaaaccatacagctgcatctacgtaagtataattagcaaaatcactgaacatgccacttcctgcctccgtctgcggtgttgacatatgaggtacagcaatccgagagtcaactgttatcacggtggccactgagggcagtgaaatcactttgatagcaccagtacccagatgtttgaaacttaagaaagtatttctttaatttttcataaacccatcataaaaaaaaaatcccgact

SEQ ID NO: 6759 - DNA, 415 bp, Homo sapiens
atcagcgtaatgatctgcagcttcgtagtactcccttccggtacctacttacaccttccatgcaaaaaagtgttcaaaataaaataaagagccttaactgggaagaaatggaaaaaagccggtgcattcctgaaatagatgattccgagttttgtatccgcattccgggaggaggtatcacaaaaacactctatgatgaaagctgttctaaagaaatccaaatggcagttctgctgaaatttgtttcagaaggggacaacatcccagatgcattaggtcttgttgagtatcttaatgagtggcttcagatactcaaaccacttagcgatgaccccacagtatctgcctcacggtggaaaataccaagttcttggagattactctttggcagtggtcttccccctgcacttttctg

SEQ ID NO: 6760 - DNA, 406 bp, Homo sapiens
  misc_feature (1)...(406): n = A,T,C or G
aagacagctgggtgtacagcgtcctcgaaaccacgagcaagtgagcagatcctccgaggcaccagggactccagcccatgccatggcggattctgagcgcctctcggctcctggctgctgggccgcctgcaccaacttctcgcgcactcgaaagggaatcctcctgtttgctgagattatattatgcctggtgatcctgatctgcttcagtgcctccacaccaggctactcctccctgtcggtgattgagatgatccttgctgctattttctttgttgtctacatgtgtgacctgcacaccaagataccattcatcaactggccctggagtgatttcttccgaaccctcatagcggcaatcctctacctgatcacctccattgggtgccttgttgagagaggatan

SEQ ID NO: 6761 - DNA, 476 bp, Homo sapiens
  misc_feature (1)...(476): n = A,T,C or G
tgcgggattaaaactgagnctagagctatcggcacggactnnnngggncgacccacgcgtccgaagaagcatcttcacatattaaaagattcagacagggatctgtgtataggagtaatttgcagttatttaacataaacctgatttgcagtgatctctaagtaattctgcaaaatccggtattactatgtcaagttattgcttttggtaaattgtctgacccagttattaatgaaagaatatggatttaaaaatttttaaactaaataatttgtgctgtcacagaaatggtattgttgctcttgtttactgggtataatttcccaatgcattgatgtgaagggatagaaaatctaaactaatttagttatccattggggggtgtatttactgtgatgaagatgagacagatgccatcttagctttgtgaatcaactggngtgttttcactgataaacaacacatatcaggtgtgt

SEQ ID NO: 6762 - DNA, 409 bp, Homo sapiens
cttggctcttgggctggagtaccgtggtgagggagtatacactagaagtctttagtacaaaactgctctagggacacctggtgattcctacacaagtgatgtttatatttctcataaagagtcttccctatcccaaggtcttcatgatgccagtagccatatatgataaattatgttcagtgataacttagttatcagaaatcagctcagtggtcttccccgccatgattcacatttgatgagtttttaaaaatcaaagtgattttgaaaatctctaatggctcagaaaataaaaacatccagtttgtggatgactatatttagatttctctagactctagtggaagacctttggaaaggccatgccaaccgtgcttgtactgctagaagcactttatgtttccttttt

SEQ ID NO: 6763 - DNA, 410 bp, Homo sapiens
aaataattgttgaaaatatggaaattttacattttatttaggaaattaagaatttcctatttaaagttttagatgagaaatttttaaacaggaaaatgatatagcaggaaaatgtaaataatatcagtggtagttaatatcagataggttgaatataagcaaaaaacaagcaaacagaaaaactcagaaattaatgttagctcccttcccaaatagaactgataaacaaaaccaagactgtatttgaaaatacaaataaaataggcaaatgtttggcaaatccaattaaggaaataaggggggaaactcatacagatatgcagcatcagacattagaaaagaagtataactacagatggggagagatgccacaaattgagtataaaaattagtggtcataatggtaaata

SEQ ID NO: 6764 - DNA, 476 bp, Homo sapiens
  misc_feature (1)...(476): n = A,T,C or G
cgtgggatttatattgagccgatcgcaatcngcangnacnnnnngggnngacccacgcgtgcgccgctctccagcccgcttgaacgctccccgcagccactttcacttattggaatggccaacaggggacctgcgtatgggctgagccgggaggtgcagcagaagattgagaaacaatatgatgcagatctggagcagatcctgatccagtggatcaccacccagtgccgaaaggatgtgggccggccccagcctggacgcgagaacttccagaactggctcaaggatggcacggtgctatgtgagctcattaatgcactgtaccccgaggggcaggccccagtaaagaagatccaggcctccaccatggccttcaagcagatggagcagatctctcagttcctgcaagcagctgagcgctatggcattaacaccactgacatcttccaaactgtggacctctgggaaggaaagaa

SEQ ID NO: 6765 - DNA, 394 bp, Homo sapiens
aggataagcaaggacttccttggtggcttggaataagctataagggaattggccaatgtgatatacaagacaaggtgaagcctcggaagttattccaatggaaacagctggagaacttatatttccgtgagaaaaaatttgctgttgaagttcatgatccacgaaggtgaggatcaaagacgtttctctgtatgacacagttactatacaaataacgctgctatcaacatttgtgtacaagtttttatatgaacatatgttttcatttctcttgggtgtatacctaggaatggaattgctgggtcaaatggtaactatctttaaccctctgaggaatggcaaggctacttttcaaagtgctgcaccattttacatcccaagcagcagtatatgt

SEQ ID NO: 6766 - DNA, 449 bp, Homo sapiens
  misc_feature (1)...(449): n = A,T,C or G
tcgcgccatcatgaacgtatccgtaactatacgcactagatattcatgaccaaccgactacttcagaggaaacaaatggtgattgatgtccttcaccccgggaaggcgacagtgcctaagacagaaattcgggaaaaactagccaaaatgtacaagaccacaccggatgtcatctttgtatttggattcacaactcattttggtggtggcaagacaactggctttggcatgatttatgattccctggattatgcaaagaaaaatgagcccaaacatagacttgctagacatggtctgtgtgagaagaataagacctcacgaaagcgacgaaaggaacgcacgaacagaatgaagaaagtcagggggactgcaaaggccaatgttggtgctggcaaaaagccgaaggagtaaaggtgcttgcatgatgttagctgtggccactgtggatn

SEQ ID NO: 6767 - DNA, 413 bp, Homo sapiens
atcggtccttacagccgctcgtcagactccagcagccaagatggtgaagcagatcgagagcaagactgcttttcaggaagccttggacgctgcaggtgataaacttgtagtagttgacttctcagccacgtggtgtgggccttgcaaaaagatcaagcctttctttcattccctctctgaaaagtattccaacgtgatattccttgaagtagatgtggatgactgtcacgatgttgcttcagagtgtgaagtcaaatgcatgccaacattccagttttttaagaagggacaaaaggtgggtgaattttctggagccaataaggaaaagcttgaagccaccattaatgaattagtctaatcatgttttctgaaaatataaccagccattggctatttaaaacttgtgattcttg

SEQ ID NO: 6768 - DNA, 429 bp, Homo sapiens
  misc_feature (1)...(429): n = A,T,C or G
agcgtctgctgctggtggagctgcctgcgttcctgattagctaccagcgcgcctttaatgaatttctggagagaggccatcagctggccaattacagggcctatggtattgcctacatctacaactgcctgtccttccggatgtccatggagcagaattggcaggtaccccaggacaccctgagcctcctgctgggccccctgcgtgagctcaatagccatggctttgacaccctgctccagaacctgcatgatgacccgcatccactgttcaagaggttcacgcacacccgctgggcggcccctgtggagaccctgaaaaacatcatcgccactgaagacacgaggctgcctgacgtctcatagctgtagggctgtttccgagaggagcttatggaggccttgcacctgcacctggtgaatagtacan

SEQ ID NO: 6769 - DNA, 418 bp, Homo sapiens
  misc_feature (1)...(418): n = A,T,C or G
ggattctgttattaattaaatgttacatttaattatagctcatcctaggagtgagttttctcttttctgaaagtaagtgactcattgcactccagcctgggctacagggcaagactccctctcaaaaaaaaaaaaaaaaaaaaagggccccggggggaaaaaaaaaaaaaggggggaaaaaagggggggggtttaaaaaaaaacccgggattttttaaatttaaaatttaatttaaaattaaatttaatttaaaaataaaatttaaaattttggacaaaaaaaaaaaaaattcggggggggttcgaaagggtttttcaaaaaaggggggggaaaaaaaaaaaaaaaaaaaaaaaaaaaaaaaaaaaaaaaaaaaaaaaaaaaaaaaaaaacnggggggggccccccccccaaaccccc

SEQ ID NO: 6770 - DNA, 416 bp, Homo sapiens
  misc_feature (1)...(416): n = A,T,C or G
gcgccctacgcagtcaaggggaaccagtgggtgggctatgatgatgtgaagagtatggagaccgaggttcagttgttaaagaatttaaacctgggaggagccatgatctggtctattgacatggatgacttcactggcaaatcctgcaaccagggcccttaccctcttgtccaagcagtcaagagaagccttggctccctgtgaaggattaacttacagagaagcaggcaagatgaccttgctgcctggggcctgctctctcccaggaattctcatgtgggattccccttgccaggatggcctttggatctctcttccaagcctttcctgacttcctcttagatcatagattggacctgcttttgttttcctgcagctgttgacttgttgccctgaagtacaataaaaaaaattcn

SEQ ID NO: 6771 - DNA, 321 bp, Homo sapiens
  misc_feature (1)...(321): n = A,T,C or G
gggggggggccgggcccnttccccctgaaaccctgctgaagtcatgcganaccgcgncgacccacgcgtccggggcagtggaatgacaggaactgcctgtactcccgactgaccatctgtgtacatctccacacacttctcttttccccgacctgcaggctcccctcggtaccaggtggtgtagtttacaggggtcccatctgagtagcggaagtctccagggctgggaccctcagtcaggcctacataggcatatgtgttgtacttcttcacgaagcttgcaatggcctcattttcctctggattccttgggacagcaat

SEQ ID NO: 6772 - DNA, 425 bp, Homo sapiens
atagttctagccatgaccgccgcccttctgtatctgccgctactagaaatgctcaagaaccagctggaccaggaggtggagttcttggccacgtgcattgctcatctcaaagcggtacagaccaagtatgtggaagccaaggactgtctgaacgtgctgaacaagagcaacgaggggaaagaattactcgtcccactgacgagttctatgtatgtacctgggaagctgcatgatgaggaacacgtgctcatcgatgtgggaactgggtactatggagagaagacagctgaggatgccaaggacttcttcaagaggaagatagattttttaaccaagcagatggagaaaatccaaccatctcttcaggagaagcacgccatgaaacaggccgtcatggaaatgatgagtcacaagagtcagccctg

SEQ ID NO: 6773 - DNA, 423 bp, Homo sapiens
gtcccgcgggactgtctcttgcttcaacagtgtttggacggaacagatccggggactctcttccagcctccgaccgccctccgatttcctctccgcttgcaacctccgggaccatcttctcggccatctcctgcttctgggacctgccagcaccggttttgtggttagctccttcttgccaaccaaccatgagctcccagattcgtcagaattattccaccgacgtggaggcagccgtcaacagcctggtcaatttgtacctgcaggcctcctacacctacctctctctgggcttctatttcgaccgcgatgatgtggctctggaaggcgtgagccacttcttccgcgaactggccgaggagaagcgcgagggctacgagcgtctcctgaagatgcaaaaccagcgtggcggccgctctagaa

SEQ ID NO: 6774 - DNA, 423 bp, Homo sapiens
tgcttctgagtccccgagaacctcttcaaccacagctctcccttagggactgggaacaatttgacaccgtcagcattcaatatttttctaattactttaacttttttattataaaatatttaacacttatgtagaaaagtccaatagcataaaaggacagcttggcaaattattataaagtggatacttataaataccactgagtagaatattaccagctgtccagaaaccccccatggtcccttccttcctgacaatgccctctctctccctagaaattactgtcctgctttataatgtattgccatgtatgtattcctaaataatatagtttggttttacttatttttgaaactatgtagacagaatcatacacattcttttgtggctgacttctttcaagcaacattgtgattttaagac

SEQ ID NO: 6775 - DNA, 405 bp, Homo sapiens
atagagcgaccggccgaccatggcgcccggagtgtttcgcgggccgactccgtactggaggctgcgcgctgggtggcgccgcgctgctcctgctgctcataccggtggccgccgcgcaggagcctcccggagctgcttgttctcagaacacaaacaaaacctgtgaagagtgcctgaagaacgtctcctgtctttggtgcaacactaacaaggcttgtctggactacccagatacaagcgtcttgccaccggcttccctttgtaaattgagctctgcacgctggggagtttgttgggtgaactttgatgcgctgatcatcaccatgtcagtagtcgggggaaccctcctcctgggcattgccatctgctgctgctgctgctgcaggaggaagaggagcccgaacg

SEQ ID NO: 6776 - DNA, 389 bp, Homo sapiens
ccatttctggttatgttcattttgtcttgtaaatttgagtcaccatctggtgtgattggttactccagtactactttgttcttatttacctcctttgtgctgccattgacaaatatgtcacatttgtatatgttctgggtctaaagcataattacatgatattttatacaattgctctttaagagaaggaagaaatgcatttatactgtctttcataattacataattacatttaccaccgcccttttttttttggaatggattcaacttaggatctggggtcacttcattccaggcagaaggcctttttttaatatatttttatataaggcaaatctgatagggacaaatctttactttttgtttatatgggctatctttattttacc

SEQ ID NO: 6777 - DNA, 469 bp, Homo sapiens
  misc_feature (1)...(469): n = A,T,C or G
ggccgggcgcnatggaactgaagcctangaactgacagcttgcggaaccgcccggaatcccggncgacccacgcgtccgacccccactccgagaacttgaacactcactccacagccctggaatttgccgctaacttattatcccctagctttgcccagacaccttgttttattttattataatgaattttgtttgttgatgtgaaacattatgccttaagtaatgttaattcttatttaagttattgatgttttaagcttatctttcatgcgtctagtgttttttagatacagagacttggggaaattgcttttcctcttgaaccacaggtctacccctgggatgttttgagggtctttgcacgaatcattaatacaaagaattttttttagcattccaatgcgttgcttatatattatcgtggagatgattattttgttactattacgccaaataaatatatttttg

SEQ ID NO: 6778 - DNA, 484 bp, Homo sapiens
  misc_feature (1)...(484): n = A,T,C or G
gcctgcctttgaacccctgcggaatgaggtgcatctcccgggncgacccacgcgtccgcccacgcgttcgggtttttaaagggggggaccagtctccttctatctaactcatactgtgaagcaatgtttaatcctgtgagagatcagctgggtatcattctaaaggagaattattttagggttagaaagatttatgacttcagcttgtaaaagtggcaaatagcactgcaagagaagaaacaaatcacttgtgaaaagttgtatttgccatgttaggtaggattttaggtaggattaagtaatgaatatgttttgtggagctttctgaatctgagattgaacaaggtggagagatacaaatcatccctatttacctttttaaaaattgatctgtttattgatgtttttgttattattcaccaccgtatttggaataggactgttattaaaccaaagcctgataacaaaaccagtcagtttttgg

SEQ ID NO: 6779 - DNA, 468 bp, Homo sapiens
  misc_feature (1)...(468): n = A,T,C or G
tgagagtttttcagaatacctcgtaagaacnngcgaatncgggtcgacccacgcgtccggtagaacccaactcatgtggaatagatctaatgcaaattactttgtcaagcttgcaaaggtaattaaactcgagggcgtacttacctaaattataatacaggaaaatagtgtcatatttacaaacctaattatatcaagtgggagaattacctgaatgatagtaatcacatggatggcgtccacatactctatatgctttttttttattacaaatgctttaaaaataggagattgaaatataacaggaaccaaaacaaacaaacaaaaaaaccaaaaacaaaacccagaatctggaatcaaacaaaccccagccctcacgtttaaatcctggcaccagggcttcctttctgtgtaatcttaggtaagtcacttaacccttaccctcaacttatcatctataacataaga

SEQ ID NO: 6780 - DNA, 404 bp, Homo sapiens
ttcatagtcattgagaatgtggagataccagtttgggtggggggtgatcaccaggggacctagggagatccccttcccaccctctctgttggcctcagagtcactcctgccccctctccctgacttggtgctcacatgcacctcactagggtttgtgaccagggtctggatgagcttgaatttgaatgaattgagtttgtatttctagaaccctgggtttttacatgtttggtctttttttgttttggtttgtcaccctcgataaaggaagtatattcatccaaaaaaaaaaaaaaaaaaaaaaggggggcccgttttaaagatcccttgggggggccaaggttaaccgggcgtggaaaggtaaaacctttccccttatggggagcgatttaataaccagcctg

SEQ ID NO: 6781 - DNA, 407 bp, Homo sapiens
tgatccttttaatggaacagattttattgactgcctcgaaatctttttgaacgattctgccacagaaggcatcatattgattggtgaaattggtggtaatgcagaagagaatgctgcagaatttttgaagcaacataattcaggtccaaattccaagcctgtagtgtccttcattgctggtttaactgctcctcctgggagaagaatgggtcatgccggggcaattattgctggaggaaaaggtggagctaaagagaagatctctgcccttcagagtgcaggagttgtggtcagtatgtctcctgcacagctgggaaccacgatctacaaggaatttgaaaagaggaagatgctatgaaagaaaaaaaaattcctaaaactgtggaatggatcacgtagacatgtaa

SEQ ID NO: 6782 - DNA, 403 bp, Homo sapiens
gtagcgtggccggcgcccgagctggggttgtgtccctgctgggctgccgttccagctggactgccgccatggaactcagcgccgaatacctccgcgagaagctgcagcgggacctggaggcggagcatgtggaggtggaggacacgaccctcaaccgttgctcctgtagcttccgagtcctggtggtgtcggccaagttcgaggggaaaccgctgcttcagagacacagagacggtatctcgccgtgttgctcaggcaggtctcaaactcctgggctcaaatgatcctgccgcctcagcctcccacagtgctgggattatagacgtgagtccccatgcccagcctccctcgttatttttatctttggacctgcaagttaaaagatgcctaccctgttctgtaa

SEQ ID NO: 6783 - DNA, 494 bp, Homo sapiens
  misc_feature (1)...(494): n = A,T,C or G
gggacataattttgatccccgttgatcgccttgagtacccgcgncgacccacgcgtccgcgttttaagagggccgccttccaggagaatgtggggagacagtgcactttccctcatggtattgatattttgaccacagctgactatgttgccgtcgggaacagatccaactgtttcctggttataagtgtgtttattgccggctttcctgagtacacgcagccaatgatagaccacctggttaccatgaagatcagccactgggatggggtcatccgagagttggctgcgagggcgctgcacaacctggcccagcaggcacccgagttcagcgccacgcaaggggtctgggaggacagctcatgagacaagcagcgtgtgttttaatagaaaagttgtcactttccaaaatgccctttagaggtgacaccgtaattgatggttggcaatggctgataaatgacactttgagacatctccatctcatctcaaggg

SEQ ID NO: 6784 - DNA, 509 bp, Homo sapiens
  misc_feature (1)...(509): n = A,T,C or G
cggtcgnngnnnnnttttnaaatggagngccctcgnattnnncactcganngtcatgcggaacngcnccggaannnncgggnngacccacgcgtncgcccacgcgtncgaccagtcactgctttacaggacagggggttgaagctgagccccgcctcacacccacccgcatgcactcaaagattggattttacagctacttgcacttcaaaattcagaagaataaaaaatgggaacatacagaactctaaaagatagacatcagaaattgttaagttaagctttttcaaaaaatcagcacttccccagcgtagtcaagggtggacactgcacgctctggcatgatgggatggcgaccgggcaagctttcttcctcgagatgctctgctgcttgagagctattgctttgttaagatataaaaaggggtttctttttgtctttctgtaaggtggacttccagcttttgattgaaagtcctagggtgattctatttctgctgtgatttatct

SEQ ID NO: 6785 - DNA, 470 bp, Homo sapiens
  misc_feature (1)...(470): n = A,T,C or G
cggcgcgggatcncattgaaacctacngnacttgatcctctcggaaccgcccccgaanncccgggacgacccacgcgtccgcggacgcgtggggtttattgcatattcttttccctggaagtgaaagagaaatgtttttgttgttgcattgattacattttataaatttgcttagctggaaagtttgggaaaagaggcctgtttgtcaattgtacaaccgattgtgaagctctagtgtgaatatttttacgtctgtattagacattttctttgcaaatctattgttcgattgaaatgtaaatgaaattaaagatggtgtacacccatcatgtaaaaagcaggcaccatctctaagatggatttaatgctcatttttaaggcatatactcagcttctatttaaaactataatttaaaatagttctgtacaatgaaatggggaatatatatgggaataaattctattccatg

SEQ ID NO: 6786 - DNA, 417 bp, Homo sapiens
aatgaaagagaggtggaaggatgccagaggaagaaaaggaaatgtgcagaagaaaaggaaatgtgcaaaagaaagtgcttccatgggaagactaccaggttagttagaatgcgaaaaacacaaaaaatgctaagtaagaagtataaaaagcacatgaaagaagtagtaaaaaaaacgaacaaacaaaaacaggtataaaggggcattctggcccttcaaaacaatgatcttcaacagtaaatgcaagcacaagaaggctccaggcttgggaggccaaggtgggtggatcgcttgaggtcaggagttcgagaccagcctggccaacatggcgaaaccctgtctctacttaaaaagaaaaaaatcagctgggcgtggtggtggatgcctgtaatcccagctacttgggaggctgaggcg

SEQ ID NO: 6787 - DNA, 456 bp, Homo sapiens
  misc_feature (1)...(456): n = A,T,C or G
ctaactccgaatacctctgnacttcgagcgccntcccgggncgacccacgcgtgcgagcacgggggcttcttcacgtgccttggccgcgaggggcgggtgtatgatgacctcaagtatgtgtggctgcaggggaggcagggatggatgtattgtcgcctgtaccgcactttcgagcgcttccgccatgctcagcttctggacgcagcaaaagcaggtggtgagttcttgctgcggtatgcccgggtggcacctcctggcaagaaatggtgcctttgtgctgactcgggacggccgcccggtcaaggtgcaacgaaccatcttcagtgagtgtttctacaccatggccatgaacgagctgtggagagccacaggggaagtgcggtaccagacggaagcggcggagatgatggatcagatcgtccactgcgtgcaggaggacgcgtcgggactggccg

SEQ ID NO: 6788 - DNA, 409 bp, Homo sapiens
caagatcaaagctgcaggaaaatggacagtgaggttcagagagatggaaggatcttggatttgattgatgatgcttggcgagaagacaagctgccttatgaggatgtcgcaataccactgaatgagcttcctgaacctgaacaagacaatggtggcaccacagaatctgtcaaagaacaagaaatgaagtggacagacttagccttacagtacctccatgagaatgttccccccattggaaactgacgcttggctcctttcttgtggatggattttctcaaagtacacagataaagcatggtttgtttcagtctccaaattcaaacctttgagtaataaatcagcactcaaaaatgtacacccatttagtttgtggtagcaaagtgcaatgcgaaattgaatgagaaac

SEQ ID NO: 6789 - DNA, 409 bp, Homo sapiens
  misc_feature (1)...(409): n = A,T,C or G
aaaaagttttaatggccacatcattacctttgaacactgcctggtgcctagaacataaaataagattcacttactttagcagaaatgttatactgtcacgatgactaacatgacattttgtataaacgactaggtctgctattagggatcaccttataaatcagtttgggtttgggttagaaggagaatgaaataagagagattgtatttaaactagcctaggaaaatggtgcactgaaataaaggttactgcaggggttttccccatgacaagcanaaaaaaaaaaaaaaaaaaaaaaaaaaaaaaaaaaaaaaaaaaaaaaaataaaaagaaaaaaaaaaaaaaaaagaaggggtttaaantaaccctagaaaaaggggccctgaagtaatggttattgttggggtt

SEQ ID NO: 6790 - DNA, 386 bp, Homo sapiens
aatttatactcatgtcctaaaggagaatatgcggtaataaagtatatttgttaagtaactaattgaaataggcttggttttaagagttccagtatataataatcacaaattgaaacctgacagtatcttgggagttccagtaatgtcacaaattattgaataagcatgccagtgtgcaagggtaatgtaaggattgttagcctatctaaatattcaaaattactttaaaacttaagtatgttttctgatttttaagaattcagaagtgttctgtaatggattcagatgtttcatttgtagtataatgaaatgtttacagaaagataactttttcattaaaatatttttagaaatgaaaaaaaaaaaaaaaaaaaaaaaggggggcg

SEQ ID NO: 6791 - DNA, 414 bp, Homo sapiens
aagacatctttggaaatgatgagattatttcctgtgttaaaaaaaaaaaaaatcttaaattcctacaatgggaaactgaaactaataatttgatcctgatgtatgggacagcgtatctgtaccagtgctttaaataacaaaagctagggtgacaagtacatgttctttttggaaagaagcagggcaatgtatattaattattctaaaagggctttgttcctttccattttctttaacttctctgagatactgatttgtaaattttgaaaattagttaaaatatgcagttttttgagcccacgaatagttgtcatttcttttatgtgcctgttagaaaaaagtagtattgtgtatttgctcagtatctgaactataagcccatttatactgttccatacaaaagctatttttcaa

SEQ ID NO: 6792 - DNA, 410 bp, Homo sapiens
  misc_feature (1)...(410): n = A,T,C or G
ctggttgcagaagcctatatagggtggctcatttggacgaagtattgttaaggtggttattagaagactcgcaacttagaaaaggaagtaaacatgttaatactagctttcataaatccccctctctaaaaaacacccctttctaaaaaattcacattactaaggcatcccctacacagaatgtttagtagggaggtattaaaattaatagcaattctgagtaagttccttctcatgtagttaatgcagcatgatgaaagaaataaaagtctccttatttttttactttctgtgttgcttcttaaatatactccttcaagtcaggttagcttaccttgggtgtttgtattttgttggcttatgtttgcatgtgtgaattanaaaaaaaaaaagcagaatgaaaaaaaaaa

SEQ ID NO: 6793 - DNA, 384 bp, Homo sapiens
  misc_feature (1)...(384): n = A,T,C or G
actttttcattgatctgaattgcttaaatcgcatatattgtaaaataggatcagatgtatattttaaagtaattggaatggattttcctcttgaaatgctttgtctactcagctataaaatattcagatacaagttttatctcacgngaatactcttggattgcttttgctttggtgacatgcttataaagggtcatcctagatacattctttgttttttaagtgtatttcattgagaatctttccatttagtctgatttttttcctaatattctagcaggctggggtggtataaagccctcctgacaagccttttgcctacaggtttacctgaaaatgagctacatatggtcgtcattttctttaactctcaaaataagaaan

SEQ ID NO: 6794 - DNA, 414 bp, Homo sapiens
atctcttataaagcagcataaccttggcttgattaaggaattgtactttcaaaacataatctgataatagtaacacggtatattatactctcattacaatcaaatgatagaaattacttgtgtacaagggctgcaaaactatatccactgtttaaatattttaatatatctcctatctgataacttaattcttctaaattaccacttgccattaagctatttcataataaattctgtacagattccccccaaaaaagagatttatttatgaaatatttagagtttctaatgtggaattttaaataaagtatcataactgtaataagtaaatatttatttaggaatactgcgaacactgagctaattattcctgcgtcagtctatgaaatccctgttttgaaatacgtaaacagg

SEQ ID NO: 6795 - DNA, 425 bp, Homo sapiens
  misc_feature (1)...(425): n = A,T,C or G
tcaaaactgcaaccatggggtatgtagtatgaccaactgcatttaacaaaactcctctaagtacttctaaatattctgtgcaaatatcttgagaacttcaacatcctaaaaatgtgtttctacaagactttatattttaagctaagtggaataatacaacgtaactaaaacatggcgggtaccgaaaggagggcaattcatggaagaaatttcctctgttcattccgttctcttcaacctaagcaatatggatgtgtgagtgtgtgatttattatggtaccaaaaatgtccaccttctttcctgcagcggaataagcttttttgaaatgctgaggttttattttaatagttgacaacctgggaaagttctgagtatttattttactgctcttttttgtgcatagaaaggtttagtanggtacttn

SEQ ID NO: 6796 - DNA, 433 bp, Homo sapiens
tcaaaactgcaaccatggggtatgtagtatgaccaactgcatttaacaaaactcctctaagtacttctaaatattctgtgcaaatatcttgagaacttcaacatcctaaaaatgtgtttctacaagactttatattttaagctaagtggaataatacaacgtaactaaaacatggcgggtaccgaaaggagggcaattcatggaagaaatttcctctgttcattccgttctcttcaacctaagcaatatggatgtgtgagtgtgtgatttattatggtaccaaaaatgtccaccttctttcctgcagcggaataagcttttttgaaatgctgaggttttattttaatagttgacaacctgggaaagttctgagtatttattttactgctctcttttgtgcatagaaaggtttagtagggtacttttttgcatt

SEQ ID NO: 6797 - DNA, 487 bp, Homo sapiens
  misc_feature (1)...(487): n = A,T,C or G
gccccgcccccccccccctcccatgatagcccgtagaccccctcgaanacccgggncgacccacgcgtccgcaagcagctgggactacaggcgcccgccaccatgcccggctaatttttttgtatttttagtagagacagggtttcaccgtgttagccaggatggtctcgatctcctgacctcgtgatccacccctctcggcctcccaaagtgctgggattacaggcgtgagctaccgctcccggcccaccctcagatctttaatggctggtatcaccacttacaaaaagtgccttgaacttgatggagcttacattgaaaaataaagcttatattttttatttttatcttttaattccattttcccacaaactttttgaaagcctcccccctcccataaatttcacttgtaaatatgttaaaactctaaaataaatcatcaccattttgttttaaaaaaaaaaaaaaaagggcggccgttctaaag

SEQ ID NO: 6798 - DNA, 415 bp, Homo sapiens
ttttctttcttctcaaaattttctttccttttattttttagtaatcaagaaaggctggaaaactactgaaaaactgatcaagctggacttgtgcatttatgtttgttttaagacactgcattaaagaaagatttgaaaagtatacacaaaaatcagatttagtaactaaaggttgtaaaaaattgtaaaactggttgtacaatcatgatgttagtaacagtaatttttttcttaaattaatttacccttaagagtatgttagatttgattatctgataatgattatttaaatatttctatctgcttataaaatggctgctataataataataatacagatgttgttatataaggtatatcagacctacaggcttctggcaggatttgtcagataatcaagccacactaactatgg

SEQ ID NO: 6799 - DNA, 470 bp, Homo sapiens
cagaggggggggttcgaatgaattccaatgagagtctagaaccgcccggaatccgggtcgacccacgcgtccgcccacgcgtccggatagcaggtcagttgatcttctgcaggaaggtgcagcttttccatatgagctcaaccacgccgccagtccattcttaaggaactgccgactaggactgatgatgcattttagctttgagcttttgggggttattctaccaacaaacagtccattggaaagaaaacagtccctggaattaacagatcagaatgtttatgtaagaatcttgcacagcactgctaatgtaaatttcagttgtttttccctctaggacaaacacttaccaaaatatgcaacttttttttggtgggaagagagattgtcctgtgatttctacccatttcctgaggcctgtggaaataaacctttatgtacttaaagttatacagaaaatagaataaagg

SEQ ID NO: 6800 - DNA, 473 bp, Homo sapiens
  misc_feature (1)...(473): n = A,T,C or G
ctccctatagatacccttgcgaaatgagagccattcccgggnccacccacgcgtccgctagttctagatcgcgagcggctgcccttcgcctgtttcgtggcgccttgtgaccccgggcccctgcggcctgcaagtcggaaattgcgctgtgctcctgtgctacggcctgtggctggactgcctgctgctgcccaactggctggcaagatgaagctctccctggtggccgcgatgctgctgctgctcagcgcggcgcgggccgaggaggaggacaagaaggaggacgtgggcacggtggtcggcatcgacctggggaccacctactcctgcgtcggcgtgttcaagaacggccgcgtggagatcatcgccaacgatcagggcaaccgcatcacgccgtcctatgtcgccttcactcctgaaggggaacgtctgattggcgatgccgccaagaaccagctcacctccaaccccgg

SEQ ID NO: 6801 - DNA, 404 bp, Homo sapiens
gtgaaaccccatctctactaaaaatacaacaaagttagccgggcgtggtggcgggcgtctgtaatcgcagctgcttgggaggctgaggcaggagaatcacttgaaccctggaggtggcggttgcagtgagcacagatcatgccactgcactccagcctgggcaacaaaacgagacttcgtctcaaaaaaaaaaaaaaaccttaaatttgggttctttggggggggttttcccaatttttttgggggggcccagggccaatggtttcacttttgtttgggcacccccttgcccaaagcccaataaaggctgtttttccctttgtttccagggttgagaaacaaaaagaaccctctgttttggggggggggaggtaaagtatacatttattttttattgggactgg

SEQ ID NO: 6802 - DNA, 418 bp, Homo sapiens
  misc_feature (1)...(418): n = A,T,C or G
cccacgcgtccgcccacgcgtccgcccaaagctaagattctaatttaaactattctctgttaaaaaaaaaaaaaaaaaaaaaaaaaaaaaaaaaaaaaggggggggccctttaaaaaaatccctgggggggcccaaatttacccgggggggaaaaataaatttttttttttttaaggggggcaaaaaaaaaccccccgggggttttttgaaaaaaaccctttttttgggggggggaaaaattgggaccaccccccccaaaaaattaaaccctttagggaaaaaaaaaaatttttaaggggaaaagggggaaaaactcctttttttttttttttttaaaaaatgttggncncnnnnnnnnnaaccccttttttttgggggggggttggtgggccccccccccccccaatttaaaagctg

SEQ ID NO: 6803 - DNA, 511 bp, Homo sapiens
  misc_feature (1)...(511): n = A,T,C or G
ctttgattgcctccgangcccgaatgatggcctagcacgcgcccggcgttgctgattccagagagctaaagccgatgctgaagaaaaggtgactggtctcatgagccctgaagaatgaactcagaggaggttgtttacatgaggttctcccactcaccagctgttgagagtctgcgattatgaagagcaggatcttattacttcaatgaaagcatgtaacaagtttctcaaaccaccaacagccaagtggatttggtacagtgcggctgtctaataaataatcaaaagcatttgatagaaatctgtcttgccttaaaacaggcttaaacaacaacaaaaaaattaaaaagggggggccttttaaagaattcccgggggggggcctagtttggggggcgagcctaatatttttttttctctttggggaggagtggtagatcatgcctgtgggtccttcacgaggggacctttttgctggtggatcacctgtggggcccacctcctcaacagt

SEQ ID NO: 6804 - DNA, 476 bp, Homo sapiens
  misc_feature (1)...(476): n = A,T,C or G
cgccgtccgatgaggttnttcctagtagcgatgcgaaccgcccggaatcccggtcgacccacgcgtccgaccacgcgtacgaaacatttcaaactaattatgtagaatctttaattgcaggtaataaggaatctgtattgagttaattttttaaattatgataaaatatgcatacacataaaatgtaccattttaagtgtatgaagcgtaccattcagaggcattaagtacattcacattgttgtgcaactgttgatgctattcatctccagaactttttcatcatccgaaactgaaacactgtattcattttttaaaaaactctcaattccctttgcccctacctcctggtaatctctgttcccttgtatgtctctatgatttgcctattttaggtaccctttataagtagaatcatgcaattatttgatctcttgtgtcttacttatttcacttagtgtaatgacttcaagggt

SEQ ID NO: 6805 - DNA, 405 bp, Homo sapiens
gcccctgggaggagacgccatgatccccaccttcacggctctgctctgcctcgggcccctccccaaacccaccctctgggctgagccaggctctgtgatcagctgggggaactctgtgaccatctggtgtcaggggaccctggaggctcgggagtaccgtctggataaagaggaaagcccagcaccctgggacagacagaacccactggagcccaagaacaagggcagattctccatcccatccatgacagaggactatgcagggagataccgctgttactatcgcagccctgtaggctggtcacagcccagtgaccccctggagctggtgatgacaggagcctacagtaaacccaccctttcagccctgccgagtcctcttgtgacctcaggagagagcgtgac

SEQ ID NO: 6806 - DNA, 441 bp, Homo sapiens
gcactctcaggaaccccaggggacttctctttctcaagagtctcatcaacaccctcaggaatgaaagttatcagactacctgctcccatccccaagccactgactacagtggggactgggctgctcccctggccaggcctaggctgggctgggtggatgttgagatggggaacatgaggtgctgccagtgggagggggagggtgggggcacggcagcccaggggacagctgccctgcacaggtctgcaggctccatttttcccaggaactcaggcttctgacttgtgttttatctcaggtgcaggagaacccagggaggaggcccaggctctgctggagggcttcgagggtgagatggacatgaggcctggagatgaagatgcacacgtcctccgggaagagagccgggagtatgaccaggaggagttccgctatgacatg

SEQ ID NO: 6807 - DNA, 407 bp, Homo sapiens
actgaggccttggggtggtggggccccgggcggcgttgaccatgacccagcagggcgcggcgctgcagaactacaacaacgagctggtcaagtgcatagaggagctgtgccagaagcgggaggagctgtgccggcagatccaggaggaggaggacgagaagcagcggctgcagaatgaggtgaggcagctgacagagaagctggcccgcgtcaacgagaacctggcacgcaagattgcctctcgcaacgagttcgaccggaccatcgcggagacggaggccgcctacctcaagatcctggagagctcccagactttgctcagcgttctcaagagggaagctgggaacctgaccaaggctacagccccagaccagaaaagtagcggcggcagggacagctgaccagag

SEQ ID NO: 6808 - DNA, 420 bp, Homo sapiens
aatatttaaacataaaagttgttgtttcctattttggcaggaggaacaagtgtttcatatggcctgatgtgtcctgcagatgagacaagaacaattatttctttggacacttcacaaatgaatcgaattctctgggttgatgagaacaatttgacagctcatgtagaggctggcataacaggacaagagttggaaagacagcttaaagaaagtggttattgtacaggtcatgaaccagattccctggagttcagtactgtaggaggatgggtatctactcgcgcatcaggcatgaagaagaatatctatggcaatatcgaggaccctggaaatatttttctagttattatgtaataattgattagtatatagatattattataaaatgattagaagcctttaaaaattaagagttggggc

SEQ ID NO: 6809 - DNA, 440 bp, Homo sapiens
  misc_feature (1)...(440): n = A,T,C or G
atttctattgaactgtggtggcttttgccactaatcaggatttagggctgtgcacctccatctgttaagtgaaatggaacttggcttcctaaacactatattagaccaacttgagtcaatacttttattaagtttaatcagggattctcaaaatatttaggattcaaattagcccaattagaaagcagtgcattaaatgttaccaaaatatctgaagatactttagaactattttacacaaagcttatgtctttcctatggaaagtatcatacataaaattttacattcttttaaaaaacagaatctaatgtcttcagatacctagagcttggaaattataatagagttgggctttgacccgaagtcagcagttcttttcattttagattttcaggcaagtttcagtagtttggagacttcttcagtagtgacctcagcn

SEQ ID NO: 6810 - DNA, 406 bp, Homo sapiens
cacgtgctaaagtcatttcactgtaataaactgactatggtttcttaagaacatgacactaaaaaaaaaggggttttttttccaccgttgctgattattagacagtaggaaatagctgttttctttagttttacaagatgtgacagctttagtggtagatgtagggaaacatttcaatagccatagtactatttgttttaccactgattgcactgttttgtttttttaacagttgcaaagctttttaatgcataaaagtataattgaaatctgtggtatttatttacaaacatgtctacaaaaatagattacagcttattttatttttagttaaatctcttaatacacagagaactcccaatcttgctcatctaaataaggaaagacttggtgtatagtgtgatgg

SEQ ID NO: 6811 - DNA, 481 bp, Homo sapiens
  misc_feature (1)...(481): n = A,T,C or G
ttttatacctaacgttttggaaccgccttcttgattntcgtcgcgacccacgcgggcgaacctttaggccacaaagcaaaaagttgcatagccacaacgaagatctagttggatatagtttttgatttaagtggcagttatagccaatggaggctaatgcttggttttggagcttttatacacaacgtttttgttaggcatcacagttttgcaacctctgctccaaagagaaaaatagaatgagttttctttcttttttttttttttggagaaaaagtctcctttttttgcccaggtggaagggaaaaagcgcaattgggcttaattgaaacctccccttccttggttaaagaatttttccggccttgcttccggagaaattggaataacgggcgggtgcacccaccctgggttaattttggaattttaagaaaaggcggggtttacccttgaaaaccttgcttggacttcctgacttctn

SEQ ID NO: 6812 - DNA, 405 bp, Homo sapiens
ctccatggtggcttcatgcctcccttctcccagctcatgtggccctgagggctccctcggaacagtgcgtgaaatcctgacccaagggccagcatggggaagagatggttgcaggcaaaatgcactttatagagattttctattgctgggaaggtgtgtttctcccacaatttgtttgtgaatattcacttgttttataaatgtctgacctgtcttgaaaaaaaaaaaaaaaaaaggggcggccgttttaaagaatccttgggggggccaaactttacgcgggatggcaaggtattatttttttccttatagggggccgtttaataccctacttgggaatttttggaaagaacccttttttttggggggggacatattggaacaacctccttccagaaatttaag

SEQ ID NO: 6813 - DNA, 413 bp, Homo sapiens
  misc_feature (1)...(413): n = A,T,C or G
cgctggtcttcgctggacaccatgaatcacactgtccaaaccttcttctctcctgtcaacagtggccagccccccaactatgagatgctcaaggaggagcacgaggtggctgtgctgggggcgccccacaaccctgctcccccgacgtccaccgtgatccacatccgcagcgagacctccgtgcccgaccatgtcgtctggtccctgttcaacaccctcttcatgaacccctgctgcctgggcttcatagcattcgcctactccgtgaagtctagggacaggaagatggttggcgacgtgaccggggcccaggcctatgcctccaccgccaagtgcctgaacatctgggccctgattctgggcatcctcatgaccattctgctcatcgtcatcccagagctgatcttccaggn

SEQ ID NO: 6814 - DNA, 403 bp, Homo sapiens
gcggcgaacgcggagagcacgccatgaaggcctcgggcacgctacgagagtacaaggtagtgggtcgctgcctgcccacccccaaatgccacacgccgcccctctaccgcatgcgaatctttgcgcctaatcatgtcgtcgccaagtcccgcttctggtactttgtatctcagttaaagaagatgaagaagtcttcaggggagattgtctactgtgggcaggtgtttgagaagtcccccctgcgggtgaagaacttcgggatctggctgcgctatgactcccggagcggcacccacaacatgtaccgggaataccgggacctgaccaccgcaggcgctgtcacccagtgctaccgagacatgggtgcccggcaccgcgcccgagcccactccattcagatcat

SEQ ID NO: 6815 - DNA, 494 bp, Homo sapiens
  misc_feature (1)...(494): n = A,T,C or G
agatggtggccgccctccctatgaatccttactgagagcgatcgcanacnccnccggaanttccggggcgacccacgcgtgcgtgcttcagaagctgcttaccatggttccaataaagttaattacctcagaacaggctgggcaggaccgctatttcttaggggacccacttcctacatcagacgtttttgccggttgtcaaatcccttacccaaaacgagaatttttaacggaagaagaacctgatgacaaaggagacaaaaaccagcagcagcagcagggcaataaccacactaatggaactggccacccagggaatcaagacagcagtcacacacagggacccccgttgaagaaagtgagagttgttcctcctaccactacctcaggtggacttatcatgacctcagactatcagcgttccaatccacatgctgcctatcccaaccctggaccaagcacatcacagccgcagagcagcatgggatactcag

SEQ ID NO: 6816 - DNA, 416 bp, Homo sapiens
catctcattcatcatgtgactgtgcccattcctgcatggacctttcccaagcgctagcacaggtgcaaaatccatcagagccattgttttcataaaaaccaagcagaagtgaagagaaaagaggaggactgatggaaagacagactctggacagctgcacggcttgtgaagtgagctaaatgcaccacatgatgagatgctcctgggcatttctccctatctgtactgctgtcttgcagctctgaacggtgcaacgtaatggcgacagaaagtatcttatttatatatagatatatatatgtaatttatataaaatatatagaaattattatatatatatattatacactctcatataatatatatatattcacacacatttgggttagaaaatctatggagacttcatcaatggg

SEQ ID NO: 6817 - DNA, 231 bp, Homo sapiens
aagatggctgtgcctctgtctgtctcccccaccatgctgggagctctgcagagcaggaaacatgactcgtatatgtctcaggtccctgcagggccaagcacctagcctcgctcttggcaggtactcagcgaatgaatgctgtatatgttgggtgcaaagttccctacttcctgtgacttcagctctgttttacaataaaatcttgaaaatgcctaaaaaaaaaaaaaaagg

SEQ ID NO: 6818 - DNA, 435 bp, Homo sapiens
  misc_feature (1)...(435): n = A,T,C or G
aaaaccatcgtttcatatgattcaccctaatagatacctccattattctctaaatgaaatagaagactttggagtatatgtttttaaagtaattttttaaaatatggtaatgtattaaacttatttttatagttatgaaattatgtgtaataatgctttatgttatacattaaatgtaaagacttgtgaatccatgtttgattgactttcatagtttcctgcattgaaataaaatcactatgaattctannaaaaaaaaaaaaaaaaaaaaaaataaaaaaaaaaaatgggggggggcctttttaaaaatttcttgggggggccaaatttttcgggggtgggaaaagttttttttttttttttttgggggggggatttaaaacccccgggggttttttgggaaaaaacctttttttgggggggggaaaaaaagag

SEQ ID NO: 6819 - DNA, 234 bp, Homo sapiens
gcgaagatggctgtgcctctgcctgtctcccccaccaggctgggagctctgcagagcaggaaacatgactcgtatatgtctcaagtccctgcagggccaagcacctagcctcgctcttggcaggtactcagcgaatgaatgctgtatatgttgggtgcaaagttccctacttcctgtgacttcagctctgttttacaataaaatcttgaaaatgcctaaaaaaaaaaaaaaagg

SEQ ID NO: 6820 - DNA, 265 bp, Homo sapiens
ggatctagttgtttcttcctagtctcaggaagccagtgccccaagggttcacacctggtaagtgtaggcgtccttggatatgggctgtagaggaacagtttgaatccaggtgccgccatctaatagctatgtgacagcaaatttcttaatctgagccctggtagcctcatttaaattggacataatgccacctacctgaggatttgtaaaaggaaaagagaataaatgtctgttacatcataaaaaaaaaaaaaaaaaaaggggg

SEQ ID NO: 6821 - DNA, 511 bp, Homo sapiens
  misc_feature (1)...(511): n = A,T,C or G
aaactgacacctcggaccgcccgtagatcttctcgacccacgcgtccgaaagagaagaggcctgtgactttcccggggcttgcccctccaggaggaagtgaggaattgtaggggtctgcttcccacaccctgcgaaatccagacatgcagaaagcgactggggtcctgtggaaaccttgctgcttgagagtgttgcctgatgaaaaatcttgcagcttaaggcatacagagtggtaggacggaccctggagacccggaaagtgggaggggcggaaggtgaggggtgaaaaactacattttgggtacaacgtacactactcgggtgacgggtgtactaaaatctcagacttcaccaccgtacaactcatccatgtaaccaaaaaccacttgtacctcaaaagctattgtaataaaaaaaattctttaaaaaaaaagcttgcggtttccagtttccaagaaaaattgctcatcaacctttccagaccttntcatcccttcagcaaagatggan

SEQ ID NO: 6822 - DNA, 429 bp, Homo sapiens
  misc_feature (1)...(429): n = A,T,C or G
tcagattctagccatgaaggtcaagaggaatcttcaaaggataatgtgtcatcaaatgctgcctgccctgaccacaccccaacacctaatgatgatggcaaatcacatgaactgtctaaccttcgactggagaatcagctgctgaggaatgaagttcagtctttaaatcaagaaatggcctcgttactccaaagatccaaagagactcaagaagaattaaacaaagcaagagcaagagttgaaaagtggaatgctgaccattcaaagagtgatcgaatgactcgaggactccgagcccaagtagatgacctgactgaagctgtggctgcaaaggattcccagctggctgtactgaaagtgagactccaagaagctgaccagctactgagtactcgcacagaagcattagaagccttacagagtgaatan

SEQ ID NO: 6823 - DNA, 433 bp, Homo sapiens
  misc_feature (1)...(433): n = A,T,C or G
atagtcaggagcgtcaatgtgcttgtacatagagtgctgtagctgtgtgttccaataaattattttgtagggaaaaaaaaaaaaaaaaaaaaaaaaaaaaaaaaaaaaaaggggggggcccctttaaaaaaatccctggggggccccaaatttaccggggggggaaaaaaaaaattttttcccttaaaggggggccaaaaaaaacccccctgggaatttttaaaaaaaaacctttttttggggggggaaaaaattgggaaaaccccccccaaaaaaataaaccccttaaggaaaaaaaaaaattttaaaggggaaagggggaaaaaaaaccctaaattcccggggggaaaaaaattttgnnnnnnnnnnnanaaaaacccctttcttgtgggggagaatttgcaccccccccccctaaaaaaaaaaaaaaaaa

SEQ ID NO: 6824 - DNA, 393 bp, Homo sapiens
gctccatgttatgccaagccccaccaggtggacctttaccaagaactacgtgagggatataatggaaggctccatgttgacaatcagctttggaagttggatggaactacctggacttaaatttaaggactgggtatcaagtaaacgaaggtaaagattgaactgtattaaaattctttggtgtacgttgaaaaagagaatgtggaaaaatttcaaaatatttgtgattttgtcatggctgaagaatataaatgtacgtctttcaaataaaaatgtgtccttgaagcagtgattattggaaaaaaagaaaaagaaataaaaaactttggagaacattaaaaaaaaaaaaagggggggggctttttaaaaaaagtccttgggggggccctaatt

SEQ ID NO: 6825 - DNA, 482 bp, Homo sapiens
  misc_feature (1)...(482): n = A,T,C or G
agaggtccccgcccctcccgatgagatctagtagacagcatcggaaacccgggcaccacgcgtcgcagaataaaatctctaaaacatcagtggatggtgatccccactttgttgtggatttccccctgagcagactcaccgtgtgcttcaacattgatgggcagcccggggacatcctcaggctggtctctgatcacagggactctggtgtcacagtgaacggagagttaattggggcacccgcccctccaaatggccacaagaaacagcgcacttacttgcgcactatcaccatcctcatcaacaagccagagagatcttatctcgagatcacaccgagcagagtcatcttggatggtggggacagactggtgctcccctgcaaccagagtgtggtggtggggagctgggggctggaggtgtccgtgtctgccaacgccaatgtcaccgtcaccatccagggctccatagcctttgtcatn

SEQ ID NO: 6826 - DNA, 434 bp, Homo sapiens
tcggcggaggacctgctcacatgctgtggcagcatgtgtggggacggctgtaatggtggctatcctgctgaagcttggaacttctggacaagaaaaggcctggtttctggtggcctctatgaatcccatgtagggtgcagaccgtactccatccctccctgtgagcaccacgtcaacggctcccggcccccatgcacgggggagggagatacccccaagtgtagcaagatctgtgagcctggctacagcccgacctacaaacaggacaagcactacggatacaattcctacagcgtctccaatagcgagaaggacatcatggccgagatctacaaaaacggccccgtggagggagctttctctgtgtattcggacttcctgctctacaagtcaggagtgtaccaacacgtcaccggagagatgatgggtggccc

SEQ ID NO: 6827 - DNA, 322 bp, Homo sapiens
aagatggctgtgcctctgcctgtctcccccaccaggttgggagctctgcagagcacgaaacatgactcgtatatgtgtgaggtccctgcagggccaagcacctaccctcgctcttggcaggtactcagcgaatgaatgctgtatatgttgggtgcaaagttccctacttcctgtgacttcagctctgttttacaataaaatcttgaaaatgcctaaaaaaaaaaaaaaaagggcggccgttttaaaggatccctcggggggcccaagctaacgcgtgcaggcgacgtcttacttttttccttaaagggagtcgaattaaaga

SEQ ID NO: 6828 - DNA, 231 bp, Homo sapiens
aagatggctgtgcctctgcctgtctcccccaccatgctgggagctctgcagagcaggaaacatgactcgtatatgtctcaggtccctgcagggccaagcacctagcctcgctcttggcaggtactcagcgaatgaatgctgtatatgttgggtgcaaagttccctacttcctgtgacttcagctctgttttacaataaaatcttgaaaatgcctaaaaaaaaaaaaaaagg

SEQ ID NO: 6829 - DNA, 433 bp, Homo sapiens
cttttgggagttttgcttgttgatataacctttttagttaacctgaaagattccaaaaattgttcttaagtgcttgagactggaaccaaaattaaattgtacttcataaaatcctcttatagagttactcttgccctagattgtaaattaagtttggcattattgtcagactggatggagggtgaagtaaaatagtatgaacaattaagaggctctccccctcttgtctttaagccatattctcctacatgtattttataagaaaatgttaagtcaaattttagtggctctttaattcctgacctcttcattctccttttcagtataacctcccctatgctcatgcccacacagacaaaaaaacaaaacgaaatacacacagaaaaaagtctttccaaactgtttaagtatttaaacatctgagccaaagcag

SEQ ID NO: 6830 - DNA, 408 bp, Homo sapiens
  misc_feature (1)...(408): n = A,T,C or G
accctgcctgtcacagaggcagcggcggccatgttggaagagggcaaagagccgccaggacccgcccaccccgcggatgcgctggatctcgagggcgcagaactcggagtggcgaggagaagcgggagggcagattgagcgcgcgtggggctcgtgagcctggggactgggagtaaaaacaactacctcaagcaggaggctcagtccccgccaacactcgctgggataactctcgataggacggaggaggagccccccagtgggaccctcctcagtgcaatggatgggaccctcctcagtgcaatggatgggaccctcctcagtgcgatggatgtgagcagcccaggccctatgggagcagagagtgttccgctgaaaaaaccctctgctggtcctttgagcgccccn

SEQ ID NO: 6831 - DNA, 479 bp, Homo sapiens
  misc_feature (1)...(479): n = A,T,C or G
cccgccccaagaantaantttgatccctgtgaanctgangtccctcggaanccacccacgcgtncggctaaatccatgaagtttgtggatggcctgatgatccacagcggagaccctgttaactactacgttgacactgctgtgcgccacgtgttgctcaaacagggtgtgctgggcatcaaggtgaagatcatgctgccctgggacccaactggtaagattggccctaagaagcccctgcctgaccacgtgagcattgtggaacccaaagatgagatactgcccaccacccccatctcagaacagaagggtgggaagccagagccgcctgccatgccccagccagtccccacagcataacagggtctccttggcagctgtattctggagtctggatgttgctctctaaagacctttaataaaattttgtacaaagaacccctttttataaaaaaaaagttaaaaaaaaagggggggcg

SEQ ID NO: 6832 - DNA, 478 bp, Homo sapiens
  misc_feature (1)...(478): n = A,T,C or G
cccgccacccgagataaattggtttcccttgaatcggttgacctcgcaaaancacccacacgnncgntgggaggtacgccggtgtccacgtgcacaccaacgctgtccgccagccagagctgcccacagaccctgagggagccctcagagaagccttgcggcgcaccgaccagatgtttctcatgaaagccaagcgagagcggctgcagagcggcaccacaggtgtgtgtgcgctcattgcaggagcgaccctgcacgtcgcctggctcggggattcccacgtcattttggcacagcagggacaggtggtgaagctgatggagccactcagaccacaacggccggatgagaaggcgcgcattgaagcattggggggctttgcgtctcacatggactgctggagaggcaacgggaccctgggcgtctccagagccatcggggatgtcttccagaagccctacgtgtctggggaggcccn

SEQ ID NO: 6833 - DNA, 380 bp, Homo sapiens
cggacgcgtgggggaagtgacatcgtctttaaaccctgcgtggcaatccctgacgcaccgccgtgatgcccagggaagacagggcgacctggaagtccaactacttccttaagatcatccaactattggatgattatccgaaatgtttcattgtgggagcagacaatgtgggctccaagcagatgcagcagatccgcatgtcccttcgcgggaaggctgtggtgctgatgggcaagaacaccatgatgcgcaaggccatccgagggcacctggaaaacaacccagctctggagaaactgctgcctcatatccgggggaatgtgggctttgtgttcaccaaggaggacctcactgagatcagggacatgttgctggccaat

SEQ ID NO: 6834 - DNA, 390 bp, Homo sapiens
cttttgccaatgaactctttccccagctgattagtgtctaaggaatgatccaatactgttgcccttttccttgactattacactgcctggaggatagcacagaagcctgtctgtacttcattcaaaaagccaaaatagagagtatacagtcctagagaattcctctatttgttcagatctcatagatgacccccaggtattgtcttttgacatccagcagtccaaggtattgagacatattactggaagtaagaaatattactataattgagaactacagcttttaagattgtacttttatcttaaaagggtggtagttttccctaaaatacttattatgtaagggtcattagacaaatgtcttgaagtagacatggaatttatgaatgg

SEQ ID NO: 6835 - DNA, 422 bp, Homo sapiens
gactcctgagaattcctgttacagtaaacaaaactaacgtaatctaccatttcctacactatttgagcatggaaatcatagtccccactctgtgaaaacttaacgctttttggaagacatttctgtagcatgtcagtttggagaaatgatgagctacgccttgatgaaagaaccgtgttggtgctgctaagtttagccattatggcttttcctttctctctcttaagccttattcttcaactaaaagatgaggattaagagcaagaagttgggggggatgtgaaaataattttatgaggttgtctaaaataaagagtagcttcttaaaaaaaaaaaaaaaaaaaaaaaaaaaggggggccctttttaaaggatccttggggggccccaactttacggggggagggaaagtattatttttttc

SEQ ID NO: 6836 - DNA, 414 bp, Homo sapiens
gcagacagctccatgatgactatttctatcatgatgagctttaatctccgagcctgtctcagtagagtactggctccttttataatttgttaccagctttacttttgtgataaaatattgatgttgtattttacactcttaagtcttaaccacagtcagaattatcttaatgtagattataattttggtcttttaggaaaaaaaaacaaaaatctgatatttatttcaaaacgtattgaagcaacaaaatattaatattgtgccatatgacaacaaagtctttcctaaatactccatctgtttagtactgtattgtggaatatttgagttctatttccatacttgaaaacatggaggattttagagatgcctgaacaatattatttaagtagtatgtgaccgagctataacttt

SEQ ID NO: 6837 - DNA, 424 bp, Homo sapiens
cggacgcgtgggcgcgtgcctgtagtcccagctacttgggaggctgaggcaggagaatcgcttgaaccagggagtcggaggttgcagtgaagcgagataacgccactgcactctagcctggcgacagagtaagactccgtctcaaaaaaaaaaaaaaaaaaaagctttttttatgtttccccaaatttccctttacttaaggaccagttccgggggaaaaaatcttgggtggcctttaaaaccccccctacagcagggctggaaggaggcccctttataattaaattccctaaacaacagccaaattggtaaccttttttaagggaaatggagtttttatgggaaacctgattggagtttcccctgcaaacaaaaccccttgaatttttttgccattctccccagccattttaggaattggttt

SEQ ID NO: 6838 - DNA, 424 bp, Homo sapiens
cggctcctcccaggcctgcaggacccctggggccctgtccttattccccagcaccgggacggccaaagctctggtcacaatgaacatcgtcttctccagggacagccaggtgagggtgatggagaataccgtggccaacaccgagaagtactttgggcagttctgctcgctgctggccgcctacacgcgcaagacggcccggctgcgggacaaggcggaccagctggtcaagcagctcatcgactttgccaactccgagaaccccgagctgcgggccaccatgaggggcttcgctgaggacctggccaaagtgcaggattaccggcaggcccaggtcgagaggctggagaccaaggtggtcaaccccctgaagctctacggggcacagatcaagcagacacgggctgagatcaagaaattcaaa

SEQ ID NO: 6839 - DNA, 418 bp, Homo sapiens
cctgaaacgccttcttatcgtggtggtggtggtggtcctcatcgtcgtggtgattgtgggaggcctgctcgtgggtctccacatgagccagaaacacacggagatggctctggagatgagcattggggcgccggaagcccagcaacgcctggccctgagtgagcacctgggtaccactggcaccttctccatcaggatccactggcctcgtggtggatgactaccaacagctgatgatcgcctacaagccagcccctggcacctgctgctacatcatgaacatagctccagagagcatccccagtcttgaggctctcaatagaaaagtccaccacttccagatggaatgctctctgcaggccaagcccgcaacgcctacgtataagctggtccaggcccaggggcgagattcgagctc

SEQ ID NO: 6840 - DNA, 500 bp, Homo sapiens
  misc_feature (1)...(500): n = A,T,C or G
nggttgcggggggctttgcaattgaaaagccatcgantaatgctngcgnaanncccgnnaagacccacgcgtccgtagctgtatagagcaaaggctttcaaatgcatttcagcattagaactctatttttgacatgaaatctgctgtggattcttagagatgtagcacaaataaaatcaaagtagctctggttgaagaaaaattagggaggctcttgaccctccagccttccccactccatctacacctcagcccacacgtggttccccacttttgccatctcctgaggaaccccaaaggagcacagttagcaaaccacctacttagaatgcatttcttgtctggttttgttataggttttccaaattacttcttaaaataagagtatatttttctctaaaattgttaaagttcaatcatatgtgaaatagttatttcagtatagttttgttatagcagtgtaatttagagcttcacaggcttctgttaatgatgtagan

SEQ ID NO: 6841 - DNA, 468 bp, Homo sapiens
  misc_feature (1)...(468): n = A,T,C or G
nggcggcggtcccactgaagcctcgatgagcatcgtcgnnaccggcncgacccacgcgtncgggtgcctggccccagtacccagggtggcacgactgggctaagtggacactgagcttcatcaggccctccctgggtaggagcagctttgtgtcactaaagaaagtgagggccactgtctccggcgggtgaggctgcagcccactttcacatgcgaggaggcctaatcaggagtttcaattccagatcgggctgggtccagccccaaaacatggcctgctggctggggagtgggaacactcacagaaaggggagatctgggcctgggaagattccggggcaggggtgagcggacgttcacatgagtgggtctatagcccgctccgggcatcatctagacttagcatgcattcactcccccatcacatattccaatacacaccctgtcctatgcactgagagctggaga

SEQ ID NO: 6842 - DNA, 469 bp, Homo sapiens
  misc_feature (1)...(469): n = A,T,C or G
cagcgcnggtccctcagtnagctgctntgatgaccgtcacnaccgcncgacccacgcgtgcgtgtaatcccagcactttgggaggctgaggtgggcagatcaccagaaatcaggagttcgagacccccctgggcaacagggcaaaaccccatctctaccaaaaatacaaaaattagctgggcgtggtggcaggcacctgtaatcccagctgcttgggaggctgaggcaggagaattgcttgaacctgagaggcggaggttgcagtgagccgagattgccccactgcactctagcctgggggatagagtgaaactctacctccaaaaaaaaaagaaaagaaaaataactgaggaagacagttttcacagggggtcaggggagcctagaattattgaatatcgtcctttaacctatagctatgactctaggttaaagctcctcctcagcttgctccagtcaagagtatcta

SEQ ID NO: 6843 - DNA, 395 bp, Homo sapiens
cccacgcgtacgcagatatggtcactttcaagccaccatcacaatcgtagagggaatgggagaggttagcagggtccagatgacagacgtcctgatgccggtgccatggcctgaaagctccctaataaactttgacatgacctgccgagggagcattcccacggaggtctgtaccatcatttctgaccccacctgcgagatcacccagaacacagtctgcagccctgtggatgtggatgagatgtgtctgctgactgtgacacgaaccttcaatgggtctgggacgtactgtgtgaacctcaccctgggggatgacacaagcctggctctcacgagcaccctgatttctggtcctgacagagacccagcctcgcctttaaggatggcaaacagtg

SEQ ID NO: 6844 - DNA, 398 bp, Homo sapiens
  misc_feature (1)...(398): n = A,T,C or G
cccacgcgtccgcggacgcgtgggctggcctgctggacaagatccggggcatgcagaagctgagcacacgccagaagaagtgagggtccccgacccaggagaacggcggctcccacaggacaatcgctgccccccaacctcgtatcatcagcaataccgggggaccctgcggccaggcctggtgccatgagcagggctcctcgtgcccctggcccaggggtctcttcccctgccccctcagttttccacttttggggttttttattgttattaaactgatgggacttttagaaaaaaaaaaaaaccaacttgcccagatactaaaccaatataaacaaaaaannggggggggggcctttttaaaaaaccctgggggggcccctttttttccttttttt

SEQ ID NO: 6845 - DNA, 467 bp, Homo sapiens
  misc_feature (1)...(467): n = A,T,C or G
cggcggggttccaatgacngcctcgactgagcccgtacnacccgcncgacccacgcgtncgcggacgcgtgggcggacgcgtgggcgagagctttgttgacacgtcccccacagggcccagctcagcagatgccaccacttccagtgaggagctgccaaagaaggaggctccgtacacgcttgtgggatccatcagtgagccaggcctgggccttctctcctggtggaccagcaactagccctggggctggacagtggaccctaccagcctgcgggaaggtggtatggccggctgtgaagacaacagcagctgaggccgatgctaaggagatagtgtctcgagctggacagtgaggcaaggccaggagtgcccaccagcttgccccgctcctccaccatctaggccctgctcctccttcactgcagagatggatccatctgtggctgtggctgttgggcctccactg

SEQ ID NO: 6846 - DNA, 410 bp, Homo sapiens
tccgttggcatcaacacggggaccctctgcttcaccaaagcccgagccctcagcccctggggagaacaaatggctgagctttgatacctggggtcgtcgagaggctgcgggctggcggcagtcccaggggagagacaccacagaaggagacccagacatcccgaggaagttcccagcagagcaaactgctttccagcctgaagcctgcttaaactgtgtgatgtgcaataactgagcttagagttaggaattgtgttcaagtgcttggatttccgtctgtagatttaactgctgaaattgtatctctcagtaattttagatgtcttttaaaaaattgaaaaacaaagtgttagactgtgtgcgtgtgcgttgatgggcactcaagagtcccgtgagtcatccagccctgg

SEQ ID NO: 6847 - DNA, 469 bp, Homo sapiens
  misc_feature (1)...(469): n = A,T,C or G
ccatgactctctatgannccntcgaannnncgnncgacccacgcgtgcgcatgcgtctgctattgagttgggttggcttcctcttttttccactttcagtgttgtgtttctggcatgagggaaactgggaaacaacttgcacacctctactccggagctgacatttcttttacatagatgacctcgcttcaaatacgttaccttactgatgataggatcttttcttgtagcactataccttgtgggaatttttttttaaatgtacacctgatttgagaagctgaagaaaacaaaattttgaagcactcactttgaggagtacaggtaatgttttaaaaaattgcacaaaagaaaaatgaatgtcgaaatgattcattcagtgtttgaaagatatggctctgttgaaacaatgagtttcatactttgtttgtaaaaaaaaaaaagcagagaagggttgaaagttactttn

SEQ ID NO: 6848 - DNA, 414 bp, Homo sapiens
agatggacagcctctcaggcagaaatccttcaagaggcccagatctcaggcctttgtgaagtcatttttgcagcttcctaccctggtcttcctatgtcaactcatgcccctgcccaatccattttacatgctgtagtcaaaggagtctcttcacaacaaatctacgctggcctttcatctacagtgactacactgtgacgacaccagccattcatcttcagtcccatttggttgtttctcttcctctctccacctcttaacattggagtggcccagttctcagtcgtcagacctcctctctgtcaacttctgctccgtaagagatctcattctgtctcatggctttgaatacatctttacactacttcctaatttgtggctttggccttttccctttcctttttcttgtacatg

SEQ ID NO: 6849 - DNA, 414 bp, Homo sapiens
  misc_feature (1)...(414): n = A,T,C or G
tagggcttctgcctaagcctctccctccagccaataggcagctttcttaactatcctaacaagccttggaccaaatggaaataaagctttttgatgcanaaaaaaaaaaaaaaaaaaaaaaaaaaaaaaaaaaaaaaaaaaaaaaaaaaaaaaaaaaaaaaaaaaaaaaaaagggggggggggtttaaaaaaaaaattaggggggggaaaaaaatttgggggggaaaaaaaaaaaattttttttttttaaaggggggaaaaaaaaaaacccggggggttttttgaaaaaaaaatttttttttggggggggaaaaaagggccaaaacccccccaaaaaaaaaaaaccttttaaaaaaaaaaaaaattttttgggggggggggggggaaaactccctttttttttcgggtgaaaag

SEQ ID NO: 6850 - DNA, 415 bp, Homo sapiens
cccacgcgtccgcccacgcgtccggtttttgtaaataaaatcttattgtaacactgccactattattcatttttgtattgtctataggtggtgtcatgctactgtggcagacttgtgtgaccatggcccacagaaaacctaaactgcttactgtctggccctttacagggtacgtctgtggacctctggcttagaccaattatgttcaccctctgggttggtgatgtggctgcccaaacaaaactgggtttagttagcaagaatgggaagcaaaatagctacagggtaggtgacaatatccttccacaaaatatcagttgtaatttttccaatagactaaaataaatacctattaataataagagcttaaggctgcacgcggtggctcacgtctgtaatcccagcactttgggag

SEQ ID NO: 6851 - DNA, 412 bp, Homo sapiens
aaaacagggagtacttcaagatcaccctctacgggagaaccaaggagctgacttcggaactaaaggagaacttcatccgcttctccaaatctctgggcctccctgaaaaccacatcgtcttccctgtcccaatcgaccagtgtatcgacggctgagtgcacaggtgccgccagctgccgcaccagcccgaacaccattgagggagctgggagaccctccccacagtgccacccatgcagctgctccccaggccaccccgctgatggagccccaccttgtctgctaaataaacatgtgccctcaggcaaaaaaaaaaaaaaaaaaaaaaaagggggggcccttttaaaagatcccttggggggcccaaatttaacgggggcggggaaggttttatttttttccttaaaggggg

SEQ ID NO: 6852 - DNA, 415 bp, Homo sapiens
agctgttgctgctattgatgcataacatactgctattggtctttttatataaatatatatatatatatacatatatatatataatttgaatttttggaaactttagctgtgctgtcaactttggaaaaagtatcccggtttactgtgttgagttggcattgtacagaaattaacagccatattggtctagaaacgttaaacttaatttttttccatttgtacaggggtaacgcactgtattaaatatgtaaggtcttatctacatgggtttgattacagaaactaataaagtattctctaaataatgaaaaaaaaaaaaaaaaaaagggggggccgttttaaagaatccttggaggggcccaagtttacgcgggcatgcaacggaatatttttttccttatagggagccgtataa

SEQ ID NO: 6853 - DNA, 426 bp, Homo sapiens
gcgaaagattcatttttctgggactgagagtgaaacccataccaatcaggcctttgagatttctctgtatggcaccgtggccgagagtgagaacatcccattcactctgcctgaagtttccacaaataagacctactccttcctaatttacacagaggtagatattggagaactactcatgttgaagctcaaatggaagagtgattcatactttatctggtcagactggtggagcagtcccggcttcgccattcagaagatcagagtaaaagcaggagagactcagaaaaaggtgatcttctgttctagggagaaagtgtctcatttgcagaaaggaaaggcacctgcggtatttgtgaaatgccatgacaagtctctgaataagaagtcaggctgaaactgggcgaatctacagaacaaagaacg

SEQ ID NO: 6854 - DNA, 428 bp, Homo sapiens
cccacgcgttcgggcgacggactctccattccagaaccatggcccaatttgtccgtaaccttgtggagaagaccccggcgctggtgaacgctgctgtgacttactcgaagcctcgattggccacattttggtattacgccaaggttgagctggttcctcccacccctgctgagatccctagagctattcagagcctgaaaaaaatagacaatagtgctcagactggtagcttcaaacagctcacagttaaggaagctgtgctgaatggtttggtggccactgaggtgttgatgtggttttatgtcggagagattataggcaagcggtgcatcatgggctatgatggtttgagaaccatctttaacatctgattatatatgacttattattggaggggtggtgaccatgtgtgatcaaactgctattga

SEQ ID NO: 6855 - DNA, 360 bp, Homo sapiens
aaaataaaagatctaagagcaacataaaggaacaaatataatttcaggctagtatgtgcagtatggaattccccaagggaaagtggagcaaaaaataattggagtggagtaaagcattgaggaaatacctcgcggaggagtcaactttcttcttaactaaaacctgaatgaggaggagttttgagacgggtttttaaagacaggaaggatatattggcagagaaagtaagttgtttttagactttggtagaagaatgaatgggggaaaaattacgcagaagtgattgttggtttagattgcttggttagagtggatttcccagtgaacttgaaactctaaggaaaaaaaaaaaaaaaaag

SEQ ID NO: 6856 - DNA, 412 bp, Homo sapiens
  misc_feature (1)...(412): n = A,T,C or G
atagagaccatcattgctaacatggtgaaaccccgtctctactaaaaatacaaaaaaaaaaaaaaaacccgttgcccggccggggggggggccccttttatccccattttttgggggggttggggcagaaaatgggcgtaaccccgggggggggactttgcagggaggggaaactgcccctttgctctccacctggggaaaaaaagggaaaccccgcaaaaaaaaagcctttcccccccaaatttggaaccctggggactgtccagggaacccctcactttttgttgggggaagggccccggggaaacagttggccaaaccctgggggcgttaaacacaaagttttttttgacccagcatttcttttttttatccctttgtacccccaaattaatggaaccctcactccccn

SEQ ID NO: 6857 - DNA, 418 bp, Homo sapiens
  misc_feature (1)...(418): n = A,T,C or G
gcgctctataaatcgatgaagggcttgggcaccgatgataacaccctcatcagagtgatgccttctcnagcggaacttgagatgttggatatccgggcacacttcaagagactctatggaaaggctctgtactccttcatcaagggtgacacatctggagactacaggaaaggactgcttcgtctctggggaggagatgattaaaataaaaatccccaaaggacaggaggattctcaacactttgaacccttttaacttccttcttctacactggtattatcattatctcagaatgcttatttccaattaaaacccctacagctgcctcctaaaaaataaacctggttggatattattcaccctatattaacccttatgatgctttaaagctgacttgcatttaaaacttataaaaaa

SEQ ID NO: 6858 - DNA, 448 bp, Homo sapiens
  misc_feature (1)...(448): n = A,T,C or G
aggacactgactcactgtttcgggttggctcccaggcttgagggcccaaatggggacagttatgacaagctggcatcaccaagggtgaaggccctggctgcagctgtacaccacctgtgcccccaggctcaaggtctctggcaggtgcacaccancccaactctgcagggcttctctccctgccaccaccccccaagccaggaccccactccttccccgaggctgagctgagccttttccaggggcagggcccaggagaccattcccagaatccatggggcagtagccagggctccggctgctggaggaagcagctatccacaaagcttcctgccccagagctgaggctgaggccccgggagaggcggcccctacccaaacactggctgctggcattccaccaagtgaccccaggngccaggccttcgatcacccacctcccatccag

SEQ ID NO: 6859 - DNA, 416 bp, Homo sapiens
acagtgtttggctgagccgagactggagcatctacacctgaggacaagacgctgcccacccgcgagggctgaaaaccccgccgcggggaggaccgtccatccccttcccccggcccctctcaataaacgtggttaagagcacaaaaaaaaaaaaaaaaaaaaaaaaaaaagggggggggccttttaaaaaaacccctgggggggccaaattttagggggggaggaaaaataaaatttttttttttaaaggggggcaaaaaaaaacccccgggggaatttttgaaaaaaaacctttttttggggggggaaaaaatggggcccaaccccccccaaaaaattaaacgctttggggaaaaaaaaaaattttaagggggaaaggggggaaaaaatccctttattcctttttttttaaaaat

SEQ ID NO: 6860 - DNA, 406 bp, Homo sapiens
aaagtatttgcccaaaatgaagaaatacaagaaatggctcagaataagttcatcatgctaaaccttatgcatgaaaccactgataagaatttatcacctgatgggcaatatgtgcctagaatcatgtttgtagacccttctttaacagttagagctgacatagctggaagatactctaacagattgtacacatatgagcctcgggatttacccctattgatagaaaacatgaagaaagcattaagacttattcagtcagagctataagagatgatagaaaaaagccttcacttcaaagaagtcaaatttcatgaagaaaacctctggcacattgacaaatactaaatgtgcaagtatatagattttgtaatattactatttagttcttttaatgcgtttgcaatag

SEQ ID NO: 6861 - DNA, 412 bp, Homo sapiens
gcgaagagcctgatccttcttgccatcctggccgccttttcggtagtaactttgtgttatgaatcacatgaaagcatggaatcttatgaacgtagtaagtgaatatttaacttctttattcaaatcccttgcattaaagaacctcttcttatttttaaataaacaagatggaaagatatataacagggagggaaaagggggcctcttttggaaaactaaagtaaatttttaaatctaatgactataaaaattgccaaaggagcaattttttaagtttgaagtagtgcaatatgggatttaagctacaggcgacatatttagaagccataaaatctcatttggaaattttaaattggcaccacgtcaactgcacagatggaaaacgaggagtaatgacaaatggtaaagcact

SEQ ID NO: 6862 - DNA, 500 bp, Homo sapiens
  misc_feature (1)...(500): n = A,T,C or G
aggcagggcccgagggcgttccctccgaaaatccctacttaggatcatgcgaaccgcnccggaanacccggggcgacccacgcgtccgcccacgcgtccgatttaaaaaacctttccttcctcagctagtccctgctaaaattctttcggaatttcttggaatttagatcgcttttctatccagttaacagataaaatggcatgacacccacagatacacttactgtatgtccacattattcactgctacagtaaggcagatagtccccttcatgcatttctatatctttatcacattttccagtgtttctcccagggcaccacagtaccatttattgggtagggcatgagaatataaaagtatacctgtggatattttaaaagtaactactatagaaagaggaattggcagtattgtgtagtgataaagcacttgactaagagtctgaaaacctgtattccagacctggctgtgccctgtgttctgtaatcttggaagc

SEQ ID NO: 6863 - DNA, 488 bp, Homo sapiens
  misc_feature (1)...(488): n = A,T,C or G
gccaggnccccaggcngttcccactgaggtcctgctgatggtcatcaaaaccgcncgancacgcgtgcgagatctggctaaattcttcctaaaaatttgcttactaactctttaggccactgtgctttgcggtccattggtaaacttggggtgctaagtgctaaacagaatactgctattttgagagagtcaagactctttcttaagggccaagaaagcaacttgagccttgggctaatctggctgagtagtcagatataaaagcatacttgctttatattttggatcattttttactgggggcggacttggggggggttgcatacaaagataacatatatatccaactttctgaaaagaaaagtttttagattactttttcaactgtaaataatgtacatttaatgtcacaagaaaaaaatgtcttctgcaaattttctagtataacagaaatttttgtagatgaaaaaaatcattatgtttagagg

SEQ ID NO: 6864 - DNA, 398 bp, Homo sapiens
cacaaggcaggtgggtgaggaaatccacagttgccatggagaaaattccagtgagggcattcttgctccttgtgggcctctcctacactctggccagagataccacagtcaaacctggagccaaaaaggacacaaaggactctcgacccaaactgccccagaccctctccagaggttggggtgaccaactcatctggactcagacatatgaagaagctttatataaatccaagacaagcaacaaacccttgatgattattcatcacttggatgagtgcccacacagtcaagctttaaagaaagtgtttgctgaaaataaagaaatccagaaattggcagagcagcttgtcctcctcaatctggtttatgaaacaactgacaaacacctttctcctgag

SEQ ID NO: 6865 - DNA, 405 bp, Homo sapiens
gacatgaaactcttacccacaatctgctgagctcgcatgtgcggggggtggggtcccgtggcttccccctgcgcctccaggccaccgaggtccgtatctgccctgtggaattcaaccccaacttcgtggcgcgtatgatacctaaagtggagtggtcggcgttcctggaggcggccgataacttgcgtctgatccaggtgccgaaagggccggttgagggatatgaggagaatgaggagtttctgaggaccatgcaccacctgctgctggaggtggaagtgatagagggcaccctgcagtgcccggaatctggacgtatgttccccatcagccgcgggatccccaacatgctgctgagtgaagaggaaactgagagttgattgtgccaggcgccagcttttcttg

SEQ ID NO: 6866 - DNA, 408 bp, Homo sapiens
  misc_feature (1)...(408): n = A,T,C or G
tgtgcctctggagcatggggaagtgattgactgtgtgcaggagctgagccgctccgtgaacaagctgtgggggctggcgtctgcagccgttgacagatgcgtcagattcaccaatggcctggggacctgcggcctgttgtcagccctgaaatccctctttgccaagtatgtgtctgatttcaccagcactctccagtccatacgaaagaagtgcaaactggaccacattcctcccaactccctcttccaggaagattggacggcttttcagaactccattaggataatagccacctgtggagagcttttgcggcattgtggggacttcgagcagcagctagccaacaggattttgtccacagctgggaagtatctatctgattcctgcagcccccggagcctggctgn

SEQ ID NO: 6867 - DNA, 388 bp, Homo sapiens
agagaggtgtccaggccacaggctcctgaaactttgcagcagtgagttgctgagcacaggtgggacttacacaggcagagcctggctcagctgcccagcccagggacacagtggctcccacacactcacccctatggctgcctgtcgacttgcagtacctgccaccagacaagcagcgagaacctgatgcagacatccgcaagatgcttgttgaagccatcatgctgctgacagccacagcaccaggtcggcagcaggtgcgggaccagggagcctacctgatccttcgagagctgcacagctgggagccggagcccgacgtgcggacggcttgtgagaagctcatccaggtgcttattggggacgagcctgaacgtggcatggaaaa

SEQ ID NO: 6868 - DNA, 405 bp, Homo sapiens
cccacgcgtccgcacgccgccgcttgtgctgcagccatgtctctagtgatccctgaaaagttccagcatattttgcgagtactcaacaccaacatcgatgggcggcggaaaatagcctttgccatcactgccattaagggtgtgggccgaagatatgctcatgtggtgttgaggaaagcagacattgacctcaccaagagggcgggagaactcactgaggatgaggtggaacgtgtgatcaccattatgcagaatccacgccagtacaagatcccagactggttcttgaacagacagaaggatgtaaaggatggaaaatacagccaggtcctagccaatggtctggacaacaagctccgtgaagacctggagcgactgaagaagattcgggcccatagagggctg

SEQ ID NO: 6869 - DNA, 404 bp, Homo sapiens
  misc_feature (1)...(404): n = A,T,C or G
cttgcgaggaaaccgactcggagctgccgtcgaaggccaaggactcactgaagatccgtgacggaggacaggcggttcatcatgggtggcttcttctcacgtatattttccagactgtttggaactaccgaaatgacaatcttaattttgggattagatggagcaggaaaaaccacagttttgtacagactacaagtgggagaagttgctactactatacctaccattggaattaatgtatagacggtgacgtacaaaaaccttacattccaagtctgggatttaggaggacagacaagtatcccgccatactggagatgctactattcaaacacatatgcagtcatttatgtagtacacagttgtgaccgataccgaattggcatttccaaatcagagttagn

SEQ ID NO: 6870 - DNA, 432 bp, Homo sapiens
aggttggccaggctggtgaaaccctatctctattaaaaaatacaaaaaaatacaaaaaaattagctgggcatgtgggcatgcacctgtagtcccagctatttgggaggctgaggagggagaatcgcttgaacccgggaggcagaggttgcagtgagccgagatcgcaccactgcactccagcctggacaacagagtgggactctgtctcaaaaaaaaaaaaaaaaaaaaaggggggggcctttttaaagatcccttggggggcccaagtttaccgggggatggaaaggtaaaattttttcccttatggggggcgaattaaaacccaccttgggatttttgggaaggaacctttcttttgggggggggactaattggcacaaccccctcccggaatttaagggcttaagggaaaataaaaatttttaaggggc

SEQ ID NO: 6871 - DNA, 481 bp, Homo sapiens
  misc_feature (1)...(481): n = A,T,C or G
agaggcgggggttttncctgagatccntcatggtaccgcnccngaattccccgggtcgaccccacgcggtgcgggtcttttgcaggtctccgtcatggcagtgatgaaaacctaacagggtggccccctgtgccagctcaagtgactggagcccgagggcctgacaggttcccagcagctgggccggccagccttgcactgtgggggctggtcctgagtcttggcctgcctcccagccctgccagggggctgcggcctatgggtccacgggaagcctccgtcaggagagacgcagccctgggggccagctggtgctgcaaggaagggtgggaagcttgctggcttctgttgcgccactgagacggcagagaccccaggatcccagagcttcccaggatccctcccagatcctctgctgactccatatggaggcctcacacccagagggtagggcagcagatcttctttataactatttatt

SEQ ID NO: 6872 - DNA, 403 bp, Homo sapiens
  misc_feature (1)...(403): n = A,T,C or G
aaaaaaaaaacacggccgccttttataagaacctatgggggccccttttaccggacatctacagggcgaggatctgtcccatacccaagctgttttacaccgaccactcccttcattttgctagggagccacactcagggggggtgcctgatatgcattgcgcgcctggaccgatctaagggtgacaggaagcaatacaagttataggggcttagggtgcacacatgatggcatgaggcatccgatggctactgagacacatgggtgctattggggttgggggggaggtgaggtaccanccttggatactccatggggtgggggtggaaaagcagaccggggttcccgtgtgcctgagcggaccttcccagctagaattcactccacttggacatgggccccc

SEQ ID NO: 6873 - DNA, 465 bp, Homo sapiens
  misc_feature (1)...(465): n = A,T,C or G
ctccccactgagangcctctgaaccgcnnncgnattctccggtcgacccacgcgtccgcgcaaggctatgtttgacagcgattttaagcaagctgatgagtacctgtcatttgcctttgagcattgtcaccgttctagtcagaagaacaaaaggatgattctgatctatttgcttccagtaaaaatgctattgggtcacatgcccactgtggagctcctgaaaaagtatcacctgatgcagtttgcggaagtaaccagagctgtgagcgagggcaacctgctgctgctgcacgaggcgctggcgaagcacgaggccttcttcattcgctgcggaatcttcctcatcctggagaagctgaagatcatcacctacaggaacctctttaagaaagtgtatttgttactgaaaacacaccagctgtctctggatgcttttctggttgccttgaagttcatgcaggtggn

SEQ ID NO: 6874 - DNA, 421 bp, Homo sapiens
  misc_feature (1)...(421): n = A,T,C or G
gcggagttggacatcgggcagcactgccaggtggagcattgccggcagcgagattttcttccatttgtgtgtgatgattgttcaggaatattttgccttgaacacagaagcagggagtctcatggttgtcctgaggtgactgtaatcaatgagagactgaagacagatcaacatacatcttacccatgctctttcaaagactgtgctgagagagaacttgtggcagttatatgtccttattgtgagaagaatttttgcctgagacaccgtcatcagtcagatcatgagtgtgaaaaactggaaatcccaaagcctcgaatggctgccactcagaaacttgttaaagacattattgattccaagacaggagaaacagcaagtaaacgatggaaaggtgccaaaaatagtgaaacagctgcan

SEQ ID NO: 6875 - DNA, 491 bp, Homo sapiens
  misc_feature (1)...(491): n = A,T,C or G
ggggggggatttagcctgcgcctgcgtacgnactganatcattgnagaaccacgcgnncgnttncccagaaggagagattcctctgccatggagtcctacgatgtgatcgccaaccagcctgtcgtgatcgacagacggatccggtgtgatgaaagctggttttgctggtgatcagatccccaaatactgctttccaaactatgtgggccgacccaagcacgttcgtgtcatggcaggagcccttgaaggcgacatcttcattggccccaaagctgaggagcaccgagggctgctttcaatccgctatcccatggagcatggcatcgtcaaggattggaacgacatggaacgcatttggcaatatgtctattctaaggaccagctgcagactttctcagaggagcatcctgtgctcctgactgaggcgcctttaaacccacgaaaaaaccgggaacgagctgccgaagttttcttcgagaccttcaatgtn

SEQ ID NO: 6876 - DNA, 491 bp, Homo sapiens
  misc_feature (1)...(491): n = A,T,C or G
aggcggggnnnttttatccgaaaccgtcggatcgctctgagaccatcggcgacncccgcgtccggaaggatgctggaaggtactatggcagaggttacaaaaaccaggcagcaattcagggcagacctccttatgctgcttcagcagaagaaggggccaaagaacttaagtcaaaatctggggaatcgaagtcctctgctatgtcttcagacgggtccctggctgaaaacggagtgatggccgaggagaagccggctccccagatgaacgggagcacgggtgacgccagggcccccagccactctgaaagtgccttgaataatgactctaaaacgtgcaatacaaatcctcatttaaatgcactaagtacagacagcgcttgccgcagagaagctgctctggaggcagctgtcttaaataaagaagagtaaacttattttttatatagggtgaaggatgctggaagggtaaggatttatgaatatctggag

SEQ ID NO: 6877 - DNA, 417 bp, Homo sapiens
gcgcataaattgatttttagctggcagacaagaatatccatataagatttgttaaccatttcagagagtttggcaaggtttaaaagataataaggtatcatttttaagtatgaaaattaacaatatccctgttgcgcacactaattttgcatgagtaagtttacaaatatgtatcgtctgtaaagcagcatgtgcagattattcataatatagaagttaaaataagtattagtgcaattttcagatatttatttttgcacagaaaacacattatctggagagaaagaaaggagaatttttgagacttgggttttcttaatgccagtgtgaatttgcagatgttttcagaaaatcaagtcacagtaacaatttgccacttttttctattataaatcttcttacttaaattttgaatat

SEQ ID NO: 6878 - DNA, 477 bp, Homo sapiens
  misc_feature (1)...(477): n = A,T,C or G
atgcgcggtttcnnnnaagccttangnanagaccgacnnnnnggnnganncacgcgtgcgcggacgcgtgggattttcacaaaggttagatgcttgcattatgacttcaattgagcagttaccttanagtctagtgacctacctatttatcctgtatttacaactatttcccatgttttctgttgtccaaggggcttacaacattcaaacccaacttcactcattcacttactcatttacttattcactcactcacactttcatttattcattcatttactatatttggcacacaaactctagggtgaccaccagggatccttgcttcctggtgtgttcactcgtgtgtaggcaggacctgggacttgcttctaaccaacagaatacggcaaaagtggtgggatgttcttcctgttattgtgttacataatataagacgctgtcttgctagtagactcactccagacactctccttg

SEQ ID NO: 6879 - DNA, 481 bp, Homo sapiens
  misc_feature (1)...(481): n = A,T,C or G
agtgccgggtnnccccgggaacttgagacangacccgcccnnaattnngggncgacccacgcgtccggtcagtgcgccgctctccagcccgcttgaacgctccccgcagccaccgccacccattggaatggccaacaggggacctgcatatggcctgagccgggaggtgcagcanaagattgagaaacaatatgatgcagatctggagcagatcctgatccagtggatcaccacccagtgccgaaaggatgtgggccggccccagcctggacgcgagaacttccagaactggctcaaggatggcacggtgctatgtgagctcattaatgcactgtaccccgaggggcaggccccagtaaagaagatccaggcctccaccatggccttcaagcagatggagcagatctctcagttcctgcaagcagctgagcgctatggcattaacaccactgacatcttccaaactgtggacctctgggan

SEQ ID NO: 6880 - DNA, 478 bp, Homo sapiens
  misc_feature (1)...(478): n = A,T,C or G
agcgccgnctttcaagggggacttagagacgnancgncncnaantcngggncgaccacgcgtccggcttttggtaaattgtctgacccagttattaatgaaagaatatggatttaaaaatttttaaactaaataatttgtgctgtcacagaaatggtattgttgctcttgtttactgggtataatttcccaatgcattgatgtgaagggatagaaaatctaaactaatttagttatccattggggggtgtatttactgtgatgaagatgagacagatgccatcagagctttgtgaatcagctggggtgttttcactgataaacaacacatagcaggtgtgcattcattacaaatatatgtatctgccaaggtggagccactttaaagagtgagttttgtcttgtatctaaagtggatacaagcgtatgtttaaactgcaagatttttacttgctagagaatctgttttaatatagcgg

SEQ ID NO: 6881 - DNA, 477 bp, Homo sapiens
  misc_feature (1)...(477): n = A,T,C or G
agcggcggtgnccccggaagttccgaanngaccggccnnnngggnngancacgcgtgcggggggggcctgggagtgtcattggcgtatgaccgcaacccttgccgctgccgctgacatcgctaccatggtctgcggcagcagcggcctcgccgccgcccgtctcctgtcgcgcagcttcctcctgccgcagaatggaattcggcattgttcctacacagcttctcggcaacatctctatgttgataaaaatacaaagattatttgccagggtttcactggcaaacagggcacctttcacagccagcaggcattggaatatggcaccaaactcgttggaggaaccactccagggaaaggaggccagacacatctgggcttacctgtctttaatactgtgaaggaggccaaagaacagacaggagcaacggcttctgtcatttatgttcctccgccttttgctgctgctgccattaatg

SEQ ID NO: 6882 - DNA, 479 bp, Homo sapiens
  misc_feature (1)...(479): n = A,T,C or G
nagcggcggtttcnnaagggttagnagaancggcnggacatnnngggngacccacgcgtgcgggaagacatggctgaaagctggacagcaggggaggaggaagagctgtggcttgtaacttgttcaactcaggcaggaagcgattttagctttatttaaagtcttctgtccagctttaagcactttgtaagacatggctgaaagtagcttttctatcagaattgcagatagtcatgttgggctaacagtcaattggatatattcctttacctcacatgaccccagcaactgtggtggtatctagaggtgaaacaggcaagtgaaatggacacctctgctgtgaatgttttagagaaggaaattcaaaaaatgttgtaactgaaagcactgttgaatatgggtatcggctttctttttcactctgactcttaacattatcagtcaacttccacattaatgaaagttgaccatagttattt

SEQ ID NO: 6883 - DNA, 414 bp, Homo sapiens
cccacgcgtccgggtaaaattcctcaactgctatttatttattccagcccagtactataaagaacgtttcaccagaatgaccctccagagctgggaaacctaccacaagatctaaagttctggctgtccattaacctccaactatggtctttatttcttgtggtaatatgatgtgcctttccttgcctaaatcccttcctggtgtgtatcaacattatttaatgtcttctaattcagtcatttttttataagtatgtctataaacattgaactttaaaaaacttatttatttattccactactgtagcaattgacagattaaaaaaatgtaacttcataatttcttaccataacctcaatgtcttttttaaaaaataaaattaaaaatgaaaagagactcaattgtaaaaaaaa

SEQ ID NO: 6884 - DNA, 482 bp, Homo sapiens
  misc_feature (1)...(482): n = A,T,C or G
naggcgcgggtttcccccaagggttcagnanngncncgncnnnnngggnngaccacgcgtgcgggtgtgggaggaggcggcgtggaaggccgaggagctcaagcccggaccaatccccacgttccgggccgcgaccgtgacgcgctgcagcgtaccgggaagcgaaaccggccggatgggccgctgagcccgaatcgggcactgtgtggagccccctggagctgagatcaggatgttccgcttcatgagggacgtggagcctgaggatcccatgttcctgatggatccctttgctattcaccgtcagcatatgagccgtatgttgtcaggtggctttggatatagccccttcctcagcatcacagatggcaacatgccagggaccaggcctgccagccgccggatgcagcaggctggagctgtctccccctttgggatgctgggaatgtcgggtgcgttcatggacatgtttgggatgatgn

SEQ ID NO: 6885 - DNA, 373 bp, Homo sapiens
gaatctagagaggcagtctggctatggcagctttgcagagctgtggtgggctctgcccaattcgaacttcccagaagctttgtttatactgtgaggggaaaaccacctactcaagcctcagtaatggtggacgcttctccccacaccaagcttgagagtcccaggtcgacttcagactgctgtgctggcagcaagaatttcaagccagtggattttagcttgctgggctctgtggcggtgggatccactgatccacttggctccctggcttcagttccctttccaggagagtgaacagttctgtcgctggccttccaggtgtcactggggtatggaaaaaaaaaaaaaaggggcggccgttttaaagaatcct

SEQ ID NO: 6886 - DNA, 410 bp, Homo sapiens
acgatatataatgatgagatcctgaacaaaagaggcaaagaaatgctcctacttgaaaaatacacattccctatagactgcctcctgtttagtccaacttacatcactcagatccttcctgggatcaaatatatttttaaacctaagacaaagcgaagcaggtgtcacttgggtgatagggaaaaaagcttgtatttcctggttaatgtttagcttttgtaatgctatttaaacacacctaaggtgcctttccctcatctcaggtgctttctctgtaaagtttcactcccacctttcttttctctgcatggccgtccagtcttgcccatctacatccagagctgttaactagtagtgtcattacctgtgaaaaacatgtagaagcttccttgaaccacccagaaatccat

SEQ ID NO: 6887 - DNA, 443 bp, Homo sapiens
ctgtctggcatacctaggttaaattctaatgcaaacagctgcgttgctgtcacttgctgtaaaacacccacttcacacagggccgtgtgctgtggggcccatggcaggtggccaggcccaaggctggcagttacctgaaaacacttgggttaagtttctatcgccatggcagttaggcagccacttgtaattatttccttcaactggcagccgtgctatacaggacatattccgacagggctggactctgaggcaactcttgcttgcctccttaaatgtttcactgctgaaagctgccttctaatctcctgggagctgccttggaaatagcctaaggccatgttacaggactgcaagttataaattaccatgcacattaataaacatggaatcactcaggggaagagaagtccaattggagtcatctttgtgggtgtgctcac

SEQ ID NO: 6888 - DNA, 444 bp, Homo sapiens
cgagaatggagcctggcgttgattcatctgtattctacagggtttaagtgtcagatgcctcgatagactatgtattatgatgttaatgaagaatgcaggtggtcaagaattttgtagagaggataacaagacttaattactgaaaaacagtaacatagcattttgaaatataatcttttaaaatattgatgctttccttttaaatggaaatttaaattttatgattaaaagtttaaacatttatgataattttcctcatcagttctcccataggaaatacagcatgtgaaagggtatttaaagttttggaggactctttttaaaatgactgagttgataactactttgggctgggtttgttttaaaaaaaacattttcatgtaggagtattctgtgaaggaaaggaatcatgcataatatactttttgctttggcgtgttacag

SEQ ID NO: 6889 - DNA, 419 bp, Homo sapiens
  misc_feature (1)...(419): n = A,T,C or G
cgttgctgcacccttcccccagcaccatttatgagtctcaagttttattattgcaataaaagtgctttatgccggcttttctcaaaaaaaaaaaaaaaaaaaaaggggggcccctttaaaggaacccttggggggcccaaacttacccggggatggcaaggtaaaactttttcccttaaggggggccaattaaaacccaccttgggaattttgggaaggaacctttcttttggggggggaacaaatgggcccaacccccctccaaaatttaaagccttaagggaaaaaaaaaatttttaaggggaaaagggggaaaaccaaccgcaataccctgccgcttaaaaaaatggggnnnnnnnnnnnnanncttcacttcggggggggcnannggcgcgcccccccctctcagggtaagacag

SEQ ID NO: 6890 - DNA, 433 bp, Homo sapiens
atcagataaagttactagagtactgtatatacattttcctttctaattttacacacgctattatttatagagcacaaaacactcaaaactaaatcaggaagtatagtcggttagttgagataggatgtggtcttaagtagtaaacagtgttctaaagtttcaggttgcatgtagtcacatctgtagagggaaacataatttgaaagatgctcttgcaggaaatttttctttgtttagtcaaaatatgctctctttgtttttaagttaatttattatgacctaaaggcatctaaaaaataaataagaaaatgaaattccatatttgtggaaattcatattgaagtctaactgtggctgttttggtaaaagtatttgctgctttgaatcaaatttagcattaaagggctgccacagtataatcatgttaaggaga

SEQ ID NO: 6891 - DNA, 424 bp, Homo sapiens
aaacactctaattactgtagctattatagtcacaacccagatcctccacctccttctctctcacccctttctttcttcccccctccccttgctctagcagcaggagttgaactgcagtctcatgagcacagtcagatctatgaatgagctttatatcttgtcaaggcagaactccagatccaacagggctaatttttcatggttctcttgctgtttgttcttggatcagagtcccagaaataagagatggcaaatacctgtcaggtcatatctagtccatcactcaggggcaaacctaggatttttctcttgtctctgtgagaaatttttccttctttcttttgcaggtgagagctgtctgatgccagacaagctctgaaactgccttctttttattgtgttctctggtcattagtgtctggcc

SEQ ID NO: 6892 - DNA, 483 bp, Homo sapiens
  misc_feature (1)...(483): n = A,T,C or G
gcgcgctaccgagntcttgcaatttgggcgagcaccgccncnaannnncgggncgacccacgcgtccggtggtgtcctggccacaagcgcaggcttgacccaaggctctggctgcgtccggggcctcaattctatgtgtcctggaggaggcaggggttcacgagtcactgtgtgtctcacttagaaaatgcttgttgcagatccaagatatcgtccggaggcggcagctgctgactgtcttccgggaaggcaaggatggtcagcaggacgcggatgtggccatcttgcatgccttgctgaaaggtgagggtcagggaacatggtggcaatggggtggaggccataacgtgagctctgaggacgccaagctctaatcttgaagtgccatgattctgggaaccagaatattcctccttgggcagaaacccttgccagagggcagctggcgacgtgcaggtgggcgcctgcctgtcacctgatgtt

SEQ ID NO: 6893 - DNA, 433 bp, Homo sapiens
taaatctaaccttgacttcttaagttcaacttcattccgtgcttctcagcctcttgttacaattaatgcccattaactggtaacttctgaaactaaccgagaggcttttggaatactgtatttaatctctgccctacagcacaagcagcgctgccctgtgctggaggaccagttggtggatctggttgtttatgccatggagcgatctgagaccgaggagaagtttgacgatgggggaacaagccaactcctgtggcagcatctctcaagtcagctcattttctttgtgcttttccagtttgcaagttttccacatatggtgctttctcttcatcagaaggtatgtactaaatcttatggtcggagtgacttcacctgttgattactgtattttagactgctgtgggcattccctagtgattttagaactgac

SEQ ID NO: 6894 - DNA, 492 bp, Homo sapiens
  misc_feature (1)...(492): n = A,T,C or G
gaggtcaattgacgctgtttggacggccctgaatacccggctcgacccacgcgtccgcactgggcttccgttacaagatgaggtctgtgtatgctcacttccccatcaacgttggtatccaggagaatgggtctcttgttgaaatccgaaatttcttgggtgaaaaatacatccgcagggttcggatgagaccaggtgttgcttgttcagtatctcaagcccagaaagatgaattaatccttgaaggaaatgacattgagcttgtttcaaattcagcggctttgattcagcaagccacaacagttaaaaacaaggatatcaggaaatttttggatggtatctatgtctctgaaaaaggaactgttcagcaggctgatgaataagatctaagagttacctggctacagaaagaagatgccagatgacacttaagacctacttgtgatatttaaatgatgcaataaaagacctattgatttggaaaaaaaaaan

SEQ ID NO: 6895 - DNA, 425 bp, Homo sapiens
cccaccgccgtggagttcgtaccgcttccttagaacttctacagaagccaagctccctggagccctgttggcagctctagctttgcagtcgtgtaattggcccaagtcattgtttttctcgcctcactttccaccaagtgtctagagtcatgtgagcctcgtgtcatctccggggtggccacaggctagatccccggtggttttgtgctcaaaataaaaagcctcagtgacccatgaaaaaaaaaaaaaaaaaaagggggggccgttttaaaggatccctgggggggccaaacttaacgcgggcaggcaaggtaatagctttttccttatagggagccgaataaaaagctacctgggaatcttggaaaaggacccttactttgggggggggacttattgggacaacctccctacagaaatttaag

SEQ ID NO: 6896 - DNA, 484 bp, Homo sapiens
  misc_feature (1)...(484): n = A,T,C or G
ccccgcccccaaaaantaaattcggttggacgtgctgaatnggatggacctcccaganccacccacgcgggcgggaaaggcattgacagccagggacaggagccagggtgggggtagttttgtgggaaagcagaactgaagttagcttaagcatagggacaaagaaaaatcttcgcttttcatgtatgtggaatccaagaataaccataggctctaccagaccagaagggtaaggatggacactaaaatgaaacaaataccaaggtattccttctgctgcagcctggagaccaccgagagtcgagctggggcacacacacacctggccgggacccggcagggacaaggcaggccgtggcctcctccaccaagtctctctagacaattcagggcctgctttccccagctccatgcatggctggactggtgattccagggtgcagaagggattcatattcccagaacgctttaagtgtacacctgn

SEQ ID NO: 6897 - DNA, 416 bp, Homo sapiens
cacacctgtaatctcagctactcaggaggctgagctgggaagactgcttgaacccaggagttcaaggccagcccaggtgccatagtgagacccccatctctaaaagacttgagagggagtaaagactatttcagaaaatctgtacagcataattttccctttgctcgcaaagtaaatttttttagtcacaaatgtcacctgttcatttcaagctggaaaaattttgtcacccttagaagtatttgatttaactaaaatgcagctttgttagtagatgtgccaaggcatgcctgggaaagctcattatttagctaaatcattgcttctctggtatattagtattcaaaaactacttcccactcaactttcctatttttcagagaattgaaggacttcagatcagcaaatcgttaagt

SEQ ID NO: 6898 - DNA, 507 bp, Homo sapiens
  misc_feature (1)...(507): n = A,T,C or G
atgggggnntttgangctagcnacctaccgtanaannctacntgngcttcgnacaagtcncnnaannnnngggnngacccacgcgtgcgcggccttctctctcactgcacagactccatgacctcctatgtgctgactcanccccggtcggtgtcagtggccgcaggacagacggccacgattacctgtgggggaagtaacattggaagaaaaagtgtgcactggtaccaacagaagccaggccaggcccctgtcctggtcgtctatgatgataccgaccggccctcagggatccctgcgcgattctccggctccaactcgggaaacacggccaccctggccatcagcagggtcggcgtcggagatgaggccgactattactgtcaggtgtgcgatggtagttatcttaatgtggtcttcggcggagggaccaaacttaccgtcctgggtcagaccaaggctgccccctcggtcactctgttcccgccctcctctgaggagcttcag

SEQ ID NO: 6899 - DNA, 492 bp, Homo sapiens
  misc_feature (1)...(492): n = A,T,C or G
nggcgggnattgagctagcgccttcgtacgnctgatantctngtagacccacgcgnncgnccacgcgtncgggtggcagccaagagcctcctggcacagcggcaccaggcaggtgacgcctattggaccccagaggtcatcccagctccagacgtggacacattttcttccaatgatgtctacggatgaggaaactgaggcctggagaggttaaagagacccgttcagagtcctacagtggcagactggtcttctgaggacctctgccctctacacagcggcctcttcaggtgcagggaggaaatggaagcacgttctatgctggttccaccccaggcatctgtgtgcttcgaggatgtggctatggcattcacacaggaggagtgggaacagctggacctggcccagaggacactgtaccgagaggtgacactggagacctgggagcatattgtctccctggggcttttcctttccaaatctgatgtgatn

SEQ ID NO: 6900 - DNA, 424 bp, Homo sapiens
  misc_feature (1)...(424): n = A,T,C or G
cggacgcgtgggttgtttttgttttttatggcaactggaaagtatttactatgggaggcatttatgtctgtctttctatcataaagaattgatcaatatgtncaaaaaaaaaaaaaaaaaaaaaaaaaaaaaaaaaaaaaaaaaaacaaaaaaacaaacaaaaaaaaaaaaaaaaaaaaaaaaaagaaaaaaaaaaaaacaaaaaaaagaaggggggccctgccccttaaaaaaaagagcggggggccatctttcttttggaggaggaaaattttttcttttttgttggggggggggtctataaaagcggaatgaggaggattggaaaaaccccccccttgggggggggggaaaatatgtggcccctccccaccaacaagattttggcgaagatgaaactgataccttcttggggggggggggg

SEQ ID NO: 6901 - DNA, 496 bp, Homo sapiens
  misc_feature (1)...(496): n = A,T,C or G
gtgggtgggattgancctgccgngttcgtaccnnactgatancctgcgcaancnccgcgtncgggcccagttcatgaattcgagcggctctcataaagatctggctggcaagtatcgtcagatcctggaaaaagccgttcagttatctggagcagaacaactagaagctttgaaagcttttgtggaagcaatggtaaatgagaatgtcagtctcgtgatctcgcggcagttgctgactgatttttgcacacatcttcctaacttgcctgatagcacagccaaagaaatctatcacttcaccttggaaaagatccagcctagagtcatttcatttgaggagcaggttgcttccataagacagcatcttgcatctatatatgagaaagaagaagattggagaaatgcagcccaagtgttggtgggaattcctttggaaacaggacaaaaacagtacaatgtagattataaactggagacttatcttgagattgctagg

SEQ ID NO: 6902 - DNA, 496 bp, Homo sapiens
  misc_feature (1)...(496): n = A,T,C or G
ggggggggattgaaactgagngctgtgtaaanccagntgnactagnaaagtcncnaannnngggnngaccacgcgtgcgagaaattctatgtctgtagggtttctgtagggctttgggccctatcaacaattctatgtctgtaaaaaccaacgaaggcattggacttgtgtgaatgtacagggtttttttagtagtaattttaaatttaaatgttttaagtgatcatcagtgttcctttttacttataaagatggattcttttttagaatttgtaataaataaaaactgctgctttaccactgtaaaaaaaaaaaaaaaaaaaaaaaaggggggggccccttttaaaggttccttgggggggccaaatttaacgggggcttacaaagaaaaattttttctttatgagggggacgattttaaagtgacttgggaatttttgagacaaaccctatttttgggggggggacaattgggaccagtctccccccaaaaaat

SEQ ID NO: 6903 - DNA, 496 bp, Homo sapiens
  misc_feature (1)...(496): n = A,T,C or G
tgcgggnntgnagctgagatcatcgtaaancctacctngcttcgcaccgncncnaantncgggncgacccacgcgtccggtctcattgcagataatttttagcttagggcctggtggctaggtcggttctctcctttccagtcggagacctctgccgcaaacatgctccgccagatcatcggtcaggccaagaagcatccgagcttgatccccctctttgtatttattggaactggagctactggagcaacactgtatctcttgcgtctggcattgttcaatccagatgtttgttgggacagaaataacccagagccctggaacaaactgggtcccaatgatcaatacaagttctactcagtgaatgtggattacagcaagctgaagaaggaacgtccagatttctaaatgaaatgtttcactataacgctgctttagaatgaaggtcttccagaagccacatccgcacaattttccacttaaccaggaaatattn

SEQ ID NO: 6904 - DNA, 497 bp, Homo sapiens
  misc_feature (1)...(497): n = A,T,C or G
gtgggggnnnttnnaacatgaantcatcgtanaaacctgnagngctagcacaancncnaannnnggnngaccacgcgtncgcggacgcgtgggcggcatctgacttgacgtggcccacaactgaaaggtctggggagagggcgccgtgtccgggggtggagaggggcgtcgtggaagcgagaagagtggcccgtccctctcctccccctttccctctttcggaaagtggtttctgcggggcccgggagcctcggagtaccgaacctcgatctccggggcggggtccttggtggggactgagcgccccctcccggggacgggcggtctggccgcggagtcccctgcgggagcgtgattggctggaaacggtcccgaacccccaggggagcccgatccctgggggaccctggcttcggactccagtatctgtcgtcgcagggtccctgccctagtggcctatgtcccttgctcggggccatggaaacactgcggccagg

SEQ ID NO: 6905 - DNA, 501 bp, Homo sapiens
  misc_feature (1)...(501): n = A,T,C or G
cggcgggnntttnaaattgaaattatcgtaaanactgatangtgatgnaccggcncggaantnnngggncgacccacgcgtgcggtgacaaacagtggcaaaacaacactggctaagaatttgcagaaacacctcccaaattgcagtgtcatatctcaggatgatttcttcaagccagagtctgagatagagacagataaaaatggatttttgcagtacgatgtgcttgaagcacttaacatggaaaaaatgatgtcagccatttcctgctggatggaaagcgcaagacactctgtggtatcaacagaccaggaaagtgctgaggaaattcccattttaatcatcgaaggttttcttctttttaattataagccccttgacactatatggaatagaagctatttcctgactattccatatgaagaatgtaaaaggaggaggagtacaagggtctatcagcctccagactctccgggatactttgatggccatgtgtggccn

SEQ ID NO: 6906 - DNA, 491 bp, Homo sapiens
  misc_feature (1)...(491): n = A,T,C or G
cggcgtggatttacctagcgcctacgtaccgnctgannatcntcgcaanccacgcgnncgaaacaagtttgctagtgactaagccccgcatatgtgagtgaaagtacttcaggcacgctgcctcctggtaacagctatgcagggagggaggacccacactgctacacttctgatcccctttggttttactacccaaatctaaatagatacttttgataatagataactgctcttttactaagacatagtctctacctatagaaatgtattttgaaaacacttattttacacagcaattttgtatccatttaaactaaccttttatcaataaagcactattgtttagatattanaaaaaaaaaaaaaaaaaaaaaaaaangggggggggcccttttaaagaacccttgggggggccaatttttacgggggaggggaacgaattatttttttccttatgggggggcatttaaaaaccctctggggaattttgg

SEQ ID NO: 6907 - DNA, 496 bp, Homo sapiens
  misc_feature (1)...(496): n = A,T,C or G
aacaggagggccttgcaactgaaagccctgantagtctncgcgnaanncccgggaagacccacgcgtacgcccacgcgtgcgcaattctgggacgccggtggggaaagaggaaaaataagcccaagatgaactacgagaagctgagccggggcttacgctactattacgacaagaacatcatccacaagacgtcggggaagcgctacgtgtaccgcttcgtgtgcgacctccagaacttgctggggttcacgcccgaggaactgcacgccatcctgggcgtccagcccgacacggaggactgaggtcgccgggaccaccctgagccggccccaggctcgtggactgagtgggaagcccatcctgaccagctgctccgaggacccaggaaaggcaggattgaaaatgtccaggaaagtggccaagaagcagtggccttattgcatcccaaaccacgcctcttgaccaggctgcctcccttgtggcagcaacggcacn

SEQ ID NO: 6908 - DNA, 492 bp, Homo sapiens
  misc_feature (1)...(492): n = A,T,C or G
gagggagggccttgccctgagnnccctgacagtctgggaaccgcnccggaatcccggtcgacccacgcgtccgcccacgcgtccgcccacgcgtccgcttggatgttcgcaaccccttttgtgtatctcgttgccagaacctacgatgcttaagaaatcagaaaaatcaattgttcttctcttatatcaagaccaatccttaatgcatcgtgaaagactggaacacctgggtggcatatgcaagcatcatcggaattgatctcaggatcgaagcgctgaccgcagccccggttgtagcacagcaaggccattttcttttcccaccgtcacaggcaaggcccaaacaccgggaacggcaagagggtgcatttgccactcccgtgtcgctagcaccggccttgacagtggactattacaaggatttctgtgggcccgctctgagccgcccgttctggccgtgcagacggacttctaccacacggtggcgctgcn

SEQ ID NO: 6909 - DNA, 480 bp, Homo sapiens
  misc_feature (1)...(480): n = A,T,C or G
gagaggcnnttagactcntggaccgcgtcgaccgcccgaatcccgggcgacccaccgtccgccacgcgtcgccacgcgtccggtgtggcgagcggtttcttgtgggctagaaaaatcctgcaaaaatgtctgtctatccatctctcgaagacttgaaggtagacaaagtaattcaggctcaaactgctttttctgcaaaccctgccaatccagcaattttgtcagaagcttctgctcctatccctcacgatggaaatctctatcccagactgtatccagagctctctcaatacatggggctgactttaaatgaagaagaaatacgtgcaaatgtggccgtggtttctggtgcaccacttcaggggttggtagcaagaccttccaatataaactatatggtggctcctgtaactggtaatgatgttggaattcgtaaagcagaaattaagcaagggattcctgaagtccttttgtgtaagg

SEQ ID NO: 6910 - DNA, 402 bp, Homo sapiens
tcgccaacccagaaaccaccacctctcacgccaaagctcacaccttcaacctccaacatgaaggggtccgcagcacttgtgtggctggtgctcataggagctgacttcagcccccaggggctcgctgggccagcttctgtcccaaccacctgctgctttaacctggccaataggaagataccccttcagcgactagagagctacaggagaatcaccagtggcaaatgtccccagaaagctgtgatcttcaagaccaaactggccaaggatatctgtgccgaccccaagaagaagtgggtgcaggattccatgaagtatctggaccaaaaatctccaactccaaagccataaataatcaccatttttgaaaccaaaccagagcctgagtgttgcctaatttgt

SEQ ID NO: 6911 - DNA, 408 bp, Homo sapiens
  misc_feature (1)...(408): n = A,T,C or G
aggacaccttgtgggacatctgaggacatccgcagattcttgtcagcctgtgaactaggccctgcctctgtcacctcattggtccatgaaggagcagccaggggtggtggaaggagcactgggctaggggtcaggggtcagagattctgtcctgctcctgggatgcactggctactcccttagtctactcccttcccctctctggtcctcagcttcctccatcatggaggagatgggatcatggattttctgggcataagtggctgttctgggagtcattccaaagagagaataaaactcctgatccantttntntnntntnntnntttttttttttttctttntntttttttttntttaaagggggccccttttttaaaattcccgggggggccccccttttccccc

SEQ ID NO: 6912 - DNA, 422 bp, Homo sapiens
  misc_feature (1)...(422): n = A,T,C or G
attgggctggacagggcagttgtgtgttggggtggtttttttctctatttttttgcttgcttcttgttttttagtaatgtttacaatctgcctcaatcactctgtcttttataaagattccacctccagtcctctctcctcccccctactcaggcccttgaggctattaggagatgcttgaagaactcaacaaaatcccaatccaagtcaaactttgcacatatttatatttatattcagaaaagaaacatttcagtaatttataataaagagcactattttttaatgaaaaaaaaaaaaaaaaaaaggggggccgttttaaaggatcccttggggggcccaagctaacgcgggcatgcaacggcttagctttttccttatagggagtcgaattataagctaccttggaatctttgagaggn

SEQ ID NO: 6913 - DNA, 411 bp, Homo sapiens
agagcatagcacctgcagcaagatggatgtgggcagcaaagaggtcctgatggagagcccgccggactactccggagctccccggggccgatttggcattccctgctgcccagtgcacctgaaacgccttcttatcgtggtggtggtggtggtcctcatcgtcgtggtgattgtgggagccctgctcatgggtctccacatgagccagaaacacacggagatggttctggagatgagcattggggcgccggaagcccagcaacgcctggccctgagtgagcacctggttaccactgccaccttctccatcggctccactggcctcgtggtgtatgactaccagcagctgctgatcgcctacaagccagcccctggcacctgctgctacatcatgaagatagctccagagag

SEQ ID NO: 6914 - DNA, 475 bp, Homo sapiens
  misc_feature (1)...(475): n = A,T,C or G
cgcggctcccaatgagcgccgcatagagagtcatcgnancgcgncgacccacgcgtgcgcttaataattagtggagtaaaagaagttcttcagattttattaatatgtgtggtaaggcttagttatgaagaagaggggacgaggcagcttccttccaggtgttggggcatagctaattgccctttttggtctgtttttacttgtcttatatctataataacggactctcttgataagaacccacctatgcacaatgatgtttttgtggggttggcagaggaaactgcatgttgctaccttgatgtgtgttctcgcttgactttttgttaagagatgatgtttagttctttgttgctgaactctgttagtgcaaagagaagaaaaatcttgcttaattaattgcaatattaaattgaaatatattttagcttccttagacagtcctgaaagagatttgcataactgcggtctttcn

SEQ ID NO: 6915 - DNA, 492 bp, Homo sapiens
  misc_feature (1)...(492): n = A,T,C or G
agagggagggccttaatcctaaagtctggacngtctntgaaccgcnccggaatcccgggggaccacgcgtccggcagatgaggttgggtgcatccttcagagggccctggctaaagctgaagggttccgactcgtgcacatccagggccgcgccgcggatccggccctccttcagggcctgggccagcgccttctcatccaccaggccaccccgggctgtgttcaccaggaaggccccttgtctcatctgcttgacggtgaagtcgttgatgaggtggtggttgtgctcgttgaggccgcagtgcagggtcacgcagtcgctgtggaagagcacgtcctgcagggtgctgacacgctgcagccccagcgcccgctccacgccatccgacaagtaagggtcgtagaagagcacgttgaagccgaaggccttggcccgcagcgccactgcctgccccacgcgaccaagtccgatgatgcccaaggtctccccgg

SEQ ID NO: 6916 - DNA, 479 bp, Homo sapiens
gtttgaactgatcccgtgcggaccgcccttgatttccgtctcgacccacgcgtccgctcaagttcgaaagaccaggtttcaaacattataagttccaggctttgcaagtctttattctctggggtaatatccagtctttctgttattggctcttaaaattctcttccatggcccacattaagggagtttgcagagagtgagggaggcaaaacttgaaaagggcctgcaacactttaaaccttctcaggttcacccacatgaaacagctgtgctgagtgtgctgccggtgcccggggagcttctctgactgtgacccggcagaggcttctgtggcggtgcatgagcggccctacagtggagggttctctttggaaacaaacagccctgcttggtttcagtttgaggccacttatcttcaatgtgacatttcttgccaagccctgtgacactccccattgatgactcccataggtacagat

SEQ ID NO: 6917 - DNA, 426 bp, Homo sapiens
  misc_feature (1)...(426): n = A,T,C or G
acgaccacgcgtccgcccacgcgttcggagaaagccttgatctctatcatcgacgtctaccacaagtactccctgataaaggggaatttccatgccgtctacagggatgacctgaagaaattgctagagaccgagtgtcctcagtatatcaggaaaaagggtgcagacgtctggttcaaagagttggatatcaacactgatggtgcagttaacttccaggagttcctcattctggtgataaagatgggcgtggcagcccacaaaaaaagccatgaagaaagccacaaagagtagctgagttactgggcccagaggctgggcccctggacatgtacctgcagaataataaagtcatcaattcctccnaaaatactgggatggggaaaaatacacatacaaattttttggggggggggctccttttat

SEQ ID NO: 6918 - DNA, 431 bp, Homo sapiens
  misc_feature (1)...(431): n = A,T,C or G
aatgaaacacattttactgggaacgaagttggttttttcaagcccatatcttgccgaaatgtaaatggctattcctacaaagaggcagtcgcattgtctctttttcttggatggttgggagcagatcgattttaccttggataccctgctttgggtttgttaaagttttgcactgtagggttttgtggaattgggagcctaattgatttcattcttatttcaatgcagattgttggaccttcagatggaagtagttacattatagattactatggaaccagacttacaagactgagtattactaatgaaacatttagaaaaacgcaattatatccataaatattttttaaaagaaacagatttgagcctccttgattntaatagagaacttctagtgtatggatttaaagatttctctttttcattcatan

SEQ ID NO: 6919 - DNA, 428 bp, Homo sapiens
ataaaagagggataacaatgctgattactaccttttaaaatattttagataaatgcacagcaccacagcaccacatctaagcattagtgatgggtagctgatgtcagcttcatgtggattttaagcactctagaaacaatgaagcttcttggcatattttaaggagctcccaaaatgtgttacctattaaattgtaactcagcaagtagaagaccatttgaaaagtcaggtacaaatttcctcaagtggcataaaaatgtagtcagttttctcttttaccagtttttatttccactccaattatttagaactttatttgtacatgtgcagaagaataaggcagctgagaatcttgtttcccccaagagagttttacaggctgagtgttgcaaatgtgttctttgtcctgttatatgtatatcaagaaa

SEQ ID NO: 6920 - DNA, 427 bp, Homo sapiens
aattttgcttttacctaaattcaagaaaatgaaattacacttttaagttagtggtgcttaagcataatttttcctatattaaccaggagtaaaatctcaagtaagattttccagtgccagaacatgttaggtggaattttaaaagtgcctcggcatcctgtattacatgtcatagaattgtaaagccaacatcaattactagtaatcattctgcactcactgggtgcatagcatggttagaggggctagagatggacagtcatcaactggcggatatagcggtacatatgatccttagccaccagggcacaagcttaccagtagacaatacagacagagcttttgttgagctgtaactgagctatggaatagcttctttgatgtacctctttgccttatattgctgtttacttctaagattggagaa

SEQ ID NO: 6921 - DNA, 491 bp, Homo sapiens
  misc_feature (1)...(491): n = A,T,C or G
tagaaataggttgaatacctgttacaacctggnaccgnnccgaancccggtcgaccacgcgtgcgggggtggtagagcctctttttaagatctgttgagtcggcttcagtctggctaagtaagaagcatgggcatactgagtccatcatttaatctttaaaagtatgtcgcttaaaaatgtaaccagaatgattcttcaatagaaatgagatttggtggagtctggattgcctgttttgcatataatatatacttaagatatataataccacctcattttctgggcattatttcctaattgttgatgtttcaggcttttgataagtcattttatatatttcaaatttaactcagaataagtaaatatttatggcacatgcagttttatgtactttcaggagaagaccatcaggaaaagacaggacaaagaagtcaaacattatagcccttgcaaatattagaggaccttagacaattaccatgaagtgttg

SEQ ID NO: 6922 - DNA, 479 bp, Homo sapiens
  misc_feature (1)...(479): n = A,T,C or G
gtgggatttaattgagcgctgcggattgacaccatcggaagggccgacccacgcgtgcgattccctgtctgttgtatttctgtgtgcctgttcccttcattgctgngagttgggagtgcattgagagatgatgtccatctgatatattcctgtgaaataaactgccaccaaactttctaacttgtattttaactgtcacagaagagattaaaaacttcggctttggacatgtccacattatggactgtcatcttatttttaaaagtcattctttacgtttaaaattttaaaataaaaaccttctgaggtattgatgtagtccaccgngtaaatgttaccttctctccatgctgccattatgccaaaacaaaagctgtgataaaaaaagtgcttgagagagtgtgttgataagaaagtgatttatttacagatggaagtctttgtttcatgaagctaccaaactntaaaaagaatgtcac

SEQ ID NO: 6923 - DNA, 429 bp, Homo sapiens
gcacacacctgtaatcccagttacttgggaggctgaggcacaagaatcgcttgaacccgggaggcggaggttgcagttagccaagatcgccctgctgcactccagcctgggcaacagagggagactctgtctccaaaaacaaaaacaaaaactgttagtgaaggttccctgggacttttgatattttaaaaattgttcttatgactagtagataaattcattgccataatgaggctagctcccagataaacagtgtattttcttctttttttttttttttttggggggggggcccaaaccttaaacctactttcccaggagttggccattttttccaaggaagtggggtggctttttcagaaaggctattgggggggcaaattttgtctccaacggagggcaacaaagaaaaataagtggtttgatggc

SEQ ID NO: 6924 - DNA, 420 bp, Homo sapiens
cagcgaccgtcggtagcagcatggctctcctctttctcctaccccttgtcatgcagggtgtgagcagggctgagatgggcaccgcggatctggggccgtcctcagtgcctacaccaactaatgttacaattgaatcctataacatgaaccctatcgtatattgggagtaccagatcatgccacaggtccctgtttttaccgtagaggtaaagaactatggtgttaagaattcagaatggattgatgcctgcatcaatatttctcatcattattggaatatttctgatcatgttggcgatccatcaaattctctttgggtcagagttaaagccagggttggacaaaaagaatctgcctatgcaaagtcaaaagaatttgctgtatgccgagatggaaaaattggaccacctatactggatg

SEQ ID NO: 6925 - DNA, 479 bp, Homo sapiens
  misc_feature (1)...(479): n = A,T,C or G
cggggatcaattatacctcggnatgacantcatcgaaccgcccaccaattctcggggcgaaccacgcgtgcgaaatgcctatgtgggattaacagattgctttttccttctatttgaggggtcatttttggaagaaattgggggaactaagattagcttttgaaaactctccctctcacagacgatatgcaaaaaaaacacgtgacttcagaatatcccacaggatcttacacattgtgaaaggacactgtctaattaataggaatggtttgctacactggactccaaaatgctgatgactttctcttgaggtagaatttgcttaagactcaatttgcataacatggggtactccagagcagttttctgaacaataatttaacaatagggctgtactctcagtgcttggcccctgagagggctgggctatccagatattgtgtgaccacctgcttccatgttgccagtcagtcttggcn

SEQ ID NO: 6926 - DNA, 474 bp, Homo sapiens
  misc_feature (1)...(474): n = A,T,C or G
aggggattaatgagncctcggaatgaccgcatactgaagnncgacccacgcgtgcgggctagatggctgtaatcttctcatataaacagtacatgtggaaggggattatatactggggggtatacctgtagcttaaagtgatcattttaaaagcagcaaacttctgaaagatttaaatactaaaagagacttgttgctgggcttggtggctcacgcctgcaaccccaacactttgggaggccaaggtgggtggatcacttgagtccacgagttcgagaccagactgggtgacatggcaaaactccatctctactaaaaatacaaaaattagccaggcatggtggcacatgcctataatcccagctacttgggaggctgaggcatgagaaccacttgaacccataagaggaggctgcagtgagccaacatgacatcactgcactccagcctgggtgacagtgaaaggctcataan

SEQ ID NO: 6927 - DNA, 424 bp, Homo sapiens
cccacgcgtccgcttgacgaggctgcggtgtctgctgctattctccgagcttcgcaatgccgcctaaggacgacaagaagaagaaggacgctggaaagtcggccaagaaagacaaagacccagtgaacaaatccgggggcaaggccaaaaagaagaagtggtccaaaggcaaagttcgggacaagctcaataacttagtcttgtttgacaaagctacctatgataaactctgtaaggaagttcccaactataaacttataaccccagctgtggtctctgagagactgaagattcgaggctccctggccagggcagcccttcaggagctccttagtaaaggacttatcaaactggtttcaaagcacagagctcaagtaatttacaccagaaataccaagggtggagatgctccagctgctggtga

SEQ ID NO: 6928 - DNA, 431 bp, Homo sapiens
cagactggtcatgcaaggtcctgggcctgcccttgggtcctggggagccacggaaggttgtgggtgccagagggttgcggtcagagtcacagtcaagggccttctgagacctgtgccccctccccacccttcctccccacctcctcaggccagctatggggtctcgggggtggtccgcaacatgacctccgagttcttcgctgcccagctccgggcccagatctctgacgacaccactcacccgatctcctactacaagcccgagttctacacgccggatgacgggggcactgctcacctgtctgtcgtcgcacaggacggcagtgctgtgtccgccaccagcaccatcaacctctactttggctccaaggtccgctccccggtcagcgggatcctgttcaataatgaaatggacgacttcagctctcccg

SEQ ID NO: 6929 - DNA, 426 bp, Homo sapiens
gcgattttaactcaaaactttatgtagaacatttcagtatatttgagttgaatatttttttattaactatttatttgctagttccataaaccagctctttaacatagcttatagtaattgatattttcttagaataagtacagagcaatatatcattaaagggctatgaaggggcaaaagaaatcacaccataaaagttagtactttttcccaatctgaaatgtcagatagagctagaagtcagatatttaggctgtttaaactttctgagagtttaatcaaaaggtgtgtatttctagaaggatgactagaaaaatgatgtgtggttgcttctgaatgggaaacaggagtcagggctgacaggaaaacttagagtggctataacattcttaaaataatcttttgagttgtaaaatagtaaatcac

SEQ ID NO: 6930 - DNA, 406 bp, Homo sapiens
  misc_feature (1)...(406): n = A,T,C or G
ctcaaccgggcagccgtggcattccagaacctcttcatggcagtcgaagatcactttgagttgtgcctggccaaatgcaggacctcatctcagagcgtgcagcatgagaacacctaccgggaccccatagcaaagtattgctatggagaaagcccgcccgagctcttccccgcttgacgggtgcagcggacttgctccagcctgggtgaggaggccccgctgaagaactcgcctcctgggacccagcttcagccatcgggccaggctgcaggaagaagacaaaggcagcgtgaggaaaccttggctttgaccccttctcgtgttgtcatctttggcttcgctcaccacccgggcttaccagatggaactcttctgtaaagcagcttggcccctccagccagtcccn

SEQ ID NO: 6931 - DNA, 320 bp, Homo sapiens
atttccttcaggctgaaaaacattctatagcatctcttataatacagatctgctggcaacaaattcttttttctttttaattggaaaatatctttgttttgtcttccatgtagcaggtactttttactagatattgaagtctgggtacacaggattttttttcttttagtcttttaaaaatatcactatagtattcctgcagttattgtttctgaaaaaaaaaaaaaggggcggccgctttaaaggatccctgggggggccaaagcttacgcgggcatgcaaggaaatagctctctccttatagggagccgtattataac

SEQ ID NO: 6932 - DNA, 409 bp, Homo sapiens
cccacgcgtccgatgctgtccagcccacagaggccccttaatgccagtgccgcccgtcagaggggtctcctgagtgcgtgtgggtggctggattctgcatactgggttatcttaaccccggctgtgaaaactggatgaagtagcaatcctttcaaccccaagagtctgtgattcagccagagttacaagatgtctcttcatcctctgaggtttacaaggttctcagaaaacctgtgaagagctgcgcggatcctctcctgccccggcccagcggcagggctgccgcctccctctcccctgggcctgagtgggtggatttcccctcccctcctccttcccaggagaagcacagagggagcggccaagcgagccgtgtctgcataccccgcttccctctgcggcggcctct

SEQ ID NO: 6933 - DNA, 405 bp, Homo sapiens
cggacgcgtggggtcagccttctgccttctgtcttctgccctctaaggtttgggatgagaaatctgataatcgtagtgagtatcccttgaatgtaatgagtcacttcttttttgctgctttcagtattctctttatgtctctgtcttttgacagtttgattataatgtgcctcagcgtgagtctctttgaattcatccttcttggagctcattgagcttcttgggtgtttatatttatgtctttttacatctgtatagtgtgttaaaataaaaaaaaagtctttcatcaaatttgggtagctttggccatttcttaaaaatagtccctcttcctccttgtttctctctttcctctggaactcccaccttttcttctattagctgcatgttggtttttgtctggta

SEQ ID NO: 6934 - DNA, 406 bp, Homo sapiens
  misc_feature (1)...(406): n = A,T,C or G
tctgagcccatagttgacggagggagtatttcatggttcacttgaggggctcccactgcgacccgatcgttagggagagaggcccacggtggggactgggaatttaaggagagctgggatcggatccctttggttcaggaagcttctgtgtaagctgcgaggatggcttgggccgaacggttgctctgcccgccgcgctagctgtgagctgagcacagccctggtctcacagcaccccaaaagcctgtggcttcaatcctgcgtctgcaccacacattcgataggatcggtttgttttgtttttaaagaaaggtgagattggcttggttcttcatgagcacatttgatatagctctttttctggttttccttgctcatttcgttttggggaagaaatctgtactgn

SEQ ID NO: 6935 - DNA, 487 bp, Homo sapiens
  misc_feature (1)...(487): n = A,T,C or G
gagggggnnncttaaaatgaagccatgangntcttgcaaannccggncgacccacgcgtcgaaaatacaaaaattagctgggcatggtggctcgtgcctgtagtcccagctatttgggaggctgaggtgggagaatcgcttgaacccaggaggcagaggtggcagtgagctgagatcacaccactgcactccagcctgggcaacagagtgagactccgtctgaaaaaaaaaatagcaaggccttctgactaggagaattatttaataatattaattacttcatctgccattcaggaagtggatattgagcaactcaagcatggcaagcactgtgcaccacgcactagggatgtaaccaggcacaagataccctgttcctgtaggggagtaatcaggcaaataatgggcatgagcaccctgagtggtgaatgttcagggtaagcacgcgatgctatggagcgtgtgggaggtgctgccaacccagact

SEQ ID NO: 6936 - DNA, 496 bp, Homo sapiens
  misc_feature (1)...(496): n = A,T,C or G
cggggcttttggcgcccgtcggatatgatcggcattcccggancgacccacgcgtccgtgacgacctacgcacacgagaacatgcctctcgcaaaggatctccttcatccctctccagaagaggagaagaggaaacacaagaagaaacgcctggtgcagagccccaattcctacttcatggatgtgaaatgcccaggatgctataaaatcaccacggtctttagccatgcacaaacggtagttttgtgtgttggctgctccactgtcctctgccagcctacaggaggaaaagcaaggcttacagaaggatgttccttcaggaggaagcagcactaaaagcactctgagtcaagatgagtgggaaaccatctcaataaacacattttggattnngnaaannaaataaaaaaaataattaaaaaaaaaataaagaaaaaaaaaataggattatnaaaagatgttgntttatggggaaggaaaacttttcgctcttttg

SEQ ID NO: 6937 - DNA, 433 bp, Homo sapiens
atgcgcagagcatgcccatccgtggcaggctcttcagctcccctccctgcttctggaaacctctgcctgctgccctggccctgcccccctgcgcatgcaccatccccagggctgacccagtgtggctgcattcactgggaggggcctgccctcactgggcctctcccactccgctgcctgttcttgcagctccttcctggaaagctggaggggactttctcctgcaagggaggaacgcaagtattatggacacacttgaccgtaaaggcacaggagcctcggaacaagggggcgcaataaagggaatggcccgtccccttccaaaaaaaaaaaaaaaaaacccctaaaaaaaaaaaaaaagaaaaacttttttaaaaaaaaaaaaaaaaaaataaaaaaaggggggcccccttaaaaaaacccccgccgggcc

SEQ ID NO: 6938 - DNA, 422 bp, Homo sapiens
  misc_feature (1)...(422): n = A,T,C or G
attttttgtcttattttctgctgaaatctgcctcactttaacttcctttcgtctttttcctgcattctatgctatgttcacacatatgacccatctcctataaattaagcctttcaaatatttgaagccagctatcaccatgctacattctcttcttataccaaggataaatatctttaatatggatggacttggtaaaacaatttcatgtctgtacttatctcaggatttctcatgtggatccactaaggcagaaaggaagctattgttttacatttgacagatgaagaaactgagtcagtacagtgaagtgctttttattttttattttaatttttaacatttccactacttacagctatatttgttttttatagagacaatctggagggacaaactatttactgtcacctggcatttcn

SEQ ID NO: 6939 - DNA, 409 bp, Homo sapiens
caaagactaactgtggaaaggactttgaacttttccttttagaaagttaaaagtcctttccacagttagtcttcgcttcttttggatttttctttttagagctaaattattcataccaatgaataagtgagtctgttctaagatataggggccattatctatttttgcttaatggactcatgtggcattgttcactatcatgcctttccatacttgtaatatttctgagtcacttattaatgtgaccaacagataaactgttcaagctaatacagcatttcctaacttcatagttgtcgcagatgtttgttctagtagcgattatttaataaacatacattgtactgaatcttactagcaactaactattttcaggtaatctcagtctgcttattcacttttttcattg

SEQ ID NO: 6940 - DNA, 423 bp, Homo sapiens
gcgcattcatctcacactgttgaactttttttttgattgagcaccttctaaacagtcattttgtagaatatgcaaaggaatatttgtgagcccattgatgcctctggggaaacaggaaatatcttcacataaaaacgagacagaatctttctcagaaacgtcttggggatgtgtgcattcatctcactgagttgaactttactttgattgagcagtttggaaacagacttttctagtatctgcaaatggatattttaagcactctgaggcctacggtgaaaaaggaaatatcttcaatataaatcagacagaagcattcatagaaacttctttgtgatgtgtgcattcatctcaccgactagaacctttcttttgattgagcagctttgaaacactcttttagcggaatctgcaagtgtttag

SEQ ID NO: 6941 - DNA, 478 bp, Homo sapiens
  misc_feature (1)...(478): n = A,T,C or G
cgcccccccaattaaanctggaaaccctctgaannttgacggccntcccgagnccacccacgcgtccgggaagtgtccctttatttataaaataacttttgccatatttcttatacatgtttcttgtaagaaattcagaaactacagacaaagagagtggaaattacccactgtcaggcctctgagcccaagctaagccatcatatcccctgtgccctgcacgtatacacccagatggcctgaagcaactgaagatccacaaaagaagtgaaaatagccagttcctgccttaactgatgacattccaccattgtgatttgttcctgccccaccctaactgatcaattgaccttgtgacaatacaccttccccacccttgagaaggtgctttgtaatattctccccacccaccccacgcccgcacccccgcacccttaagaaggtattttgtaatattctctccgccattgagaatggg

SEQ ID NO: 6942 - DNA, 433 bp, Homo sapiens
  misc_feature (1)...(433): n = A,T,C or G
tcctcctccccccgtgtgtgaaatcagtggagtggcagggtcccagccagtgagtgagaagcagtcggcagctgagctagacctcgtcctgcagcgacatcagaacctccaggaaaagctggcggaagagatgctaggactggcccggagcctcaagaccaataccctggccgcccagagtgtcatcaagaaggacaaccagaccctgtcacactcactgaaaatggcggaccagaacctggagaaactgaagacggagtcagagcgtctggagcagcacacgcagaagtcagtcaactggctgctctgggccatgctcattatcgtctgcttcatcttcattagcatgatcctcttcattcgaatcatgcctaaactcaaataaagacccccgcccaaanaaaaaannaaaaaaaaaagaaaaaaaaaaaaa

SEQ ID NO: 6943 - DNA, 497 bp, Homo sapiens
  misc_feature (1)...(497): n = A,T,C or G
gtggggcggttttcatttgatagcctttctannacttgacggccntcccgggncgacccacgcgtccgcccacgcgtccgggaacaggaggggcccatgagcctggggcctgtggggtctgcaggcccagtggagacctctaaggggttgccggggcaggagggcctggtggaaattgccatggactcaccagagcaagaggggctggtgggtcccatggagatcaccatggggtctctggagaaggcagggcctgtgagcccaggatgtgtgaagctggcagggcaggagggcctggtggagatggtgctattgatggagccaggggcgatgcgcttcctgcagctctaccatgaggaccttcttgcgggcctgggagacgtcgctctcttgccacttgaaggaccggatatgactggctttcgggtgagtgacccctcaggactcctcaccttcagccccctcctcctactggggactcaaagtacctttcctgg

SEQ ID NO: 6944 - DNA, 429 bp, Homo sapiens
acccggttccccggcccacagtgggggtgtgcaaacccgagagaactgggttgcaaattcgtgaagaatcagcatcatgtttggcagctgagtattggagccaggagcctgccatgaggttttgagaacagagtgctgttttagagctggcagcagcatctcagcccaagagaaggttatattcccagaggatgtcagtcccaaggaccagtagctgccatcagtttggattctgaaaactaactggcatcaacactgggtgtagaaacatgcttgccttatgtatcagaggacatgctcagcagatccaagagatatatttggcaactttttctagaaaaggcacattgggtatcattcattacattcttgagtttttttgggtttttttttttttttttaaaacagccttgttgatttgcccagctt

SEQ ID NO: 6945 - DNA, 421 bp, Homo sapiens
cccacgcgtccgggagaggcgggaaaaggaattgccacttttcagacttagcatttttaacatctggggaaactttattttattttttccactgtgtgaagttaattgggagtcagatttagtagcggggtgactggtatggtatataacctctctgtgcctcaactactcctctagaaaatggagacaataacagtacctgctgtgtatggctgttttgaaaataaatgaaataatccatgtacatcctcagaacagacctggtagctagatggcaaatgcttgaagagtgtaaggtataaatgtttagttcatattattaagtgccccacataattcaccataatggtctgatatctacagccttcaccaatctttaacctattttcttaagaataatgagtaaattttttaaagcctt

SEQ ID NO: 6946 - DNA, 429 bp, Homo sapiens
cattcttaaaaattgtgttaagtctatgtataatactactgtgagtaaaagtaatactttaataatgtggtacaaatgttaaagtttaatattgaataagaggaggattatcaaattcatatatgataaaagtgaatgttctaagtctctcaaactagcgttttatgtaataatatgtaatataaataaaactatggtaaatgtgacaagcatttaataggaaaatgctatggaggcctcataaatgacccataattaccaacgtagaatttttcagtacatttagggttgctggatttagcaaataaaaatagggattgcccagttggatttgaatttcagataaacaattagttttttaatattctacatggaatatttggaaaatacttatactaaaaacattggtgattgaaattcacatttaac

SEQ ID NO: 6947 - DNA, 421 bp, Homo sapiens
agaaatcacccttctaattgttacatttaggtaaaattttctccatcatttactgtgttggcttaagccagatggactgtccattccacaggtaacaatgattggtccagaatagggcaaatactacattcagaacaagaagatcaaaagaaagctctcctgtagcttctgaaaaagaaaacttttcactgtttggaatgcgtaggatgagtttaggaggttgggactgctacagctaattggttacatgaagagaggcagcttgatgatgaaaccgacactcagaggaaagggccctgagacatggatctcagtgacctcatttgagccttcgcagcaactaaagccagacctactcatgttctttttaggtctatcaagcaacaaatttcgttttagttcaagccattttgaagtaggg

SEQ ID NO: 6948 - DNA, 422 bp, Homo sapiens
  misc_feature (1)...(422): n = A,T,C or G
gggagaggaacgcgcagccagccttgggaagcccaggcccggcagccatggcggtggaaggaggaatgaaatgtgtgaagttcttgctctacgtcctcctgctggccttttgcgcctgtgcagtgggactgattgccgtgggtgtcggggcacagcttgtcctgagtcagaccataatccagggggctacccctggctctctgttgccagtggtcatcatcgcagtgggtgtcttcctcttcctggtggcttttgtgggctgctgcggggcctgcaaggagaactattgtcttatgatcacgtttgccatctttctgtctcttatcatgttggnggagggggccgcagccattgctggctatgtgtttagagataaggtgatgtcagagtttaataacaacttccggcagcagatggagact

SEQ ID NO: 6949 - DNA, 393 bp, Homo sapiens
  misc_feature (1)...(393): n = A,T,C or G
tttgttcatcacatttaaaattggaagagaacgcgcttgatggatagagcgccttcagtggactgtttcttattaactttactttttttaaatcaacttgctatagactttatatacattttgttaaatatagttcctagtgacatagaaacgatgcgtacttttcatttactaattacaaatgttgaggcctaattctgaaagtcctcatatttaaaggctagacaacgtaatgaaatttttaactatttgtatgtcattttgaaagtgtactgctttatggtaaaagagtttttcatttgttcattgttttcattatttgtgatcatgttggctttcaatacaggcataaaccttccactcttgaacaaagcagctgctttttaaaagcgn

SEQ ID NO: 6950 - DNA, 388 bp, Homo sapiens
cacgagcgctggctgagggaccgagccggagagccccggagcccccgtaacccgcgcggggagcgcccaggatgccgcgcggggactcggagcaggtgcgctactgcgcgcgcttctcctacctctgggtgaagttttcacttatcatctattccaccgtgttctggctgattggggccctggtcctgtctgtgggcatctatgcagaggttgagcggcagaaatataaaacccttgaaagtgccttcctggctccagccatcatcctcatcctcctgggcgtcgtcatgttcatggtctccttcattggtgtgctggcgtccctccgtgacaacctgtaccttctccaagcattcatgtacatccttgggatctgcctcatcatggg

SEQ ID NO: 6951 - DNA, 483 bp, Homo sapiens
  misc_feature (1)...(483): n = A,T,C or G
nggcgggtntntnnnaaactggattgcctccggtaccggcncgaacctgatgtccatccgcgcgtccggccatntgctttatctgaagattttcagctgatgaagaactaggaggctcatacactatcttacctgagtccaggacaagtgacttggagagtgtgctcttctgtggcaggatcaggtctgtctagggcaggatggcccaggatctcagcgagaaggacctgttgaagatggaggtggagcagctgaagaaagaagtgaaaaacacatgaattccgatttccaaagcgggaaaggaaatcaaggagtacgtggaggcccacgcaggaaacgatccttttctcaaaggcatccctgaggacaagaatcccttcaaggagaaaggtggctgtctgataagctgatggcatggagccctgccctgagtgtctgtccctcttcagccaagcccaagtctcctagacccccagggagcca

SEQ ID NO: 6952 - DNA, 422 bp, Homo sapiens
  misc_feature (1)...(422): n = A,T,C or G
ccactgcgcagaccacacttcgctcgtactcgcgcgcctcgcttcgcttttcctccgcaaccatgtctgacaaacccgatatggctgagatcgagaaattcgataagtcgaaactgaagaagacagagacgcaagagaaaaatccactgccttccaaagaaacgattgaacaggagaagcaagcaggcgaatcgtaatgaggcgtgcgccgccaatatgcactgtacattccacaagcattgccttcttattttacttcttttagctgtttaactttgtaagatgcaaagaggttggatcaagtttaaatgactgtgctgcccctttcacatcaaagaactactgacaacgaaggccgcgcctgcctttcccatctgtctatctatctggctggcagggaaggaaagaacttgcatgttggn

SEQ ID NO: 6953 - DNA, 421 bp, Homo sapiens
agttcgagaccagcctcgccaacatggtgaaaccccatttctactaaaaatacaaataattagccaagtgtggtggcatatgcctgtaatcccaactactcaaaaggccgaggcaggagaattacttgaacgcaggagaatcactgcagaccaggaggcataggttgcagagagccgagattgcaccactgcactccagcctgggtgacagagcaagactccatctcagtaaataaataaataaataaaaagcgctgcagtagctgtggcctcaccctgaagtcagcgggcccaggcctacctcactctctcccttggcagagaagcagacgtccatagctcctctccctcacaagcgctcccagcctgccctccagctgctgctctcccctcccagtctctactcactgggatgaggtta

SEQ ID NO: 6954 - DNA, 435 bp, Homo sapiens
cttctgcctcagcctcccaagtagctgggactacaggcgccgtcatcacgcctggctaattttttgtttttttttttttaaaaaaagacagggtttaactgggttagccaggggggtctcaatttcctgacctggggatccacccacctgggcctccaaaggggctggaattatgggcgtaagccactgccccgggcctgtaactaaaaatttttatactagaaaataaacttttggttcacattaataaaagctctatattggttggactaaaaaataacccaaattttctggaccagccaaaaaatgataaattttccccaaaaataaaacaaaaaaatccttcaaaactgataggtatgggtccaacacctactaatagcattaaggcaggggggcttttatagtcccgatatgtgtaataacattaaacag

SEQ ID NO: 6955 - DNA, 410 bp, Homo sapiens
  misc_feature (1)...(410): n = A,T,C or G
cccacgcgtccggggcaacgtgctggtctgtgtgctggcccatcactttggcaaagaattcgaccccaccagggcaggctgcctatcanaaagtggtggctggtgtggctaatgccctggcccacaagtatcactaagctcgctttcttgctgtccaatttctattaaaggttcctttgttccctaagtccaactactaaactgggggatattatgaagggccttgagcatctggattctgcctaataaaaaacatttattttcattgcaaaaaaaaaaaaaaggggggccctttttaaagaatccttgggggggccaaattttacgggggtatggaaggatatatttttttccttatggggggccgttttaaaacctcccggggaattttgggaaagaacctttatttn

SEQ ID NO: 6956 - DNA, 399 bp, Homo sapiens
aaaatatacttgtaaattaggctgaaaaataagtagcttactctggtagtaagtaaatacaaaattaaaaataagtaccaactgaaaattattaaatggtattattatctctcttcagccataacaaagataataattagtttgtgtgaggccagagtcattgaggatcctagaaaatagcttgggtagtagataatctgacatttgccctcttatcatgggattcattagctcttctctgaagagcatttagaacacattgatcctggatacatatcttgtttctctgaggacatacttttcctttaaatccacctgctttttttcctagagagacatggaaatcatttctggctcttgttccactcctgacttttttcccccactgaaaacagagag

SEQ ID NO: 6957 - DNA, 389 bp, Homo sapiens
tgaccattcactttcgaagagacatctgtttccaaatcactggctttttggcttggtataactccttcccaagcgatgccaccttgaggttggtcaatttaaattcatcctatggtctatgtgccgggcgtgtagaaatttaccatggtggcacctgggggacagtttgtgatgactcctggaccattcaggaagctgaggtggtctgcagacagctagggtgtggacgtgcagtttcagcccttggaaatgcatattttggctctggctctggccccatcaccctggacgatgtagagtgctcagggacggaatccactctctggcagtgccggaaccgaggctggttctcccacaactgtaatcatcgtgaagatgctggtgtcatc

SEQ ID NO: 6958 - DNA, 404 bp, Homo sapiens
cccacgcgtccgcccacgcgtccggaattttcttatacttcaaggcatcatggaaacacttttttcctgtgtggatattgtggaatttaaacgttcaaataaataaatggcataactaagtgttccaaatttttttacaatgtctttgaccctattcaaacactttaggtatttactgaccgtctgatgtgtaagatgtggaataaaactggaatcaattaattatttcactgtgttatcagcgcaagatcaaccatctgggtttcttaaagacacccgaaggattgaattttgtttcagtattgataatggcatagtctctatgtgctacatggaattacatcatttatccctccagtgccctatatgttgataagtatgtcagcttgacttactatacatat

SEQ ID NO: 6959 - DNA, 407 bp, Homo sapiens
tcactgggagaagaacctctcataccctcggtgctccagtccccagctcactcagccacacacaccatgtgtgaagaggagaccaccgcgctcgtgtgtgacaatggctctggcctgtgcaaggcaggcttcgcaggagatgatgccccccgggctgtcttcccctccattgtgggccgccctcgccaccagggtgtgatggtgggaatgggccagaaagacagctatgtgggggatgaggctcagagcaagcgagggatcctaactctcaaataccccattgaacacggcatcatcaccaactgggatgacatggagaagccccacgaccatttctccaacctaggctgccaacatctctccctggactattgcaatggcttcctggctgatttcttggtctcttg

SEQ ID NO: 6960 - DNA, 390 bp, Homo sapiens
gcgatgagctacttgaagaggctatgtggtaccttcctgggtgggcccaagccacccgagagagttatgtttaccgaggacctgaagctgcctgcaagcttcgatgcacgggaacaatggccacagtgtcccaccatcaaagagatcagagaccagggctcctgtggctcctgctgggccttcggggctgtggaagccatctctgaccggatctgcatccacaccaatgcgcacgtcagcgtggaggtgtcggcggaggacctgctcacatgctgtggcagcatgtgtggggacggctgtaatggtggctatcctgctgaagcttggaacttctggacaagaaaaggcctggtttctggtggcctctatgaatcccatgtagggtgcagg

SEQ ID NO: 6961 - DNA, 461 bp, Homo sapiens
  misc_feature (1)...(461): n = A,T,C or G
cttaactacggtttcaacttcggaanngtgatcagcantccgaaancgcaccacgcgtccggattgttctggactgaaaataaagaatttaaactaggctagagatgcctttaagttacatttcagatcctgttcacagcacgctacatatctaaagcccttgagatcctgattgttctcacagttgttggtggaatccatagttttataactcacctctttttatggtggcattgttagcccttctgtgtctctccctaggatttttaattcaggactaaaatcacagaagtagcaaggaaaggctcaagactagagatagctttcaatctcttcagaaatagcctggtgcagagagaaaactaggtttgttttcaggccagtctgatcttcatcctattctgtctataactagttgcaggtccttgctcggatggcataattttttgatgcctccattg

SEQ ID NO: 6962 - DNA, 387 bp, Homo sapiens
aatcaataaaactcttcatcactttcagggtaatttagtaacaagaaactttcttctgtccttggctggggttgataaaagtcgcacgaaaccatcttagacataacacaagttgtgccctattgcccctgagataaatcagcctatgatccaatttttatgtgacaggaaagtgaaaagaaaacagagaaaagtgaaaatgatctataggaaaacactttgcaagagcccatctgtttgaggacatgtttttttgagctgtgatctggctcatatgattggggaataaagcttgtcatgaagtgcagtctcgttgagcattgttcaggggaggatgtcgctaaatgcttttggtgttatgtcacaagatggaatctaatatctctg

SEQ ID NO: 6963 - DNA, 385 bp, Homo sapiens
aaatctttctccacccctacttaagcactgttgggcccctcttctcctgcttttccttagctattgaaaaaaggccatggtctttttttaatattaaaatattttccttagctattaaaatttaatattaaatttaaattaatttaatattaaatatttaggtttaaattaaaattttaatttaatattaaaataaaaatattaaaatttaatttaatattgaagcaattaaaattaaaattaaattagttaatattgaattaaattaaattaaattaatattaaaattaaaaatattaaaatttaatttaatattaaattaattaaattaagttaaattaatattaaattaaattaagttaaattgatattgaattaaattaac

SEQ ID NO: 6964 - DNA, 484 bp, Homo sapiens
  misc_feature (1)...(484): n = A,T,C or G
gcgcgctacgatncccacgctagngnggctnagcaccgccnncgaancccgggncgacccacgcgtccggaagcggaccttccgcaagttcacctaccgcggcgcggatctcgaccagctgctggacatgtcctacgagcagctgatgcaactgtacagtgcgcgccagcggcggcggctgaaccggggcctgcggcggaagcagcactccctgctgaagcgcctgcgcaaggccaagaaggaggcgccgcccatggagaagccggaagtggtgaagacgcacctgcgggacatgatcatcctacccgagatggtgggcagcatggtgggcgtctacaacggcaagaccttcaaccaggtggagatcaagcccgagatgatcggccactacctgggcgagttctccatcacctacaaacccgtaaagcatggccggcccggcatcggggccacccactcctgccgcttatccatctcaagaaag

SEQ ID NO: 6965 - DNA, 421 bp, Homo sapiens
cccacgcgtccgaaacgtgggttcaatttgccattggtttctgaaagtattcacatcatttgggataccagatagctcaatactctctgagtacattgtgcccttgatttttatctccaagtggcagtttttaaaattggccttttacctggatataaattaattgtgcctgccaccaccatccaacagacctggtgctctaatgccaagttatacacgggacagttgctggcatgtcttcattggctatataaaatgtggccaagaagataggctctcagtaagaagtctgatggtgagcagtaactgtccctgctttctggtataaagctctcaaatgtgaccatgtgaatctgggtgggataatggactcagctctgtctgctcaatgccattgtgcagagaagcaccctaatgcata

SEQ ID NO: 6966 - DNA, 388 bp, Homo sapiens
cccacgcgtccggaaggaggcagtcaataagatgtccctgcacaacctcgccacggtctttggccccacgctgctccggccctccgagaaggagagcaagctccctgccaaccccagccagcctatcaccatgactgacagctggtccttggaggtcatgtcccaggtccaggtgctgctgtacttcctgcagctggaggccatccctgccccggacagcaagagacagagcatcctgttctccaccgaagtctaaaggtcccagtccatctcctggaggcagacagatggcctggaaacctctggctaatcgggccatccgtagagcgggaaccttcctgaggtgtccttgggccacccccaagtgttgggccatctgccaagagag

SEQ ID NO: 6967 - DNA, 413 bp, Homo sapiens
acagatgcaggaaaagtctaaggagatctacatgacctttctgtccagcaaggcctcattacacgggagcgtggaggggcaatctcggctcaaagagaagatcctggaagaaccgcaccctctgatgttacagaaactccaggaccagatctttaatctcaggaagtacgacagctacagccgcttcttaaagtctgacttgttgttaaaacacaagcgaaccgaggaagaggaagaagatttgcctgatgctcaaactgcagctaaaagagcttgcagaatttataacacatgagcccccacaaagccgggactggcagctttaagaagcaaaggaatttcctcttatgaccgtgccgggttatcattgctttgttatttgtaaggactgaaatgtacaaaacccttcaatg

SEQ ID NO: 6968 - DNA, 420 bp, Homo sapiens
agggtctgggtcaggccccaccattgaggaggtagattaggggcctttccaagattgctgtttttgttttggagcttcaagactttgcatttcctagtatttctgtttgtcagttctcaatttcctgtgtttgcaatgttgaaattttttggtgaagtactgaacttgctttttttccggtttctacatgcagagatgaatttatactgccatcttacgactatttcttctttttaatacacttaactcaggccattttttaagttggttacttcaaagtaaataaactttaaaattcaaaaaaaaaaaaaaaaggggcgcccgttttaaagaacccttggggggcccaaagtttacccgtgcttgcaaggtaatatttttttccttaaagggagccgatttataccctacttgggaatt

SEQ ID NO: 6969 - DNA, 461 bp, Homo sapiens
  misc_feature (1)...(461): n = A,T,C or G
ctacactctggaatgacggtcgaaactttgacagccntcccgggncgacccacgcgtccgcgaaagcggactgaaagagggaggcagggagccggatagccggaaccggagtcgcagcggcggatacccctgtgcggtgcggagggggcggcggccccgactctgacccgcgccgggggtgggccatggcggagatcatcgacctggaccggcagatcgagcagctgcgtcgctgcgagctcatcaaggagagcgaagtcaaggccctgtgcgctaaggccagagagatcttggtagaggagagcaacgtgcagagggtggactcgccagtcacagtgtgcggcgacatccatggacaattctatgacctcaaagagctgttcagagtaagtggcgacgtccctgagaccaactacctcttcatgggggactttgaggaccgtggcttctatagcgtcgaa

SEQ ID NO: 6970 - DNA, 389 bp, Homo sapiens
cggacgcgtgggcggacgcgtgggaactgaaccagaggttcacaaaacaagtgtagtaagtttgtttctgcgtcacatgatcttggcctacagtaagctttctttcagccaagtgtttaaactgtacactgcccttcagcagtacttccagaatggtgagaaaaagacagtggaggatgctgatatggaactgaccagtagagatgagggtgaaagaaaaatggaaaaagaagaacttgatgtatctgtaagagaagaggaggtatcttgcagtgggcctctgtcccaaaaacaagcagaattttttctttctcaacaggcttctttgctaaagaatgatgagactaaggccctcactccagcttccttgcagaaggaattaaacaatg

SEQ ID NO: 6971 - DNA, 497 bp, Homo sapiens
  misc_feature (1)...(497): n = A,T,C or G
aggaagtggcccnaggggggttcccttagatagccatcactgataggcnctcaanncccgcgncgacccacgcgtccggcaggtggaaccaggggacatgtcctcctcagagagttgtttctgccagcagtgcatgaaaagttgtgttttatcatgccctgtcgccagtaggggttctaagttttaaatttgtatgctatttttaccagtaagaaatacagcaaacaatgcttgacacatagtaggcatttgatgaatatttcttgaatgaatgaatacagtatgatctcatcgttgtttattaggtaaatatttactgaccaaactatgtctttgaaagcactttgagaataacagtctcgctttcacctctgtcggggtcttacttcagaaacctcctttggacttaaaattctccttttttttcttccttttcctagcttaggcctgggggagcccatccaggaacatgcagtcccagcagaccaggctcctga

SEQ ID NO: 6972 - DNA, 380 bp, Homo sapiens
tcttcctacctatctccagatacatgtcaaaaaaagaaaggtgtttgagcttccgttttgtttctgctcagtaacatacccaagcgagcttggtccacgtgacccattgagctgcgtatgcatttttgtttatttcaataaaatatattggtattatttaggcttcgtactatccatacataccacactatcttctgtatcacgtagtctaagacaaatatacctgacttgttctaacctcccggaggctgctgaagcgcggggagccgttcttagtgaaacataccggactctttcgtaaaattgccagccgaccaacgtgctacctttttctgtggaacgatgtactaggtgtgaccgggaacattagcgaggaccct

SEQ ID NO: 6973 - DNA, 456 bp, Homo sapiens
  misc_feature (1)...(456): n = A,T,C or G
tcccttggttacactttgaatntttcagacctctcgaancncacccacgcgtccgctgagtatctaggattacaggcacgcacccccacgcccggctaatttttgtatttttagtagagatggggcttcaccatgttgggcaggctggtcttaaactcctgacctcgtgatctgcccactttggcctcccaaagtgctgggattacaggcatgagccaccgcacccagccaagtaatcctatattataagagtctaagggtctataggacaaaaagtctgtagggctttacattgtcaagaacaatgagattgtaagtatttttggatgatagtaaatacctcttcctgactcttatagtaaactttggttagcaatgtaatgggtaatgtacagtgctagactttgaagaaatgtaagagtgtggaaatatttctagactcatcaactctacctt

SEQ ID NO: 6974 - DNA, 388 bp, Homo sapiens
aaaacttcttttgtcaactttacagatatctgtaaactattacatcgtcagcccaaacatctccttgcatttttgttggctgaattgggtacaagtggttctatagatggtaataaccaacttgtaatcaaaggaagattccaacagaaacagatagaaaatgtcttgagaagatatatcaaggaatatgtcacttgtcacacatgccgatcaccggacacaatcctgcagaaggacacacgactctatttcctacagtgcgaaacttgtcattctagatgttctgttgccagtatcaaaaccggcttccaggctgtcacgggcaagcgagcacagctccgtgccaaagctaactaatttgctaatcactgattttgcaaagcttgtt

SEQ ID NO: 6975 - DNA, 378 bp, Homo sapiens
agctctaggagggctggcaacttaaaggtggggagcagagaattctcttatccaacatcaacatcttggtcagatttgaactcttcaatctcttgcactcaaagcttgttaagatagttaagcgtgcataagttaacttccaatttacatactctgcttagaatttgggggaaaatttagaaatataattgacaggattattggaaatttgttataatgaatgaaacattttgtcatataagattcatatttacttcttatacatttgataaagtaaggcatggttgtggttaatctggtttatttttgttccacaagttaaataaatcataaaacttgaaaaaaaaatgaaaaaaaaatataatgaaaggaacggtt

SEQ ID NO: 6976 - DNA, 388 bp, Homo sapiens
  misc_feature (1)...(388): n = A,T,C or G
cactgtactgtagtttttgaaagtatggtacgctacaaaaagtttttcattatatctcttattatgntttctcatttccaaagtccatttataaatgcttcccgtggatatctcatagagtcatatgtttaatgaaggttttaggatcacgttttattaaaacttaaatatgggagtgtgatccttccagaactgttttgggaagctcagtcgtggccgtgggtgactgggatcttggaggccctctcctttttaaaaacacacaaacagtcctcagaacactgctggggccaggaaactacagacagctactgtctggcttttcttcttttttatttgtggacaggtcttaaatgaatttttttactgtgggtttttttatatttan

SEQ ID NO: 6977 - DNA, 384 bp, Homo sapiens
agcagggtctggtcataatccagcgtgaagatgaggtgaggaaggaaggggttgctgtccagtgttggcctggtcgctttgattcttcctgcacagctcagcccaccccatctgtactggaagggaccctggagccctgggaccaccccctttcaagtcccaaacactgagtcctctgtcatgtgtccttgtccctaggctacaatgctacacttggctcaggctgatcaccatgctagtcacaggagggagagagaggcagtgtacttgcccccatctcctggagggaggtgcgttggaaattctaggcccttcagcagagacccatttgtgcccagaccacaatatttcttcttcctcagggactacatgccacagacctgg

SEQ ID NO: 6978 - DNA, 546 bp, Homo sapiens
  misc_feature (1)...(546): n = A,T,C or G
tccgtggcgttatcgccttcgaatcgctcggtgacgatcttgaacagttcggttagctcattataatgtcgaatgaagtgacaacacaaaaagaaacacaannntttagatagccctgcgtttgatgnccctgacagccccgcnccanaacacccgggtggacggacgaactggactgctttttaccctggcgccctgcctgattatttcttgtgagattacttaattacttggagtgaggacnancctattgaagctgctgccaggcaacaccacttaacagtaacttaaaggaattattttctttagaggatcctcttcctataggaagggatagtggaaaactgtccttatatcttcagatccctagcagaaatgactgtttatttcaaactatgccttacttggatatgatgtaggcaccttaactatctttcaattccatacttcccccgcccccattttaaaggcttattgggggattttgtagcagcttcaagagaccaaaagactaaaatctttcaacgtcaatgccaaaagccaagg

SEQ ID NO: 6979 - DNA, 390 bp, Homo sapiens
cgcatttactaaacgcagacgaaaatggaaagattaattgggagtggtaggatgaaacaatttggagaagatagaagtttgaagtggaaaactggaagacagaagtacgggaaggcgaagaaaagaatagagaagatagggaaattagaagataaaaacatacttttagaagaaaaaagataaatttaaacctgaaaagtaggaagcagaagaaaaaagacaagctaggaaacaaaaagctaagggcaaaatgtacaaacttagaagaaaactggaagacagaagtacgggaaggcgaagaaaagaatagagaagatagggaaattagaagataaaaacatacttttagaagaaaaaagataaatttaaacctgaaaagtaggaagcaga

SEQ ID NO: 6980 - DNA, 376 bp, Homo sapiens
cttttaatgtatttgtttgcaattttggggtaagacttttttatgagtactttttctttgaagttttagcggtcaatttgcctttttaatgaacatgtgaagttatactgtggctatgcaacagctctcacctacgcgagtcttactttgagttagtgccataacagaccactgtatgtttacttctcaccatttgagttgcccatcttgtttcacactagtcacattcttgttttaagtgcctttagttttaacagttcactttttacagtgctatttactgaagttatttattaaatatgcctaaaatacttaaaaaaaaaaaaaaaaaaaaaaagggggggccgttttaaaggatccctcggggggcccaact

SEQ ID NO: 6981 - DNA, 373 bp, Homo sapiens
  misc_feature (1)...(373): n = A,T,C or G
aactgctaactcatgcccccatgtctaacaacatggctaanaaaaaaaaaaaaaaaaaaaaaaaaaaaaggggggggcccttttaaaaaaacccttggggggcccaaatttaaccggggcgggaaaaaaaaaattttttcccttatagggagggaaataaaaaccccccggggattttttgaaaaaaaccctttttttggggggggaaaaaattggaaaaacccccccaaaaaaattaaaccctttagggaaaaaaaaaaattttaaagggaaaagggggaaaaaaaaccccaatttcctgggggtaaaaaaatggggnnnnnnnnnnannnaaaccccccccnnggngnggagaaggggaacaccccccccc

SEQ ID NO: 6982 - DNA, 482 bp, Homo sapiens
  misc_feature (1)...(482): n = A,T,C or G
cgcggctccccctaggcgccagctangagagccctccacaacccgcgncgacccacgcgtncgagagtttgaattctcacagttgcccctcaaagtggagttcctggagtgcagtgccaagggtggaagaggggacgtggcctctgctgacatccaggacttggagaaatggctggctaaaattgcctgagaggcagctctaaagcacaagacctggatgtgtgacacacagtttcggaaaaaggtctgtggtagtctggagttgatgaggaaggggtacaagatgtggttagaaacatttctttgttctggaaacaaagtactgttgaaaccactaaaaaaaaaaaaaaaaacttgggggggccgttttaaaacattctctggggggcccaatgtaacgcggggagcgaaatctaatcattttgcccttaagggggagcgatttaaaacctgcctggaggacttggaaagggacttttctn

SEQ ID NO: 6983 - DNA, 408 bp, Homo sapiens
  misc_feature (1)...(408): n = A,T,C or G
cccacgcgtccggggttttcctggggtcctggcccacaaaaggcacccagagtagggactaagggcccagggtttggcatatgctctaactctgtgcactttcagaccctcttcttgtaaagtgaggtcatttacatagctctccataaattatgtgttagcctctgttcttttttttctactgttctccttccatgccaatgacaccacttacatttcccctagaactgcagattttttttaaatactgggtttcctaaagcagttcttattttatatattctaatttatgtacatgaatgtgtcacatagacctgtcattagagatggtttagaaaataagcttacactatacgtgcctcaatccacttcaaaactacatattgggcccaaagaggaaaagggacn

SEQ ID NO: 6984 - DNA, 432 bp, Homo sapiens
taaccatcaccactaaggtccattccttactagaaggcatctcaaattattttaccaagtggaataagcacatgatggacaccagagactgccaggtttcctttacttttggaccctgtgattatcaccaggaagtttctcttagggtccacctgatggaatacattacaaaacaaggtttcacgatccgcaacacccgggtgcatcacatgagtgagcgggccaatgaaaacacagtggagcacaactggactttctgtaggctagcccggaagacagacgactgatctccgaccctgccacaggttcctggaaagactctccaggaaatggaagatactgatttttttttttaaatcacagggtgagatattttttttcttttaaatagtctgatttatttgaaggcagggaggaccacaaggaagtttt

SEQ ID NO: 6985 - DNA, 407 bp, Homo sapiens
ttttatgatacattacagccaaattatttgttggtttatggacatactgccctttcattttttttcttttgcagtgtttaggtgagctcaaattaggaaatgcatttaaccatgtaaaagatgagtgctaaagtaagctttttagggccctttgccaataggtagtcattcaatctggtattgatcttttcacaaataacagaactgagaaacttttatatataactgatgatcacataaaacagatttgcataaaattaccatgattgctttatgtttatatttaacttgtatttttgtacaaacaagattgtgtaagatatatttgaagtttcagtgatttaacagtctttccaacttttcatgatttttatgagcacagactttcaagaaaatacttgaaaata

SEQ ID NO: 6986 - DNA, 393 bp, Homo sapiens
  misc_feature (1)...(393): n = A,T,C or G
tggtgttgggcgcacaggaacctatatcggaattgatgccatgctagaaggcctggaagccgagaacaaagtggatgtttatggttatgttgtcaagctaaggcgacagagatgcctgatggttcaagtagaggtatgttctaacctttagtgattattctcactttggttttttggacttaaatcttttccaagtgataataatgatattttttaaaaatccaaattcttcacaacctcaaacagtagatgatttcctgaaaactaaaacgtggtaatcaccagaaatacttagaagcatttttcattagtgcctaaaagtactgtggaagaaagatgaccacaaaatatataatttttaaaataatgaactactgttaacatatatcagan

SEQ ID NO: 6987 - DNA, 408 bp, Homo sapiens
cccacgcgtccggtgctgctctgcccagctcctgttctgtttagaaacatgtttattgccttaagaaggagccaccgcgtccggcctaacatggtaaattttatgctatgtgtattttaccacacacacaaaaacacgtgtcgaggtgttttcccaagacagtgtctcgcagacgtacgttttacactatgatttttacttttcaagaactgttttaaagcagtatttgccttataataggtaggtgaatgttctagctgcaagagaaaccggagtggtctggtcactcaaccaaaacctgctgaagcagacccctggggcacactgggaacttctaccatcccaggtggaaaggttagtctgatgtgcgtaagcaaaccttgcacttctgtgcgcaggacggtatcc

SEQ ID NO: 6988 - DNA, 406 bp, Homo sapiens
caagcagctggaggctctgtgtgtgggagcagcgactggacccagagccatgtggctgtgccctctggccctcaacctcatcttgatggcagcctctggtgctgtgtgcgaagtgaaggacgtttgtgttggaagccctggtatccccggcactcctggatcccacggcctgccaggcagggacgggagagatggtgtcaaaggagaccctggccctccaggccccatgggtccacctggagaaatgccatgtcctcctggaaatgatgggctgcctggagcccctggtatccctggagagtgtggagagaagggggagcctggcgagaggggccctccagggcttccagctcatctagatgaggagctccaagccacactccacgactttagacatcaaatcctg

SEQ ID NO: 6989 - DNA, 420 bp, Homo sapiens
  misc_feature (1)...(420): n = A,T,C or G
ctctgcggggcagggccttcctggttttgtacactgctgtacccagatgcctacaaccatccctgccacatacaggtgctcaataaacacttgtagagcanaaaaaaaaaaaaaaaaaaaaaaaaaaaaaaaaaaaaaaaaagggggggggcccttaaaaaaaaacttcggggggggcaaaaataaacgggggaaaaaaaaaaaaaatttttttttaaaaagggggggaaaaaaaaaaaccggggggattttggaaaaaaaaaatttttttgggggggggaaaaaaggggaaaaacccccccaaaaaaaaaaagcccttaaggaaaaaaaaaaatttttaagggggaaggggggaaaaaaacccctaaattgggggggaaaaaaaaaatggganannannnaaaaaaccactataagggn

SEQ ID NO: 6990 - DNA, 405 bp, Homo sapiens
gggggcagtgctggctgcctctgtcctgtgtgtgaccctaccctcgaagggtcctgtcctgtcagtcccgagggagccacaaccaaagctgcggagagaaggtggggaagggtgcggaatggccgtggggcacagcgtggcagactgttcagtctctgctgggtctttcctagggacctggaaggccagtgttgcttccccctcactccctttcactgtaggcagcctctctgcttccccaatgccttatgcctgggcacactgccacagaatatgcaatatgtgtgggtgaccatgccctcacgaccacacccccaccccgggcagcccccggactccaaaggtcgtggctgccacagcctccctcagctcttcctgcctatctgtcttcacactgagaatggc

SEQ ID NO: 6991 - DNA, 403 bp, Homo sapiens
ggtgaggtagaggggagagtccgtatttgggagaaaaaggccccagcccttgtcgtctctgggtaggaataagagaataggactatcctcagctccctgtgactccagatccctaagcaggccttcctggggcctggcctgaaagttaatcccaggggcagacttagcatttagctaactgagatttagcattagccccttttttactcccacttcaaaccttgggacctccccaccgaccccgggctggctacccagttctaattttgttcatacttactgaacagagtggacccataccatccttggttttgcttttggcacttctctgcagctgggaactaagaattccttactcctgggtggggagtgggaaagaacctaagctttggaatctgtcagg

SEQ ID NO: 6992 - DNA, 474 bp, Homo sapiens
  misc_feature (1)...(474): n = A,T,C or G
ctccgatgatggcgtttcgaaaactgatggcattgcgggacccacccacgcgtccgagttaaaggcgaaacccatcaaaactgctagngggtttgctgtcgtggctgtgatgtgcaaaccccggagatgtccacacatgagttggacaggaaatatatgtgtatactgccctggtggacctgattctgattttgagtattccacccagtcttacactggctatgagccaacctccatgagagctatccgtgccaaatatgaccctttcctacagacaagacaccgaatagaacagttaaaacaacttggtcatagtgtggataaagtggagtttattgtgatgggtggaacgtttatggcccttccagaagaatacagagattattttattcgaaatttacatgatgccttatcaggacatacttccaacaatatttacgaggcagtcaagtattctgagagaagcctcacaag

SEQ ID NO: 6993 - DNA, 476 bp, Homo sapiens
  misc_feature (1)...(476): n = A,T,C or G
ctcccgataggacccctgtggaaactgattgcactgcgggacccacccaagcgtccgaaaataatacattaactgatactgctttagaattcatgaactgcatctcatgagaatatgtanagatgacgtgggcaggtaaagtaaaacttcaggttgaatatcctatgataatttaaaaatgacaaaatagtgtggtgaataatagagcttgagcactttaaggcaccgtagggaccccttcaatgtaatgatgacagtgctgaggtgcagagaagttaggtaatcagcccaagccactactctaaggacagaccctatctacttttcctaatttgtcagaagactgcctatgatactactaataaaaagtcctatgaaattggtattgtcattattttacaaataaaataatcttcaatttttgtttcctctatgcatgggttacttagtattttggaatttgaatttcaagcata

SEQ ID NO: 6994 - DNA, 404 bp, Homo sapiens
aaaggcagcggtggccacagaggcggcggagagatggccttcagcagttcccaggctccctacctgagtccagctgtccccttttctgggactattcaaggaggtctccaggacggacttcagatcactgtcaatgggaccgttctcagctccagtggaaccagatggagggtacgtggtgtgcaacacgaggcagaacggaagctgggggcccgaggagaggaagacacacatgcctttccagaaggggatgccctttgacctctgcttcctggtgcagagctcagatttcaaggtgatggtgaacgggatcctcttcgtgcagtacttccaccgcgtgcccttccaccgtgtggacaccatctccgtcaatggctctgtgcagctgtcctacatcagcttcc

SEQ ID NO: 6995 - DNA, 486 bp, Homo sapiens
  misc_feature (1)...(486): n = A,T,C or G
gtccccattgaacnccnctcnnnnanatgatttgcactgtcagggnccanccacagcttccgggcagacccacgcgtccgctactgctagaatgaagactattctcagcaatcagactgtcgacattccagaacatgtcgacattactgtgaagggactcacagttatcgggaaaggccccagaggaaccctgcggagggacttcaatcacatcaatgtagaactcagctcttcttggaaagaaaaaaaagaggctccgggttgacaaatggtggggtaacagaaaggaactggctaccgttcggactatttgtagtcatgtacagaacatgatcaagggtgttacactgggcttccgttacaagatgaggnctgtgtatgctcacttccccatcaacgttgttatccaggagaatgggtctcttgttgaaatccgaaatttcttgggtgaaaaatatatccgcagggttcggatgagaccacgtg

SEQ ID NO: 6996 - DNA, 417 bp, Homo sapiens
ggagaaggtgtctgagatcccactgacaagagacaatgtgtcagagatcctgcgctgcttccttatggcatatggagtagagccagccctctgtgaccgcctgcgcacccagccttttcaggcccagccaccccagcagaaggctgctgtcctggccttccttgtgcatgagctcaatggctccaccctcatcatcaatgagattgacaagactctggagagtatgtccagctacaggaaaaacaagtggattgttgaaggccggctccggaggctgaaaactgttctggccaagcgaactgggcggtctgaagtagagatggaagggccagaggaatgcctgggacggaggcgcagttctcggatcatggaggagaccagtggcatggaagaagaggaagatgaggagtctatatc

SEQ ID NO: 6997 - DNA, 432 bp, Homo sapiens
cggacgcgtggggagcgaacgaccaagagggtgttcgactgctagagccgagcgaagcgatgcctaaatcaaaggaacttgtttcttcaagctcttctggcagtgattctgacagtgaggttgacaaaaagttaaagaggaaaaagcaagttgctccagaaaaacctgtaaagaaacaaaagacaggtgagacttcgagagccctgtcatcttctaaacagagcagcagcagcagagatgataacatgtttcagattgggaaaatgaggtacgttagtgttcgcgattttaaaggcaaagtgctaattgatattagagaatattggatggatcctgaaggtgaaatgaaaccaggaagaaaaggtatttctttaaatccagaacaatggagccagctgaaggaacagatttctgacattgatgatgcagtaa

SEQ ID NO: 6998 - DNA, 505 bp, Homo sapiens
  misc_feature (1)...(505): n = A,T,C or G
agagagccgcnncgcnctgcccatgatcgccntcggatagagcgccgtagaggccgggccgacccacgcgtgcggaacggagtctccttcacttcgccctccagctgctggagctgcagcccgaccgcgagcgtgccaagcggcttcagcagctagcggagcggtggcggcggcccccctcaggacaccaccagattcccctcttcccgcggcctcgccatggcgacccacggacagacttgcgcgcgtccaaagtgtattcctccatcatatgctgaccttggcaaagctgccagagatattttcaacaaaggatttggttttgggttggtgaaactggatgtgaaaacaaagtcttgcagtggcgtggaattttcaacgtccggttcatctaatacagacactggtaaagttactgggaccttggagaccaaatacaagtggtgtgagtatggtctgactttcacagaaaagtggaacactgataacactctgggaacagaan

SEQ ID NO: 6999 - DNA, 499 bp, Homo sapiens
  misc_feature (1)...(499): n = A,T,C or G
cggcccccccaggctccaatagacnccntcnatagatcgcctgcggaccgcccggaatcccggtcgacccacgcgtccgcccacgcgtccggaaccccacctacaaatacctggagcagatgcagatttatgtggcagggagcgcggcagccctggcggagggatgcaggtgggccggaagatcccacgattccgatcgactgccaagcagcagccgctgccaggggctgcgtctgacatcctgacctcctggactgtaggactatataaagtactactgtagaactgcaatttccattcttttaaatgggtgaaaaatggtaatataacaatatatgatatataaaccttaaatgaaaaaaatgatctattgcagatatttgatgtagttttcttttttaaattaatcagaaaccccacttccattgtattgtctgacacatgctctcaatatataataaatgggaaatgtcgattttcaataatagacttatatgcn

SEQ ID NO: 7000 - DNA, 491 bp, Homo sapiens
  misc_feature (1)...(491): n = A,T,C or G
gtttgacctgatnaccntccgatnnccaactagatgtcgtctgaaccgcnccggaagtnacgggtcgacaccacgcgtgcgagactagatacaagcagattttctctgtggaactctaaagactcagtgacaggaggtaacagaggaagggatgaggggcagatggaaaatcattactgaatgatatcccttcaatgcaatcaggcaactattccttctccccctcaacaagagactaaaccacttaagccagagaaattctggattcagggacattgggcataaagaaggacagagtgaggcatggaatgaaaaatggggaattatcccttctctaatttagctctaaaatgcttacttcattttagatgaagatggttttacacccatacccttcagtcaggagactagagttttctctggaaaaaattaacagttccagcaaagacataaagatactaactgctccacagtgaaggccacaagtcagt

SEQ ID NO: 7001 - DNA, 430 bp, Homo sapiens
  misc_feature (1)...(430): n = A,T,C or G
tgcttggtttgcacatgttgttattgccttaattctaattttattttgttctctacatacaatcaatgtaaagccatatcacaatgatacagtaatattgcaatgtttgtaaaccttcattcttactagtttcattctaatcaagatgtcaaattgaataaaaatcacagcaatctctgattctgtgtaataatattgaataattttttagaaggttactgaaagctctgccttccggaatccctctaagtctgcttgatagagtggatagtatgttaaaactgtgtactttaaaaaaaaattcaacctttacatctagaataatttgcatctcattttgcctaaattggttctgtattcataaacactttccacatagaaaatagattagtattacctgtggcaccttttaagaaagggtcaaatgttn

SEQ ID NO: 7002 - DNA, 485 bp, Homo sapiens
  misc_feature (1)...(485): n = A,T,C or G
gccgcccttgacgcctggatgatcncgtcagaacgggccgacccacgcgtgcgcccacgcgtgcgcagttttcctcctcagctccttcctagatcagagagcacagaaaatcaaagttatgctaaacattctgccagtatgaatttctctaatcataacaatgttcgagctaatactgcataccatttacatcagagacttggcccagcaagacatggggaaatgtgggccatctcaccaaacgaccgacttattcctgcagtaactcgaagtacaatccagcggcaaagtagtgtgtcctccacagcctctgtaaatcttggtgatccaggctctacaaggcgggctcagattcctgaaggagattatttatcatacagagagttccacttagcgggaagaactcctccaatgatgccaggatcacagagacccctttctgcacgaacatacagcatagatggtccaaatgcatcaagacctcn

SEQ ID NO: 7003 - DNA, 421 bp, Homo sapiens
caaggaggctcataaaagcagtgacctcatccggggctttggatagagtgagaattccccaactaaattggacttctctgctttatccccttctcttccttcaccatctgcactacatttctggctgatcccaatcagattcccgctaatggaagaagtttagaatctttcaggtggaataaagtcacatgaaaacaaaacacaactatatatattttcagtttttttgccttattgatttttttccaaaaaaaaaaaaacctcctaaattaaatatttttttaaaaaaaaaaaaaaaaaaaaaaaaaaaaaaggggccccctttaaaaaaaacccttggggggcccaaatttacccggggagggaaaagaaaaattttttcccttaaggggggccaaaaaaaaaccacctggggattttt

SEQ ID NO: 7004 - DNA, 419 bp, Homo sapiens
taatcctagaaattatcctccagctttctcacctgaaaatctattgaagtgatccctggtcatcctaataatgggatgagggaagtttccagcagatttcaggctgttcttaaagtttttgttggtcattttctcaatagtacatgaaatcaagatgcttatgagcatggaaatgtatttaaagtttttgcttgtgtcctcctcagtcagaatagaaaagtaactgaaatactcttacctttctgtccttgataaaatagtaaagaaaaccaaacaaacccaggcctgatgggaaaaatgattcctttattctagcaacttactttctgttggtatgggaaatgttattaatttctattactaaagttcatatcacaaaatgatatttaataataaccttggggtaaatcatgaatttt

SEQ ID NO: 7005 - DNA, 430 bp, Homo sapiens
tgaacatgattttgttgaccatgttcgtgaattacagatgcaacatgcattggtagaatcgtgtgatggtcttttgtgatacttaatttttacatatcccagtctctgtatgtatctgcatagacaaagaaaaaacaaactcctgctttgcttttattgaagggtttccaggactgcgtgtctgctcctgagctctgttttaagtatgtgtatcctttgcttgtattttgtattaaaaaaataagaaaaagaagcctttattgttgagcatgttggcattgtcccctttatttttttctctttttgggacatatgaagcaagttattctttttctgtatctttttttcttttgtaaactttttttttgttttgtttaaaaatggctttataaaagggcttttataacccaaaaaaaaaaaaaaagggggg

SEQ ID NO: 7006 - DNA, 488 bp, Homo sapiens
  misc_feature (1)...(488): n = A,T,C or G
gccagtggcccccagcnnttcccaatgagattacctagatagtcatcaaanncgcncgacccacgcgtggctattttcaaaatgtgttccaacagaaatccttcataactcctagcatggtatcttaataaagaataaagggcttttaaaaagctgctctaagtagatttttccccttttttaaattaaggatcccaacagtggtattttgaaatattctcttgaatttgtgcatttaaattttattgcagtggtatagatgaatgccactgatggtatccttaaattttatttctgctcaccaaggttaatcatgattgtctatatcttttttatagggatcacttttgaattgtgttcagatatgcagtttcaggtgtaatcatcagagctggttagtcaggcattccagatagtggttcttttcagaacctttttaaaagggttggttaactacctcagtagcagaggattgaactataccctgg

SEQ ID NO: 7007 - DNA, 540 bp, Homo sapiens
  misc_feature (1)...(540): n = A,T,C or G
aactttctataaccttgtgcctatatacttgattaactcattattcatcaatccccccaagggaaagcggngnnncnttttgatacctattgaacgccccggaanacccgggncgacccacgcgnccgaatatctgcagctcgaccaaattcattaatagatgctgaaaaagcattccataaaattcaatattccttcatgataaaactcaacaagctaaatatggaaggaacataatacagtaaaggccatctgtgtcaaacccatagcatcatacttaatgagaaaaaattgagtttttcctccaaggcttggaacaagacaaggatgcccattttcaccacttttattcaacacatcacactagaagttctattcagagcaataagacaagagaaggaagtaaaaggcatctaaatgggaaaggaggaagtcagattgtccacgtttgcacatagcatgatcatctatgtagaaaatcctgacgactccacaaaaaaagtggtagaatcatttgctctttcactgcagctcctgcct

SEQ ID NO: 7008 - DNA, 410 bp, Homo sapiens
cttcagctaacacatcatcagctttgtcaactcacttgcagtctgcattgatgtcaacaggggtcacaatggccactgcgggtagcaaggttatggcttctgagggacagtcacctgctcagtctaatgcccggactcagttcattacacctgtctttatcaattcatcctcaataattcaggttatgaaaggatcacagccaagcacaattcctgcagccccactgacaaccaactctggcctgatgcctccctctgttgcagttgttggccctttacacatacctcagaacataaaattttcttctgctcctgtaccgcctaatgccctctccagtagacctgctccaaacatccagacaggtcgacctttggtccttagctcacgagccacccctgttcagcttcct

SEQ ID NO: 7009 - DNA, 504 bp, Homo sapiens
  misc_feature (1)...(504): n = A,T,C or G
gaagtcgggcagcctcnctaatagagccttcgtatgatcccntcaggaaccgcccgcaatcccggggcgacccacgcgtccgcccacgcgtccgtgcctggtggatgtttttcctcatctttgccggagcagcggccctggctgccatcccctacttcttcttccccaaggaaaagcccaacgaaaaacgtgagcttcagtttcagcgaaaggtcttaacagtcacagactcacctgccaggaagggcaaagactctccctctaagcagagccctggggagtccacgaaaaagcaagatggcctagtccagattgcaccaaacctgactgtgatccagctcattaaagtcttccccagggtgctgctgcagaccctacgccaccccatcttcctgctggtggtcctgttccaagtatgcttgtcatccatggctgagggcatggccaccttcctgcccaagatcctggagcgccagctttccatcacagcctcctacgccaacn

SEQ ID NO: 7010 - DNA, 433 bp, Homo sapiens
cagaaaagaggatgatgatgaatgtcttgaacaaaaaccagctcagcccggtaggaaatggcgcgaactcggacttcctcctgtttccccgcgtgactgtgtcaaagatgccgtggcagcagaagtgtttgatcacgtctggacaaatatggtagaacttttggaagagctgattagaaaacactgggaaactacactcacagaagggaaaaaacagagagaaacattgaaagtggctggaaacagatttccgcacgtcctcgttccacgcgctcacgccgatggagccagaggccccccgtccggacacgccgaggctcacggcatctccctggcttctcgtctgaacccgccccagattcatcacttctccagcagtttttatagtgacatgaatggtgtcatgacaattcaagcaaaaccgcttcagcgg

SEQ ID NO: 7011 - DNA, 426 bp, Homo sapiens
atgggcctgtctgtggcgttggtctgtccgtggcgtgggccggtccgtggcgtgggccggtccacagtgtgggtggaggtggacgtgctgcactgcatggtgctgagctgccctgcctctctggggcagccaccgtggagcgggagatggagctgcggcacaagaatgagatgctgcgagtggagaccgaggcccgggcgcgcgccaaggccgagcgggagaatgcagacatcatccgcgagcagatccgcctgaaggcgtccgagcaccgtcagaccgtcttggagtccatcaggacggctggcaccttgtttggggaaggattccgtgcctttgtgacagaccgggacaaagtgacagccacggtaaacatattcataaaacagggctggcaggtggctgagaggcagcatgtggcggcctcct

SEQ ID NO: 7012 - DNA, 420 bp, Homo sapiens
agatggatgtgggcagcaaagaggtcctgatggagagcccgccggactactccgcagctccccggggccgatttggcattccctgctgcccagtgcacctgaaacgccttcttatcgtggtggtggtggtggtcctcatcgtcgtggtgattgtgggagccctgctcatgggtctccacatgagccagaaacacacggagatggttctggagatgagcattggggcgccggaagcccagcaacgcctggccctgagtgagcacctggttaccactgccaccttctccatcggctccactggcctcgtggtgtatgactaccagcagctgctgatcgcctacaagccagcccctggcacctgctgctacatcatgaagatagctccagagagcatccccagtcttgaggctctcactagaa

SEQ ID NO: 7013 - DNA, 420 bp, Homo sapiens
aaatattttataaactcactgtattcaaatcttatattatctgaatcaacatgaaaagttgtcaatgcttgaatgaatactaaaatcataccacaagatactagataacataaatgaccatgaagcgtcccactgctcaaagggcaacaactttaagaacagaagcaaagaggggtggtgtggaacccaagattcttggcgactagggaatttaaaggttggggaggaggaattcaatgatttgacaagaaatactttataaaaatttgctccatgtattggctaagaaaaatataataaaattttggtagtgaaaattgtatcactaatgtttaccaatattactagtatgaataatacacataaggtagtgacttggaagctgctcaatactttgttgctataacaaaatgcaatatt

SEQ ID NO: 7014 - DNA, 474 bp, Homo sapiens
  misc_feature (1)...(474): n = A,T,C or G
gcgggattaaatgaancctggngactgacaccatctgacggnncgacccacgcgtccggaaaaaaagagcagagaaggagcgaatcatgaatgaggaagatcctgagaaacagcgcaggctggaggaggctgcattgaggcgtgagcaaaagaagttggaaaagaagcaaatgaaaatgaaacaaatcaaagtgaaagccatgtaaagccatcccaggctgtcagggcttctgtttgttttttaaactatgcaccaggtttctgatgatgaaataaagcacctgtttgttttaaaaaaaaaaaaaaaaaaaaggggcgcccgttttaaaggatccttcggggggcccaagttaacgcgggcttgcaacgtcttagctttttccttatggggagcctatttataacctccttggggatttttggaaagaacctttttttttggggggggacataatgggacaacctccctcccaa

SEQ ID NO: 7015 - DNA, 410 bp, Homo sapiens
  misc_feature (1)...(410): n = A,T,C or G
ctttcttctaaattaatctcaaactggactagaaaacaagagacagacgcttttgggttagtactccccaggaatgaagaaaatacacaatcaacaatgaagcaaacaaacaaacaaaaaaaaggagagcttcattagtagccaagataagtgcttgtgggttttgttttttgttttttttttttttttttaacaaatcacaggaattttaaattgcaaataagccatgctattgggggggacaaaaaaaacttgaacctttcccaggggaatattttttttaaggccctaaaagaaagggtccgggggggcggggtaaaacacttcccaggtaaaaaaggggaaccctacctcaccttttttgaagggcccattttttggaggggaaacctaccgaaataaacccttcn

SEQ ID NO: 7016 - DNA, 395 bp, Homo sapiens
atcagaggccctctaacctttaccgacgatccacttgggaaatacacttcccttagccaggtgctttggcctgcgggtgatacaccagcgagttctttttggagggattctggggagaaaaattgctcttcccaatgtctgcttggctgctctgctctcatttcctgcacatactctgaagcctatctgtgcttctcagtattctctagcggcgttgaaaaacgccccttagaggtgcacagttaattatagaagctgtgagctcttccatctgtagtcctgccctggagctaagagaaggacttgaatactgaagaggagatgccccctgtacagagagaaacaatgaatccttcctgcagggaataagcaagtttattaggagtaacttcggg

SEQ ID NO: 7017 - DNA, 400 bp, Homo sapiens
  misc_feature (1)...(400): n = A,T,C or G
agaccttagctaggcgtgggagccgtgagaaggctttaatgacaggcctccttgggggtctcctagtctccagccccaggagactaccacgaaggcagaggccaactcatgttgcttctggctgttttcatttaggactacaaaggtcctgctcatgactttgtaaaaactcatctccaaagaggcagaactcaattttcctccccatttaaaagctgtcaatagtgagtatttttttctttgaatatgaattgtattttctataaatacatatgaaattttatataattcttctaattataggtttattataagaaaaataaaaatggctgggtgcagagactcacgcctgtaatcccagcacatttggaggnngaacgtggacttatggcctgaagat

SEQ ID NO: 7018 - DNA, 409 bp, Homo sapiens
  misc_feature (1)...(409): n = A,T,C or G
ctctgctgcatcttacagaagagtaaactggngagagtatatattttatatatatatatatatataatatggatatatatatatattgacttgttacatgaagatgttaaaatcggtttttaaaggtgatgtaaatagtgatttccttaatgaaaaatacatattttgtattgttctaatgcaacagaaaagccttttaatctctttggttcctgtatattccatgtataagtgtaaatataatcagacaggtttaaaagttgtgcatgtatgtatacagttgcaagtctggacaaatgtataaaataaaccttttatttaagttgtgattacctgctgcatgaaaagtgcatgggggaccctgtgcatctgtgcatttgggaaaatgtcttaacaaatcagatcagat

SEQ ID NO: 7019 - DNA, 398 bp, Homo sapiens
aagactcactgggtggctttgcctatgtggagatcagctccaaagagatgactgtcgcttacatcgaggccgcgggcaggtgcctctttaagaccaggctgccgaggcgagccaggccctgaactcccatgactgcccagctctgaggcccgatctccactgttgggtgggtgggccctgccgggaccctgctcacaggcaggcttttcctccaacctgtggcgctgcagcagggcaggaaggggaaacacagctgatgaactgtggtgccacatgacccttgtggcacagatgcccacgtatgtgaaacacacatggacatgtgtcccagccacagtgttatgctctgtggctggctcacctttgctgagttccggggtgcaatgggggagggaggg

SEQ ID NO: 7020 - DNA, 470 bp, Homo sapiens
  misc_feature (1)...(470): n = A,T,C or G
gcgggattaaattgaggcttcggaattgatcngcatgtgcaggnncgacccacgcgtccgagcctggagcctgcagctagcagagggcccctgcctacagactgaccacgctggctattctccacatgagaccacaggcccagccagagcctgtcgggagaagaccagactctttacttgcagtaggcaccacaggtgggaaggatggtgggattgtgtacctttctaagaattaaccctctcctgctttactgctaattttttcctgctgcaaccctcccaccagtttttggcttactcctgagatatgatttgcaaatgaggagagagaagatgaggttggacaagaggccactgcttttcttagcactcttccctcccctaaaccatcccgtaggcttctaatacagtctctcagacaagtgtctctagatggatgtgaactccttaactcatcaagtgaggtggta

SEQ ID NO: 7021 - DNA, 311 bp, Homo sapiens
gccctgcctcctttgtgaggaagccgctggggccagttggtcccccttccatggactttgttagtttctccaagcaggacatggacaaggatgatctaggaagactttggaaagagtaggaagactttggaaagacttttccaaccctcatcaccaacgtctgtgccattttgtattttactaataaaatttaaaagtcttgtgaaaaaaaaaaaaaaaggggcggccgttttaaaggatcctttggggggcccaagctaacgcgggcatgcaaggtaatagttttttccttatagggagcccaattatag

SEQ ID NO: 7022 - DNA, 475 bp, Homo sapiens
  misc_feature (1)...(475): n = A,T,C or G
aggcgnntnnnnnaaactgattacctcggaccgccncgacctgaggccatccgaacgnccgangntagaaagcagcagcaattataaggcaaaataggtaatagaaatccaaaaggggattttccttatagaggacattccaagaacacacaacacttataaagcacattgacttgctcattttaaataccaaacttgtgtgactagcagatgaaaattataaatcaattgattctcaggaatgtaactgtggatatgaaagtgatcctatgcattgttaataattccatggtcttaggacaattttgcttaccactttggatctttgtttgaaagccacattttcagaaccagctcatgtattttctttggttatttgaattttattttctttatggacaagagcatcataacataatgataaaaacatatagaaaaactaaagtatcatgatctagatagaagcctgtatttg

SEQ ID NO: 7023 - DNA, 409 bp, Homo sapiens
ggtgggggtgaggtcatatagttcaaactaaggcatttttattatgttgttgatattgtattatttggagtattttaatgctatctttgggagtcattgtataattgttgtcagctatgtcaggaaatatggctggacataattgtaaattagggctgcaattgtgatcaaattttcagtctagggtgtaatgtagccttagagttaatttaattactgttctattttgacttatttcagagcctcttgggggcaaaaacaactgctcaccaatcttacattgatgggagcagaacttttctaagatactgttggtctccctggaaggggacagccacagccctgtttgttgaccagagtcttgagcattaaccattgtggcttaagagaatgaaaatgtacaagggta

SEQ ID NO: 7024 - DNA, 418 bp, Homo sapiens
  misc_feature (1)...(418): n = A,T,C or G
atctttccgcgccgccacaatggtgcgcatgaatgtcctggcagatgctctcaagagtatcaacaatgccgaaaagagaggcaaacgccaggtgcttattaggccgtgctccaaagtcatcgtccggtttctcactgtgatgatgaagcatggttacattggcgaatttgaaatcattgatgaccacagagctgggaaaattgttgtgaacctcacaggcaggctaaacaagtgtggggtgatcagccccagatttgacgtgcaactcaaagacctggaaaaatggcagaataatctgcttccatcccgccagtttggtttcattgtactgacaacctcagctggcatcatggaccatgaagaagcaagacgaaaacacacaggagggaaaatcctgggattctttttctagggatgn

SEQ ID NO: 7025 - DNA, 418 bp, Homo sapiens
cccagctactcaggagcctgaggtgggaggatcacttgagccaaggaggcagagattgcagtgagccaagatcgcaccactgcactccagcttgggcaacagaacgagaccctgtctcaaaaaaaaaaaaaaaaaaaaaaaaaaaaaaaaaaaaaaaaaaaaggggggggcccttaaaaaaaaatccggggggggcccaaaataaagggggggaggaaaaaaaaaattttttccttaaagggggggaaaaaaaaaaccacccggggttttttaaaaaaaaaaccttttttgggggggggaaaaaaggggaaaaccccccccaaaaaaaaaaaacccttgggggaaaaaaaaaatttttaagggggaaggggggaaaaaccccccctaatggcgtgggttaaaaaaaagcgcccccccc

SEQ ID NO: 7026 - DNA, 418 bp, Homo sapiens
aggacctaggtcgcggcgacatggccagacgtaccaagaaagtcgggatcgtcggtaaatacgggacccgctagggggcctccctccggaaaatggtgaagacaattgaaatcagccagcacgccaagtacacttgctctttctgtggcaaaaccaagatgaagagacgagctgtggggatctggcactgtggatcctgcatgaagacagtggctggcggtgcctggacgtacaataccacttgcgctgtcacggtaaagtccgccatcacaagactgaacgagttgaaagaccagtagacgctcctctactctttgagacatcactggcctataataaatgggttaatttatgtaacaaaaagaaaaaaagggggagcccgttatcaggtgtcttcaggggcccataatatactctg

SEQ ID NO: 7027 - DNA, 411 bp, Homo sapiens
ctcatcatttccatttacccttcttttctgactatttttcagaatctctcttcttttcaagtggggtgatggggtggtagatgctaatggctttattgcaccgattaataacaggcaaaaggaagcagggttggcttcccttctttttgttcttcatctaagccttctggctttatgggtcagagttccgactgccatcttggacttgtcagcaaaaaaaaaaaaaaaggggcgccctttttagggaccccccaaagggcccaaacctcccccggggaagaaccaccttgtttttttccctttgggccccccaaaaaaattttcccgcgggcgtttggaccggccccttattttcggggggggccttaaaaacctcaacctccaaaagggattcccaagttgttgaggaag

SEQ ID NO: 7028 - DNA, 410 bp, Homo sapiens
atggggccaccgagaggccgaagaaggccaaggaggagcggcgcatggaccagatgatgccaggaaagaccagagcagatgctgctgacccagcaccacttcccagccaggagccccccaggaacagcacagaacagcagggcctggcctctgggtcttctgtgtcctttgtgggtgccagcggctgtcctgaggcctacaagcggctcctatccagcttctactgcaaggggacacacggcatcatgtcaccactggccaaaaagaagctcctggcccacgtgagcaaggtggaggccttgcagtgccaggaggagggctgccgccatggggcagaaccccaggcgttcccagctgttcacctcccagagagtccccaaagccccaaagggctgactgagaactccagg

SEQ ID NO: 7029 - DNA, 407 bp, Homo sapiens
tgattttcatgtatatgtcatgagtatgtgaggtaatgcatatgtaaaataacttgatttagacattgcacactataggcatatatcaaaacttcattctgtacaatataaatacactatacaatttttacttgtcaatcaaaaaagtaatcctaatgtttaaaaaggcaatgcataaaaactgagaacagactataacaactgaaacaaacttggcaaccatgagatgagaaaccagctagcaagtcaatcagaactttttttcaccccgtctacaatattttgtatttataactgtaaattagtgtatagtgtttcactccagagacttcaataatatagtgttatcaaaggacttgtacagatttcagagaaagacaaatttagaagacggaggattctctatt

SEQ ID NO: 7030 - DNA, 415 bp, Homo sapiens
  misc_feature (1)...(415): n = A,T,C or G
gcgcccacgcgtccggaggagggcacccacctggtcggtgtttcttgctgcttcggccccagcgtcccctccaggtcccgtcgccggccgtattccccatagccttccccagcgcaggcccggccgccccacccgcggcccgcccctggccgcccgacgggagggagggatcggcttctcctaggaagtttcaggtcattcaacatttattcaaccaactatactacgtctgctctatacaaactaatggaaggatacagctatgctaatatagaacactaaagtgttacatgacagatgtatgagatattaaagtaattgtgaaataaaagaaaaaattgtctgataaaaccacatctcatagaaacccaattgatgcaacacatctaatcacttatctgcaaaaaacgagaan

SEQ ID NO: 7031 - DNA, 477 bp, Homo sapiens
  misc_feature (1)...(477): n = A,T,C or G
ttttnaactgaagccctcggaccgcccttgatttccgttcgacccacgcgtccgctctctgtaattggactgtattcaacgaaaacttagtaagttgtaattatgcctcaggtatgtttctatgcactgagtgaagagtggagataaaaatagaatttagattttcctttactttttaaataggttgttgcctcttatatatttattctatgatgcaaatgtcactatcctaattcctcagtttatgtttaacagcacacagtggcacttctatgattcaaatacatttgataccctttgaaatcaatcagaatactgcaaaattaatttttctaaaacaatgcttttatcgttatttctcctgttgaatcatcagtacaatttccaaatgaaaacacttaaaataatctcatattacaatctttctctaacagaaccatgatgtaaggacagtgataacaaatatctgacaatgag

SEQ ID NO: 7032 - DNA, 465 bp, Homo sapiens
  misc_feature (1)...(465): n = A,T,C or G
ctcccattagtatgacgttccgaatnggagaaacctgcggaaccgcaccggaagtgccgggtcgacccacgcgttcgcccacgcgttcgccgaccactgggcgtggttgctggtgctcatcttcgcgtttggatgcaatgttcttaggatcctcctcccgtccttctcatccttcatgtccagggtgctgcagaaggacgcggagcacgagtcacagatgagagcggagatccatgacatgaaagcaggagctctccacagtcaacatgatggacgagtttgccagatatgccaggctggaaagaaagatcaacaagatgacggataagctcaaaacccatggtactgtgtcccttgcagcctggaggcttcatgagagcggatgaatagagaagtctgtatgtgaagattagtagaatacatactttgcttcttggatgttctgaatattgatggaaacttaag

SEQ ID NO: 7033 - DNA, 411 bp, Homo sapiens
  misc_feature (1)...(411): n = A,T,C or G
aaatagatggccntcggnaccggcccactgatcaccgtcgacacacgcgtccgcgcgaacgctcgaggtggccgcgcgcaggtgtttccttgtaccgcagggccccctccctttcccaggcgtccctcggcgcctctgcgggcccgaggaggagcggctggcgggtggggggagtgtgacccaccctcggtgagaaaagccttctctagcgatctgagaggcgtgccttgggggtaccggaaaaaaaaaaaaaaaaaggggcgcccctttaaaaggatccttggggggcccaaattttacggggggtggcaagataatagttctttccttatggggagccctttaataacctggctgggatttttggggagggaccctttcttgtgggggggaacttattgggccagcctc

SEQ ID NO: 7034 - DNA, 443 bp, Homo sapiens
catcgctgcaagcgttgtaggaatgggcttggcagccatgagccttattggaggcatgttctcaagaaacaagcgacaaaagcaataactgaaaaagactgtcctgtcagcgatgactttatacatcaggggggtcttgttttgctagagagtttggggtttggtttgtggatttcattgtgatttataataaggcttattttcacagaataaaataagccttattataaatcataataaaatcacgttaagccacaccaatacacaccgccaccaccaaacaaccggtgggacggacggttccatgccagctgcctggaggaggaacagacccctttagtcctcatcccttagatcctggagggcacggatcacattctgagaagaaggcgtctgtaggataagcaacaccaccccggcgcccaatattggaagccctaaca

SEQ ID NO: 7035 - DNA, 509 bp, Homo sapiens
  misc_feature (1)...(509): n = A,T,C or G
aactggtgactctngaccgcccactgatcccgtcgacacacgcgtccgatgggcggcttctccgacttctacaagctccggtggctggaggccattctcagctggcataaacagcaggaaggatgcttcggggagcctgatgctgaagatgaagaatcatctaaagctattcaatatcagcagcatttttcgaggagagtgaagaggcgagaaaaacaatttccagatggctgctcctcccacaacacagccacagcagtggcagccctgggtggcttcctatacatcctggcagaataccccccagcaaacagagagccacacccatccacaccgccaccaccaagcagccgctgagacggacggttccatgccagctgcctggaggaggaacagacccctttagtcctcatcccttagatcctggagggcacggatcacatcctgggaagaaggcatctggaggataagcaaagccaccccgacacccaatcttggaagccctgagn

SEQ ID NO: 7036 - DNA, 442 bp, Homo sapiens
  misc_feature (1)...(442): n = A,T,C or G
atgatctgtaatttggtcattgctctgctatattccagattgctctacttgctaatatttggatagaatagaatttatgtaaactagtaaccagttgatctctgtgccaaatacattatatcaggattacacagaaagtatcacaaaggatggtcttggacatatgctagggcccctgtgaaaataagtagttgtgagaagtttttctatatacgtatatatacacgtgtggctctatttaggtggggaaaaaatgaaaaagcacggacaacaggaggaaatgaaggcagagaaatatagtttcctttcctaggattgagacaaatctatttttcatatactcgatgctcattatatagtaaagggctgatttgctgcaggagtaactgagaattcangnacatccttgcagaatgattcacaagacaagagccaggctcaa

SEQ ID NO: 7037 - DNA, 477 bp, Homo sapiens
  misc_feature (1)...(477): n = A,T,C or G
agcgnttnntnaaactgattgcctgcggaccgccncgaaaactgattccactcgacgcgtccgcggacgcgtggggagcctatagtgtttgctttgtgaacatgtgtattgtatatattctgtatagttatattggactgaaattagcttgtttgagataaggaaaatatgtattgagtacctttttgctagcctgattgtttaatctttttaaaaaaggtttaaactttttttaaaaaaaaaatctttaaactggcctttattacatggtcacacataaagttgcagttaggaaagggatgggcagggaaaaactagttttgagtgtctttagatagaaacatgagactaaggtttgattttgttttcgttttctcattaaaatatcttatgctttatggaaaaaaaaaaaaaagggggggccgttataaagaatccttttgggggccaaagcttaccctgcctgtgaacttattt

SEQ ID NO: 7038 - DNA, 443 bp, Homo sapiens
  misc_feature (1)...(443): n = A,T,C or G
tgtcttttaggatggggactcataccgaggagaaatggtgacagtgggatcaaaatgaagcaggtcaggcatggtgggtggtgcctgtaatcctggctaaggcaggagaattgcttaaagtgaggaattcgagaccagcctgagatgcatagtaatacccagtctctaaaaaaaaaaaaaaaaaaaaaaaaaaaaaaaaaaaaaaaaaaaaaaaaaaaaaaaaaaaaaaanggggggggccctttttaaaaaatccctgggggggcccaaatttcccggggggaaaaaaattttatttttttttttttgggggggtttttaaaaaccctctgggggtttttgggaaaaaaccttttttttgggggggggaaatttgggcccccccccccccaaaaatttaaaccctttggggagaaaaaaaatttttgggggggtgggggggg

SEQ ID NO: 7039 - DNA, 482 bp, Homo sapiens
ggcggggggtttaattgaagctacggattgatcgcgtcggaaccgccgagcaatgcgggcgcgaaccacgcgtgcaggatatatagcttaatttcggagactagggtgttgcactaactacagtggagcatacatagggcttgctgctatgctgctaagctgaaggctgaattaacctaagttctaaacataatgcgaacctttgagatacaaaatcaagtatattttaaaagaagggatgtgaagatcaactgaggacatgcctctgtcattaatggcccttgaaccagcaacaatggatgcagtcattccagcaccaacaggatccaagccagattgattgggctgcattggcccaagcttggattgcccaaagagaagcttcaggacagcaaagcatggtagaacaaccaccaggaatgatgccacatggacaagatatgtctacaatggaatctggtccaaacaatcatgggaatttg

SEQ ID NO: 7040 - DNA, 463 bp, Homo sapiens
  misc_feature (1)...(463): n = A,T,C or G
cggcggngnattcaatgtagctcggattgacgtctcccccgnccaccacgcggcgggagacccacagatgttgctttgggggaatctgattctacaaagtctgtaagctgagctgctttggacgtggcaaaagaagggttggctcttcaagcaagttcttttcaggacccatcccaacccacccgagtatccagtgtcttgcgcatctgtgagcttttcatgtagttgctgagtcacgtgaaacaggaaaccttttcctgcgacttactggtgnccttcccaaccactgggactcagttctctttgtttactctgcaggtaatgggtaaagtgccaaccatatccatcaacaaaacatatggctgccatgcttacctgagcaagaattccctggattgtgaaatagtcagggccaaatcttccgagatgaatgtcctcaattctacagaaggcggtgacttta

SEQ ID NO: 7041 - DNA, 476 bp, Homo sapiens
  misc_feature (1)...(476): n = A,T,C or G
agcgnntnnnnnaaactggatagcggtcgaaccgcncgaaactgagtccatcgaagcgnccgcccacgcgtgcggtgataaattattcagataattaacactgcatgaatctgattcagaggcatgcatttacatatgttgccctaattaccatttgatgatcataaatacaagtgaatgacattggacttttagtaacaaacttaatttttaaaaaggtgtagacaatggtggttaaaaaaaaaaaaaaacagggcccggggtttgggggttggccccaaaaaattgacatgttttttgtttaatacagggggaccatgaacagtattcattttactttttaaaatgatatgctgaaaaaaatattccttgaagatgggagattaaaaaatttttccctttcaatggggttttaatggaatttcttacttggtttttttgattgatagcacagggataaatcatattactagaca

SEQ ID NO: 7042 - DNA, 403 bp, Homo sapiens
  misc_feature (1)...(403): n = A,T,C or G
atagataaaggcggtcttctgtgttcttggcaactttcgttttactacttctgttactgctaagggccctcttacaattgtgagaacaattcaggaattcgtatctcataaagcattctatcacatactgacaaaataaggtgataggttagaaaggagctaaaaaaagatgtgatgtgatatccagtcaaataaatagaggactgccaaaaaaaaaaaaaaaaggggcgggcactttaaacaacctgtggggggcccaagtttttcttgtgatggaaagcgataatttttttccatatggggggggagatataaatgtatttgggaattttggagagggaactttattttggtgggggacaatatttgccaaaccaccccgcgaaaatttaactttctaggn

SEQ ID NO: 7043 - DNA, 492 bp, Homo sapiens
  misc_feature (1)...(492): n = A,T,C or G
atgcggcttgctgaannnttaaaatngtttagtananncncnnnnactgatagtcatcggaacggcnncggaannncngggncgacccacccgttcgaaaacacgaggtgtgtcaaagccatacactgcataatttatagaagcggtcanatgcagaataaatagggaggaaattatattattttcatagagagaatgactgagatcattacaggtaatacagataaaccttatgattaaagcattacaaggaaactactatatatagaagctattcagcccatccaacataattataattggtgcctctgacgtatagacctcaaaaatagaatgaagatatatttgaagatttaaggaaatttccttgagataaataattgaagttgggattaaaagagcatgtcccaaaaaagaattgataccaaaagttttacactgggacatattggaaacaagctataaaacttcaaacatgaagaagtctttagg

SEQ ID NO: 7044 - DNA, 397 bp, Homo sapiens
ccatttctgggtatgttcattttgtcttggaaatttgagacaccatctggtgtgagttcttactccaggactactttgttcttatttacctcctttgtgttgtcattgtcaaatatgtcacatttgtatatgttctgggtctaaagcataattacatgatattttatacaattgctctttaagagaaggaagaaatgcatttatactgtctttcataattacataattacatttaccagtgcccttttttttttggaatggattcaaattataatctggggtcacttcattccaggcagaagccctttttttaatatatttttatataaggcaaatctgatagggacaaatctttagtttttgtttatatgggctatctttattttaccttctttgg

SEQ ID NO: 7045 - DNA, 418 bp, Homo sapiens
gcggataaggagaaaaagaaaaaggagagcatcttgtacttgtctttgtacatcgacaagacgatcggggtaaagtgccagggaggccgcgaagccagtggaatcctgaagggcttcgacccactcctcaaccttgtgctggacggcaccattgagtacatgcgagaccctgacgaccagtacaagctcacggaggacacccggcagctgggcctcgtggtgtgccggggcacgtccgtggtgctaatctgcccgcaggacggcatggaggccatccccaaccccttcatccagcagcaggacgcctagcctggccgggggcgcggggggtgcagggcaggcccgagcagctcgccttcccgcggacttggctgctgctcccaccgcagtaccgcctcctggaacggaagcattttcc

SEQ ID NO: 7046 - DNA, 402 bp, Homo sapiens
gaccgtctggaatggattttactgctttgcctgagacggctgcttgggaggtacaaggggagggacctagggtgtggaagaactaaggaatgtaaatgtatttttcccacatttcaaatattccatggacacctatgtttttaaagatagttctcagaaagacctgctgaattttactggcacacttcctgtgatgtatcaggcctaaatctgtcattgttggattaattaaagaaatgattgccaagtttcaagaggaacttcccatgtattctctatcatcatctgatgaggcacggcaggtagacttgctagcctatattgcaaaaatcactgaaggtgtttcagatacaaattcaaagagctgggcaaatcatgagaataaaacagtcaataaaatta

SEQ ID NO: 7047 - DNA, 417 bp, Homo sapiens
cttggcatgggcgcaggcccagtgacaaagactcctctgggcctggggtgcatcctcctcagcccccaggccaggtgaggtccaccggcccctggcagcacagcccagggcctgcatgggggcaccgggctccatgcctctggaggcctctggccctcggtggctgcacagaagggctctttctctctgctgagctgggcccagcccctccacgtgatttccagtgagtgtaaataattttaaataacctctggcccttggaataaagttctgttttctgtaaaaaaaaaaaaaaaaaaaggggcggccgttttaaaggatccctgggggggcccaagtttacccgggcatgcaacgtaatagttttttccttatggggagccgaattataacctacctgggaatctttgtgaagga

SEQ ID NO: 7048 - DNA, 430 bp, Homo sapiens
cccacgcgtccgggctcccgcaaagaagggtggcgagaagaaaaagggccgttctgccatcaacgaagtggtaacccgagaatacaccatcaacattcacaagcgcatccatggagtgggcttcaagaagcgtgcacctcgggcactcaaagagattcggaaatttgccatgaaggagatgggaactccagatgtgcgcattgacaccaggctcaacaaagctgtctgggccaaaggaataaggaatgtgccataccgaatccgtgtgcggctgtccagaaaacgtaatgaggatgaagattcaccaaataagctatatactttggttacctatgtacctgttaccactttcaaaaatctacagacagtcaatgtggatgagaactaatcgctgatcgtcagatcaaataaagttataaaattgcaaaaa

SEQ ID NO: 7049 - DNA, 424 bp, Homo sapiens
aacagacatgtgactgggaacatcttgctgccaaaagaatcctaggcagtggctcattgtatgtgaggttgaaccacgtgaaattgccaatattaggctggcttttatctacaaagaaggagtttcatggggttcagcctaacagttatggaaactacagtccttataaaccattggcatggtaataaacagatcttaagtataaaaattttgtaattgggcctttactctctcaataataaagtattttgtttatataaaaaaaaaaaaaaaaaaaaaaaaaaaaagggggggggccgttttaaagatccctttgggggcccaaattttcccggggctggaaaaaattttttttttcccttaaagggggcctttttaaaaccaacctgggattttttggaaagaaccctttttttgggggggg

SEQ ID NO: 7050 - DNA, 394 bp, Homo sapiens
gaaaactgagcgtgggcctcagaaagaagttaaggcacccgcgagccgggcaactgccctccttccgcgccggcggagcgattaaagtgaagaaacaatggccagcaatcacaaatcttcagcagctcgccctgtttcaagaggtggagttgggttaacaggaaggcctccttctgggatacgacccctatcaggaaatattcgagtggcaactgcaatgccacctgggacagcaagaccaggttctcgtggttgtcccatagggactggtggagttctgtcttctcaaatcaaagttgcccatcgccctgtaacacaacaaggtttgactggaatgaaaactgggacgaaaggtccccagaggcaaattttagacaaatcttactatcttggg

SEQ ID NO: 7051 - DNA, 485 bp, Homo sapiens
  misc_feature (1)...(485): n = A,T,C or G
cccccccccagcgctcggatgantcctaatgataccctgcggacccgccggaatcccggtcgacccacgcgtccgccgtcccctgagtccaacagtgggagccctagctgggaagttctgatccccaaagccacagcaggggactgatggctatagcagaatgaggtcgggtcaggaccctcaaacaccatctgggaacaccaagcaccctgaatcgagactgcaggagccctgcggggtgagactgtgtcagagatacactgctggccacaagtgtcccctctcagtcccaccttttcgggctgtcccatgtctatctcaggggcccgttacctctctgcagcagtcccccatcccagccacaccagggtctgtccggccaaccctcttccccagggaaaggagaaaagagaaaacaggctgggcccggtggctcactcctgtaatcccagcactttgggaggttgaggtgggcggatcacctg

SEQ ID NO: 7052 - DNA, 463 bp, Homo sapiens
  misc_feature (1)...(463): n = A,T,C or G
ataaaatcagatacccgtgctgaanngtgatcggcantcccggancgccccacgcgtccgngaacattctgtatggaaaagagccctggagcatcaagttccccagataggcccccaaataaagacctgggtatggctctcccgaccttctgtcagcttctttggcaagacattgctccaggcacagggactgaaccccaggcctcctgggactggagcagcagtgaggcaaaacccgacctgctagccctttctgccttggaggtttcagtccatacctggactctgagaaaatgagctgaataaggagtacagcgcgtaaggagcagccagggaagccctagacactccccgcgtctcccccatgcacaggggaaggatgttgacatagcactgggctgtttgaatgccttttcatctccatggtctcatttgaaagagagcgaggcaggcaggcatgatg

SEQ ID NO: 7053 - DNA, 387 bp, Homo sapiens
gctcactgagggattggctgaggatgcataaagcataggctgtgagaagcaggtgggagtttggttggcattggattgaatttacttttttgtttctcacccgcaacttgagccaggacagctggtccaagtggccacagtgatgggttttagtaccttggtagggctggcaccactggaaacacatactgaagctgccaccacattagcttgtgaagctttatccagctttggttagaccctgcatgaccaaatttgacctgcccttgtttatggcaagaagggcatttttctcttcaatttccagggtttcctaggacccagctcctcatgtaagggaggaagaccaagggctttgtgttttcttcctcatggaattgaacctga

SEQ ID NO: 7054 - DNA, 459 bp, Homo sapiens
  misc_feature (1)...(459): n = A,T,C or G
ataaaactgatagcgtgctggatttgacgacctcccgggnccacccacgcgtccgacatccacccagggattagggttcaagtagcagctgctaacccttgcaccagcccttgtgggactcccagcacaagacaaagctcaggatgctggtgatgctaggaagatgtccctcccctcactgccccacattctcccagtggctctaccagcctcacccatcaaaccagtgaatttctcaatcttgcctcacagtgactgcagcgccaagcggcatccaccaagcatcaagttggagaaaagggaacccaagcagtagagagcgatattggagtcttttgttcattcaaatcttggatttttttttttccctaaaagattctctttttagggggaatgggaaacggacacctcataaagggttcaaagatcatcaatttttctgactttttaaatcattat

SEQ ID NO: 7055 - DNA, 392 bp, Homo sapiens
gcgcagacaacctagagctgtctctgcggagccagagtgacctcgacgaccaacacgagtacgacagcgtggggtctgacgaggacacagaccgggagcccctgcgcagcaccggcgccactctgagcaaccgggcccgggtctgagtcccaccctccttcccactcccctgtgccctgacccaggccttcgctgaggcccagctctgtcctcttgtagcccaagggcctgagggacaggtgggctgctcctatcctcaataactgccccctgcgggtggtggcctccctgcccccaggtgctgaccagcttaggtctctctctgcagagcatggactcctcggacttggctgacggggctgtgacgctgcaggagtacccggagctgagag

SEQ ID NO: 7056 - DNA, 464 bp, Homo sapiens
  misc_feature (1)...(464): n = A,T,C or G
ataacatcatgatagccntgctanactttgatggccntcccgggnccacccacgcgtccggactagttctagatctgttctgcccgaggcttgtggtcaagcaaaaattcagccctgaaatcaggcacatctgttcgttggactaaacccacaggttagttcagtcaaagcaggcaacccccttgtgggcactgaccctgccactggggtcatggcggttgtggcagctggggaggtttggccccaacagccctcctgtgcctgcttccctgtgtgtcggggtcctccagggagctgacccagaggtggaggccacggaggcagggtctctggggactgtcggggggtacagagggagaaggctctgcaagagctccctggcaatacccccttgtgtaattgctttgtgtgcgacagggaggaagtttcaataaagcagcaacaagcttcacaaaaaaaaaaan

SEQ ID NO: 7057 - DNA, 391 bp, Homo sapiens
ggcccccagagaatcatcatcgggagcggaactaatgaagcgctcatctcttagagacaaaggcccatggaggggaacaggaaccatcccctcccaattcagaaaaaggtaacataagcacttcatttgtcatgcagataaccacataagtctattaataacaaggaaggaatgagaaagaacaaaaaaacaaaggggggggggttctaaaggacccctgggggggcccgaacttacccggtctttcaaaaaaaatggtttttccctttcgggagccttataatacactatgtgggaatcttttaaaggaaccctatcttctggggggaacaatattagaaaaacccacctgcaaaaattgaatcccctagggaaaatacaaaattgttag

SEQ ID NO: 7058 - DNA, 237 bp, Homo sapiens
ctaagatgcgccgccggacctacagagctcatggtcggattaacccatacatgagctctccctgccacattgagatgatccttacggaaaaggaacagattgttcctaaaccagaagaggaggttgcccagaagaaaaagatatcccagaagaaactgaagaaacaaaaacttatggcacgggagtaaattcagcattaaaataaatgtaattaaaaggaaaaaaaaaaaaaaaagg

SEQ ID NO: 7059 - DNA, 409 bp, Homo sapiens
  misc_feature (1)...(409): n = A,T,C or G
caggatgtctggggcctcaccagcaggagcgcgtgcaagccgggcaggcggtccacctagacccacagcccctcgggagcaccccacctctgtgtgtgatgtagctttctctccctcagcctgcaagggtccgatttgccatcgaaaaagacaacctctacttttttcttttgtattttgataaacactgaagctggagctgttaaatttatcttggggaaacctcagaactggtctatttggtgtcgtggaacctcttactgctttcaatacacgattagtaatcaactgttttgtatacttgttttcagttttcatttcgacaaacaagcactgtaattatagctattagaataaaatctcttaactattaaaaaaaaaaaaaaaaaaaggggcggccgttctaaan

SEQ ID NO: 7060 - DNA, 472 bp, Homo sapiens
  misc_feature (1)...(472): n = A,T,C or G
cgtgggatttttttgatgctgagcatcgcaaggacnnnngggncgacccacgcgtccgctggacacagaacccaggatcagggtcggaacccaggttcaaggatttgctttctctactccctgtggcctgtgtgagcaagtctttgaagaggtgccagcttccttttgcatcattaatcctgattgatcagacaccacctgcttatgccacgttcagggacaactgtagacagtgactcaggaatcagcgggacccacagaccaggcagtctggtcccagtcccctcaaacagaaacttgctcctttcccacatctgtgcctgggtgtcacagtccgaatgtcaggtatttaatgagatgttgaggaaagcaaagcacttgctgagactgaaatatcagcatttgagccaaggcggaacccaagggattaggtgttggaatctagagctatggcgtaaagcacgttttgcag

SEQ ID NO: 7061 - DNA, 482 bp, Homo sapiens
  misc_feature (1)...(482): n = A,T,C or G
ggccccttcccactgaaatcctgatgatancatcgcaancgcccncgaannnccggggcgacccacgcgtgcgctttcattgaggggctatgtgatggagacagactaactcattttgttatttgcattaaaagtattttgggggtctgttcaaatgagtttggagaatgcttgacttgttggtctgtgtgaatgtgtatatatatatacctgaatacaggaacatcggagacctattcactcccacacactctgctatagtttgcgtgcttttgtggacacccctcatgaacaggctggcgctctaggacgctctgtgttcactgatgatgaagaaacctagaactccaagcctgtttgtaaacacactaaacacagtggcctagatagaaactgtatcgtagtttaaaatctgcctcgcgggatgttactaaactcgctaatagtttaaaggttacttacaatagagcaagttggacaat

SEQ ID NO: 7062 - DNA, 382 bp, Homo sapiens
tgcctcctcctggtggagttcaacaggcccaggcagaggttgcttgaaccacctgtggttgccccagctaaaaggggagaagcagccacattccacaatctggactggctgggaagctgagcagggagttctagagtggcagcccaaactcaggcaggcaagcactgaaggatggttcctcatcctcccagcaggaggttggaggctatgagataccctgtctctcaggggctggaagagcaaagagcagtatctctttcagacatcctgctgtcagaagttacaccacagcacagtcatacattgggtttaattgttgctccatacccattacaatctccagcattccccctcaaacctaaaaaaaaaaaaaaaaaaaaaa

SEQ ID NO: 7063 - DNA, 456 bp, Homo sapiens
  misc_feature (1)...(456): n = A,T,C or G
ataactcggtaacaactcgtaacttgnacggacctcccggancgccccacgcgtccgtgctgttccttttcaggagagaaattacaataggattggtggcctaatgatgtaagtgccaaagtttcattcgaggttttgggggagaatgtttttcaactgtttgcttttatctgagacaaagtgggcaaggaataaaggtagagtggtgagaagggtgttatcccttcctgggaaacctttttttttttttttttggggggggaaaattttttcttttttggcccagggggaaggaaatgggagtaattttgtttatttgaaacctccacctcgtgggtaaaacaattctctggtttaaccctccctataacttgaaataaaggccttcccccccccccccgggtaaattggtgttttttaaaaaaaacagaatttcctcttgttgggaaactttct

SEQ ID NO: 7064 - DNA, 417 bp, Homo sapiens
gaggtggttatggtggtcagagcagtatgagtggatatgaccaagttctgcaggaaaactccagtgactatgagtcaaaccttgcttaggtagagaaggagcactaaatagctactccagatataaaagctgtacatttgtgggagttgaatagaatgggagggatgtttagtatatccagtatgattggtaaatgggaaatataattgattctgatcactcttggtcagcttctctttctttatctttctttctccttttttaagaaaacgagttaagtttaacagttttgcattacaggcttgtgattcatgcttactgtaaagtggaagttgagattattttaaaacttcaagctcagtaattctgaacactgaaacattcatctaggacataataacaaagttcagtattgac

SEQ ID NO: 7065 - DNA, 405 bp, Homo sapiens
cttaatcttctcatccatttagaggagacagcaccactattcacaggactattgtcagaattacgagacaatagcataggtgaaaatataaagtactttgtaaactaaaatgttacacggataagctgatatcattggtagcaagagcaacactattccgaagtttttgtggggtaggtccctctgattattcttcatattacagggcaatcaattgggtagacatcctcttaaacctctgttcctcttttcttcttaaaacactgagatctcttcatctgaaataaaaatttcgagagagttatagatttgtagtcttggatcctggagagaagagacatgtattcctgtatacacccagatcattaatcctacttttaattctactccaaaccttgtaccacg

SEQ ID NO: 7066 - DNA, 494 bp, Homo sapiens
  misc_feature (1)...(494): n = A,T,C or G
aggtcgcgngnnnnnatttaccttgatgccctcgtanngactgatnatcatccgnaganncacgcgnncgntgncgnttgcaacatgcagagttccgcctccagtattcctaatagaattaaagttggaggaatcagtaaaaagtcatggcttttaatatatagaaatagatatatgtatgtgtgtatgtatgtattatctagctctgtctgctaagaggtcctagaagcaattatatcaaagtagttatgagtacacttagcacctggatcttgatttctttttttttttttttttttggaaagggatttttgttgccccccgggctggagggcgggggcgcaatttgggttaattgaaacccccccccctggggtgggcccctttttctggcctaacccccccaaaaagttggaactaaggggccccccctccccccccatttaattttttgttttttaaaggaaaacgggttttccccggttaacccgggg

SEQ ID NO: 7067 - DNA, 414 bp, Homo sapiens
cgcaccatgccgctcctaagcctgcacagccgtggcggcagcatcagtgatagtgccagggtctgcctccactgctgtaataacacgcgtccggagcctcggtggggctcctgatgcccctcacccacccctgatgatcccaggagggcgagggaatagtcagagggatcacaatctttcagctaacttattctactccgatgattggctgaatgtatcataggaactaacggccaactacaagacgaagattctcaatgttcagtccaggctcacaaacgccaaacgcattaactggcgaacagtgctgagtggtatcagtctctacatcaagatctcggcctgcgcgctgtgcgaggggagcaaggacagatttgcaggtttactggagttcgatgacgagcatctgcgacg

SEQ ID NO: 7068 - DNA, 413 bp, Homo sapiens
  misc_feature (1)...(413): n = A,T,C or G
ccgtgggggtagctcactccccctcctgctgctatgcctgtgacccccgcggcccacacactggactgacctgccctgagcggggatgcagtgttgcactgatgacttgaccagcccctcccccaataaactcgcctcttggaaatggcnnaaaaaaaaaaaaaaaaaaaaaaaaaaaaaaaaaaaaaaaaaaaaaaaaaaaaaaaaaaaaaaaaaaaaaaaaaaaaaaaggggggggcgttttttaaaaaatttctgggggggccccctccccccgggggggggaaaattttttttttttttttttagggggaagtaataaaaccctggggggagtgtgagaaaaaaacttttttttggggggggggcaaaatatggcccccccccctcaaaagaaaaaactccctcgagag

SEQ ID NO: 7069 - DNA, 419 bp, Homo sapiens
cccacgcgtccggcgagagccgcgggagagcgtgcagccgagtcactactgcctgcctgcctgcctgctacgggtcatcagcaggtacgtacccaaccatgggctcgcaggccctgcccccggggcccatgcagaccctcatctttttcgacatggaggccactggcttgcccttctcccagcccaaggtcacggagctgtgcctgctggctgtccacagatgtgccctggagagcccccccacctctcaggggccacctcccacagttcctccaccaccgcgtgtggtagacaagctctccctgtgtgtggctccggggaaggcctgcagccctgcagccagcgagatcacaggtctgagcacagctgtgctggcagcgcatgggcgtcaatgttttgatgacaacctggccaacctg

SEQ ID NO: 7070 - DNA, 408 bp, Homo sapiens
atctacagacttgtcattgctgctttggacaagtggggattgtggaggaattgacaatctagaagtgtgtacaaagaaaagtattgtcaatatcagcttcttttaaccttttgaatagctctgctaataaattattctccatatctagtctaatctttcatattacaggcattttcgttttattctgccacgagtaataggcagctgattaatatattctgtgaaagaactcttctcatctgaaggtaattctctactaatctttattaccacaaagatcccgtctttgtacacatgaaattagtaactgcattttcaacatgatgaaccatttgaaatttacattttctgtaaagaaaatagtgcctgcacgttgtttcactaccttttccccttcaaacctcctcg

SEQ ID NO: 7071 - DNA, 415 bp, Homo sapiens
ttgccttggtggcctatcccagtgccagggctcacaggaatggctcgtgcttgtctatgcttatcgcagaggccggtgctgtgagtcagagctggtcattcccgagtgactgatggtggagggaggggacagcaacctggaaagctgtgatcacctttgtgtgctagcagagtactgtaaaatattaaaatataggattggccgggtgcagtggctcacacctgtaatcccagcactttgggaggctgaggcgggtggatcgcttgagaccaggagtttgagaccagcctggccaacatggcgaaaccccatctttactaaaaaatacaaaaataagccaggcgtggtggcacgcacctgtaatcccagctactcaggtggctgaggcaggaaaattgctggaacctgggaggcg

SEQ ID NO: 7072 - DNA, 469 bp, Homo sapiens
  misc_feature (1)...(469): n = A,T,C or G
gatgcgccgttccctcagggggctgcgcagtggantctggaaccgcncgacccacgcgggcggagacgcgcgggcggacgcgcgggtccagacgcgtgttcgccaggcgtcctctaggaaagcccgctaccgagggatgggcgtgggcgtgaccaggcctgacctccctgtctctcctcagagacatcggctttaaaccctgcgtggcaatccctgacgcaccgccgtgatgcccagggaagacagggcgacctggaagtccaactacttccttaagatcatccaactattggatgattatccgacatgtttcattgtgggagcagacaatgtgggctccaagcagatgcagcagatccgcatgtcccttcgcgggaaggctgtgttgctgatgggcaagaacaccatgatgcgcaaggccatccgagggcacctggaaaacaacccagctctggagaaactgctgcct

SEQ ID NO: 7073 - DNA, 493 bp, Homo sapiens
  misc_feature (1)...(493): n = A,T,C or G
agcagttccccagcnggtcccatgatagtcatcactgataggccctcaaaacccgcgncgacccacgcgtccggtcagacattggaattggaagaactataaagtgtgattcgatcgtcaagacatcacttggatttcttaatcttaaatgcttatggaagatgtgaagttgaggtgctgcattctanaacttcaatatgtagcttactctttttttccccccttcttaaaccaccagtggttcatttttaaggttttttcatcaagagaagaataactttactaaattttatttctttatttgcaaaagaatctttattaaaacaaacaatcttaactatgcacatgatgtgaccagatcatcttgaaaatattcctctttagtaggaactctttgtttttaactcttggtatggncagaatataatacttccataattacttataattctttccggntactggggctataaatacaactttttaaatgaan

SEQ ID NO: 7074 - DNA, 465 bp, Homo sapiens
  misc_feature (1)...(465): n = A,T,C or G
ggacggggggtcccactgaatgcccactganagtctggcaannnccnngannangcgtgcgggaaacaccacagaaatctacttagcttcagcatattgcttgagaggtactctagtaagccaaagcttggctggtgtaggatgtttatcctaaagtggagtggccaaaaatgaatgccacaaattgccccactctgaattctgctcctcagggcccaatagctgactttctaatctgcaagagcacctgtgcttcctggtctctgggcctttgcaagtgctgtatctctagcatggacagggaatgctcctccccctgagctccttcttgagaactctgaatcatcctttaagacccagagaacttgttatcacttctttgatacattgctggaccgccttttcagcctggcccctgaactcccactgcactgcggaatgaattgttccgtcccctgagatgct

SEQ ID NO: 7075 - DNA, 397 bp, Homo sapiens
caccaaactttttcctgtcgagagccctaatacagagtaaaacttctgtgttcacagcagagatggttatgataatgggcatacatttcaccgtataattaagggctttatgactcagactggagatccaacaggtactgggatgggaggagaaagcatatggggaggagaatttgaagatgaatttcattcaacattacgacatgacaggccgtacacactcagcatggctaacgcgggatcaaatactaatggatcccattttttcgtaacggtagtaccaacgccttggcttgataataagcatactgtatttggacgagtgactataggaatggaaggtgtacagaggatctccatcgtctaagtcaatcccaaaatagataagccctatgag

SEQ ID NO: 7076 - DNA, 471 bp, Homo sapiens
  misc_feature (1)...(471): n = A,T,C or G
aggaggggngnttcccactgaatgccgactganagcctcgaannccccgnncgacccacgcgtccgggcacgcatctttgatcccagctacttgggaggctgaggtgggaagattgcttgagtgtggggacaggttgcagtgagccaagattgtgctaatgcactccagcccgggcgacagagtgagactgtctcaaaaaaaaaaaaaaaagggggggccgttttaaagaacccttgggggggccaaagtttacgcgggctggcaacgtaatagctttttccttatggggagccaaataataagctctctgggttttttgggaagggacccttctttcgggggggggacatactggacccatctacttacggagttctaaggctttagggaaaaaaaaaatcttttaggggtaaaaggcgtaaaactactgccttaccctccctgatggaaagtgtgcttgatatttgnat

SEQ ID NO: 7077 - DNA, 497 bp, Homo sapiens
  misc_feature (1)...(497): n = A,T,C or G
ggaagtggccgnagcgntttcccgtagagangcctgaatagagagccnctgaaancccgcgncgacccacgcgtccgggctggtctcgaactcctgacctcaggagatccaccttggcctccgaaagtgctgggattacaggcgtgagccaccagccaggccaagctattcttttaaagtaagcttcctgacgacatgaaataattgggggttttgttgcttagttacattaggctttgctatatccccaggccaaatagcatgtgacacaggacagccatagtatagtgtgtcactcgtggttggagtcctttcatgcttctgccctgtcaaaggtccctatttgaaatgtgttataatacaaacaaggaagcacattgtgtacaaaatacttatgtatttatgaatccatgaccaaattaaatatgaaaccttatataaaaaaaaaaaaaaaaaaaagggggggccgttttaaagaatccctcggggggcccaag

SEQ ID NO: 7078 - DNA, 398 bp, Homo sapiens
ctcccaaaagctagaacactgccaactgatctgttataggtcctttagaaacacataattagcacttaagggtgggtgctgctaattctttgcaaaaatccaaatattgttaagggaccagggagatgccactaccccttgattttccatctaaaaatatacatgtttatgtaaacaaatctttccatatccatagtgacttttcaagtatttaagcctaaagattttgatctcacatttttatacctgtttaaattgctcacagttattacatacacatcagccatcaactaaagttgtactttaaaaatttactacaatatgtacatttctaagtcaaacacttgtgacttttgctttaattccatgaatgttcctgcctccttgatatttgtatt

SEQ ID NO: 7079 - DNA, 469 bp, Homo sapiens
  misc_feature (1)...(469): n = A,T,C or G
aggaggggcgnttcccaatgaatgccgactgataggctggaanccccgncgacccacgcgtccggacattggtattctgggcaccttcctaatatgctttacaatctgcactttaactgacttaagtggcattagacatttgagagctaactatatttttataagactactatacaaactacagagtttatgatttaaggtacttaaagcttctatggttgacattgtatatataattttttaaaaaggctttctatatggggattttctatttatgtaggtaatattgttctatttgtatatattgagataatttatttaatatactttaaataaaggtgactgggaattgttactgttgtacttattctatcttccatttattatttatgtacaatttggcgtttgtattagctctactacagtaaatgactgtaaaattgtcaaaaaaaaaaaaaaaaaaaaaaag

SEQ ID NO: 7080 - DNA, 396 bp, Homo sapiens
atggtgaatatcttgatggcgaacactaagtttgatgcatttctgaagcaatctctcccatcttacgacgggcagaaggtcatggcggccattaaacagcagggaatagaagataatgatgaacttccctctgccaaaggccgcaaggtgttgaggagtctggtggtgtgtgagaacgggctgcccatcaaggaggggtatggctgctcctgtatctctgggcttcacatctaagacttctgacagaggcatcctgcttgtccatggccaggggtggctctggggtggacatatggatctggggtatcgctgagacctacttggggctgcattactaatagatgaatttgcaggatgtgttccccccaacccacatcccagggagaccaaatcctg

SEQ ID NO: 7081 - DNA, 413 bp, Homo sapiens
cagaaagaaacagaaaaacattaaacacagtgggaatatcacttttgatgagattgtcaacattgctcgacagatgcggcaccgatccttagccagagaactctctggaaccattaaagagatcctggggactgcccagtcagtgggctgtaatgttgatggccgccatcctcatgacatcatcgatgacatcaacagtggtgctgtggaatgcccagccagttaagcacaaaggaaaacatttcaataaaggatcatttgacaactggtgaagaagaaaaaaaaaaaaaaaaaaaaaaaaaaaaaaaaaaaaaaaaaaaaaagaggggggggggggttttaaaaaaaccctggggggggcccccattccgggggggacaaaaaaaaaaatttttttcctaaaggggggggag

SEQ ID NO: 7082 - DNA, 486 bp, Homo sapiens
  misc_feature (1)...(486): n = A,T,C or G
cgcccttcccaatgagacgtcctgnactagagaggtcatccaaancccgcgncgacccacgcgtncgctggtgtgtgatccaagttatacatgaatagaaaaagatggtgttaaatttgtgtgtaggctgagaattcttgctgaaggaaggggagaaaacctgttgctgcgaaattttacatgttccacatggaaagggaagtctaagcgctttttaaaacaatttttttttgtatttaattaagcacttgcagctatctgggatttttgggtcagaattttaaattctgtttgattctccatattccagggaataaaatacaaaagcattgtgtttttaagattgtgtcgatattcacctaaaaacttgtgccaaaagcacctggattggtaattatatttcacttaaagggtaaatttgacaatatcttgataatcaaaagtgcaatttttttcttcaaaatgttttctccagcatcacagatg

SEQ ID NO: 7083 - DNA, 398 bp, Homo sapiens
  misc_feature (1)...(398): n = A,T,C or G
aaaaaagaagattgcagtcatccattcatatgcatggggtctgatcgcaaatacactaaatgtggagtgtaggaaccaaaatgaaacctgctgtatggaaactactttcacttatggttcattggtttttgtaccaatattttttatgcacttcagtgcaagtcttgtcagttaaccttactttatgagtaagctaaataacccaaattacatttctttaaacctgttttactactatggcactttgataaaatggtcaggaaccaactttactggcaaaagggtccatgtaccaccatgtgctggagcatctgttctacatgtggatatctatgaatggtaatgttttccttcatgtaagtgcctattcagagtttcagaattttaaaatgccaaan

SEQ ID NO: 7084 - DNA, 395 bp, Homo sapiens
cgctcgtactcgtgcgcctcgcttcgctgttcctccgcaaccatgtctgacaaacccgatgtggctgagagcgagaaattcgataagtcgaaactgaagaagacagagacgcaagagaaaaatccactgccttccaaagaaacgattgaacaggagaagcaagcaggcgaatcgtaatgaggcgtgcgccgtcaatatgcactgtgcgttggacaagcattgccttattattttacttcttttagctgcttaactttgtaagatgcaaagaggttggatcaagtttaaatgactgtgctgcccctttcacatcaaagaactactgacaacgaaggccgcgcctgcctttccgatctggctatgtatctggctggcagggaaggagagaacttgca

SEQ ID NO: 7085 - DNA, 466 bp, Homo sapiens
  misc_feature (1)...(466): n = A,T,C or G
gtgcggnnnattacattgaacgtccggactgtcntctcgccagnnncnancaangcgngcgatatattttctctagcctggattttattttctaacagtgattcagactatttagtaaggtagtttttgtattaccatgatgtgtgtagatcacaagtctctttccaattaatatattttgcattcagaatgatgtatttcattcagaatgatgtagtacaccacatgtcaattgcataattatgacaacctaattaaatctagcccaaaaaaagttctaatatctgggatggaacagaaagaagaataaaaaatgggaataaattagtacattttcaaaagcttgagttgtctagatagacaccaatagagctttgaccaaagggagaaaataacctgtactttggttgaaattgagaaaaccttcaaggttttaaaatttgttaagcatctgctaaacatctgt

SEQ ID NO: 7086 - DNA, 411 bp, Homo sapiens
ctatggagtcctgctctgtgtggtccaggtcctttccaccctgagacttggctccaccactgatatcctcgtttggggaaaggcttggcacacagcaggctttcaagaagtgccagttgatcaatgaataaataaacgagcctatttctctttgcaaaaaaaaaaaaaaaaaaagggggggccgttttaaagaacccttggggggcccaaagttaacccgtgctggcaaggcaaaacttttttccttatggggagccgaataaaaacctacttgggaattttgggaaggaaccttttttttgggggggggacatattggaacaacctccctccaaaaattaaagcctttagggaaaaaaaaaaattttaaagggaaaaaggggtaaaccaacctgcataggctgggggttg

SEQ ID NO: 7087 - DNA, 418 bp, Homo sapiens
cgaaggaagggtttatgacctcttttgccttgttcatggtcatttggatcatcttttacactgccatccattatgactgatggtgtacagctcccaagtgctccctatccagtccaaaggaccctcttgattacagcacaggaacttgatcgttggggaaccccagccccttggaacttggaagacccgtgtttcctggaccgcgaatcagtgtgttgggcatcagtgttttctgcaagggttgtgacctgaaactttttaaaaaccacccacctttggggaagcatttctgaatttatccatcaccaaccatttcttcttggataccatcaagtaacagctattatttgccaagtggagctgtcatttaatttgatgcacctctggattcagatgaaacattaaattgtcttcctcg

SEQ ID NO: 7088 - DNA, 476 bp, Homo sapiens
  misc_feature (1)...(476): n = A,T,C or G
cgtgccggnnnattttatatggaaagcctagcgtactgancnccgatcggaaggnccgacccangcgtgcgntgactcagtgcactacaagctagacggtcttcttaaagcaccaacattacttgagtctttggataaaattgagaaaacagtctacaggtattgcggactctacaggaggcaggaggctgacaactggctgtaaagacaaagatgtcaggcctgcggcccggcactcaagtggaccctgagattgagctttttgtaaaggctggaagtgatggagagagtattggaaactgtcccttttgccaacgccttttcatgatcctctggcttaaaggagttaaatttaatgtgacaactgttgacatgaccagaaagcctgaagaactaaaggacttagccccaggtaccaatcctccgttcctggtgtataacaaggagttgaaaacagacttcattaaaattgaggg

SEQ ID NO: 7089 - DNA, 414 bp, Homo sapiens
ttttattattttcctttcttttagggggcacacagtatgatcaaaatcacattatcctcaacactgtcagcaaagagaagtttacacaagtgtgggaagccatggtcctatatacctgaacaaagaaggaagaagaatcttctggaggtccttccagccaccttatttcttaaaaaggacaatgctgatggaagaccagactggaaagtggatcgactcctccttcattgattctaaattcaaccttaaatcatgctgccatgactcagagaacttactcatcgtttcaaaagactatcatagctttaaaccaataatttgtcctcctttcatttcttgcctttcatttttggtagctgcttaaacaggttgcctaattagcagcttttgggtgattttgtaaaatgttatatc

SEQ ID NO: 7090 - DNA, 420 bp, Homo sapiens
cacggtcccccccagggggatgggcacagccacgccagatggacgagaagaccaagaaagcagaggaaatggccctgagcctcacccgagcagtggcgggcggggatgaacaggtggcaatgaagtgtgccatctggctggcagagcaacgggtgcccctgagtgtgcaactgaagcctgaggtctccccaacgcaggacatcagattcctcatggtgcaaaatggccattccagctccatccagccatcacatcacaggaggaagggaagaaagacacccctccacactcttctaaagagcatagctcaaaaattgtatacacttcttccgttaattcctgtggaccagaactgattcccacagctacagttcagcttgaggggagactgtatagccaagatattcagctagaattcag

SEQ ID NO: 7091 - DNA, 412 bp, Homo sapiens
  misc_feature (1)...(412): n = A,T,C or G
gaacacaagaagtgtttggttaatgaatgacgtacacatttaagatctgtttggacgcggaggataatcctgtgaattgctaatagttcactgggtttggcccttagtgttgacttcagtatgctgagacggaaaccaacacgcctagagctaaagcttgatgacattgaagagttagagaacattcgaaaggacctggagacccgtatgaaacagaaggaagatgtggaagttgtaggaggcagtgatggagaaggagccattgngcttagcagtgatcccaagagccgggaacaaatgatcaatgatcggattggttattaaccccaacccacgcccaataatcgttcatctcaatttggaagtcttgaattttagagatggattatcttgcatgccagagcgctggaat

SEQ ID NO: 7092 - DNA, 408 bp, Homo sapiens
cttttatgtcatcagttttaactgtttacttcatttaacagtttacatcattcaacagtttacttcattagacagtaggtggaaaaatagatgccagtctatgaaaatcttcccatctatatcaaaatacttttcaaggatatacttttcaaaacaaacgatttaaattttatgtttaaaatataaactttagatttaaactttatttaaatatctggttcctatgattttgacttcagtaagttcaaataaaatatattttgcaattcatttttacattataatttaaaaagaagaagcgataagtggagtcagtttcaatgctaggtggggaggttaatgatttttctggtgttgctgctaatgtggattaacaaataaaaacattcattgctttttaaaaaaaaa

SEQ ID NO: 7093 - DNA, 419 bp, Homo sapiens
cccacgcgtccggatgagcatagcatggttttgtttgtttttgctttcaattttctaatttggcatggatccatatgtatttactatcctttttctaatatattaatatatgctacatttgtatttgcattactataatactttgagttgaaaaagagtttcattgtggagagaaaaagcaaatggtatgccacaagatcactctgatttgagaaaagggaggaggggaagatagtctgaatggaaatctgaaatacggaatgttttagagaaatatgtcacttgcatatagaatgttttaattgaggtataaattaatgagacaaagtgaaaaagaaattatattcagataggactgcactacattatttgtcacacatggatctgttaccatcaggtcaattcctagtatgcataaa

SEQ ID NO: 7094 - DNA, 415 bp, Homo sapiens
agaaacttcaaagttaatgggatggtcggatctcacaggctgagaactcgttcacctccaagcatttcatgaaaaagctgcttcttattaatcatacaaactctcaccatgatgtgaagagtttcacaaatccttcaaaataaaaagtaatgacttagaaactgcaaaaaaaaaaaaaaaaaaaagggggggccgttttaaagaacccttggggggcccaaatttaacccgggcatgaaaggtaaaacttttttccttaaggggggccgattaaaaacctccttgggaattttggaaaggaacctttattttggggggggaacatattggaccaacctccctccaaaatttaaagcctttagggaaaaaaaaaatttttaaggggaaaagggggtaaaccaacctccataggctg

SEQ ID NO: 7095 - DNA, 418 bp, Homo sapiens
aagcttgaatgaaaattatgtgtttagaaggcgggaaagcaaagtattttttcttcaccctttatgcccagtctgtgaagttcactgcatggttactgcagcctattcatgacatagtgatgctagatattcttctgctttgctgagtggcctgtgaaaagagcttaacaccagtgtagcctggcatgaggaagtaaatgattggtataatattttggggaacaaatatgcagccgatgagtatttcagctctcccccacccattaagagacactgtccatggaaatatcccttcaaagaaaagacttagttactcatgcaagctcttcttggccagggcctgtgtgaggacttaattcactatatccaccactcaaccatgcctggaatagacgctcattaatgtttgttgatttag

SEQ ID NO: 7096 - DNA, 414 bp, Homo sapiens
ctacaaatgagattcaagggagagaacagtgaggaaagcccagagagggggcaggagactggccacaagccaggtgtgtacttccctttcttagtctgtaaatgacaggttgagctggcaggactccatggtcctcaccaactgacactcaaggactccattctgtattctgaggtccatttctatccaggcttgtcaggctgagtcagacaaaacttccttaccactttgtgtcaacaatttaaagtggttttaacatacttctatgatgtagtttgaggttttccctctctctcctacccatcaaagacttcattccactggtaccaaccacttggccaaactgatggctgctgaggtttaaaactgaatctctggcctggtgaagatatggcctttgagtaacttagacca

SEQ ID NO: 7097 - DNA, 420 bp, Homo sapiens
cccacgcgtccgcccacgcgtccgggagcgagactccatctcaataaaaaaaataaagtgaattttcctccatcttgtaagggcgaaaagccccctaccatgtctgaatgaacattcatgcatgggcttgggggcttgggaaaaagacagggcttggccacacagtgcaggtaggcccagtgatcctatgagaggggccaggaggtggtaggtcccctgtgggcaggaggtcaagtatgtggtattatacttgatgaaccaggggagagggcaccaagaacaacgatatttaattgtaaaatctccaccctctgaggatatgtttttaggtctggatgactaattagactgggaaacaaggcagggaaagatggccctgtgcttcctctgcctgctgcctttgtggatgcgtgggccgcc

SEQ ID NO: 7098 - DNA, 432 bp, Homo sapiens
  misc_feature (1)...(432): n = A,T,C or G
ctttgccaagccatcctggatgaaaccaaaggagattatgagaaaatcctggtggctctttgtggaggaaactaaacattcccttgatggtctcaagctatgatcagaagactttaattatatattttcatcctataagcttaaataggaaagtttcttcaacaggattacagtgtagctacctacatgctgaaaaatatagcctttaaatcatttttatattataactctgtataatagagataagtccattttttaaaaatgttttccccaaaccataaaaccctatacaagttgttctagtaacaatacatgagaaagatgtctatgtagctgaaaataaaatgacgtcccccgacanannaaaataaaaaaaaaaaataaaaaaaaaaaaaaaaaaaaaataaaaaggggggccccctttaaaaaccc

SEQ ID NO: 7099 - DNA, 416 bp, Homo sapiens
tagcgttcataagtctgctggccctgcgaccgcccgaaccggcgacacgcgtcgaccctttatgaaccctgctgctggcttcatacattccctactccggaaggtatggacaggaggaggtggcgacggacgggcccagcctatgcctcccgccaagtgcctgacatctggccctgattctggcatcctcatgaccattctgctcatcgtcataccagtgctgatcttccaggcctatggatagatcaggaggcatcactgaggccagactctgcccatgacctgtatcacgactccaacttcattcctcccctgccccggagccgagtcctgtatcaccctttatcctcacacgcttttctacaatggcattcaataagtgccgtgtttctggaaaaaaaaaaaaaaaaaaaaaa

SEQ ID NO: 7100 - DNA, 395 bp, Homo sapiens
ctactaaaaatacaaaaattagccgggcgtggtggcacgggcctgtagtctcagctactggggaggctgaggcaggagaatcacttgaacccgggaggcacagtttgcagtgagctgagattgcgtcattgcactccagcctgggcgacagagcaaggctccttttcaaaaaaaaaaaaaaaaaaaggggggctttttttttttggaaggggggtttccttttttgtgcctaaggggggggggaagggcccctttttttgttctttgcccccccccctttcgggtttaaaaaaataaaaaaggacggggccttttttaatttaaattaagggggggggtggaaaaatggtgggggctttgaacccccctttgttcccctttctggggaaacaaag

SEQ ID NO: 7101 - DNA, 462 bp, Homo sapiens
  misc_feature (1)...(462): n = A,T,C or G
ctcccttcggaatcaacttcggaacngtgatcgcccntcccgggncgccccacgcgtccgagcttgcaattcttattacatctttattatcagtcaaggtcacagncatattaaaaatatataatttaaggctcaaataatggctttgttcctctttttcctaaaggcctttgtcaaaagaagtcaaagttgaatatattttggagctgatatacatatgctgacagacagcacaatgttctgaaatgaaaacagagatattattgctttataaaaagaaacttggtcccagagaggagaaaaatagatagtacacaagagtgacataagaaaaaaagcaaagcattatcggagaattgtttccatttaagtgaaagcaggatctgtgatttttggctgactgctccaagtaccgtgtatctcctacatcagtgctttgaatgtattcttctataaatgcag

SEQ ID NO: 7102 - DNA, 388 bp, Homo sapiens
agaactacaagttgtataggctttattgtttattgctggcttatgaccttaataaagtgtaattatgtattaccagcagggtggtttttaactgtgactattgtataaaaacaaatcttgatatccagaagcacatgaagtttgcaactttccaccctgcccatttttgtaaaactgcagtcatcttggaccttttaaaacacaaattttaaactcaaccaagctgtgataagtggaatggttactgtttatactgtggtatgtttttgattacagcagataatgctttcttttccagtcgtctttgagaataaaggaaaaaaaatcttcagatgcaatggttttgtgtagcatcttgtctatcatgctttgtaaatactggagaagg

SEQ ID NO: 7103 - DNA, 439 bp, Homo sapiens
atctgaacttgaaatgtattaaaatgggtcaatattctcattcttttagatctcaggatgggaaaatgggtttgttcagatggatatggtaaatcttacccaattaaggaaggctaattttagagttcttctaatttgcttgtgtcaactcttaacttgtaaaactgctgttaactcggtttaaatttttaaattaatataatagaaagaacactaaaatacttactggtaactgcttagagccatttatctgatcctgtggattacagaatgcattccctcttctgctgtagcttatcattgctttgttttgtagctctgcatattttgcccaccttgtcttccctgtaagtttaagacgtttccaaggaaaagcttcagggctgatagtttcttagcaattcctattcttatgcccttactttaaaatagtcctttt

SEQ ID NO: 7104 - DNA, 506 bp, Homo sapiens
aactgaaccttggaccggcccgactgatggcctgagcacgcgcccggactatgtttacaggacggtttaaattaaggattatcatgcatgtgagatctttcagttatctttaaagtagatgtatattaagggcttagatttaggatctacatattctgggcattgaataggcagtaacttacaaataagttttgcttaccttttgttctagggactagcactgctatcaatggaaagtatttttaactaatctgttattaagaaagtcatatttttgcatttcagccaaaataaagaccgcctgtaataatctgttagaaacagataatacatgtctgaaatccatgtttcatatgatctaaactgtattttccaatttaaattaaaaatgtaatgtagattcagaaaggttcatatttttctaatgacttcattctatattattttggtaggttgcataaagaagcaaggaattgtacttgtattaaaagatgaagaaagctatt

SEQ ID NO: 7105 - DNA, 514 bp, Homo sapiens
  misc_feature (1)...(514): n = A,T,C or G
aaaataggaganccttcggnnaccgcccgaactgatggcctgagcacgcgcccgatcttcggcttcctcagtggcctgctgctggccttcgccttcctgccctacatcaccttcggcaccagcgacaagtaccgcaagcgggcactcatcctggtgtcactgctggcctttgccggcctcttcgccgccctcgtgctgtggctgtacatctaccccattaactggccctggatcgagcacctcacctgcttccccttcaccagccgcttctgcgagaagtatgagctggaccaggtgctgcactgaccgctgggccacacggctgcccctcagccctgctggaacagggtctgcctgcgagggctgccctctgcagagcgctctctgtgtgccagagagccagagacccaagacagggcccgggctctggacctgggtgcccccctgccaggcgaggctgactccgcgtgagatggttggttaaggcggngtttttctggggcgtgaggcctgn

SEQ ID NO: 7106 - DNA, 504 bp, Homo sapiens
  misc_feature (1)...(504): n = A,T,C or G
gcgtgataccggacccatgcaatttggngcgnagcacccgccncgnaannnccgggncgacccacgcgtgccgctttcagctaaagtgggagatctggatgtgtcatctacttctgtatgacnntattgcagagtgcccagtggaagacaggggatanatcgctgtaagccttctgcgtggggatanggaattctggtgcctcctgatcnatcgtgattctngggggtggcccttgattatcttcaccatcaaggccaacagcgaggcctgccgggacggccttcgggcagtgatggagtgtcgcaatgtcacccatctcctgcaacaagagctgaccgaagcccagaagggctttcaggatgtggaggcccaggccgccacctgcaaccacactgtgatggccctaatggcttccctggatgcagagaaggcccaaggacaaaagaaagtggaggagcttgagggagagatcactacattaaaccataagcttcaggacgcgt

SEQ ID NO: 7107 - DNA, 508 bp, Homo sapiens
  misc_feature (1)...(508): n = A,T,C or G
atatggaagcacttcgannnnccntatgtttcccctccgcacgcgcncgggcctatcatgtgcagnttgcgagtggagtccacgtgttctgtttctggctctctgctcttttgtgggacctcatctccttcctcatccccagggtgctgctgctggtggtgtttaaggccttccacgtgcgtgccttcacgcgggacggccacatggctgacaccctgctgctgctcctgctctacggctgggccatcatccccctcatgtacctgatgaacttcttcttcttgggggcggccactgcctacacgaggctgaccatcttcaacatcctgtcaggcatcgccaccttcctgatggtcaccatcatgcgcatcccagctgtaaaactggaagaactttccaaaaccctggatcacgtgttcctggtgctgcccaaccactgtctggggatggccgccagcagtttctacgagaactacgagactgcgaggttctgcacctcctccgatgt

SEQ ID NO: 7108 - DNA, 477 bp, Homo sapiens
  misc_feature (1)...(477): n = A,T,C or G
aggaggtgttaacggctgacnagcgtacaggaccngcnanggaannnccgggcgcgccagtcgggttctgcctcctcgtactgcgcctctttctcgggatccacgtcttcctggtcagctgcgcgctgccagacggcgggcttcgcagattcgtagtgcggaccatgtgtgcggtgctagggctcgcggcccggcaggaggactccggactccgggatcacagtgtcagggtcctcatttccaaccatgtgacacctttcgaccacaacatagtcaatttgcttaccacctgtagcacccctctactcaatagtccccccagctttgtgtgctggtctcggggcttcatggagatgaatgggcggngggagttggtggagtcactcaagagattctgtgcttccacgaggcttccccccactcctctgctgctattccctgaggaagaggccaccaatggccgggaggggctcctgc

SEQ ID NO: 7109 - DNA, 475 bp, Homo sapiens
  misc_feature (1)...(475): n = A,T,C or G
caattgggangctttcgatgagngctatcggaaccgcccccggaaacccggggcgacccacgcgtccgaaaacacgaggagtgtcacagcaatacactgcataatgtatagaaacagtcataggcagaggatatagggaggaaattatattattttcatagagagaatgactgatatcattacaggtaatacagataaaccttatgattaaagcattacagggaagctactatatatagaagctattcagcccatccaacataagaataataggtgcctctgacgtatagacctcaaaaatagaatgaagatatatttgaagatttaaggaaatttccttgagataaaatattgaagttgggattaaaagagcatgtcccaaaaaagaattgataccaaaagttttacactgggacatattggaaacaagctataaaacttcaaacatgaagaagtctttaggcctttatggaaa

SEQ ID NO: 7110 - DNA, 407 bp, Homo sapiens
cccacgcgtccggcctcacacaagcagaaacactcctgtggatggtattgtagcatgtattgtttatgttagtcaatagaccctctccttataaatggtgtttagtcttcctgttgcatttcatgggcctgggggtttcctagcagaggatattggagcccctttttgtgacattaccaattacatctttgtccacgtttaatactttgttttggaaaatttaaatgctgcagatttgtgtagagttctaataccaaagacagaagtaaatgttttccatatactttgtcttgcctgtatgcagcccttgtgtaatatggtgaattagagtgggatttcactttgtattattttgtaaatatgtcaatataataaatagtgactaaattgaaaaaaaaaaaaaaaag

SEQ ID NO: 7111 - DNA, 405 bp, Homo sapiens
aaatactcttttattaataacaggtgttttcaaagcttaaatatatttcaaaaaccaatgacagttaaaggaggggttctaaatatatttaagctttgaaaacacctgttattaatgaaatactcttttattttggatattatgattgcagtatatggatcaagatcactagtgacaattgaaaaaaactattggaataatagcacttgtataaaattcagttttggaactaaacagcaaatttctagaattttgctgaaaatgttttaaaatgctattctcatccagccatattagtcttctggcttttctttagcttcatcaaataagcatgttgtgataatgatagatgtacaattccaacaaggttattattttttaaatacattgtcattctgaacattt

SEQ ID NO: 7112 - DNA, 474 bp, Homo sapiens
  misc_feature (1)...(474): n = A,T,C or G
ggacgagngnttcccaatgaatgccgctganngtctggcanccccgncgaccacgcgtccgcaaaggtgctgcttttacagggaagcttattctgttttaaacattgaaaagttgtgggctgatcacttaatgttgtatgtagcagtgtatgctctcatatacaattactgacctatgctctaaaacatgaatgctttgttacagacccaagctgtccatttctgtgatgggttttgaataaagcatttcctgtcttaaaaaaacaaaaaatataagaataacacaaaattactgttaaaccgcctgcccccaaagcaaaatctctgagttaagatatcttctgaacaaaaaatgaaaaccgacgccggaaagnnnaatgggannngagacctttcttgcccttaatggttttacaaagaacgtgtctcactaagaactaggacactcatcggcccgagaccaacttctaaatn

SEQ ID NO: 7113 - DNA, 401 bp, Homo sapiens
  misc_feature (1)...(401): n = A,T,C or G
cggacgcgtggggtttttacaaagaacgtgtctcactaggaactaggacactcatcggcccgagaccaacggctggacgtgctgggcagcatgggctcccaaggcagcatccccagctgctctcccaccccaccccagctgcccggcggctgggcccacgagggctctggggacacttccataggaaaggggcctggcactttgtgattgccacgtgtttcctgttaagccgcctgcccccagtgcaaatctctgtgttttgctctctcctgaacaaaaatgtaaaccgacgccggaaagcaaatggtatcgaatacctttcttgcccataagggtttttacaaagaacgtgtctcactaggaactaggacactcatcggcccgagaccaactcctggatn

SEQ ID NO: 7114 - DNA, 392 bp, Homo sapiens
ctcatttgagttttcaaaaccttgcgaaatggtcaggaattatcaccttaatcgtcaggaattaccaccttgattatacatatgaaatctgtggttcagtcaagcatctgatgtgattagtcagttgcagaggtgattgattcttgctagttattctaaccgtatgctctatcccagaaaatgtttgaaggtttagtaaaacagttttaagttgtctaaccttaaagccaatacatattttagaaattatgaagtccactgtacagatcaagaaactggtacttaggaggactaaacagcttagcttagctgttgttgtgacataaccatgaccagagccagactgctcataaaatggctttttcagttatttcaaaattgtcaatatagtg

SEQ ID NO: 7115 - DNA, 469 bp, Homo sapiens
  misc_feature (1)...(469): n = A,T,C or G
gggcgagnggttccccctgaatgccgctganngtcctggcannccccggncgacccacgcgtccgcggacgcgtgggcaactactaaactgggggatattatgaagggccttgagcatctggattctgcctaataaaaaacatttattttcattgcaaaaaaaaaaaaaaaaaggggcgcccgttttaaagaacccctggggggccccaacctaacccgggcgggcaacgaaatagctttctccttatagggggccgttttaaaacctacctgggaaccttgggaaagaacccttcctttgggggggggacaaatggggccaacctccctacaaaaatttaaggctttagggaaaaaaaaaacttttaaggggaaaagggggtaaaacaacctccatatcctcgctgcttaaaaatttgncnncccccnncaaccacccaatccttttggggcgaaacaaccccccctt

SEQ ID NO: 7116 - DNA, 482 bp, Homo sapiens
  misc_feature (1)...(482): n = A,T,C or G
gatgcgggggccttgcacagtagtctggaagntctgcaaannnccgaaacccagcggcgactggtctgcgccaggcgaacgggtcctgcgcctcctgcagtcccagctctccaccgccgcgtgcgcctgcagacgctgcgctcgctgcctgctctcctggcaggcgctgccttttctccccgttaaagggcacttgggctgaaggatcgctttgagatctgaggaacccgcagcgctttgagggacctgaagctgcccttcttccgcttcctttgggttcagcttgaacgggaggctcttgatccctttttttcagaatggattatttgctcatgactttctctctgctgcttgnggcttgccaaggagctccagaaacagcagtcttaggcgctgagctcagcgcggtgggtgagaacggcggggagaaacccactcccagtccaccctggcggctccgccggtccaagcgctgctcctgt

SEQ ID NO: 7117 - DNA, 476 bp, Homo sapiens
  misc_feature (1)...(476): n = A,T,C or G
cgtgcgggggggatttcaattgacnccctgaggacttgtcancgatcgcccgggncgacccacgcgtccgcccacgcgtccggaagcctctggtgggaaaaaaggcagcagctaccaagaaaccagcccctgaaaagaagcctgcagagaagaaacctactacagaggagaagaagcctgctgcataaactcttaaatttgattattccataaagggcaaatcattttggacagcttcttttgaataaagacctgattatacaggcagtgagaaccatgagaaaaaaacctacccaaaaaaagcccacaacaaaaaaaaaaaaaaaaagaagatggggggggggggcttaaaaagactttctggggggcccacattttgggggggggggggaaaaaatttttttttttttttggggggcggtaaaaaaccccttcggggttttttgggaaagaaccctttttttggggggggaaat

SEQ ID NO: 7118 - DNA, 389 bp, Homo sapiens
  misc_feature (1)...(389): n = A,T,C or G
caaagcccttgtgggcggacctcccctgagcctgtctgaggggccagcccttagtgcattcaggctaaggcccctgggcagggatgccacccctgctccttcggaggacgtgccctcacccctcactggtccactggcttgagactcaccccgtctgcccagtaaaagcctttctgcngctganngaagggacaaacaaaaaaaaaaaaaaacaaaagaaactaaaaaaaaaaaaccacccttaatccttttaaagaaaaggggggggcccctcactaaaaaaatgcctcggggagccccccccatctgcccggtggaaaacattttttttttttttttggggagggatttaaaaaaacaccctgggggatttgggaaaaaaaacttcn

SEQ ID NO: 7119 - DNA, 458 bp, Homo sapiens
  misc_feature (1)...(458): n = A,T,C or G
ggcgggggattcattgaagctgcggactgacagtcatcgcagnncgaccacgcgtgcgcgcatgactggcagtggcatcaacgatggcggctgcgtcggggtcggttctgcagcgctgtatcgtgtcgccggcagggaggcgtagcgcctctctgatcttcctgcatggctcaggtgattctggacaaggattaacaatgtggatcaagcaggttttaaatcaagatttaacattccaacacataaaaattatttatccaacagctcctcccagttacactgttggaccaagttttgccagatcatatactcctatgaaaggaggaatctccaatgtatggtttgacagatttaaaataaccaatgactgcccagaacaccttgaatcaattgatgtcatgtgtcaagtgcttactgatttgattgatgaagaagtaaaaagtggcatcaagaataan

SEQ ID NO: 7120 - DNA, 418 bp, Homo sapiens
cggacgcgtgggttttgagtcccattgttctaaatttacactcagatctgaagctgttcactgtgcatatataggcgtgatttcatggtgtcaaagataagagacatctggcaggcagattacaaacaaagtgggttgctgggtttcagaactgaaggcagggacctctgggctacttaaatctacttaaattcagtgctgccaattctgtcccttcttccttggtgttgtcatgtcactgataacctgccagggtcaaccatcttaccacccagtaggaaagccaagcgtggggtgtgtgtgcacagtgcatgccgtgccaggttgggagcagaatgttctcgatgacagatcgagcctggtcgcagcaccgcctgcacaaagtgggttttggtcatcagaggctgtggtcgaccac

SEQ ID NO: 7121 - DNA, 413 bp, Homo sapiens
aacaaagagaaaatttaaaaataaacaagaacataattacaatagagaatgttaataccaagtaagaccctacaggttctgctgattctcccactgagtggcagggcccaggccatcattaggggaggatttattttgaaagtgtcatcttaaactgcaaggatgtctgtcagatatcacaattaaacatgccaaaggagaaatcatattgtcaaaatgcccacttaacccactgaaacgtctcaaactcaccccttgctgaccttctataaccccattgtttaagttttttttttctttttttaaacaagagaaaatagacagatccatgttggtatatgctaactgtccatattcacatagagacacagtgtgctctctgatcccaatatacagagaaaggaggaaaaaat

SEQ ID NO: 7122 - DNA, 414 bp, Homo sapiens
tatttcttttcatcgctttgttttaaggtttttgtggaatatttttcatcatttctatttagagggtcccgttttcttcacttaacatcaataccctaagcatttcttcctgttgctaagttcacgtgcaccccttccctaactgcataatactgggtcatatgggggtatcataattgacataaccaatgcccaaatatggaacatttagattgctctctctcttcaatttttcattttagactgcattaccatctactttcccgagcacggacttttgttcctgttccagattgtttctctaggatcaattcctagaagtggattgcttgattctcagggtgatacatatgccaaatagtataccagagtattgaaggtacttgtttctaggaatcccactttgacatatcg

SEQ ID NO: 7123 - DNA, 411 bp, Homo sapiens
tagaaaacccaaattatgctttaacaagccgtttttgttaaattgaagtgcttactactgtggccgaggcgtggtcttctttatattctcagggctccgggacgcccctgcagagaattggaagtatgtcctcagtgacctctaacaaggagacagacccacctacacctttaactcgaagtaacactgcaaatcgtttaatgaaaacactctcaaaactgaatttatgtgttgataaaacagagaaaggagaaagtagccgtccttctccatcagctgagaaaggaaagattctaaatgtttcaatgattgaagaacgtggcaataaatacgatcaaaagtctcacaaaaaaaaaaaaatggggagcctgttcagaagattccttgggggccacaagctttctcctcgct

SEQ ID NO: 7124 - DNA, 481 bp, Homo sapiens
  misc_feature (1)...(481): n = A,T,C or G
gccagcaagcngggggnttttnaactgaagccancgaaatctcccgnaccgccgggcgacccacgcgtgcgacttgaagaacacttttatcattctcacaattacgttttttatacagcctggaatttttaagncattatgaggctatttggcgctccaacagagagatcctgcagtatatattatcttgttttctataattcccaactgtgtgccatcctgtgccaccttatggtgctgttatatatacatatgaggttcatgtggcatatgtcccatcttcccaactgggctgaaagctccttgacatcagaggatccataaatgcatctttacatctcccatggtgctttgtatcaaataagcatgagaaaggggataatattcagggtctctgaatatttaacccttcaaaagaaaaaaaaactagttttaaaagacatgagatgcttggatattattttaaggattaaattggttg

SEQ ID NO: 7125 - DNA, 410 bp, Homo sapiens
tgggagattggcttcggggcgtctaccgctttgccactgataggaatgacttccggaggaacttgatactaaatttgggactctttgctgcgggagtttggctggccaggaacttgagtgacattgacctcatggcacctcagccaggggtgtagccaagtagacaaatggaatcctgtgctgaacccgaatcttccaaaaaacagcctacaatctgtgaccaccacaagatgtgccctgatggcagctgaagtttgattcagatgggcacttttcttccccttccctgcctagtttccttttgttccttgagtccacgcagaattccattctctggtcagcagacaggcttaagctaaagtattgcctctattctagaaagttctgtacatagttcccaagcttctgca

SEQ ID NO: 7126 - DNA, 510 bp, Homo sapiens
  misc_feature (1)...(510): n = A,T,C or G
ataaagataggcgtcgnaccggcncgtacatanggtctacgcacgcgcccggnttttctcctctgttttttccccatctttgtggttttatctatctttggtctttgatgattgtgacatacacatgggtttttggtgttcttaccacctcttaatacctactattattacaactcttagtgaaaattagatagttatcaggtcaaaggaaactattagtttaccattgtaaacgaattggtaaaccattagtttaccaatttggggaaggaggtaagtagaggatagaaaatgagagagaatttgggcttataatgggatggggtaggtgagtcatttaggttgggccttaaattcatgatgtgccttaaatttaggttnttgcctctaatcccagctacttgggagcctgaggcaggagaatcacttgaacccaggaggcggaggttgcagtgagcccaaaccacgccactgtactccagcctgggtnagagagtgagactccttctg

SEQ ID NO: 7127 - DNA, 415 bp, Homo sapiens
agtacctcaccagggagcattccagtatcatgcagggtcctgtgatctagccaggagcagccattaacctagtgagtaatatgggagacattaccatatggaggatggatgcttcactttggcaagcacctcagttacacattcgccttttctaggattgcatttcccaagtgctattgcaataacagttgatactcattttaggtaccaaaccttttgagttcaactgatcaaaccaaaggaaaagtgttgctagagaaaattagggaaaaggtgaaaaagaaaaaatggtagtaattgagcagaaaaaaattaatttatatatgtattgattggcaaccagatttatctaagtagaactgaattggctaggaaaaaagaaaaactgcatgttaatcattttcctaagctgtcc

SEQ ID NO: 7128 - DNA, 410 bp, Homo sapiens
attctacaacatggttgagcctagaaaacatgctaagtgaaagaagccagacacaaaagaccaatgtatgactccactgatgtgaaatctccagaatggaccaatccctacagaggggagcagatcagtggctgcccagagcttggaggaggggaatagggagtcactccttcctgggcaccaggtttcggtttggggtgatgaaatgttctataaccagacagtggtgatggttgcataacattgtaaatatgcttaatgccactggattgcacaatttaaaatggttatgatggtaaattttatgttatgtgtgttttaccacgtacacacataaaacttattttgtgccattaaaaagaaaaagctctatgaagcacctctattaaaaaaaaaaaaaaaaaaaaagg

SEQ ID NO: 7129 - DNA, 481 bp, Homo sapiens
  misc_feature (1)...(481): n = A,T,C or G
ggagccagggccttgaacttagngcaacgtggtctngccaanncccgggnnganccacgcgtccgtttttctttcttttacagaaaatgcttggacagaagagatgagtactatttccactaaggcctataattgcggtactgtgcgaatagtcctgatgaggcaatatacgaatggcccaaggaagccaccaaattgattttcaggttttacatgacctgcgacaaaaattccctgaagtacctgaagttgttgtatccaggtgcatgttacaggtcagtgttcaatgatttctgaatttgttaatacaaacctggtatttttttaaacattggaagaaaaactcttttaggttatcttcttgttggtggtagcgtattatgatgaaaagagataagctttggtgtctgatagtcatgtggcctttggcaagatggagctttctgtacccatctgtagtatggataatacttgacttgta

SEQ ID NO: 7130 - DNA, 428 bp, Homo sapiens
  misc_feature (1)...(428): n = A,T,C or G
ccccggtaccctcgctcctcgatcgaggacgacttcaactatggcagcagcgtggcctccgccaccgtgcacatccgaatgggctttctgagaaaagtctacagcattctttctctgcaggttctcttaactacagtgacttcaacagcttttttatactttgagtctgtacggacatttgtacatgagagacctgccttaattttgctgtttgccctcggatctctgggtttgatttttgcgttgactttaaacagacataagtatccccttaacctgtacctactttttggatttacgctgttggaagctctgactgtggcagttgttgatactttctatgatgcatatattattctgcaagctctcatactgactactacagtattttttgggttgactgagtatactctacaatctaagaaggn

SEQ ID NO: 7131 - DNA, 481 bp, Homo sapiens
  misc_feature (1)...(481): n = A,T,C or G
atgtatgacngctcgagcgtgctnggaanncncggnncgacccacgcgtncgcactatctaatggaaatgaccaaatagcattcttagacttctgtattattaatataattgatatttaaattaatggcttgttgagcatatgtgtactttcatatttgaatataaaatgtacattataacctgtatggcattttatttaaaggagataaacagccaaatagcaaataggtcactgaatgataagatttgcaccttataacaataatcattttaaggataacaagtaaatgtctgaaagcatgaggggctttatttgcctttacctcatatgagtctttgatcttgaaccgatacttttggatctcattgttgatatacctgaatttactttgtaagagattttaacttcacttcatgctgatgatgtatcaaattcattttatagaaagatttaaagtttttttctggaagtgatatatg

SEQ ID NO: 7132 - DNA, 420 bp, Homo sapiens
  misc_feature (1)...(420): n = A,T,C or G
cccacgcgtccggcatttagttgaagagttaagcattcagttccattaggttttcacatgtgttaatctcatttacagcattgaattgcggcagtaacattttcctttctgtgaagttctaaatttagttatgacctatttagcaatgcctttgaaaagggatattgtatccatggtaaattaattgtatacctaaacagagatagctcatctttgcctatcaggcttgtaattgacatctagtagacttctgcacatgtaaaattgaattcaaataaaatcatacacactttctagttcttaaaanngaaaggngaaaaggccaagaaaacaaataaacttacataaaaannggggggggggggcgtttaaatataattgctggggggccacaaatatatggggaagagcaaaatattc

SEQ ID NO: 7133 - DNA, 411 bp, Homo sapiens
  misc_feature (1)...(411): n = A,T,C or G
agagtctctgcttcagcgatatctagtttgtacagttgggtgatcttttgtaattcctaggaggtaatgcattgttaatgttttctgaagctttgtaagtgtgagagagggacaagaagtgcagttctgttctggaattccttattgctttcaacggacactctttgtgaaaaatccaagtaatattttagttcaaacttgatcttgagccaaggcccactgccacctctgggatgggagtcggacctacataccaagtgacaagttcaccttaacatctgcttccagaatggctttgattcagccatgccaggcaacagaacagggtcagactcctgctctgttattggcttgaagactangatccccaagggggtggaggcagggaatatttgaaaattcagactggaa

SEQ ID NO: 7134 - DNA, 470 bp, Homo sapiens
  misc_feature (1)...(470): n = A,T,C or G
gcgggtttccttaagcgctcgtacaacnnncgaattnngggtcgacccacgcgtccgcactgcacccagcggattaagtcttaacgtatgagtttttggtagaaactcaaacattcggacaatagcagggagaatacaaaaccacagtgagctaccgcttcagacaccagagaagtttaagtgaaaaagactggcaataccaagtgctgatgaggatatggagcaaccagaactctcaggacattgctgatgggaatctaaattagtataaccaccacgaaagcatccgtaaggtttaattgtgttgaacacaccctgccctctgaccaagcatttccactcctgggcatacaggcaaaagaaatgcatccacgtgttcatcaaaagatgtaacctgtgccgggtgaggtggttcatgcctgtaatcccagcacatcnggaggccgatgagggatgattgctttggcccc

SEQ ID NO: 7135 - DNA, 407 bp, Homo sapiens
  misc_feature (1)...(407): n = A,T,C or G
gtgtcggatacaggtcatgagtccttcctgttctataaagaaggcatttattttgagccagactgtagcagtgaagacatggatcatggtgtgctggtggttggctacggatttgaaagcacagaatcagataacaataaatattggctggtgaagaacagctggggtgaagaatggggccacctatcacaccccatccttnnnaaaaaaaataaaaaaaaaaaaataaaaaaaaattancaccttttttaattttggtgtttgtgtggtttattgattatagaaaaaaataaaaagggcggtttgaattcctcccgccttgaaaaaaaaaaaaaaaaaaagggcgcccccctcctactaacaagaaaaaaaaaaaattctttttggggtagaaaagaagaacaaaa

SEQ ID NO: 7136 - DNA, 413 bp, Homo sapiens
  misc_feature (1)...(413): n = A,T,C or G
accttgtctagttatttataaaactgtatgtacctccctcacttctctcctatcactgctttcctactctccttttatctcactctagtccaggtgccaagaatttcccttctaccctctattctcttgtgtctgtaagttacaaagtcaggaaaagtcttggctggacccctttcctgctgggtggatgcagtggtccaggactggggtctgggcccaggtttgagggagaaggttgcagagcacttcccacctctctgaatagtgtgtatgtgttggcttattgattctgtaaataagtaaaatgacaatatgaatcctcaaaccatgatnaaaaaannnnnnnaaaaaaaaaaatnaaaaaaaaaaattaaaaaaaaaaaaaggggggggcccttttttaaattcccccg

SEQ ID NO: 7137 - DNA, 477 bp, Homo sapiens
  misc_feature (1)...(477): n = A,T,C or G
ttagttctgagntcgtcggaactgcnactgaatntcgtgtcgaaccacgcgggcggtaaggatgaccttctgcgtgtattaataaataggagactacatggagggggttctaattatgatgaataatgtatgtaaaaagccattgggagcatctgataaaactttctgtaacattacttttacaattttaaaacacatacacattcctaatctgtaactgaaaattactttcctaatagatgatgctaatgatttccatactccgtcacagtttacaaaggaatatacttatagtcttaccagtctgctataaagcaggcttgggtttgaattgttaaaagggtcctcatgcaaatgtcttttatattccatgacatactatgatgattcttcttttcttggcattttttttccttgtcccatggggacctgttaatattggaaaggaatttcacaaggaacttaatgcggaagcta

SEQ ID NO: 7138 - DNA, 400 bp, Homo sapiens
  misc_feature (1)...(400): n = A,T,C or G
agattattcaacacctctcacatcttacagatctataaggtcacatgcttttaaaatagtagcaagttaaacttcactcttgaattctttacaatctaagtcaaactaagttataatttaggattgtctttaaacagccattcagaaacaaaactgtagaactgtgtatttgattgggaatggtgcttttgccaacttaaaaggattaaagtaacggagatatacacaaattttaaaattatgtgtgatcacaagactaaagataattaaaaagaaaaccacagatcatgannaaaaaaaaaaaaaaaaaaaaattattaaatannaannnnntttttttttttttttttttttttttnnnnnnntttnnnnnnnntnttnnttcttggccttcttttcg

SEQ ID NO: 7139 - DNA, 417 bp, Homo sapiens
ataaagtaatgtgagtaagacggaaaaatacaaaacgcttatggcttcttttgttttccagtgttctggacttggtgcctctttctgttatatgctttcctatttagttgggagaccagttgtatacaaatacctaacagagaaagcagtaaaatggtcacagcaggttgaacgtcatagagaacatctcattaactacattatatttttgagaataacaccatttctgcctaattggtttattaatatcacatctcctgtgataaacgtgccattgaaagtttttttattggtacttttctaggtgtcgcacctccttcttttgtagccattaaggcaggaacaacactgtatcaacttacaacagcaggagaagctgtttcctggaactcaatatttattctgatgatcttggct

SEQ ID NO: 7140 - DNA, 410 bp, Homo sapiens
aactaagagaggggtgagaactatatcgttgagtggtctttaaacagcaaatgaagaggctgggcacagtggcttatgcctataatcccagcagtttgggaggccatggcagaatgatctcttaaagctagaagtttgagaccagcctgggcaactaagtgagagcccatctctacaaaaaattgaaaaataaaatcagccagcatgctggtacacacctgtagtagtcccagctactcaggaggctgaggcaggacgatcattggaacccaggagtttgaggctgcagtgagtgaaagagtgagaccccatccctaaaatacacacacacacacacacacacaccccaagtaaaatttcagctggaatataaatcgtgggtattatactgatttatggagagaattatg

SEQ ID NO: 7141 - DNA, 409 bp, Homo sapiens
cccacgcgtccggcttcccaacttcacctctcctccctccaacacactcaccaacactctgaaatggaggaataccagtacactggtgctggtccataggaaactgagaatccattcatactaacaagagaaacactgccttattttcttgctatcttcctacttatatttctcacaagactattatatttacttctgccttttatccaataaatggctcatgcaacagtagcctaattaaaacaagacagattctttaattgccagcacaaagcacgtctgaagatctagttagagtaccatatgatggccttcccttcattgttaagaggtagaactgagctgtgacactgtaataaataaataaataacagtggtccaaggaagagttacaaatttttataaggat

SEQ ID NO: 7142 - DNA, 422 bp, Homo sapiens
  misc_feature (1)...(422): n = A,T,C or G
gattcccgatccagagacaatggccccgatgggatggagcccgaaggcgtcatcgagagtaactggaatgagattgttgacagctttgatgacatgaacctctcggagtcccttctccgtggcatctacgcctatggttttgagaagccctctgccatccagcagcgagccattctaccttgtatcaagggttatgatgtgattgctcaagcccaatctgggactgggaaaacggccacatttgccatatcgattctgcagcagattgaattagatctaaaagccacccaggccttggtcctagcacccactcgagaattggctcagcagatacagaaggtggtcatggcactaggagactacatgggcgcctcctgtcacgcctgtatcgggggcaccaacgtgcgtgctgaggtgcaaan

SEQ ID NO: 7143 - DNA, 429 bp, Homo sapiens
aaaatggctccgtattcagcagtgagactctaccaccatttccaccaccaaatgaaattaatcctgctcttcttgcattgtatgtggaggaagaggaggatgatgactgtggagaagatacaactgaggaagctcaaaggcgtcgactggatgaaatcagtgaccatgctaaagttctgacaactcagttgatgattttggaaagaacaattgaggagagggtgaatatcctctttgattttgttaagaaaaagaaagaagagggtgtcattgcttcatctgacaaagaaatcgttgctgaagcactatagactggatgtaaaagccatgggccctcttgttctaactgatggtctttttaatgagaagattagagaacagattaatatatacaggcgccattttctacgattttgtcacaacaacaaa

SEQ ID NO: 7144 - DNA, 425 bp, Homo sapiens
  misc_feature (1)...(425): n = A,T,C or G
gctgcacttgctgacactgcagctgcgacgcggctaataggcgcagagcgaggagtcgggatttggtcgcgagcggcgacgagcatttgtgcagaatgtcatcagatgaggagaaatactcacttccagttgtgcaaaatgactccagtcgaggcagttctgtctcttcgaatcttcaggaagaatatgaagaactgcttcattatgctatagtgactccaaatattgaaccctgtgcttcacagtcatctcatcctaagggagaattggtgccagatgtcagaatttctacaattcatgattatgaagccaaagttgctatgttatctggagctttggaaaatgcaaaagctgagattcaaagaatgcaacatgaaaaagagcactttgaagattccatgaanaaagctttcatgaggggtgtg

SEQ ID NO: 7145 - DNA, 424 bp, Homo sapiens
  misc_feature (1)...(424): n = A,T,C or G
gcgattgaggccctgcctaatcaatgtttgttatcaaggcagttaaaatagattttgtggcttttttgtttttccccctcatctgaccagcttttagccaaagtccctcatagctgttctggcactggataaatgtctgagatagatgtacgaactgtagaaactgtgtcttctttttctcacaactgtttattcctataagaaaaagagaaggacatataaagtttgcttttgagttcagtttgggcaatacctttgggatatgttcattatgtaatttagggagtcattcctgggactaggtgacgacaagctaatgttgacagctgacaaaaggggtatggtacaatgtgtgggcccaaggacctgagcagtagaccaagggattctagagatctccaggcctgacttgaaagagcatacn

SEQ ID NO: 7146 - DNA, 231 bp, Homo sapiens; identical to SEQ ID NO: 6419

SEQ ID NO: 7147 - DNA, 423 bp, Homo sapiens
  misc_feature (1)...(423): n = A,T,C or G
atcgaatggctttttgcagctaactactatgtgtagacaggttttatattataaagtatgcattcttatcacctagtatatagttagtttgtagagtgatttccccccagtttcttgaacatggtatcttcacatcttggaccttggtcagttgtgctattcattattaaacactaaaactttggcggttcttgcnnaaaaaaaaaaaaaaaaaaaaaaaaaaaaaaaaaaaaaaaaaaaaaaaaaaaaaaaaaaaaaaaaaaaaaaaaaaaaaaaaaaaaaaaaaaaaaaaaaaaaaaaaaaaaaaaaaaaaaaaataaannnnnnnnccttttttttttttttttttnnnnnnnnnnanaattttttttttttaaaaaaatttttttttttttttttgaggaaaaaaaaaaaaattctttg

SEQ ID NO: 7148 - DNA, 425 bp, Homo sapiens
gcagtttttaattgaagagatgacaggcaccagctctgattcctctgtgttgctgttttactgcctgccctggtcctgatccctgtcattccagacgccacccagctctattaatgacagggatcaggaccagggcagggtggcgtctggaatgaatcagagcttctttgatgaaatggcatactccccatcatcaggccgaggtggaggaactgtgagtgccgtcctgatcaaagtccgaggggaaacatgcctcaggccttcactaagatggtctaggagactggcatgcacttttgcatttaacacagaaggcaaacgccactttcaggcagatggctcctgcctttatttatttatttatttattttgagaacagagcaaaaccctatctcaaaaaataaaaggcttcactaaaaaaagcg

SEQ ID NO: 7149 - DNA, 480 bp, Homo sapiens
  misc_feature (1)...(480): n = A,T,C or G
nttttataccgacnctctcggaccgcctacgtgtgtcgtctcgacccacgcgtccgaccacgcgtacaatgaaagcaatgtattgcaggctgggtagctggtagaaatgttgtgggcgattgtaagtggaagatttacgccattatgaccctaatatattcctgcagagtaacaacacagcctatctaatatacaatgatggagtccctaaacctgtgaattacagcagaaagtatggacacaccaaaggtttactgctgtggaacagagttcaagggttctggctgattcattccatccctcagtttcctccaattccggaagaaggctatgattatccacccacagggagacgaaatggacaaagtggcatctgcataactttcaagtacaaccagtatgaggcaatagattctcagctcttggtctgcaaccccaacgtctatagctgctccatcccaggcacctttcaccaggagg

SEQ ID NO: 7150 - DNA, 477 bp, Homo sapiens
  misc_feature (1)...(477): n = A,T,C or G
attgaacgccttctgaacagtgatggtcttcccggncgacccacgcgtccgctatcatctattgtgaattatttttgtatatgctatgacttatgggtcaagcttcaggtttttctcatgtggtatatccagttaggtaaacaccatcaattcaaaaggctatcctttcctcagcaaattgcagtggtgtctttgatataaatatacaatacatatatacacacacacacacacacacacacacacacacacaatgtgtatctgtatatacaatcaggtgattgtatatatgccgttttgttgggagaattaagcttcatttacatatttgtctttttgtcttcccttatatcaatactatttcacctcacttactaaagctttatagtaagtcttcaaattaggtggtataattcttccaactttgttgttgctaatatatattgaaggcactgatgtctctgagctggatctttg

SEQ ID NO: 7151 - DNA, 413 bp, Homo sapiens
cggaaggaccttcacacgacctgaggaatgcccgggagaggctaagcctcatgctacaatgcttctggggtcggccatgaggatgtacacaaacacccactaccttactactgacacttcatttcactccttttggaaatgtccaatttaaaaatcaagcacgcctttttagtgagaaaaaatctgagctcttatgtagaaaacacaatctgtaccacgacaaaatgccagggcttgatggaagagctgagtaaccctttctatgccaaacccaggaaatttggggggcacagaggaggctctcacaatccaaggtgtatctttgctgtataccaaactgaaaccactgcgaataatttatgaaacataaaaagattctgtgcttcactccaaagtacatttgcttactgacg

SEQ ID NO: 7152 - DNA, 429 bp, Homo sapiens
tgagaataaagtggctgttatcaggtcgtgtgtatgcataagtcatggggaaccacaggaagtagctgggaaagagagaacaacagatacagggaagaaagtggagaagccgggaatgagaaagagcgatcacctctagcatttcctgtatgccaagtgctgcactaagtccctaagtcctttacattaaattaccttatttatttctcatagcaatcttatgacatggatgctatgattatcctcattttacagataagaaaccaaggcataaacatagtgtgcccaaaatgactcttgggaaagccatgatgtatactaaatagactggctccctatttagttttttttttttttagttttataagggctggcttgtagccaccatgaattaccacctttcaaaggggagatgagaatcgacccctt

SEQ ID NO: 7153 - DNA, 425 bp, Homo sapiens
agaagaacacgaagaggcacatcacactgcttatcttgtgttctccccaagcaagagctttgtccaccttgagcccatgtctcatgaactaccctgtggccatactcagacagtccaggcacattatattctaaatggaggcaccctgctggggctgaagaagctctccttctattatctgataatggcaaagggaggcattgtccgaactgggactcatggactgcttgtgaagcaggaagacatgaagggccatttttccatctcaatccctgtgaagtcagacattgctcctgtcgctcggttgctcatctatgctgttttacctaccggggacgtgattggggattctgcaaaatatgatgttgaaaattgtctggccaacaaggtggatttgagcttcagcccatcacaaagtctcccag

SEQ ID NO: 7154 - DNA, 429 bp, Homo sapiens
ctctgtagagcttaatactgttctgtacttttaaaagaaattcatgaaatttagcaagagtgagaagtaagcttgttgctgtgaacacagattgcagatgtatttggtatccattataaataacttagttatttataacacactagtctaatatatttctagtattttttaaataaagggtagataaataatggttttactttactgtggtaaatatttcttgagaaaatgttatgtaatcaactatttaataacaaatgaggacacagttctgtcttcataaaacctagaataaaataagggagttaaaattaccatatagacaattgtatggaaggcagaatgtggtgaataccataaaagaggtgctgttggagcccagatagcagatttacacttggtgcaagcatctggcaaagaaggcttatt

SEQ ID NO: 7155 - DNA, 423 bp, Homo sapiens
cccgaccggaggagccgctctttccgcgcggtgcattctggggcccgaggtcgagcccgccgctgccgccgtcgcctgagggaagcgagaagaggccgcgaccggagagaaaaagcggagtcgccaccggagagaagtcgactccctagcagcagccgccgccagagaggcccgcccaccagttcgcccgtccccctgccccgttcacaatgcagcctgcttctgcaaagtggtacgatcgaagggactatgtcttcattgaattttgtgttgaagacagtaaggatgttaatgtaaattttgaaaaatccaaacttacattcagttgtctcggaggaagtgataattttaagcatttaaatgaaattgatctttttcactgtattgatccaaatgattccaagcatataagaacggacagat

SEQ ID NO: 7156 - DNA, 416 bp, Homo sapiens
cggccttctcccgccaccgccgccgtcgccttccgcaggccgtttccaccgaggaaaaggaatcgtatcgtatggccgctatccagaacctccactctttcgacccctttgctgatgcaagtaagggtgatgacctgcttcctgctggcactgaggattatatccatataagaattcaacagagaaacggcaggaagacccttactactgtccaagggatcgctgatgattacgataaaaagaaactagtgaaggcgtttaagaaaaagtttgcctgcaatggtactgtaattgagcatccggaatatggagaagtaattcagctacagggtgaccaacgcaagaacatatgccagttcctcgtagagattggactggctaaggacgatcagctgaaggttcatgggttttaagtg

SEQ ID NO: 7157 - DNA, 494 bp, Homo sapiens
  misc_feature (1)...(494): n = A,T,C or G
tggcggggggttttnatctgaacgcgttcggnaccttcgacgactttccgggncgacccacgcgtccgatttgtgcttctgcctaaagtggtcaacacaagtgattctgacatgagacgggaaatggagcagtcaatgaatatgctgaattccaaccatgagttgcctgatgtttctgagttcatgacaagactcttctcttcaaaatcatctggcaaatctagcagcggcagcagtaaaacaggcaaaagtggggctggcaaaaggaggtagtcaggccgtccagagctggcatttgcacaaacacggcaacactgggtggcatccaagtcttggaaaaccgtgtgaagcaactactataaacttgagtcatcccgacgttgatctcttacaactgtgtatgttaactttttagcacatgttttgtacttggtacacgagaaaacccagctttcatcttttgtctgtatgaggtcaatattgatgtcactgag

SEQ ID NO: 7158 - DNA, 400 bp, Homo sapiens
ccgtgtctgtgcgtgtgcgtgtgtgtttcatacagctagcattagatgggtgatgtttcttacttatcatccctaactattgcaacttgaccttaaaaagacaaaaccccacaaaactcttcctgccacgggcttgcagattgaagcactttcgatgttgggcgctggcgtttgtgttctgggcaccaccgtgaccctgcccagatggctataatattattttatacacaaaccttttttttccataaatgttataattttgtgtctgtctttataaactattataagtactatttttgttataattcaaaatagatatttagtataaagtttttgctgttaaatatttgttatttagtaaactatgaattttgctctattgtaaacatggttcaaaata

SEQ ID NO: 7159 - DNA, 410 bp, Homo sapiens
  misc_feature (1)...(410): n = A,T,C or G
gaaaaggtcccggagagctgagcagtcaagatgtgtgacttcaccgaagaccagaccgcagagttcaaggaggccttccagctgtttgaccgaacaggtgatggcaagatcctgtacagccagtgtggggatgtgatgagggccctgggccagaaccctaccaacgccgaggtgctcaaggtcctggggaaccccaagagtgatgagatgaatgtgaaggtgctggactttgagcactttctgcccatgctgcagacagtggccaagaacaaggaccagggcacctatgaggattatgtcgaaggacttcgggtgtttgacaaggaaggaaatggcaccgtcatgggtgctgaaatccggcatgttcttgtcacactgngtgagaagatgacagaggaagaagtagagan

SEQ ID NO: 7160 - DNA, 411 bp, Homo sapiens
ctctggtgctagcatcagtcattttgatcacaagacgtggaccagcccaccttggagctcactgaggaggtggcctggtcctaatgcaagaactaatggagctcttggaactggctgtagcctttgctgagcacgaacaactatgtctatgggtcttaaggattgaaaaggtacgttgaaaatggagaacaactgatgtcaagacacattttggttgtaagggacagaagtccaactccaacgagcttgccaaggatggaacctgctggcaaacataaccaaactttgggaagggcagggtatggttaacctcaggtttctggaagcatagtgtacagtgctgtgcccgccctcttctctctgcttctctatgcatattggccctatcctctcagtggggcaccctccctg

SEQ ID NO: 7161 - DNA, 407 bp, Homo sapiens
  misc_feature (1)...(407): n = A,T,C or G
cccacgcgtccgcccacgcgtccgccagtattgtggctggaatggaagaagatcaccttggtgttccttggttggaagattatttcctctgaatttctgggcttggtcttccacttggcatttgcctgaagttgtattgaaacaatttaatgaaaatattaaatatttggtttcaaaaggcagatttatcttctcccaacattctgttatttctgatacttttgaaaaactaataaaaactaataaaagaagcgtgtaaaaaaaaaaaaaaactaaaaaagaatagaaaaaaaaaaaaaaaaaaaaaaaaatatttggttttaaaaagaaaaataaaaattttaacaaaantntgnnttgggggaggcgctcgtttaaataattctggcgggggcgaacaagcttta

SEQ ID NO: 7162 - DNA, 420 bp, Homo sapiens
tatgtaacaatccatcattcaccttcactactggtaataacatagagctgccattttccttttaccatgcatcatctctttacagtaggcctggcagatcattttttaaaaagattattcaactaccaatcagtaatgtttttaaacagtacatttgctttgaacttggaaaatgtgttcagaaagaaaaatggaattgaatttcatttatacactaattccttggattttgcacagttacctaacggctttagtctggagttaaattcagatgcatggaatcctgaaggaaaatggtagctttttaatctttttgtgtgtgcgtgagtcttttaaatcaagtactgattaactattaagtacaactttgagattttagttttaactcttcagaagccagtgtgaaatagaattggttat

SEQ ID NO: 7163 - DNA, 426 bp, Homo sapiens
cccccggggccggtcccggagggctcgatccgcatctacagcatgaggttctgcccgtttgctgagaggacgcgtctagtcctgaaggccaagggaatcaggcatgaagtcatcaatatcaacctgaaaaataatcctgagtggttctttaagaaaaatccctttggtctggtgccagttctggaaaacagtcagggtcagctgatctacgagtctgccatcacctgtgagtacctggatgaagcatacccagggaagaagctgttgccggatgacccctatgagaaagcttgccagaagatgatcttagagttgttttctaaggtgccatccttggtaggaagctttattagaagccaaaataaagaagactatgctggcctaaaagaagaatttcgtaaagaatttaccaagctagaggaggtt

SEQ ID NO: 7164 - DNA, 429 bp, Homo sapiens
caaccacctgggctgtaggtggtgtgatggtgaactttcactctgatctccaacgaccattcctattaaaacacacacacaacattgcagaattagcaataagcacaagaaagaggtgatttgccactgaggtacagaagttgggaaagaggggtgcataaaaagaaaaaaaaaaaaaaaaaaaaaaaaaaaaaaaaaaaaaaaaaaggggggggggcgttttaaaaggtccctggggggggcaaaatttaccggggggggggaagatatttttttttttttttggggggggttattaaaacccctctggggatttttggaaaaaaacctttttttgggggggggaaattttgggcacacccccccccaaaaatttaagggcttaggggaaaaaaaaaatttttaggggggaaggggggaaaacccccg

SEQ ID NO: 7165 - DNA, 416 bp, Homo sapiens
cggacgcgtgggcggacgcgtgggtgggtctgaatgtttttgatgccaatttctgtatgaaaggagaagactgggactctcaggttggagttatagatttttcaatgtatctcaaggacgggaacagcagtaaaggtactgaaggagacggtcagattactgcaattctggaccagaagaactatgtagaagaactgaacagacatttgaatgctactgtaaacaaccttcaggcaaaagtagatgcattagaaaaatccaacactaaactgacagaggagcttgcagttgcaaacaacaggatcattaccttacaagaagaaatggaacgagttaaagaggaaagttcctacatactggaatccaatcggaagggtcccaagcaagacagaactgcagaagggcaagcactaagt

SEQ ID NO: 7166 - DNA, 416 bp, Homo sapiens
  misc_feature (1)...(416): n = A,T,C or G
tcgattgtcagtgaaatgcaagattattcccagtgtctctgacactctcttagcttgctgagatcttactgcttggcactcgaatcccgtgatagaaatacatttgtggtctaagcaacagttccttactgatgtggggagaccatctcttcctatcttcctgatgaaattttacgctcctgcgtttttaaaacagtttggccataatcctagatgcacccttctaattaatgtacctgcacaagagacctttgtgaacagaaatttgcatgtataatttgagcttacttgtaactttctggctatatactgcttatatctgtggattcaagatactgaagtgaataccaataaaaagaaaaccctacgccatgttaaaaaaaataaaaaggggcggccgtcttaaaggatccccn

SEQ ID NO: 7167 - DNA, 410 bp, Homo sapiens
tgaatctgacttaaaatgtaaagtttcctcatgataaaataggaacaacatagaaatggattgatggggtgatctgagttattgtatataaaagtttttaaagaatagaatgaacatcaagctagataggcaaaaattgacacattcagaacagcttttttgactgcgaagccaaaagttgtcagaaacagcaaaagatcccttattattacagagtattttacgtagtctctattttaaggagagaaattaaatagaagggcttcatgcatttaggggagggtgctaaaacttctcaagttcgtcaaacttacaggaatacccaccatgatcattttctctctaattatgtataccacaaaattttcatctggccataggaattcactggtgggtgtaaaattaatgac

SEQ ID NO: 7168 - DNA, 413 bp, Homo sapiens
aagacatgatgctacactcagctttgggtctctgcctcttactcgtcacagtttcttccaaccttgcgcattgcaataaaaaaggaaaagaggcctcctcagacactctcaagaggatggggagatgacatcacttgggtacaaacttatgaagaaggtctcttttatgctcaaaaaagtaagaagccattaatggttattcatcacctggaggattgtcaatactctcaagcactaaagaaagtatttgcccaaaatgaagaaatacaagaaatggctcagaataagttcatcatgctaaaccttatgcatgaaaccactgataagaatttatcacctgatgggcaatatgtgcctagaatcatgtttgtagacccttctttaacagttagagctgacatagctggaagata

SEQ ID NO: 7169 - DNA, 477 bp, Homo sapiens
  misc_feature (1)...(477): n = A,T,C or G
atggggtttaaactgaccctagcgcaatcgcanggactnnnngggtcgacccacgcgtccgcccacgcgtacgtccacgcgtacgcgcagcggaggctttcctggtttcggaccccagcggccggatggtgagggcctgcctgcagcggatcctcaatagccactgcttcgccagagagaaggaaggggataaacccagcgccaccatccacgccagccgcaccatgccgctcctaagcctgcacagccgcggcggcagcagcagtgagagttccagggactccctccactgctgtagtaacccgggtccggggcctcggtggagctcctgatgcccctcacccacccctgaagatcccaggtgggcgagggaatagtcagagggatcacaatctttcagctaacttattctactccgatgatcggctgaatgtaacagaggaactaacgtccaacgacaagacgaggattctcacc

SEQ ID NO: 7170 - DNA, 420 bp, Homo sapiens
agtgagccgagattgcaccactgcactccagcctgggtgacagagcaagactccatctcagtaaataaataaataaataaaaagcgctgcagtagctgtggcctcaccctgaagtcagcgggcccaggcctacctcactctctcccttggcagagaagcagacgtccatagctcctctccctcacaagcgctcccagcctgccctccagctgctgctctcccctcccagtctctactcactgggatgaggttaggtcatgaggacaccaaaaacctaaaaataaacaaaaagccaaacaagccttagcttttcttaaagactgaaaaaaaaaaaaaaggggcggccgttttaaagaatccttgggggggccaaagctaacgcgggcatgcgaggtaatatttttttccttaaagggagac

SEQ ID NO: 7171 - DNA, 406 bp, Homo sapiens
agagaggagattggcctctgaaggagtaaccacagtacctgacagcgctggatgtgatgtgaggagagagggatccaagatgactgtccgggtcctgagcacctggagggactgacctgacattcgctgagctggaggacggggcatggactggagatgccgcgacaactctagactgccctaggaccatgtacctgggccctctctgggcacgtgctctgtctctgcgaggtaggtctgttagtccctgagcagcaatggggaaataggttcagagaggccaagtgcttgctctgaagctacacagcagattgaaattcaggagcttcgactctcagctggttcttcatagtgacccccgggcctgcaacttccttatggacctgccggatgcctgagggcttcc

SEQ ID NO: 7172 - DNA, 415 bp, Homo sapiens
ctagttctagatcgcgagcggccgcccttttttttttcaagtattggaaggggtggggagatatataaataaatcatgaaatcattacaaaaaaaaaaaaaaaaaaaaaaaaaaaaaaaaaaaaaaaaaaaaaaaaaaaaaaaaaaaaaaaaaaaaaaaaaaaaaaaaaaaaaaaaaaaatagggggggggggtcttaataaaaaatctcggggggccccacaataattccctggggaaaaaaaaatttttttttttttttagggggtaaaaaaaaaacaacccgttttttttaaaaaaaaaaaatttttttgggggggggggtttatccaacccccccccccccacattaaaaagcttttagaaaaaaaatatttttttttgggggggggggggggacccccgcccttttctcg

SEQ ID NO: 7173 - DNA, 398 bp, Homo sapiens
tgacagtgacagagatggagagagcagaaaccaaaactcagacagatctgactcccggatcgccttccgtgactagagatggggtttaactgtgttacccaggatggtctcgatctcctgacctcgtgatccccgttgatgcagcacttccacttctaggatgtaccctatggatatacttgcacaagaacacagttgcaatttgtcatggcaaaagcctgcaagccaccatcactaaggaactggctgtttacatcctgctctgtgtccaccatggaacgccacacagccttgaaaaaggagggtgctctctacgtactgatatcatcaagatctactgttgctgaaaatcacaaggcacagaactagtgtgtagagtcctctgatatctgtaagaa

SEQ ID NO: 7174 - DNA, 470 bp, Homo sapiens
  misc_feature (1)...(470): n = A,T,C or G
ccccatactgaaagcctattgtnagtcctcgaaancccggnncganccacgcgtgcggtgactccagagcctccagcgagatgctgctgattttgctgtcagtggccctgctggccctgagctcagctgagagttcaagtgaagatgtcagccaggaagaatctctctttctaatatcaggaaagccagaaggacgacgcccacaaggaggaaaccagccccaacgtcccccacctcctccaggaaagccacaaggaccacccccacaaggaggaaaccagtcccaaggtcccccacctccttcaggaaagccagaaggacgacccccacaaggaggcaaccagtcccaaggtcccccacctcatccaggaaagccagaaagaccacccccacaaggaggaaaccagtcccaaggtaccccacctccttcaggaaagccagaaagaccacccccacaaggaggcaacccg

SEQ ID NO: 7175 - DNA, 434 bp, Homo sapiens
tggatatatattcagcagttgatatatcatttcaattcacagtgtcaaaacaatcaaaagataaatacaaattgatccatatttgaatgaatgtaactttactcttaatcagatttgcaaataaagaatgtatttcttactacttactaattaatagctgcacattacagcctaaaatgaaatctcagttctgagactctgcaagaagctcttatcagttataattttatttttattataccgtttaatataatagttaattgctacatatcagatggacagtgttattctttcaagatcttttcacttattaatgccctagttaaatatctttcaattgtttttttcagtttacatcatctcaaaactaattggagcagaaacttgatctgcatatttctaaagttattcccttttgtctaaaaaagaatgat

SEQ ID NO: 7176 - DNA, 403 bp, Homo sapiens
  misc_feature (1)...(403): n = A,T,C or G
accagaagtttgagcctctttggtagcaggaggctggaagaaaggacagaagtagctctggctgtgatggggatcttactgggcctgctactcctggggcacctaacagtggacacttatggccgtcccatcctggaagtgccagagagtgtaacaggaccttggaaaggggatgtgaatcttccctgcacctatgaccccctgcaaggctacacccaagtcttggtgaagtggctggtacaacgtggctcagaccctgtcaccatctttctacgtgactcttctggagaccatatccagcaggcaaagtaccagggccgcctgcatgtgagccacaaggttccaggagatgtatccctccaattgagcaccctggagatggatgaccggagccactacacgn

SEQ ID NO: 7177 - DNA, 400 bp, Homo sapiens
  misc_feature (1)...(400): n = A,T,C or G
tttctccattttggtcaggctgctctcgaactcctgacctcaggtgatccacccgcctcagcctcctaaagtgctgggattacaggcgtgagccaccgcgcccagctagtatgcacttttataaccatttatgtctttttaaaaaattcttcctactagattgtgagttccatgagggcagagacagtcttcattcatctttaaatttctgggaccatgtgcagtgcctgcagaaatcagttatacaataaacgtctgttaaatgaatttgtttccctctagattcgaagtttagaaaacaaagacctaccaatcaataggatttatgggcgcctcatggcaatcaattcattaaaaatatttattaaagaaaaagggggccaagtgtggtggctcatgn

SEQ ID NO: 7178 - DNA, 472 bp, Homo sapiens
  misc_feature (1)...(472): n = A,T,C or G
cgtagcgcgtcccttagnnntccgcgctagggagtctgagaaccgcnccgagacacgcgggcggaacaacacactgatttgtacgtctgactgagagaaagatggtcgcctccagcacataaagtgaacagcattggttggaaggggaaggctctgcctcctccctccccatttcattggcgtaacgtatagtggattctgtacataatttacaaataaaacattttattttaattgttacttattatttagatatttctcaacacttaaattcataaaattaagaccatgtaagggtatgtttttagagaaatggaagtttgagtaacccacagaacatctgtgatctttctacagcagcttcagctttgtgccaacattccatgtattttgaatatgagcaaaaactgatcttaagagcacacttaaagtagctttgtacgccttaatgttcattttgatttattttaan

SEQ ID NO: 7179 - DNA, 489 bp, Homo sapiens
  misc_feature (1)...(489): n = A,T,C or G
gggtanattgacgcgtcggactttgacggtccttccgggncgacccacgcgtccgcccagaagaaccgttaacaggattttcctggagagggggatctgatccagaaaccactgggattcaaatctggagtgaagttttcactgtggagaagccaggtgggaagaaggttgcagttgttctgatggatacccagggggcatttgacagccagtcaactgtgaaagactgtgctaccatctttgctctaagcactatgactagttctgttcagatttataatttatctcagaacattcaagaagatgatcttcaacagctgcagctcttcacagaatacggtcgtctggcaatggatgaaattttccaaaagcctttccagacactgatgtttttggttagagattggagtttcccttatgaatatagctatggactccaaggaggaatggcatttttggataagcgtttacaggtgaaggaacatcacg

SEQ ID NO: 7180 - DNA, 463 bp, Homo sapiens
  misc_feature (1)...(463): n = A,T,C or G
cccctaggtttgccttnttacagcctcgaaaacccggncgacccacgcgtgcggcaggattcaaaagaacatctttgcgttttctaccgtctccccatcatcgtactagggaggaagaagcgggtgagaaacaaaacttctttccattgtcctgcccgtttctgcggacttgttctgaggccgaggcacctctaagatactgatggctctgcagaggacccattcattgcttctgcttttgctgctgaccctgctggggctggggctggtccagccctcctatggccaggatggcatgtaccagcgattcctgcggcaacacgtgcaccctgaggagacaggtggcagtgatcgctactgcaacttgatgatgcaaagacggaagatgactttgtatcactgcaagcgcttcaacaccttcatccatgaagatatctggaacattcggagtatctgcaacacg

SEQ ID NO: 7181 - DNA, 506 bp, Homo sapiens
  misc_feature (1)...(506): n = A,T,C or G
agaggcgcgnnnnanncttttnatagatcgccatgcggnatagactcccatttcccggggcgacccacgcgtgcgaatgtttgtttagacgagatcataccggtaaagcaggtatgacaaagcttgcttttctggtatgttctaggtgtattgtgacttttactgttatattaattgccaatataagtaaatatagattatatatgtatagtgtttcacaaagcttagacctttaccttccagccaccccacagtgcttgatatttcagagtcagtcattggttatacatgtgtagttccaaagcacataagctagaagaagaaatatttctaggagcactaccatctgttttcaacatgaaatgccacacacatagaactccaacaacatcaatttcattgcacagactgactgtagttaattttgtcacagaatctatggactgaatctaatgcttccaaaaatgttgtttgtttgcaaatatcacacattgttatgcaagaaa

SEQ ID NO: 7182 - DNA, 500 bp, Homo sapiens
  misc_feature (1)...(500): n = A,T,C or G
gagtcccggnnagctgncaatgacgcctgagatagaccgcgagtaggcagcggcgacccacgcgtgcgggctgagtcacacctgctgcagaggctgctgctgctgttgcccacgctctgtggcccaggcactgctgcctggaccacctcatccttggcctgtgcccagggccctgagttctggtgccaaagcctggagcaagcattgcagtgcagagccctagggcattgcctacaggaagtctggggacatgtgggagccgatgacctatgccaagagtgtgaggacatcgtccacatccttaacaagatggccaaggaggccattttccaggacacgatgaggaagttcctggagcaggagtgcaacgtcctccccttgaaactgctcatgccccagtgcaaccaagtgcttgacgactacttccccctggtcatcgactacttccagaaccagattgactcaaacggcatctgtatgcacctgggcctgtgcaaatn

SEQ ID NO: 7183 - DNA, 433 bp, Homo sapiens
aaagaacggacacatttcaccgtccgcctgaccgaggcgaagcccgtggacaaagtgaagctgatcaaggaaatcaagaactacatccaaggcatcaacctcgtccaggcaaagaagctggtggagtccctgccccaggaaatcaaagccaatgtcgccaaagctgaggcggagaagatcaaggcggccctggaggcggtgggcggcaccgtggttctggagtagcctccagctcggaggacttgtgttcaggggtcctgggccccgggcgaggtcccgccctcccgtggtcactggctccgcccccagcaccaggcgcccagtggagccgtttgggagaattgcctgcgccacgcagcggggccggacaggccgcacagacctactgtggcgggagggaggggcggctgctgcctggtgacggcacccggag

SEQ ID NO: 7184 - DNA, 419 bp, Homo sapiens
cgattgtcactcttcatcacaggcacatttcaaaaagaggttagactttcagacttcttttttctcaaacctcagaacttccaccccaaacttcgctctcagctggtgactttgcttctttatgtgtgtgtatgtgtgtcagagaaagagagagagagagagagaagggaggatgagaacgaatggggggaagagataaactttatgcataacattagggtaaatcaataaagatggtctgacacatcgtttaaaaaaaaaattaaaaaaaaaaaaaaaaaaaagggggggggcccttttaaaaaaacccctgggggggccaaatttacccggggggggaaaagattaactttttcccttaaggggggggaaataaaaaccaggggggggtctttggggaaaaaccctttctttggggg

SEQ ID NO: 7185 - DNA, 421 bp, Homo sapiens
tgaggagtaaagtgttaaaataaaggatttaaagctatgcatggtggggcacatttgtgatcccaacactttggaaggctgaggtaggagaatcacttgaggctaggagctcaagaccagcctggtcaacatagcaagaccccttcgctacaaaaaaattaaaaaattagttgggtgtggtcgtgtgtgcctgtagtcccagctactcgggaggttgaggcaagaggatcatttcagcctaggagttagaggctgcagtgatctctgattgcaccactgccctccagcctggaagacagagcaagaccttgtctcaaaaaaaacaagttaaaaaagaaaaagatttaaaaatggtgtctagcacacacacagtaagttttcaattaagatgatctagctaagagctatgtattttttttgg

SEQ ID NO: 7186 - DNA, 494 bp, Homo sapiens
  misc_feature (1)...(494): n = A,T,C or G
gagggtcnnaatgatacccctcggnacatcgacggactttccgggncgacccacgcgttcggtgacaaaaccattcatttatttattcccaatactgggagtcatggaacagccttcataaggtggcatccaagcagcacaatgtccctcctgttcctgagcatttccgcatccctgcatcagagagcagtatcactagcaggagctcagaggcttgtaatggaaggcagggacatcaccctatagggacagcagaactgcagggtgaccataggggctggccggggaccaggcataggtgaccagctttccgggtgtgccttggactgaggggttttcctggaggcagaacttccagtgttaaaaacaggaaagtcccaggtaaactgggatggttggtcaccctaggctgaggcccagctcagagtctgggcttatccaggggcaggtccgtgcatgcttcctgaaagagtagcgagggatccggcgctgtn

SEQ ID NO: 7187 - DNA, 420 bp, Homo sapiens
gacgccttcggtgagcagggtcagtggaagccccaacgggaaaggaaacgccccgggcaaagggtcttttgcagcttttgcagacgggcaagaagctgcttctgcccacaccgcaaggacaaaccctggagaaatgggagcttggggagaggatgggagtgggcagaggtggcacccaagggcccgggaactcctgccacaacagaataaagcagcctgattgaaaagcaaaaaaaaaaaaaaggggggccccttaaaaagaacccctggggggcccaaattttacagggccgtgagagaaatgtttttttcccttatggggggccattttaaaacctgcttggattttttggaaacaaacctttctttgggggggggggaatctgggaccaccccccctcgaacatttaagcgcgtaag

SEQ ID NO: 7188 - DNA, 419 bp, Homo sapiens
tcaaaaagaaaatatcagcaccaaaaaaacacagtgggttgatatatatacaaatacatgaaaatctgaattaaggataaattcactgattccttttcacaggctgctaggtatcaatccatcactctaaaaattggccaaaaaaaaatcacattaatatcatttccagccagatgtgatggctcacacctgtaatcctagcactttaggaagctgaggtgggagatcacttgagcccaagactccaagaccagtctgggcaacatggcaaaaccaccgtcttgacaaaaaagttagttgggcatggtggcaccaaaaaaaaaaaaaaaaaggggctttccgggggggcaaccaccaacccttcctttttggagtcttaataaaaaaaaagggcgcccgttctaaagaatccctcgagg

SEQ ID NO: 7189 - DNA, 504 bp, Homo sapiens
  misc_feature (1)...(504): n = A,T,C or G
gagtcncaggccagctaggcattgaacgctgtcggatggatcnccgtctgacacgcgccgacccactcgtgcgggggtaagcagtttcattcttcctgctgagttaaagcataaagtactgcatagtatatgagatatagccaggtagctaaagtgcagattttgttagggtcaaccctatgaaaaaaactattttcataggacaaaaatggtggaaaattaccagtttcataagattcaaccacataaatatatatatacacacacacatacatatacacctatatatgtgtgtatacaaacagttcgaatgtattttggtgacagtaataaatcaatgtgaggatggatagaatttagtatatgatacagaaaatgtcataaatggataaaaggaatttacaacttgaggagaaaacctttacaatttcctatgggtgtcagaagtactctcagcgaaaactgatggctaaaacagtatctactattctctgataacttttn

SEQ ID NO: 7190 - DNA, 426 bp, Homo sapiens
tgaagtctctgaaagcatgtaaaagggaaatcaagtcagtcatgaatacagctggaaattccgcaccctctctctttcttaaaagcacttttgagtacttaagaggtaattatcgaaaagccgcgaagctattaaatagttcaaacattgctgagcatccaggattcatgaaaacaggtgaatgcttgagatgcatgtcctggaataaccttggttgcatccattttgccatgagcaaacactatttgggaatattctactttaaaaaggctctgcaagagaatgacaacgtctgtgcacagctcagtgcaggtagcactgatccaggtgaaaaattttgaggaagacccatgagtacgttactaaccaataagagatatgagttgctgtataactgcggaattcagcttcttcacattggaaggc

SEQ ID NO: 7191 - DNA, 407 bp, Homo sapiens
  misc_feature (1)...(407): n = A,T,C or G
cccacgcgtccgagctaattttgtatctttagtagagatggggtttcaccatgttggtcaggctgttctcgaactcctgacctcaggtgatctgcctgccttggcctcccaaagtgctgggattacaggcgtgagccactgcgcctagccgtcacatatctaaacaagcatgaaaggggttcatttttgtcttcttcttgcctgccgtcagcatggtggaaatggctctgcctatgctcatgcttctggtgcccaatgccttgcactgtgccattcaacactatgaagagaaacaagtagccacacctcanaataatgtggctgtcaactggcctatataaacctacacaaaccagtacttgcctttttgctggaaacatgantatgtgctcctcacgtagtagaaa

SEQ ID NO: 7192 - DNA, 476 bp, Homo sapiens
  misc_feature (1)...(476): n = A,T,C or G
atagatcccctcnggttgactaccgattgccaggcgcgacccacgcgtgcggtaaaaggatgcaaatctagtgaacagaatggaatggagcaaaagacaattattttaataccctttgatttagcatgtacactgctggggcaatcaatggatgaaagtggattaccacagctgaccagctatgattgtgaagttaatgctcctatacaaggcagcagaaacctactgcagggtgaagaattactcagagctttggatcaagttaactgagctttttcttaatttcattcctttttttggacactggaggctcactacctaaagcagtctatttatattttctacatctaattttagaagcctggctacaatactgcacaaacttgattagttcaatttttgatcccctttctacttaatttacattaatgctcttttttagcatgttctttaatgctggatcacagacagctcat

SEQ ID NO: 7193 - DNA, 425 bp, Homo sapiens
tgctgcttgttgttttctcttccttatctttccaaattgtttccttgaaatgcttgtttccaatttttcttagattatgtttctaatttttattccaggtgtttttttttcttacttgacagaaaaaaagaaaaccccaacaatatcttgctgtattatcacattttttataaagttaaagcatttctcttaaaaaaaaaaaaaaaaaaaaaaaaaaaaaaaaaaaaaaaaaaaaaaaaaataaaaagggatattattttataattaaaaaaaaaaaaaaaaaagctccccaaacggggagggggttaataacctatcttgtggctgtgaaccatttttcttctttgggggggggcccttcttttttcagggtggggctaattttcttcctcctccgcaagggaaaaacttttctcctttggttc

SEQ ID NO: 7194 - DNA, 453 bp, Homo sapiens
  misc_feature (1)...(453): n = A,T,C or G
cttcctcttaatgcctctgaattgatgacctcccgggnccacccacgcgtccggtggaaacatgatattcattttgtctggtgctcttttctttctgcctaaggctttctgataaaatttatgctatatgccccttagtaccgatttcatgatggttaaccatatctatgcctggaaagaaaatatagacttgggaagaaaacagatatatagtctacaatgaatatttctagcttgcattcaagatgactgtgttgtgcagaacattctgccaggcattaagtgggatacaaaagcagtctaacatatgatctctgtcctatgaatgtgtttttaaaatgtatactagtcattattggagtgactattatataaagacaaaagccactagggtagccatggttttttgccagttattagccatatatagtgcgtgcatgcacacatacaccg

SEQ ID NO: 7195 - DNA, 404 bp, Homo sapiens
cccacgcgtccgcccacgcgtacgcactctgttgcacaggctggagtgcagaggcgtgatcatggcttactgcagccttgacctcctgggactcaggtgatccttccactttagccccccaagtagcagggactacaggcacgcaccacagtgcctagctgatttttggggggttttttgtttgcttttgttttttttattgctttttgtttttggtaaagatggagatcctccatgccatacaggatactttcactttaaacaaccacaatgatgcttcttcagtctctcaccaaagaatctatatgatgtatggggggggatatggccgcgcctgctatttttataaaattcattgtgtggaaaagaagcaaaacatgaattcggatctagatagcaagatg

SEQ ID NO: 7196 - DNA, 411 bp, Homo sapiens
cttggaaattgtgctgctacttaaatattgaaggaattcagaaagttgtgtatttatcttaaaatgttccttctcacttattctactggaattgaccatgaaaaagaaaatattatgccttatttatatctaattattgactgtgcaaactgtgactcagtggatatttgtatgccccccaaaaacattttaaagctgagcaatttttaataaagatgtataaataattttgattattctcattgtagttaagttactgttagtttggtgcaatacattctttccttcctcatccttttaaaattaaatatataagatgtatgttttgttttattacattaagtgctatttttaaaaaattcattgtgtgtatatgagctaatacttgatttgtttctgtatagcatgatt

SEQ ID NO: 7197 - DNA, 476 bp, Homo sapiens
  misc_feature (1)...(476): n = A,T,C or G
agaggggngnttcccactgaatgcccactganngacctggcanccnccnncgacccacgcgtccggggatgcccttcatgtgtatttacacaccagatttttatggtacatagggagtaatctagggaaaagatatgttacgcatgaatcttagctgtggtagaagcacagctcaaattagcttaaggaaaaaaaaaaaaaaaggcgggctcataaaactcgaggacggggggggccatgactatggccttgttgggatttagggactcaagctcctttcctttggcccttcaaaccacccccccttccttccacaaataatactttttgtgggcctttgaaaaaaaggggccttttttggccccttccacaggccaggggatatggccaccaccagttttggggaaaccattataatttggggaccgaaaaaatttgcctcccacctttccttagggcaaaatttttgggagttn

SEQ ID NO: 7198 - DNA, 404 bp, Homo sapiens
cccacgcgtgcgcctagctgaacaggacccacatgaactcaacaaggcctgtgccttcaacaagccttccaacagctggttgccagaggaaggcccggctgacatctgtcaatgctgtaacaaaggtgactgtggcactccaagccatcccaggaggcagcctcactgcaggagccagccggtcacgcctgcttaccggaaccgcaggcatgtgacagaagaagcagatgtcaccgcgggggccactgatcttcctggacaggagtgatgaccatgaagtaaagcagggggctttgccttctgacacctcagcggtgctgctgggcgcatgcctggctgtggtggagcccctgactctgactgcgtgtatcctgggtctcaccaggaggcagcgcactgcctcc

SEQ ID NO: 7199 - DNA, 402 bp, Homo sapiens
  misc_feature (1)...(402): n = A,T,C or G
ctgacatgggaggagctgcaactatatgctcagccatcgtgtctgctgcaaagcttaattggcccattaatattataggtctggcccctctttgtgaaaatatgcccagcggcaaggccaacaagccgggggatgttgttagagccaaaaacgggaagaccatccaggttgataacactgatgctgaggggaggctcatactggctgatgcgctctgttacgcacacacgtttaacccgaaggtcatcctcaatgccgccaccttaacaggtgccatggatgtagctttgggatcaggtgccactggggtctttaccaattcatcctggctctggaacaaactcttcgaggccagcattgaaacaggggaccgtgtctggaggatgcctctcttcgaacatn

SEQ ID NO: 7200 - DNA, 406 bp, Homo sapiens
  misc_feature (1)...(406): n = A,T,C or G
tggagagaccagcgggcgtgtggacgacaatgaggagaccatcaaaaagcggctggagacctattacaaggccacagaacccgtcatcgccttctatgagaaacgtggcattgtgcgcaaggtcaacgctgagggctccgtggacagtgtcttctcccaggtctgcacccacctggacgccctaaagtagcaacgctggagccgcttccccagctcagagccccgccccaccccgtcctgattagaggtcctcctggcctgagcgcagcgcctccaccctgccctgctgagcacagacggaggaagccgcttatcctgttttcatggacagctgagcactaaaggaatttctatggannaaaaaaaaaaaacaccccaaccccaaccaaaaaaaaaagggggcggc

SEQ ID NO: 7201 - DNA, 471 bp, Homo sapiens
  misc_feature (1)...(471): n = A,T,C or G
ggggggagggccccgctgaattccgctganacccctcganncncnncgancacgcgtcggaccttgggctacggctgaccgttttttgtggtgtactccgtgccatcatgtccgtcctgacgccgctgctgctgcggggcttgacaggctcggcccggcggctcccagtgccgcgcgccaagatccattcgttgccgccggaggggaagcttgggatcatggaattggccgttgggcttacctcctgcttcgtgaccttcctcctgccagcgggctggatcctgtcacacctggagacctacaggaggccagagtgaaggggtccgttctgtccctcacactgtgacctgaccagccccaccggcccatcctggtcatgttactgcatttgtggccggcctcccctggatcatgtcattcaattccagtcacctcttctgcaatcatgacctcttgatgtctccatggtgg

SEQ ID NO: 7202 - DNA, 426 bp, Homo sapiens
  misc_feature (1)...(426): n = A,T,C or G
catgcagcagataattgttcatagtggactgaaaactaatgcaaggactatggtctcagtgataagtatattttgaagttcttaatatggaaatataccagtgtagcttggtactgtatttttttatattgatctgctgataccagtgataggcttaaagattgtattttcacagagtggaaaccaatttttttagttattgttcaaggagggtgcaatattaagtgttttggaatttgaagctaatttttaaaaggcctgaactatactttgaagaaacccctatagaaaaggaaagctccagctaaataggaagaattagaatattgagcttttttttcctgatttttctctttcctatctttgatggaaggaggaagtagaaagtggtaaagaattgaggctttccttcttggagagctgtan

SEQ ID NO: 7203 - DNA, 405 bp, Homo sapiens
cccacgcgtccgaaagaccccagaagaaaatgaacccacccagctggagggaggtcctgacggcttggggggtgagaccctggaaaactgcaggaaggctcataaagaactctcaaaggagatcaaaaggctgaaaggtttgctcacccagcacggcatcccctacacgaggcccacagaaacttccaacttggagcacttgggccacgagacgcccagagccaagtctccagagcagctgcggggtgacccaggactgcgtgggagtttgtgaccttgtggtgggagagcagaggtggacgcggccgagagccctacagagaagctggctggtaggacccgcagggaccagctgaccaggcttgtgctcagagaagcagacaaaacaaagattcaaggctttaa

SEQ ID NO: 7204 - DNA, 494 bp, Homo sapiens
  misc_feature (1)...(494): n = A,T,C or G
tggcnagcnccgcgngggggcttcgcaactgatnncccctcgataaccgtncgcaaanncccgggncgatccacgcgtncgcggacgcgtgggtgcgcaagagccgcanggccgtatgtttccatgttgcccagccggaatggcatggtcttgaagccccacttccacaaggactggcagcggcgcgtggccacgtggttcaaccagccggcccggaagatccgcagacgtaaggcccggcaagccaaggcgcgccgcatcgctccgcgccccgcgtcgggtcccatccggcccatcgtgcgctgccccacggttcggtaccacacgaaggtgcgcgccggccgcggcttcagcctggaggagctcagggtggccggcattcacaagaaggtggcccggaccatcggcatttctgtggatccgaggaggcggaacaagtccacggagtccctgcaggccaacgtgcagcggctgaaggagtaccgctccaaacn

SEQ ID NO: 7205 - DNA, 472 bp, Homo sapiens
  misc_feature (1)...(472): n = A,T,C or G
aggcgggnttcccatgaataccgctganngacctgaannnccgnncgaccacgcgggcgcaagaccagctggatcaaatggattgccaggcttgataggaaaacgtggagacagcggatcacctgcaagggggacaacgagaggctttggcttcacccgacacagtcaaaccacagcacttccttcatgtccagaggggacagtgccactctacagcgggtattcttttctttttggacaaggaaatcaacgagcccaccgacaaaaccttgatgcactgcttgtgaaggacctgcgatcgccatacccgttacacagccgctccactgacattcctccatgtcctcacggatgaacttctctctggaaaggattttcattcatcatgttcacaagtgcaggttctgagggcacacggcaagcactgtgctcccctggctcctgcctggaagacttccgagccagcccattt

SEQ ID NO: 7206 - DNA, 401 bp, Homo sapiens
cttaaaagatactgcattcattcatcagatatttattccatgcctactctatgctaggcactgtgctagatggtatgaaaacttattaggaacctttttgtttttgagaccattgcattctggctggtttgtgctggtttaacgacatctaagaaggtttagaaatggtgagaccaaaacaataactgttaatgatggacagcattattaggaaccctgtagtatgatatttaacaatataggcttcaagaaggtctggtcctaagagggggcagaaatgaatgaccaggttaaatccctctacatgtggtttctgtttgaaaaaaagaaaactgacatttgaacaggacttttaatttgtttaaaactctggtaattacttgtaacagtagaaaatagaa

SEQ ID NO: 7207 - DNA, 415 bp, Homo sapiens
acaggacagcctgtctcttgtagcttcctggggtgggaggcacaggggcaaagcaataccccagggaaagtgggaggtggtgctggtgctctctccaggcccaccatgctgggagaggcggccagagcctggggcctccagcctgggactgctgtgatggggtatcacggtgatggtcccattaaacttccactctgcaaaaaaaaaaaaaaaaaaaaaaagggggggcccttttaaaagatccttgggggggcccaattttaacgggggagggaaagttaatttttttttctttagggggggccaaaaaaaacccccctggggatttttggaaaggaacctttttttggggggggggcaaaatgggcccaccccccccccaaaatttaaggctttgggggaaaaaaaaaatttt

SEQ ID NO: 7208 - DNA, 409 bp, Homo sapiens
  misc_feature (1)...(409): n = A,T,C or G
tgaagttctctcaagaagctgacttgtccttgttctctctggatgctgatccctattcctgttcatatctttcccctttcttccctgctgggggatggaacaatgaggcttctaccagatatcagctccgactggctttgcttgaatcaagagtttgcccctgttcaatcagccatagccatggagtgggggtcatgtgtgggggatcaggatgacacccactggatatgtctgaggcagaccagtggggtgtaatcactagggacacctacatttgcctgtagtgtagagagggactgatgtcactttggtgccaggactgagtggccttctcaggaaccagagccttttgccgaanaaaggtttgggatcctgaggccagaccagtcaggcagtccaccctgaacag

SEQ ID NO: 7209 - DNA, 401 bp, Homo sapiens
agaccttagaatgctttatataaagtcaccactgtccctccccacattccattgtcatacaatggtttatgtttctgtctttaatcccacaaattggactctaattataatgttatatacacttaatcctttgtttttattttccacatatttaccttttactcacattttccctttcatctcaggtcttctttctgggatcagaacatcatgtggcaaaggtcttttagtcataagctttcagtgtccgtttggctgaaatcttatttcatctttattcttttttttcttcttcttcttttttttagcctagaatatatataataatggcttcatccttactcttaaaagatagttaagcgtgcataagttaacttccaatttacatactctgcttagaa

SEQ ID NO: 7210 - DNA, 407 bp, Homo sapiens
  misc_feature (1)...(407): n = A,T,C or G
ctggcatcccgagaagccaggaagcagtgagcccatgagtcctcggccagccctgcctgcccaccaggaggatgaaggtctccgtggctgccctctcctgcctcatgcttgttactgcccttggatcccaggcccgggtcacaaaagatgcagagacagagttcatgatgtcaaagcttccattggaaaatccagtacttctggacatgctctggaggagaaagattggtcctcagatgaccctttctcatgctgcaggattccatgctactagtgctgactgctgcatctcctacaccccacgaagcatcccgtgttcactcctggagagttactttgaaacgaacagcgagtgctccaagccgggtgtcatcttcctcaccaagaaggggcgacgtttctgtgcn

SEQ ID NO: 7211 - DNA, 402 bp, Homo sapiens
cccagggtggggactgggaatttaaggagagctgggaacggatcccttaggttcaggaagcttctgtgcaagctgcgaggatggcttgggccgaagggttgctctgcccgccgcgctagctgtgagctgagcaaagccctgggctcacagcaccccaaaagcctgtggcttcagtcctgcgtctgcaccacacaatcaaaaggatcgttttgttttgtttttaaagaaaggtgagattggcttggttcttcatgagcacatttgatatagctctttttctgtttttccttgctcatttcgttgtggggaagaaatctgtactgtattgggattgtaaagaacatctctgcactcagacagtttacagaaataaatgttttttttgtttttcagaaaaaaaag

SEQ ID NO: 7212 - DNA, 406 bp, Homo sapiens
aagaaattaatcctgtgtttatctaacttcataataattttgatttgtaaaccaagaaattaatcctgtgtttatctaacttcataatagcaattattgcccgaagctatagtggcatatttacaaaagttcttattactgggcggactgataacatttaaaaaataattgggtttgaccccaaatgactttatacccaattctacataaaaatatagaagatctatctttttttgttaccttcagatgttcactaaataactcagtttttaagcagaagttttcagggcattaaatatatgttgtgtatgaagtatctcaaactggaacataaatttagtgatcaaactgccattcacagtgtaaggcagcacttaaatttcgaacctaaagtttagatgcattg

SEQ ID NO: 7213 - DNA, 401 bp, Homo sapiens
gaacattctatgtcaatgacctctctgaatatggagccccagaaaaaaagaaagaagagccagaccctaaaggcagagactaggaattccacttaaggacctcacaggtagcaaagggagaaaacctatggaagaatcaacttcctgtcttcttttcctcccttttgctattataatcgccaccaccatctggatgaaaatgaaggtacattaagaagggaatgaacatttcccaagttcttgtcattgatcaagaattggtctcttgcagaagagggaatgagactcagggaggttaagtaagaaacaaggacaaaagtggagcagtgcgaggatgccattcttctcaggagcaaagccaacaaccaattggaggacagaaggaagtcccaaagagtgtc

SEQ ID NO: 7214 - DNA, 461 bp, Homo sapiens
  misc_feature (1)...(461): n = A,T,C or G
ctttgataaggttgatcatgcgcaacngcnnnggaantnccgggncgacccacgcgtgcgggaatgtctgaggaggcaacacttctcttcagccagacagcactggccagtttggagtctgtccatcctgcaggccacaagctctggatgaggaacttgaggcaagtcaccagcccctgatcatttcgcctaaaagagcaaggactagagttcctgacctccaggccagtccctgatccctgacctaatgttatcgcggaatgatggagagggaatctgagaaagctgcaaccaaccaggaggctggggtacgctggagaaggaatgggcttcctaaccttgagccctcttccctgaagatatatgtatctacgggggcctggggctgggcgggctcctgcttctggcagaggtccttctgtccgcctgcctgtgttggctgcatcgaaaagtaaagaggc

SEQ ID NO: 7215 - DNA, 492 bp, Homo sapiens
  misc_feature (1)...(492): n = A,T,C or G
ggcccccccatannatggatagcctgcggaacattgatggaccttccgggncgacccacgcgtccgcatttgcaaatgttttaaattgcaaagaaagccatgaggtcttcaatactgttttaccccatcccttgtgcatatttccagggagaaggaaagcatatacacttttttctttcatttttccaaaagagaaaaaaatgacaaaaggtgaaacttacatacaaatattacctcatttgttgtgtgactgagtaaagaatttttggatcaagcggaaagagtttaagtgtctaacaaacttaaagctactgtagtacctaaaaagtcagtgttgtacatagcataaaaactctgcagagaagtattcccaataaggaaatagcattgaaatgttaaatacaatttctgaaagttatgtttttttttctatcatctggtataccattgctttatttttataaattattttctcattgccattggaataga

SEQ ID NO: 7216 - DNA, 477 bp, Homo sapiens
  misc_feature (1)...(477): n = A,T,C or G
ttttaatgagcgcctcggnaccgcnactgattatcgtgtcgacccacgcgtccgatagttctcatggaacatggaaatttttgaaagtgatatatgatacacattttttgtgtatgtattctaattagtgtgaataaagcagtaacattaatgcattttttaagcagcaaacttatgtatttctcttgtcttccttaaaagtgtccccatgaactcagtgtttattcccttttcattttgagtacctgcttatatggtcagtatgtaacgttagcattggctcctaatggtagaattagaacagcaagattgtagagctgtaattgactccagacaacatagatttcagccacctcattctacagctgaggccaggacaataaatgcctttcccagactgggtagtggcagatctgggatggaatatggttttcttgattccctttcagccttcatttctctctctcaggactactg

SEQ ID NO: 7217 - DNA, 412 bp, Homo sapiens
atctgagatgtacttacagcagggttctaagagctctgaaagaagcgctctgttagatgcagactggcagcatcctccttgataaaagcagaaaagcaaagaggtaattggagttgaatcaagttaatagggaaggttggtagtaaatgctgttagtgtgacatgattctgaaacccagagctcagaactaactgtgagatgtaccatgaactaacaattctttgaaaggacctgcagaagcatttttaatacctcattctgtctatgcaagatgaaaatccatggagttttttcttggcttttgtaccaaatttaggggtcttgcatgtcagcaagtgatatatattgtttataaatgcaagctatttctggaggggaaaaatgtgtgtggctcttacgttttctgggaat

SEQ ID NO: 7218 - DNA, 489 bp, Homo sapiens
  misc_feature (1)...(489): n = A,T,C or G
aggggcgggggnctttttaccgaaacgtctcgatactcctngcaannncncnnnaaannnngggnggaccgacgcgtgcgggctcaacattgatctctgtcgcaggcatgttggacattccacagcagaggtggctacccaggggcgtgagggggagccccttcggtcaggcccacgcacagcctccatccctgccaccacggctgctgtgttcatgagccctgtgccatgtacaggtgaccagtggcagaggctggctgacatccactggctgtgtcatcatgtctccctggctgtctgctgactatgatacatgctctcagtgggagttaatatgggatgcagaaatctccacgctccagctactccctcaggtccatccttcttcccaaacgaccttgtacctaaccttccagtcttccttccccagggcccctgaccaccaggcttgtcactaacccctgcctgggatcccacagctggcctgag

SEQ ID NO: 7219 - DNA, 424 bp, Homo sapiens
  misc_feature (1)...(424): n = A,T,C or G
gcgcgctgtccaagatgcctaaaggaaagaatgccaagggatttaaggtggctccggccccagctgtggtgaataagggggaggctaagaaagtggtgaatcccctgttagagaaaaggcctaagaattttggcattggacaggacatccagcccaaaagagacctcacccgctatgtgaaatggccccgctatatcaggttgcagcggcagagagccatcctctataagcggctgaaagtgcctcctgcgattaaccagttcacccaggccctggaccgccaaacagctactcagctgcttaagctggcccacaggtacagaccagagacaaagcaagagaaaaagcagagactggtggcccgggccgagaagaaagctgctggcaaaggggacgtcccaacgaagagaccacctgtccttcn

SEQ ID NO: 7220 - DNA, 426 bp, Homo sapiens
  misc_feature (1)...(426): n = A,T,C or G
cttctaacctcaggaaggaaagcccaggggcccctgggatgtcctgccaaactgggaagacaaagattgtgactgagaaggtgggggcagggcaggagaagggggaagaagggagaatggatcaaccccaggccggggaaagagatgaatgaaggtccacgccagagtgacatgctctaagtaggggaaatcttcctaactagagttcccatgactttggcaacatttgngnngnaannnnnnnnnnaaaggggaaaaaaggggaaaggaataaaacnnnnggggggggggccttttaaaaatgttttgtggggggccaattttttccggggggggggaaaataattttttttttttttgggggggttttttaaaactcccgggggggaattttgggaaaacccctttttttttggggggggagaa

SEQ ID NO: 7221 - DNA, 472 bp, Homo sapiens
ggcgggtttaatgagactagcgcatgcgcaccgcccggaatccgggacgacccacgcgtccggactgtacactccctgaccagccagcactctggaagctttggtatctcaggaaccatggaattattgccagatggactctgaccagatttttgccatactggggggtggcgcaatggaggatgggtactctagcatgactgcgtatttattagagagtgtttttccacaatgtaccaaacgaggcataagcagcttctactgctgactggccaaacactggccatctgagagatgatttcctctggcccatatttgaatttattggagtaactcaaattgcctgaggaaaaatggaaaaattatccaccagtcgattcaaactgaatttcactctttataggaaggcagggcaaacttgtaggagtacgaaacattttcaataaatctacaaagggaagccttactacaa

SEQ ID NO: 7222 - DNA, 412 bp, Homo sapiens
  misc_feature (1)...(412): n = A,T,C or G
ttaaagtggaatgaggtaagaagatacagctacagataatagttgcgtgtatgggagaacagtcattgtaattgggtagttttgttaataaatatttttaaatcttgcttttcagaaattaccgaatgtgtataaacaaataaagaaaaataatttagctgtgttttagacagcattagaatatattgttcagcacagtaaaatatatttgaaatttgataagccaaaaatgtggttttgaatgaatattttgtgaatctttcttaaaagctcaaatttgtagacttctaaatagaataaacacttgcagcagaaaaaaaaaaaaaaaaggaggganaatataaaaaaaaaataaaagaaccaaattttggcggggggtgggttttttttttattttgcctcaaggggctct

SEQ ID NO: 7223 - DNA, 408 bp, Homo sapiens
catttagggtacctgaatgtaggatgggtctttgtttatcctgaaacaaacaaaaggcagagctttcggcataagagctaagttcagtttggggtaggtaaaatattaggtgattacaaaaatatgcgttcacttacgcaagcttaaaaagaatctgtcaatgaacatcaaagaaacagtgagtatttttccacttttcgccatacttcttgtacaaatattacaaacttgtgcatgggcatgagtataagatgccacaggtctgtcaatgactgtggatgggggtatagcacctgcatgtggatggaggcatgatgtgtggggaattggggggtgagtgttcatttgggtgaggatcacatgcctgcctatggatgtgtgtgttacagaatatgcttatggcagaaa

SEQ ID NO: 7224 - DNA, 411 bp, Homo sapiens
  misc_feature (1)...(411): n = A,T,C or G
agagtcgccgagatgacatggaatcattaggatatgttttgatgtattttaatagaaccagcctgccatggcaagggctaaaggctgcaacaaagaaacaaaaatatgaaaagattagtgaaaagaagatgtccacgcctgttgaagttttatgtaaggggtttcctgcagaatttgcgatgtacttaaactattgtcgtgggctacgctttgaggaagccccagattacatgtatctgaggcagctattccgcattcttttcaggaccctgaaccatcaatatgactacacatttgattggacaatgttaaagcagaaagcagcacagcaggcagcctcttccagtgggcagggtcagcaggcccaaacccccacaggtttctaagcatgaattgaggaacagaagaacn

SEQ ID NO: 7225 - DNA, 404 bp, Homo sapiens
atatctgcgcttctcataattactgaaagctgctttattttagtaataccttcgggaccactgtgccccatcttccgtgttagagcaaagtgaaaagtttaaaggaggaagaagaaagaactgtcttacaccacttgagctcagacctctaaaccctgtatttcccttatgatgtcccctttttgagacactaatttttaaatacttactagctctgaaatatattgatttttatcacaggcttctcagggtgaaattaaaccaactataggcctttttcttgggatgactttctagtcttaagggttggggacattataaacttgagtacatttgttgtacacagttgatattccacattgcatggatgggagggagaggtgtcttaagctgtaggctcttct

SEQ ID NO: 7226 - DNA, 485 bp, Homo sapiens
  misc_feature (1)...(485): n = A,T,C or G
cgcgtactgagcgccctcgaacangcttcggaannnccggnncgacccacgcgtgcgccgaaatgtttcattgtgggagcatacaatgtgggctccaagcacatgcatcagatccgcatgtaccttctagggaaggctgtggtgctgatgggcaagaacaccatgatgcgcaaggccatccgagggcacctggaaaacaacccagctctggagaaactgctgcctcatatccgggggaatgtgggctttgtgttcaccaaggaggacctcactgagatcacgaacatgttgctggccaataatgagacagctgctgcccgtgctggtgccattgccccatgtgaagtcactgtgccagcccataacactggtctcgggcccgagaagacctcctttttccaggctttaggtatcaccactaaaatctccaggggcaccattgaaatcctgagtgatgtgcagctgatcaagactggagacaaagn

SEQ ID NO: 7227 - DNA, 409 bp, Homo sapiens
ctccagggatgcaggggatccaggattctctgccctgtcacacggcgagtcagaagggaggggcctttccctcggacccatggccccaggcagagttttgcaccagcaggacccctttgagggccttcaaggctctcccaggagtccccctctgccggccccccaatgccccagctccctcttgggtcctgtgccaagtccgccccagggcctggggctgttgggagccaagggccccctggtactcagttccctcacgattcccgatcacgggcacacctgccccctggttatttgtaaatatttctattggacccaattctcctcggaattggctggcacctctggctgccgcagctcagtgatgacgtgggggaggtgggagaggccgatggctttgcctaggggt

SEQ ID NO: 7228 - DNA, 415 bp, Homo sapiens
  misc_feature (1)...(415): n = A,T,C or G
ttgccttggtggcctancccagtgccagggctcacaggaatggcttgtgcttgtctatgtttatcgcagaggccggtgctgtgagtcagagctggtcattcccgagtgactgatggtggagggaggggacagcaacctggaaagctgtgatcacctttgtgtgctagcagagtactgtaaaatattaaaatataggattggccgggtgcagtggctcacacctgtaatcccagcactttgggaggctgaggcgggtggatcgcttgagaccaggagtttgagaccagcctggccaacatggcgaaaccccatctttactaaaaaatacaaaaataagccaggcgtggtggcacgcacctgtaatcccagctactcaggtggctgaggcaggaaaattgctggaacctgggaggcg

SEQ ID NO: 7229 - DNA, 410 bp, Homo sapiens
cccacgcgtccggtgtcacctatgtacacctgttacttacacatttcctcttttggaaaaatgagaggcttagaataacaagaaaattaggacatactggcctggtgccagcagatggcttttctatagacaaactaggttagtgtggaagatataggttaaaataaactatgctgctttatttatcttcccaacctgattggcagctagacttttttagggtctcatttaatggccctgcttttttcattattatatttaatgatagggcaggatttcgtatgcaagctcttgtttctcaggctgcctgcagaagaagtcgctataaattatctgatggctacatggtacaaggcccattgactcatctgatgcttggtttggtaatttctttaatatttttatcacgg

SEQ ID NO: 7230 - DNA, 467 bp, Homo sapiens
  misc_feature (1)...(467): n = A,T,C or G
ctccaatgaagccttggaaatgatgctctcgaggcccacccacgcgtccgcccacgcgtccgcgcagtcattcctgcggcttgcgcgcccttgtagacagccggggccttcgtgagaccggtgcaggcctggggtagtctcctgtctggacagagaagagaaaaatgcaggacactggctcagtagtgcctttgcattggtttggctttggctacgcagcactggttgcttctggtgggatcattggctatgtaaaagcaggcagcgtgccgtccctggctgcagggctgctctttggcagtctagccggcctgggtgcttaccagctgtctcaggatccaaggaacgtttgggttttcctagctacatctggtaccttggctggcattatgggaatgaggttctaccactctggaaaattcatgcctgcaggtttaattgcangtgccagtttgctgatggtcgcc

SEQ ID NO: 7231 - DNA, 415 bp, Homo sapiens
  misc_feature (1)...(415): n = A,T,C or G
gcgacctgctgttgacgaatcccacggaggccagtgctgaccagctgccctcgcccagccagctgcgggagaagatcatcatcaagcataagaagctgggcccccgaggcgatgtggatgtcaacatggaggacaagaaggacgaacacaagcaacagggggagctgtacatgtgggattccattgaccagaaatggactcggcactactgcgccattgctgatgccaagctgtccttcagtgatgacattgaacagactatggaggaggaagtgccccaggatataccccctacagaactacattttggggagaaatggttccacaagaaggtggagaagaggacgagtgccgagaagttgctgcaggaatactgcatggagacggngggcaaggatggcaccttcctggttcg

SEQ ID NO: 7232 - DNA, 440 bp, Homo sapiens
  misc_feature (1)...(440): n = A,T,C or G
atggctccgcggctgtgcagcatctctgtgacggcgcttcggctgctggggggcccggggcctcgcgctggggacgttgcgtctgcagctgcggcgcgtttctattccaaggacaatgaaggcagctggttccgctccctctttgttcacaaagtggatccccggaaggatgcccactccaccctgctgtccaagaaggaaaccagcaacctctataagatccagtttcacaatgtaaagcctgaatacctggatgcctacaacagcctcacggaggctgtgctgcccaagcttcacctggatgaggactacccatgctcactcgtgggcaactggaacacgtggtatggggagcaggaccaggcagtgcacctgtggcgattctcaggtggctacccagccctcatggactgcatgaacaagctcanaaacaataagga

SEQ ID NO: 7233 - DNA, 476 bp, Homo sapiens
  misc_feature (1)...(476): n = A,T,C or G
cgccgtccctacggacggccgctcagtgggcctgcgnanccccncgacccacgcgtncggaggcggcggcgccatggtagggcttgcaggatccctgctgccttggtgatcccgggctgacagccagagagcacagcggcggagctcctggagagtgagggttgaagaaagcggagggcagccgcctgcgcccgctggctcccattaggtcggctcctgcagcggtgcccggcagccttggtgaaggccctgcccggcagagatcatgtattgcctccagtggctgctgcccgtcctcctcatccccaagcccctcaaccccgccctgtggttcagccactccatgttcatgggcttctacctgctcagcttcctcctggaacggaagccttgcacaatttgtgccttgcgtttcctggcagccctgttccttatctgctatagctgctggggaaactgcttcctgtaccactgct

SEQ ID NO: 7234 - DNA, 467 bp, Homo sapiens
  misc_feature (1)...(467): n = A,T,C or G
cggcgccngttccatgaaaccctcgctgancgtctgggaaccgcnccggaatccgggtcgacccacgcgtccgctttttgaaaatctacttttattttttaatacctatttttaaaaaatacttttctgtagtatagctccatggcatttgtatagatcatcccttctgagggtcaggaaatctgtattccattcctcattcctcccttgactactgaattactgtgtacctctgggaaaagtcctttcccctctctgggcctgagtttcctctctgaacaatcagaaggttgttgtgtaactttgcactctactctcagaggcactggaaatgcagggccttgtgaaatgcccattttaaaatggaaatctaaactgaaaaaagcatgtaagattaaagaaatcaccgaatgtcaacgacaacaacaaaaaactaacaaacacacacaaaaaagcagaccctttct

SEQ ID NO: 7235 - DNA, 482 bp, Homo sapiens
  misc_feature (1)...(482): n = A,T,C or G
aggggcgagggttttnatccgaaactcccgtataactnncaaannccnnnnnganccangcgggcggaaaaagctgccgcggagaggtgttccttccccttcttttcagcttcttcacccgcgtgagcgagcgcgcgcgcgcggagggggtggtgaaaagctcaagcggggtggcgcgcatgagcggggaagctcctcctccccgcctatatataaagggctggcgcggggctcggcggcgccatttcgtgctggagtggagcagcctctacaacgagctggaggattctgcctaccgatacagagccttcgagtcgtccggggccgccattacaatccacctccatccgcttggaaatggccttcgtcccggcctatgactggtcccagcgggcagtacagaccccctagaagcccctggagctcccctttttcgggccccgcccaatcctcggagtctggccaccccctctactccgccc

SEQ ID NO: 7236 - DNA, 409 bp, Homo sapiens
agaagaataaattcatagcagctcatggtcccaaacaggaaacggttaacgacttctggagaatggtctgggagcaaaagtctgcgaccatcgtcatgttaacaaacttgaaagaaaggaaagaggaaaagtgccatcagtactggcccgaccaaggctgctggacctatggaaacatccgggtgtgcgtggaggactgcgtggttttggtcgactacaccatccggaagttctgcatacagccacagctccccgacggctgcaaagcccccaggctggtctcacagctgcacttcaccagctggcccgacttcggagtgccttttacccccattgggatgctgaagttcctcaagaaagtaaagacgctcaaccccgtgcacgctgggcccatcgtggtccactgtag

SEQ ID NO: 7237 - DNA, 399 bp, Homo sapiens
tactcgctgcatcaggtttgcaagtgagattgcaggagtagatgatttgggaacaacaggcagaggaaatgatatgcaagttggcacatacattgaaaagatgttcatgtctgaactgtctgggaatatcattgatatctgccctgtaagtgccctaacctctaagccctatgcctttactgcccggccttgggaaacaagaaagacagaatccattgatgtaatggatgcggttggaagtaatattgtggttagcacaagaactggagaagtgatgaggattttgccacgtatgcatgaggacatcaatgaagagtggatctctgataaaaccagatttgcctatgatgggctaaaacgtcaaagacttaccgagccaatggtcagaaatgaaaaagg

SEQ ID NO: 7238 - DNA, 390 bp, Homo sapiens
ggaaattggctcagagatggacaacctggcaactgtgagtccctgcttcccgacaccagcctcatggaatatgcaacaactcctgtaccccagtccacggtgttctggcagcagggacacctgggccaatgggccatctggaccaaaggtggggtgtggggccctggatggcagctctggcccagacatgaatacctcgtgttcctcctccctctattactgtttcaccagagctgtcttagctcaaatctgttgtgtttctgagtctagggtctgtacacttgtttataataaatgcaatcgtttggaaaaaaaaaaaaaaaagggcggccgttttaaagaatccctggaggggcccaagtttacccgggcttgcaaagttttattttt

SEQ ID NO: 7239 - DNA, 469 bp, Homo sapiens
  misc_feature (1)...(469): n = A,T,C or G
cgcgtcccactgacgcccgattganggcatgcgaaccccncgancacgcgncgcgcctctggctggctacgagacggccaccatctcctacatcctcactctcactgatgaacagtttctggtgcaggatcagggcccagtgacgcccgtgagcacgctgtgtgcataggccagggaaacggcgcggcggctgctgacccactacgtgaaggtgcagggcctggtcatatcacagatgctgcgcaagagcgtggagactcgcgactggctcagcactctggagccccggaatgtgcgggccgtcatgaagcgggtggtggaggataccaccgccatcgacgtgcaggtgctgcccaggctggccggggtagccctgacgcaggctgggggtactgtcccttcaagaggggctggggcagcagaggatcactggcagtccctgcctggaggaggggacatgtgtatctgg

SEQ ID NO: 7240 - DNA, 417 bp, Homo sapiens
  misc_feature (1)...(417): n = A,T,C or G
tacaaatgggacagttattgctcctttctggctttaaatatggagaggtttccaatgtatggttagatatggaaagcccttgatacaaagtatgtgagtgtcagcattttgcagccatctgtttccctcatgaagatagattagcccagcaaaggtgcagagttcacttaggattcccacggtctagatattctgtgagttgaagccttggttgccgaacacgtttgtctaatacccacctcccacttctgaacaactactgttgagttgaataaggatgccctgggtccaatgtgacattctaattcatctttcatttttactccctcggtttttatgcgtgtacattgccttctttcaaaagcattgcaaaaaaataagacataagtaaggtttataagacagtctcanaccatn

SEQ ID NO: 7241 - DNA, 481 bp, Homo sapiens
  misc_feature (1)...(481): n = A,T,C or G
ggtccctcagttagcatcanganancnntcccanacnncnccnnaattcccggggcgacccacgcgtgcggaaaaaaacacaagcagaaattgtttatagaaatggttacattacaatatactaacccggaacttctggagcaacttagaggtgaaagacttgcacagaaacaagttgagcaaattcagcctcctccctcatctggcacccctctcctcggaccccagccttttccaggacaaggtccaatgtctcagattcctcaaggttttcaacagccccatccatctcagcagatgccaatgaacatggctcaaatggggcctccaggtccacagggacagtttaggcctcctggaccccagggacaaatgggaccacaaggtcctccactgcatcagggaggtggggggccacaaggattcatgggaccacaggggccccagggcccgccccaggggttgccacggcctcaggaca

SEQ ID NO: 7242 - DNA, 451 bp, Homo sapiens
atagaacgcctgctggaccgccctgcagtaccggggcggacccacgcgtccgcataaccaccaccacaatcgacatagaccgttttcactagcccagatgtccccctatccttttgcagtcaatctcctcccctaaagtctggcccatggaaatcactgagctgctctctatcactctagctttgccttttctagaatttcgcataactggagtcagagtatatagtgttttacacctggtttctctcactagcatgatgctatcgagggtcctcatgttgcatttgtcagcaatttgttccttttctttgccgagttgcattccattgtacgaatacaccacaatttgcttatccagtcactggttgatgagcatttggagtttttctaactttggactattaggcataaaacttctataaattttaaatgtgggcgtttgcatgaacat

SEQ ID NO: 7243 - DNA, 415 bp, Homo sapiens
  misc_feature (1)...(415): n = A,T,C or G
ctttgactttatctcctgctctttctacatgactgggcctcccttgggctggaagaattggggattctctattggaggtgagatcacagcctccagggccccccaaatcccagggaaggacttggagagaatcatgctgttgcatttagaactttctgctttgcacaggaaagagtcacacaattaatcaacatgtatattttctctatacatagagctctatttctctacggttttataaaagccttgggttccaaccaggcagtagatgtgcttctgaaccgcaaggagcaaacactgaaataaaatagtttatttttcacactcannnnnnannnnnnaaannnaannnnntaaaaaaaaaaaaaaaaaannnnnnnnnnnnaaaaaaaaaannnaaaaggcacccgcgggg

SEQ ID NO: 7244 - DNA, 407 bp, Homo sapiens
ttctactcattttcacttctttttcactgtatacatgtgttctgctttgacaaagggagtctttatgacttacatttaagatttcttattgccaaaagaacgtgttttatggggagaaacaaactctttgaagccagttatgtcatgccttgcacaaaagtgatgaaatctagaaaagattgtgtgtcacccctgtttattcttgaacagagggcaaagagggcactgggcacttctcacaaactttctagtgaacaaaaggtgcctattcttttttaaaaaaataaaataaaacataaatattactcttccatattccttctgcctatatttagtaattaatttattttatgataaagttctaatgaaatgtaaattgtttcagcaaaattctgcttttttttcat

SEQ ID NO: 7245 - DNA, 491 bp, Homo sapiens
  misc_feature (1)...(491): n = A,T,C or G
tgtcaggcnccaggacgggcgttaagatgtgccttantgaganccgttcgganancccggcncgactcacgcgtccgcccacgcgggcggccatcgcctggccccggctctttgtaccttgtttcgctcgggagcggaaacaggggcatccagagaactgttttaggcatggacaaacaaaactcacagatgaatgcttctcacccggaaacaaacttgccagttgggtatcctcctcagtatccaccgacagcattccaagatagatcagatactgattcatcagcaaattgaacttctggaagttttaacaggttttgaaactaataacaaatatgaaattaagaacagctttggacagagggtttactttgcagcggaagatactgattgctgtacccgaaattgctgtgggccatctagaccttttaccttgaggattattgataatatgggtcaagaagtcataactctggagagaccactaagag

SEQ ID NO: 7246 - DNA, 422 bp, Homo sapiens
  misc_feature (1)...(422): n = A,T,C or G
ctggccttgcccgtcgtgtgctgaatacatgtttcaagaaccgcatttcgggaagggcatgcacgggcatgcaggcggctggtcactctgccctctgctgctgcccggggtggcgtgcactcgccatttgctcacgtgcaggacagctcttgatttgggtggaaaacagggtgctaaagccaaccagcctttgggtcctgggcaggtgggagctgaaaaggatcgaggcatggggcatgtcctttccatctgtccacatacccagagcccagctcttgctctcttgtgacgtgcactgtgaatcctggcaagaaagcttgagactcaagggtggcaggtcacttgcactggcgacattcctcncccagcataatggatgcaggggacaacggaaggcagcgcctagtggggtgaacaacctg

SEQ ID NO: 7247 - DNA, 509 bp, Homo sapiens
  misc_feature (1)...(509): n = A,T,C or G
ataaatgaagcctngnaccgccccgtacataaggcctcggacgcgcncggggattcggagagtggccgggccggcagagcagggggtcgaggacaccaggtctgttctcttagcgatgggccgcggagactgatctgccgccatgattggaggcttattcatctataatcacaagggggaggtgctcatctcccgagtctaccgagatgacatcgggaggaacgcagtggatgcctttcgggtcaatgttatccatgcccggcagcaggtgcgcagccccgtcaccaacattgctcgcaccagcttcttccacgttaagcggtccaacatttggctggcagcagtcaccaagcagaatgtcaacgctgccatggtcttcgaattcctctataagatgtgtgacgtgatggctgcctactntggcaagatcagcgaggaaaacatcaagaacaattttgtgctcatatatgagctgctggatgagattctagactttggctacccacaan

SEQ ID NO: 7248 - DNA, 406 bp, Homo sapiens
acctcattgctgtggtggccggcgtattccacaccatcctatactgtgacttcttgtacttgtacattacaaaagtactcaagggaaagaagctcagtttgccagcataagtgccaaagaccatcaccagcatctgtccttcagggtgctcggacagaattcttaccacagcaaaggcataagatgcttgatacggaaaatcagaaacttaactcttttgttgcagatagtcatcagtggctctgtaaaaacgcagaggaaaagagccagaaggtttctgtttaatgcatcttgccttatctttttttattactgtgtacaaagatttttttacacaaagaaacttaatgctgtattaataaattcagtgtgtagcttcaattggaaaaaaaaaaaaaaggggggg

SEQ ID NO: 7249 - DNA, 426 bp, Homo sapiens
gcgcaaggcctctcgcgacgtgggggtgaacctcgccctcttctactggaagctgctggctgtgcatgtgcatctgggtttcattatcgccttcgagaatgtagtgttcttcttcctgtgccccaacgaccggctcgtgcccgatgtgccagccctggctaccaagataactgcgcgagcgctacctggccaagcaggcggtggcagacaaccgggagacgctgtttcagtcagcaaggcaggcggaccccggccccacccgcaacataatgaccataatgaccacgccccttggcctgccctcaagcttcagctcagccctctctagttcagcactctctagccccgccctcttatttggcctcatccattggaaggattggctggactccctgtagtttccgcctgttcccgcccatcattaag

SEQ ID NO: 7250 - DNA, 413 bp, Homo sapiens
cccacgcgtccgcccaagcaaggttccttggaagaagatgtctgcagaggagctggagaatcagtactgtcccagccgatgggttgtccgactgggagcagaggaagccttgaggacctactcacagataggaattgaagccaccacaagggcccgggccaccaggaagagcctgctgcatgtcccctatggagacggcgaaggggagaaagtggacatttacttccccgacgagtcgtctgaagccttgcctttcttcctgttctttcacggaggatactggcagagcggaaggcaccctggaccacatggtagaccaggtgacccgcagcgttgcgtttgtccagaagcggtatccaagcaacaaaccctgtgtcaaggagagtggaaagcctcatttgaagagctccacg

SEQ ID NO: 7251 - DNA, 416 bp, Homo sapiens
ggcaggccctgctgcttctcgcgctgtgcgccacaggcgcccaggggctctacttccacatcggcgagaccgagaagcgctgtttcatcgaggaaatccccgacgagaccatggtcatcggcaactatcgtacccagatgtgggataagcagaaggaggtcttcctgccctcgacccctggcctgggcatgcacgtggaagtgaaggaccccgacggcaagatgttgcaggtggtgctgtcccggcagtacggctcggagggccgcttcacgttcacctcccacacgcccggtgaccatcaaatctgtctgcactccagtctgggcaacagtgatcccatctgaaaaaaaaaaacaaaaaaaaaaacccaatttagggccagggggggtggctcgcgcctgtaatcccagcacttg

SEQ ID NO: 7252 - DNA, 493 bp, Homo sapiens
  misc_feature (1)...(493): n = A,T,C or G
cgcgccccnntnttttgatcgctttgcggnacctcgacggcctttccgggncgacccacgcgtccggggaaccgggcggagcggccaacatggcggaacgcatgagacacaagaagcggatccaggaagttggcgaaccatctaaagaagagaaggctggggccaagtatcttcgattcaactgtccaacaaagtccaccaatatgatgggtcaccgggttgattattttattgcttcaaaagcaggggactgtcttttggattcaaagtgggcaaaggccaagaaaggagaggaagctttatttacaaccagggagtctgtggttgactactgcaacaggcttttaaagaagcagttttttcaccgagccctataagtaatgaaaatgaaatatgattacgacataaagaaagaaaaagatattggaaaagctgacagtggaaaagaagaagattagacgagcaagagagacaatataacggatgagaagac

SEQ ID NO: 7253 - DNA, 412 bp, Homo sapiens
cggaaggtccttcagaggacctgaggaatgcctgggagaggctaagcctcaagcttcaatgcttctggggttgggcatgaggatgtacacagacacccactaccttactactcacacttcatttcactccttttgtaaatttccaatttaaaaatcaagcacgtctttttagggagataaaatctgagctcttctgtagaaaaatcaatctctaccagtagaaaatgccagggcttgatggaagagctgtgtaaccctttctatgccaaagccaggaaatttggggggcaggaggaggttctcagaatccagtctgtatctttgctgtatgccaaactgaaaccactgggaataatttatgaaacataaaaatcttctgtacttcactccaaggtacatttgcttactgaca

SEQ ID NO: 7254 - DNA, 424 bp, Homo sapiens
ccgattctgaatcagagtcagaacctgaaagtgaatctgaatccagaagagtcactaaggagaaagaaaagaaaacaaagcaagatagaactcctcttaccaaagatgtttcacttctagatctggatgattttaacccagtatccactccagttgcacttcccacaccagctctttctccaagtttgatggctgatcttgaaggtttacacttgtcaacttcctcttcagtcatcagtgtcagtactcctgcatttgtaccaacgaaaactcacgtgctgcttcatcgaatgagtggaaaaggactagctgcccattatttctttccaagacagccttgcatttttggtgataagatggtctctatacaaataacactgaataacactactgatcgaaagatagaaaatatccacataggggg

SEQ ID NO: 7255 - DNA, 497 bp, Homo sapiens
  misc_feature (1)...(497): n = A,T,C or G
cccgcccgagaatggangtggaagacgtcgatanccgtccggaannnccgggncgacccacgcgtgcggacattttaagaaataaattaatggaaaagttactgccttatctatcatgggtaaagcatgaagcgtggctttttggtacttattgtctataaattaggtcaaataacttcagaagactgacttctttttgttcacttttaaatccttttgcttttaaaatatttttaggcagactttatacagtatatcagctgagtcatgatattgatgttggtcgcttccaaacactaatggaatgttttaccagcacttttgaagacgtgaaaattttagcatttgatcttctgatgaaggtatcaaaaacagctgtacattttcaggattcggtgaaactgcaaggcttatttcaggcagcattggagctcagcacaagcaccaaaccatacgactgtgtgacagcttcctacctgctgaacttcttaatctgg

SEQ ID NO: 7256 - DNA, 422 bp, Homo sapiens
tcccagacgctgcccatggaggcgtccagcgagccgccgctggatgctaagtccgatgtcaccaaccagcttgtagattttcagtggaaactgggtatggctgtgagctcagacacttgcagatctcttaagtatccttacgttgcagtgatgctaaaagtggcagatcattcaggccaagtaaagaccaagtgctttgaaatgacgattccacagtttcagaatttctacagacagttcaaggaaattgctgcagttattgaaacggtgtgaagacggattctttggttgataaattgctatcattctaaagtcatggacttcactttcggcaacaaaactaaataaggatggaacatttattgaatgaaaaatgcacttttgtttttccatttttttaaataataaaaatcagacaaaca

SEQ ID NO: 7257 - DNA, 413 bp, Homo sapiens
tagaccttcactttgtcgaccgaagcgggagctcaacacctgcatgaggagggcagcgcgtgcattaaccagccgccactggagggctctgctgccctccggtcaatacactgtatgtactgcctagccagcaccagtcttctgcatcaagaactgaaaccttgctcggaggggattattatagcatcctttgtaattaacggggaaatacacattgctatataatgtctgaaaaagcctgatactacttcaagagattgtgctcagaagaaaatgagagttatcataataggaagctgtggcggtccatgccaactgtgctgtgtcacatacagcgatgagagtggctttcatactttttctttttttgaggaggcacgatcttttaccccaaccgggatggcagggtttgg

SEQ ID NO: 7258 - DNA, 383 bp, Homo sapiens
aatccagcagccaactcgaatccccctagggctcaggcactgagggcctggggacagtggagcatatgggtgggagacagatggagggtaccctatttacaactgagtcagccaagccactgatgggaatatacagatttaggtgctaaaccatttattttccacggatgagtcacaatctgaagaatcaaacttccatcctgaaaatctatatgtttcaaaaccacttgccatcctgttagattgccagttcctgggaccaggcctcagactgtgaagtatatatcctccagcattcagtccagggggagccacggaaaccatgttcttgcttaagccattaaagtcagagatgaattctgaaaaaaaaaaaaaaaaagggg

SEQ ID NO: 7259 - DNA, 424 bp, Homo sapiens
  misc_feature (1)...(424): n = A,T,C or G
aggggcagcaccaccaggtcctggccgggctctcgcacctggcgtcccgccttcaacagcctgcccttgttcatgatcaggtaggtgtagtagcggatcttggcctcgtgggcgcggtccattcgcaggaggaagttgacgttgagggtctccccgggtctgagctctgtacgtagcactgagagatgcaggtaattgttggagttgcccacggtgctgtagggcagagcctgcatggtcctggtagcctgctctgcctccgagagctcctgcttcttcgtgcgcaccgtgatgctcaagggcttctggctggggtgtgtgttgatgctgagtttggccacgccatctccctgggttagagactgcacagtgtcctcgccctggactgccacggggactcggtaggctggagagccatcagggn

SEQ ID NO: 7260 - DNA, 410 bp, Homo sapiens
  misc_feature (1)...(410): n = A,T,C or G
cccggagccgccagaccgtcgcgcccctgccccatcgtagtatatgagctcgcctacacaaggacccccgctaaaagccagagctcccagtccccgaggcttgaagacggggactcccttctccaccaactctgtcctcggggggtggggccccagccgagatcacagcgcgacaggagtgggggtggccgctggagacaggtgaagaaacaagaaaactaagaaatccgagcggttggagggggagtctgtgtggatgggatggggacgccgggggaggggctgggccgctgctcccatgccctgatccggggagtcccagagagcctggcgtcggnggaaggtgcggaggctggccttccgctctggatctggccaaagctcanagggagcacggtgtgctgggaggt

SEQ ID NO: 7261 - DNA, 413 bp, Homo sapiens
gctgaggcaggagaatggcatgaacccgggaggcggagcttgcagtgagccaagattgtgccactgcactccagcctgggtgagagtgcaagactctgtctcaaaaaaaacaaaaaacaaaaaactggtttccacttcattctgtggatcccctactgagaaaatatgccttcacttgactagaggggtatgcggactgtagtagtatcttttttcttttctttcatcgagtcatacagtttgcaaaatatttcagttgacagattttatcagttcacattttcaatatccaggttccacttgagtgtaaaaaggaagtcatactttggtggaagtaccagaaatgttgggcagtaacaagtagaatttatgctctgggtcatgaggaaattttattagagttaaaaaaaatg

SEQ ID NO: 7262 - DNA, 475 bp, Homo sapiens
  misc_feature (1)...(475): n = A,T,C or G
tgggttttaactgacactgaaggcctcggcacgaactcncggncgacccacgcgtccgcccacgcgtccgccgaggaatagatgcacgagggatggttgccttagccatggaggcaagagggttagatgccagaggattagaggcccgtgcaatggaggcccgtgcgatggaagctcgtgcaatggaggcccgagcgatggaggcccgtgcaatggaagtccgagggatggaggccagaggcatggataccagaggcccagtgcctggccccagaggacctatacctagtggaatgcagggtcccagtccaattaacatgggggcggttgtcccccagggatccagacaggtcccagtcatgcagggaacaggaatgcaaggagcaagtatacagggtggaagccagcctggcggctttagtcccgggcagaaccaagtcactccacaggatcatgagaaggctgctttgattat

SEQ ID NO: 7263 - DNA, 321 bp, Homo sapiens
tcctttgaaatttgggtaaaaaattgtacaaccgtatatatagtcatttttgtattttttctatgttgtgaaaaccaaaattgtaattttataagtctttgattcactaaaattatataatttaaatgtattttttgtatatttagaaataaggagtccagagactacgcttaactttctatgcatgcatttgaaagctgtttttacctgataatgtagtaataagttgtattcataaaatactgatctgtgttgcatttcaaaataaactggtgtgtgctctgcctggatttgaaatacctaaaaaaaaaaaaaaaaagg

SEQ ID NO: 7264 - DNA, 477 bp, Homo sapiens
  misc_feature (1)...(477): n = A,T,C or G
cgtggatttaaagagtactttctcatacggcaaccgctccggaannnacgggncgagccacgcgtccgccagaacctggaaaatttaattgaagtaaattttcatttttctgaaaacaagaatggaagctctagcactggagccaagcaggcaggaccacaggatactgttgagtacacaaggacatatgtggagaatagtaaatcacccaaggatggatatcaggagaatatctctggaaaatacatacaaactgtttattcaacttctgataggtctgtcattgaaagagatatgtgcacttactgccgaaaacccttgggtgtagaaactaaaatgattttagatgaattacaaatttgctgccattctacttgctttaagtgggaaaatgcaagcagtctttggaaaatctacaagcgggtgatagtatttggatttatagacagacaatacattgtgaaccttgctactata

SEQ ID NO: 7265 - DNA, 421 bp, Homo sapiens
tgcctttgtgccctccaggccccaaagtcagggaaccaaaagaagaaaggggccgtagctagggcagagctccactgcaatgattgttttaggggtaggagccaggattgccgtctgtggacactgaaatttgaatctcatatacttttgtgacaaaacattcttcctcttttgttcttctcctaccatctaaaaatgtagaaaacattcttagcctatgagttgcacaaaaacaggcagtggccagatttggcccatagaccatagtttgctgacttctgccctaaatcatcctccatttctttccttctgtgtccttgttactgacaaagccactttccctaaaatggggtctttccctgtttggtgccatgaagccaatatgcaaaaccgaaagtgagcctcaagcagtgcaggcttt

SEQ ID NO: 7266 - DNA, 430 bp, Homo sapiens
atggatgggtaacaataatagtaacatcaatactatcagctaacatttagcaagagtttattaagtaccagccaggcgccgtggctcatgcctgtaaacccagcactttgggatgcctaggcaggcagatcacctgaggtcaggagttcaagaccagcctgcccaacatggcgaaaccccatctctactaaaaatgcaaaaaactggccaggtgtggtggcagatgcctgcggtcccagctccttgggaggctgaggcaggagaatcgcttgaacccaggaggcagaggctgcagcgagccgagatcacgccactgcactctagcctgggcgacaagagcaaaactctgtctcaaattaaaaaaaaaaaaaaaaaaaaaaaaaaggggggcccgttttaaagaatccctggggggccccagctctccccc

SEQ ID NO: 7267 - DNA, 339 bp, Homo sapiens
caggaagtcccttgccatcctaaaagccaccccacttctctctaaagagaatggcccagtcctctcccaagtccacacaggggaggtgatagcattgctttcgtgtaaattatgtaatgcaaaatttttttaatcttcgccttaatacttttttattttgttttattttgaatgatgagccttcgtgcccccccttcccccttttttgtcccccaacttgagatgtatgaaggcttttggtctccctgggagtgggtggaggcagccagggcttacctgtacactgacttgagaccagttgaataaaagtgcacaccttaaaaaaaaaaaaaaaaaaag

SEQ ID NO: 7268 - DNA, 413 bp, Homo sapiens
  misc_feature (1)...(413): n = A,T,C or G
tgaagacatatggtatcattttaatttaaggggcagatttccattcttttttggcatgtccttaaaaagaggatttgaaatcaactatatgctaccaagaactttaggatccaattttccaagccaccgtgaagcctcttatggctactattatagttcatgagatgttggacagcatttggtttgtttggtaagagaagaacaaatatggctaattgttaataaggtcccctggctatggtttttgttcttataacagagtttagaatatcagagcatttcttgaatcatacatcattattgtccagggaattcaagaccaaatacaatatcgggagaaaatacaaactccctgtgtttaagaataggggattataatggctcacattggttcatttgatttctaaaaatan

SEQ ID NO: 7269 - DNA, 478 bp, Homo sapiens
  misc_feature (1)...(478): n = A,T,C or G
ggcccccatgagcgcctcggattgactagcatctgccggnncgacccacgcgtncggctaatttggggaaggaaggttggtatatgaatgtcttaaaagtactctttataattatcagtaccagagtgtattatttaactgagcactaaattgctcttgcatgtgtcgcatttgcatatactatggtttctagcagcgaacataaaagcaccagtgatttactcaaaaaaagatattttctatttattttcaattctacctatactatattgaaagactaggaaatactatgaattattgatatgctttttagtgaaatatggtgttttatgtaccataatgaaaaccaacataggtaaacacttggttacagtgatgtaagtgcagaaatgtgtaattgatgcaattaggtgcttcattggccttttaatgaaaactgacttctgcatatgaattataatttgaaatatcctgatcg

SEQ ID NO: 7270 - DNA, 413 bp, Homo sapiens
  misc_feature (1)...(413): n = A,T,C or G
cagagctgttgcactaagcaatgctgccagagatgaggaggcatcagggcagtcatcccttctgctgtttgccccaagaatgccatacaaacctggggatgacccttaaaagtctcccgtcacccccagtattggggggaagctgactattcctcagatgatagcccagtcacttgaagaacaggacaagactattctgtgtctagggggctcaagcactgtgtgtgggtctaacgaatgcattttgtggaaatgggctcagactccccaaagggccatccaacctatgggagtgtctggccttctgaggtcctgaaatgtctcttttgtcagtaaacagctaataccctcaaaaaaaaaaaaaaaaagggggggccgttttaaagaatccttggggggccccaaccttaccn

SEQ ID NO: 7271 - DNA, 426 bp, Homo sapiens
cggacgcgtgggcggcagggaagaggccagcgtgaaggacctgggctcttggccgtggcatttccgtggacagcccgccgtcagggtggctggggctggcacgggtgtcgaggcaggaaggattgtttctggtgactgcagccgctgccgtcgtgacacagggcttggtggtggtagcatttgggtctgagatcggcccagctctgactgaaggggcttggcttccactcagcatcagcgtggcagtcaccaccccagtgaggacctcgatgtccagctgctgtcaggtctgatagtcctctgctaaaacaacacgatttacataaaaaatcttacacatctgccaccggaaataccatgcacagagtccttaaaaaatagagtgcagtatttaaaccaaaaaaaaaaaaaaggggcggccgtttt

SEQ ID NO: 7272 - DNA, 415 bp, Homo sapiens
cccacgcgtccgctgaatatacacgagaaagcctggaatgcttacccctactgcagaaccgttattacaaatgagtacatgaaagaagactttctgattaaaattgaaacctggcacaaaccagatcttggcacgcaggagaatgtgcataagctggagcctgaggcgtggaaacacgtggaagccgtatatatagacattgcagatcgaagccaagtgctcagcaaggattacaaggcagaggaagacccagcaaaatttaaatctatcaaaacaggccgaggacccttgggccccaattggaagcaagagcttgtaaaccagaaggactgcccatatatgtgtgcatacaaactggtgaccgtcaagttcaagtggtggggcctgcagaacaaagtggagaacttcatccata

SEQ ID NO: 7273 - DNA, 472 bp, Homo sapiens
  misc_feature (1)...(472): n = A,T,C or G
gatgcagccgttcctatgaaacnttgctctagtngcatgcaagcancngcncnannnangnggnggacaaatcctatttgatttgcatcgattacttacatgttctgttcatagtcttttgtgaatcattgcctttgtgtttaaaaagagggcctattttgatcttttgagtacgtaccttcctgtttttgtgacaaaagaaaaactttaaacttgtcacaaacagaaaaataatggctatcagaagtatcctttgttttagtgcaagttaccgttactgtacttgcttattgtaaagatggacatttagcattcagtgcacttttcaataaaatgtaattaggaaaaaactgcttaattaacaaaaacagagcatagacaacaaaataatattagaagtgatacataaagaaaatgagatatcaaaagatttttagaaaccaacaaaaactgtgaatctgaataacacaag

SEQ ID NO: 7274 - DNA, 426 bp, Homo sapiens
aattcaactctgttctccttctgactgagtcaaaactcaaaatttccagcaattcaaacctttcgatgtgggtctccctgtttaatatctccatgtaattgtccttcagccttaggtaggtaaagccaagtctctggacaccttcgaccagcgccacctcgtcgggcgaggatgagatgtacacacaggatttccccccgtccggcgatttcctggggccgtctacgctgtcatcgtctttcacctggacggtgtggcagagacagagggcccggaaaaacagctcctcgcgctccctcccgttgacgctgggggacgagtcaatcatgtcgattcctgacgactctgggaggacctgcccgttgcagatgacgtggggcacgtagacatggccttcgatgcagcactccttgaactccatgttgt

SEQ ID NO: 7275 - DNA, 413 bp, Homo sapiens
ggtaggggtccagaggaagggggcgtctgcatcactgaagcccttatcactaagcggaacttgactttccctgaagatggggaactgtcagagaagatgtttcacactcttgatgaactgcagactgtccgcctggaccgggaggggattactactatcaggaacttagaaggcctccagaatcttcacagtctctatctgcaagggaataagatccagcaaattgagaacctggcttgcatcccctccttgcgcttcctgtctctggcaggaaaccaaatcaggcaggtggaaaacctcctcgacctcccatgcctccagtttctggacctttctgagaacctgatagaaacattgaagctggatgagttcccccagagccttctcatcctcaacctgtctggaaacagctg

SEQ ID NO: 7276 - DNA, 485 bp, Homo sapiens
  misc_feature (1)...(485): n = A,T,C or G
cccccatgatcgccctcggnatagaccaccatttcccgggccgacccacgcgtncggaagaatttctctttagttctttgcaagaaggtagagttaaagacactttttcaaaaatggcaatggtatcagaattcctcaagcaggcctggtttattgaaaatgaagagcaggaatatgttcaaactgtgaagtcatccaaaggtggtcccggatcagcggtgagcccctatcctaccttcaatccatcctcggatgtcgctgccttgcataaggccataatggttaaaggtgtggatgaagcaaccatcattgacattctaactaagcgaaacaatgcacagcgtcaacagatcaaagcagcatatctccaggaaacaggaaagcccctggatgaaacactgaagaaagcccttacaggtcaccttgaggaggttgttttagctctgctaaaaactccagcgcaatttgatgctgatgaacttcgn

SEQ ID NO: 7277 - DNA, 413 bp, Homo sapiens
accaaagctctgtgccaggcagctggggacccaaggacactaggaggaataaatcagggtgggcgctggccctcagggagcttctgtcttgctgaggagacaacaccagccagcactcagccatcttaattaattattttatttttttctttacttttctgttttttagacagggtctcactctgttgcccaggctgtcaggctggagtacagtagtgtgatcacagctcactgcaacttccgtctccggggctcaagcaatcctccaaaaaaaaaaaaaaaagggggggccgttttaaaggatccttgggggggccaaagtttacccgggcttgcaacgtattacttttttccttataggggggcgaataaaaacctacttggggatttttgggagggacctttatttgtgg

SEQ ID NO: 7278 - DNA, 420 bp, Homo sapiens
cagaggtggaggccacggaggcagggtctctggggactgtcggggggtacagagggagaaggctctgcaagagctccctggcaatacccccttgtgtaattgctttgtgtgcgacagggaggaagtttcaataaagcagcaacaagcttcaaaaaaaaaaaaaaaaaaaaaaaaaaaaaaaaaaaaaaaaaaaaaaaaaaaaaaaaaaaaaaaaagaaaaaaaaaaaaaaaaaaaaaaccaaaagaaaaaaaaattttagtgggagggggggggggttttattaaaaagagggggggggggcgaaaaaaatttgtggggggggtaaatttttttttttttttgagggaagaaaaaaaaaattgggtggggaaaaaaaaaaaaaaatctctttttgggggggaaaacaccacaccccccca

SEQ ID NO: 7279 - DNA, 467 bp, Homo sapiens
  misc_feature (1)...(467): n = A,T,C or G
ctgggttttacgttagcctcgtaacagcnnngcaannnngggncgacccacgcgtccgtgacgggcaggaaaccattacaccaccacctgggctgttctctccggctcccgccgccacccccgccctcggcttcgcctccgcctccggtgcacattaaagatccaaagtcatgactgactccaagtatttcacaaccaataaaaaaggtaagtatgaggatacaatcaaatcttttgaaattttcaaaagttgtagtgtaagattgccccaggcagaatgctgctgacctcttccttcagacatacatgtagctgacaatctcactggacatctactacttctatagatgaatgtattcaagcaagttattaaagagtaggctttaaaagagagggctgtgatgcacattattatgacttgaagggtctggttagtgaaagagactcctctttgctgtttgagatgg

SEQ ID NO: 7280 - DNA, 410 bp, Homo sapiens
ctcagggccaattattggctgagcccacggtcccctcagcagggatgcgatggtctctgaatcagtgtgcagctggggtcccaggcagcgctgcctgggggctggggaggggaggcccagaggagggctggccatgtgagcaccccatgaagggaccgccccctcccaaggatggtccctttgggtgcagcagcagaggtcacctcctgacatgcgctctgggaaaggtggcagagggcaggacaccatgagctcaggatctgtgtgaggtgtgggaggtgggaagggtgagggtctgggggaatgcggagaaaagggaggcttgaccccgggcaccatgggccactccaggatgggacacggcccctctttcttggggacccagtatgtcctctcctctagacccagag

SEQ ID NO: 7281 - DNA, 493 bp, Homo sapiens
  misc_feature (1)...(493): n = A,T,C or G
agcagggcccnaggncgtcccactgaagccctnatgataggcccgcaanncccgcgncgacccacgcgtccgatttacttgaaggatgtagaatactgtttaaaaaatactaaaatttgtacaattagatcaaagaattgtgcggtcatttcctttttaatttttaaaatgttgaggctcataaatatttgagaacatcagatctaatagagcatagtgatactatttaatttaaccaaagtctctagtgaatatttcaactttgaatgtaaactaacaaataaacctgaccaccaaggagattgtttgcccagagtttcaaagcacattgtctacaaatggaaattgaaataatttataaaatattgacgttactatgttttttaaaaagttcctaattttttcactaaatggaggaaactattagttttattgttaaatatgggagatattaatattcctcttagatgaccagtgattccaattgtgccan

SEQ ID NO: 7282 - DNA, 407 bp, Homo sapiens
  misc_feature (1)...(407): n = A,T,C or G
cagcagcctcccccttgagccccctcgctttccgacgttccgttcccccctgcccgccttctcccgccaccgacgccgccgcctttcgcaggccgtttccaccgaggaaaaggaatcgtatcgtatgtccgctatccagaacctccactctttcgacccctttgctgatgcaagtaagggtgatgacctgcttcctgctggcactgaggattatatccatataagaattcaacagagaaacggcaggaagacccttactactgtccaagggatcgctgatgattacgataaaaagaaactagtgaaggcgtttaagaaaaagtttgcctgcaatggtactgtaattgagcatccggaatatggagaagtaattcagctacagggtgaccaacgcaagaacatatgcn

SEQ ID NO: 7283 - DNA, 412 bp, Homo sapiens
  misc_feature (1)...(412): n = A,T,C or G
atggctcgtcaccttcgtgaataccatgacctgctcaatgttaagatggcccttgacatggagattgccacgtacaggaagctgctggaaggcgaggagagcangatttctctgcctcttccaaacttttcctccctgaacctgagggaaactaatctggattcactccctctggttgatacccactcaaaaaggacacttctgattaagacggttgaaactagagatggacaggttatcaacgaaacttctcagcatcacgatgaccttgaataaaaattgcacacactcagtgcagcaatatattaccagcaagaataaaaaagaaatccatatcttaaagaaacagctttcaagtgcctttctgcagtttttcaggagcgcaagatagatttggaataggaataagctg

SEQ ID NO: 7284 - DNA, 436 bp, Homo sapiens
  misc_feature (1)...(436): n = A,T,C or G
tgaagaagcaggagctgctggaagccctcaccaagcacttccaggactgaccagaggccgcgcgtccagctgcccttccgcagtgtggccaggctgcctggccttgtcctcagccagttaaaatgtgtttctcctgagctaggaagagtctacccgacataagtcgagggactttatgtttttgaggctttctgttgccatggtgatggtgtagccctcccactttgctgttccttactttactgcctgaataaagagccctaagtttgtnnnanaaaaannaaaaaaaaaaaaaaaaaaaaaaaaaggggggggggccttttaaaaaatccctgggggggcccaatttttcggggggggggaaaaaaaaatttttttcctttaaggggggcgaattaaaaacccaccgggaatttttggaaaagaacctttcttt

SEQ ID NO: 7285 - DNA, 410 bp, Homo sapiens
  misc_feature (1)...(410): n = A,T,C or G
gaagagactgtcgcctgccttcctccgttgttgcgtgagaacccgtgtgccccttcccaccatatccaccctcgctccatctttgaactcaaacacgaggaactaactgcaccctggtcctctccccagtccccagttcaccctccatccctcaccttcctccactctaagggatatcaacactgcccagcacaggggccctgaatttatgtggcttttatacattttttaataagatgcactttatgtcattttttaaaaaaaaaaaaaaaaaaaaaagggggggccgctttaaaggacccctgggggggccaaagtttacccgggcaggcaacgaaaaaactttttccctatagggggcggtattaaaacctacctgggaaccttggaaagggacccttacttcgggn

SEQ ID NO: 7286 - DNA, 410 bp, Homo sapiens
  misc_feature (1)...(410): n = A,T,C or G
tgcgcggtaagaagctgcgcggtagcgcggngaggttccactgatgaaattatgaccaggtgggcccgagttagtaccacatataacaagagacccttgcctgcaacatcatgggaggacatgaagaagggatcctttgagggaacaagccaaaacctaccaaagcgtaaacaacttgaagccaataggctatccctcaaaaatgatgcaccccaagcaaaacataaaaagaacaaaaagaaaaaagagtacttaaatgaagatgtgaatggattcatggaatacctaagacagaattcacagatggttcacaatgggcaaattatagcaacagacagtgaggaagtaagggaagatattgcacgtgctttaaagaaagacagtcgacgggaaggaagaagattaaaaag

SEQ ID NO: 7287 - DNA, 433 bp, Homo sapiens
  misc_feature (1)...(433): n = A,T,C or G
cttctaacctcaggaaggaaagcccaggggcccctgggatgtcctgccatactgggaagacaaagattgtgactgagaaggtgggggcagggcaggagaagggggaagaagggagaatggatcaaccccaggccggggaaagagatgaatgaaggtccacgccagagtgacatgctctaagtaggggaaatcttcctaactagagttcccatgactttggcaacatttgtgtgantngaacattattaatatatgtgccttgtttatttataaatcaattgggggggggggtttttataaagagttttgggggggccctttttctctttgggggtgggaaagtaatttctttttttctttgtggggggtaaaaataaaccccttggggtctttgtgaaaaacactcttcttttgggtgggaaaaaataaaaan

SEQ ID NO: 7288 - DNA, 405 bp, Homo sapiens
gcacggtgaagcccaatgcaaacaattctgggcacggtgaagcccaatgcaaacagaattgctttagatttccaaagagggaatgatgttgccttccactttaacccacgcttcaatgagaacaacaggagagtcattgtttgcaatacaaagctggataataactggggaagggaagaaagacagtcggttttcccatttgaaagtgggaaaccattcaaaatacaagtactggttgaacctgaccacttcaaggttgcagtgaatgatgctcacttgttgcagtacaatcatcgggttaaaaaactcaatgaaatcagcaaactgggaatttctggtgacatagacctcaccagtgcttcatataccatgatataatctgaaaggggcagattaaaaaaaaaa

SEQ ID NO: 7289 - DNA, 408 bp, Homo sapiens
cgcaggtcggggaaaagagtatgtgtgtggagatgtacacagatgggcagtggggtgacaggaactgcctgtactcccgactgaccatctgtgagttctgagaggcatttaggccatgggacagggaggacgctctctggccttcggcctccatcctgaggctccacttggtctgtgagatgctagaactccctttcaacagaattcacttgtggctattgggactggaggcacccttagccacttcattcctctgatgggccctgactcttcccccaacaagaataaagtttattaacttatttaaaaaaaaaaaagaaaaagaaaaaaaaaaaaaaaaaattaaaaaaaaaaataaaattatgataatagaatgggtgtggtccttctcctctttcctttttttgg

SEQ ID NO: 7290 - DNA, 468 bp, Homo sapiens
  misc_feature (1)...(468): n = A,T,C or G
gtgcgcnggtccctcagtagtcctcgangagtntctaggcaccngcncnacccacgcggncgaatagaaccacaccacatggggtctgctcggtctcaatattttaaaacaggccgggggtggtggctcacgcgtgtaatcccagcactttgggaggcggaggcgggcggatcacgaggtcaggagatcgagaacatcctggctaacacggtgaaaccccgtctctactaaaaatacaaaaaattagccaggcgtggtggcgggcacctgtagtcccagctactcgggaggctgaggcaggagaatggcgtgaacccgggaggcagagcttgcagcgagcagagatcgcgccactgcactccagcctgggcgacagagcgagactccgtctctaaaaaaaaaaaaattaagggaaaccacttattaaatggaaattgctatcctcggaggggggagccccccaaacct

SEQ ID NO: 7291 - DNA, 403 bp, Homo sapiens
ctccatggtggcttcatgcctcccttctcccagctcaggtggccctgagggctccctcggaacagtgcctcaaatcctgacccaagggccagcatggggaagagatggttgcaggcaaaatgcactttatagagattttctattgctgggaaggtgtgtttctcccacaatttgtttgtgaatattcacttgttttataaatgtctgacctgtcttgaaaaaaaaaaaaaaaaaaggggcggccgttttaaagaatccttgggggggcccaaccttacgcgggcttgcaacgtattagctctttccttatagggagccgtattataacctacctgggaatcttgtgaaaggacccttacttctggggggggacatattggaacaacctccctccagaaattta

SEQ ID NO: 7292 - DNA, 418 bp, Homo sapiens
agaacgccagtctcccaggccccctgcatctatcgagtttgcaatgtcacaacctgcacagatcctgaacaacaaatgaataacgatgaatgtctttttggttgtaatttaacaagtcaaataaaataatcattgctgagcacacaaaaaaaaaaaaaaaaaaaaaaaaaaaaaaaaaaaaaaaaaaaaaaaaattaaaaaaataaaaaaaaaataaaaaaaaaaaaaaataacgaggaatgcccttttgggtgtaaatttaacaaggcaaaaaaaataatccttgctgagcacaccaaaaaaaatttttttttttgggggggggggggggggtgttccccgcctcctccccctcgggccggggaacctcttgggggaaaaaaaaaatagtttcctttttgtggggggtgtttttgtt

SEQ ID NO: 7293 - DNA, 482 bp, Homo sapiens
  misc_feature (1)...(482): n = A,T,C or G
agaggcgaggggtttaacctgaaagccatgctacccctccgaancccggncgaaccacgcgtccgcccacgcgtccggcgagtacagcaagtacgcaagaaattggaagaagcactgatggcagacatcttgtcgcgagctgctgatacagaagagatggatattgaaatggacagtggagatgaagcctaagaatatgatcaggtaactttcgaccgactttccccaagagaaaattcctagaaattgaacaaaaatgtttccactggcttttgcctgtaagaaaaaaaatgtacccgagcacatagagctttttaatagcactaaccaatgcctttttagatgtatttttgatgtatatatctattattcaaaaaatcatgtttattttgagtcctaggacttaaaattagtcttttgtaatatcaagcaggaccctaagatgaagctgagcttttgatgccaggtgcaatctactggag

SEQ ID NO: 7294 - DNA, 388 bp, Homo sapiens
gaaacgtgtgtgtcagttggaccatgtgggaccctgatggacctgaaagaccaggatcggtccagctcagatattgagggctctgaagcctcggtctgtcttctctggagcagctgtggcttccccgtggctgcttggtgacatggattaacgctacgtgggctgcagcatttgggatccaggctacctagaggggcatcgggccagggaaaacctcggattagcaagcaataaaaacatgacctcactcttcctcaaaggagcccctggtcttccctgtgtgactcagttctttccatctgtttgtcccgctgcaagcctctttctgcgctgactgtgacatcggaacgtggccttcctgtcaccccctccgtgccacgcactgaag

SEQ ID NO: 7295 - DNA, 407 bp, Homo sapiens
atacaccctgcaatacacctacccatatgcatatagcggagcagcggaggagaaccctgctgaaagatttccatgacacctaagttgggatgtggatgtgccggggtgaggaagatgtggctgcaaggtctcccggctgccatactgcatgctgcaggctctgcctttcatgaccccaggcaacagccagggccccactcctgagagacactggcaacacctcttagttgatttctgttttcttctcttttcactttttgtttctaccagggtagaggccatgttgaactggcctcttttcaggacttttatttccccctggatggttgttgggagggagggaaagtgttttctgaatggctattaatagtattagatcattacaacttatgtaactttcaaaggtt

SEQ ID NO: 7296 - DNA, 410 bp, Homo sapiens
agatatctgtgcttctcataattactgaaagctgcactattttactaataccttcgggatcactgtcccgcatgttccgtgtttgagcaaagggaagagcttaaaggaggaagaagaatgaactgtcttacaccacttgagctcagacctctaaaccctgtatttcccttatgatgtcccctttttgagacactaatacttaaatacttactagctctgaaatatattgagttttatcacagtattctcagggtgaaattaaaccaactataggcctttttcttgggatgatcttctaggcttaaggattggggacattataaacttgaatacatatgctggacacagttgatattccaaattgtatggatgggagggagatgtgtcttaagctgtaagctattctttgg

SEQ ID NO: 7297 - DNA, 408 bp, Homo sapiens
gtgtacctaaatatttatcatatccttgcccttgagtgcttgttagagagaaagagaactactaaggaaaataatattatttaaactcgctcctagtgtttctttgtggtctgtgtcaccgtatctcaggaagtccagccacttgactggcacacacccctccggacatccagcgtgacggagcccacactgccaccttgtggccgcctgagaccctcgcgccccccgcgccccccgcgcccctctttttccccttgatggaaattgaccatacaatttcatcctccttcaggggatcaaaaggacggagtggggggacagagactcagatgaggacagagtggcttccaatgtgttcaatagatttaggagcagaaatgcaaggggctgcatgacctaccaggacag

SEQ ID NO: 7298 - DNA, 475 bp, Homo sapiens
  misc_feature (1)...(475): n = A,T,C or G
cgggcggggaattattccgacgacgctataccgtccggaancccggncaccacgcgtccgcttgtctgcccgccgctggcctggccccgtctgtctctctcagcagctgtctttctcgcgcccactggccgggctctcctcttccccgcagttgcctccttctctgcctgcctgggtggccgccatgggccggaagcggctcatcactgattcctacccggttgtgaagaggagggaggggcccgctgggcacagcaagggggagctggcacccgagctaggggaggagccccagccccgcgacgaggaggaagcggagctggagctgctgaagcagtttgacctggcctggcagtacgggccctgcaccgggatcacacggctgcagcgctggtgtcgggccaagcagatgggcttggagcctcccccagaggtggggcaggtgctgaagacccaccccggagacccccgcttg

SEQ ID NO: 7299 - DNA, 408 bp, Homo sapiens
  misc_feature (1)...(408): n = A,T,C or G
cccacgcgtccgcaaacttcctgtgaagttaggaagaaatattagtaacccacacacttgaagtgagttttccattttaccttgtagaaattgtactagagatagaacaaatgaaattagttttcttttccaggtatatcctgtgagataccagcacagagtattttctctgagttctctcagggttaaagctcagtgagcttttcttttctctttggtagtgtggaaccatttgtaccgtagaaagaatagctggaaatatggaactccaatgtggcaatacagtaataaacagaaggaatgagtcagtaggataatatattcgagtgatttctgtatatttcagntataatgttttttatatagtgtatatttcagttatttcagttataatgtgttttagaatgg

SEQ ID NO: 7300 - DNA, 411 bp, Homo sapiens
cacaactaccctccaaaccaccacagtctctgtcacacccccactaccgctgccacgccctctgaatcatgcagggaagggtctgcccctgccctggcacacacaggcacccattccctccccctgctgacatgtgtatgcgtatgcatacacaccacacacacacacatgcacaagtcatgtgcgaacagccctccaaagcctatgccacagacagctcttgccccagccagaatcagccatagcagctcgccgtctgccctgtccatctgtccgtccgttccctggagaagacacaagggtatccatgctctgtggccaggtgcctgccaccctctggaactcacaaaagctggcttttattcctttcccatcctatggggacaggagccttcaggactgctggcctgg

SEQ ID NO: 7301 - DNA, 464 bp, Homo sapiens
  misc_feature (1)...(464): n = A,T,C or G
cggcggngnattaaatgacgctgcggnactgaccagtcatccccggnncgacccacgcgtccgctcccaccaactgattaaggagtgggtggaaaaacagacctgttcttccctgcctgcttagcccggatcaaggcacttacatcgctccttggtattcctgagggacaaactanagatcagttgacaaaggagaagtgacaaaagataagctgcagaaggacctcagaagggcagagcaaagggtgagcctacagtaagacacttctatcagcagtgttaatggaagaaattcctaccaatgggcaatcaaaaaagccagtgtgagaagaaaactgatgagctgtcaactgtcaaaaatcagggggaagggggaagcattagtttggatgtaggcccttgttcagtcattttctctaaggccttggaagcaaacatcttctggcatatggcttgttaatgtt

SEQ ID NO: 7302 - DNA, 408 bp, Homo sapiens
  misc_feature (1)...(408): n = A,T,C or G
tgtctgcgtccctgttagcataatgtgaggaggtggagagaccagcccacccccgtgtccactgtgacccctgttcccatgctgacctgtgtttcctccccagtcatctttcctgttccagagaggtggggctggatgtctccatctctgtctcaactttatgtgcactgagctgcaacttcttacttccctactgaaaataagaatctgaatataaatttgttttctcaaatatttgctatgagaggttgatggattaattaaataagtcaattcctggaatttgagagagcaaataaagacctgagaaccttccngatnanaannnnnnnnnnnnntnnnnaaaaaaaaaaannggggggggccctttttaagaatcccttggggggccccacttttccccgtccc

SEQ ID NO: 7303 - DNA, 387 bp, Homo sapiens
  misc_feature (1)...(387): n = A,T,C or G
tcatttacacccttagtaaacccaatgaattaggcttctttactgcagatttttgtagaatctgctgtaggtttttatcttcactggctagtgctaaaaacaccctgacaaattcttaacatttttctccttgcctagattctgtattgacccatgcctttgattttggctttattatgggatttctacctgtataataatagaaaaaataccttccaggctgggtgcgggggctcacgcctgtaatcccagcactttgggaggctgaggcaggtggatggcctgaggtcaggagtttgagaccagcttggtcaacatggcgaaaccccatcctccnngngnagaagggaaaaaaaaaccttcccggctgggggcgggggctcaccg

SEQ ID NO: 7304 - DNA, 427 bp, Homo sapiens
  misc_feature (1)...(427): n = A,T,C or G
ctgggccgccgagccttcatccctctccccagcgctgtggtgcaagctgtctttgggcgacagcgtgccatcatgctgctggagggccagaaggtgatcccacagcgaacactggccactggctaccagtattccttcccagagctaggggctgccttaaaggaaattgtagcctaagtaggtcgtggcaagggcctgaggcctgttcctcacaggcttccaggttaggcactgtgaataggctcagctcctctagagagctgaagccatctggttcttagattcctctcccagtcctctttcccattgttctgttgctccaccttattgtctcaaggccgtaatctcatcaggttgggacattaatcttttcaactccttgtaagatttcccagtttggtttctctacatgtcctgcagctgcccn

SEQ ID NO: 7305 - DNA, 398 bp, Homo sapiens
  misc_feature (1)...(398): n = A,T,C or G
cctgctccttcggaggacgtgccctcacccctcactggtccactggcttgagactcaccccgtctgcccagtaaaagcctttctgcagcaaaaaaaaaaaaaaggggggcccgtttaaaagaacccttggggggcccaaatttaacgcgggttggcaaggaaaaatttttttccttatgggggggcttattaaaccctcctggggatttttgggaaggaacctttcttttggggggggaacatatgggcccaccccccctccaaaatttaaaggctttggggaaaaaaaaaatttttaaggggtaaagggggaaaaacaacctcattaccctggcggttagaaagttggnnnncncncncncaccacctttccggtccacttactaaacgcactgcct

SEQ ID NO: 7306 - DNA, 462 bp, Homo sapiens
  misc_feature (1)...(462): n = A,T,C or G
tttgagcgcctgagtgataggcctggaanacccgggncgacccacgcgtncggtaagaaaatggaggcccaaacttcgtggctgtccaaaggctgtgtgacccgttgggcattggaaccagtccagccatctttgtcagtccgttgcttttacccctgtggtttagggcagtcagttttcttgcccttaaattatcaaaagccctttgattttattagtagtagaagttctagcttgttcccgctgccaaagtgtccttgtactgacaaatgtagaccagcagtgttcgatgcaattttcttcaaggaagaaaatgtgtctgctggccagtatggtagtcagcagtcacatttggcagccaagcacttagaatatatggttgatggtcctaaggaaatatctccgctttactttaaatgtaagtaaccacatatgggtagtggctaacgagtgggacggcac

SEQ ID NO: 7307 - DNA, 408 bp, Homo sapiens
cggacgcgtgggcccagacgctggttcgagagtacttttcctgggagggggccttccagcatgtgggcaaagccttcaatcagggcaagatcttcaagtgaacatctcttgccatcacctagctgcctgcacctgcccttcagggagatgggggtcattaaaggaaactgaacattgaaaaaaaaaaaaaaaaaaaagggggggccgttttaaagaacccctgggggggccaaagttaacccgggatggcaacggaatagctttttccttatagggggccgtattataacctacctgggaatctttggaaagaacccttacttcgggggggggacatattgggccaacctccctacaaaaattaaagcctctagggaaaaaataaaattttaaaggggataaggggaa

SEQ ID NO: 7308 - DNA, 404 bp, Homo sapiens
caagacaataaagggatgtatcagtgtggagccttacatactgggagaatttgtaaaattgtcaaataacacgaaagtggtgaaaacagaatacaaagccacagaatatggcttggcctatggccatttttcttatgagttttctaatcatagagatgttgtggtcgatttacaaggttgggtaaccggtaatggaaaaggactcatctacctcacagatccccagattcactccgttgatcagaaagttttcactaccaattttggaaagagaggaattttttacttctttaataaccagcatgtggaatgtaatgaaatctgccatcgtctttctttgactagaccttcaatggagaaaccatgcacatagaatacggcacagtctggtcctttggggcttg

SEQ ID NO: 7309 - DNA, 405 bp, Homo sapiens
ttttgtcagcagcatttaaagaccctcaggaagcttctgcgtctggaagctagaaacctttatatctgtgagtgtaaaaattgactttttactatagatatgaagagaatcatgattagaatgagtttatgattcaactctacagattagaatcaggaatataatgccctgtgtctgtaacatcgcttcctttgattccctttgttcattagaccaaacatgcgttgaagtgttgagttcctaatccatgtgaaggcatcaatccctatactgggatatataagtagggtaaatgttgagtaggacattaaacatgacccttggagctcagacaggcaaaaagacttttcaggagaaacagaaacaggccagagcttttcgttgccatgtcaatagaaatggatt

SEQ ID NO: 7310 - DNA, 384 bp, Homo sapiens
  misc_feature (1)...(384): n = A,T,C or G
tctggatctcgttcatagacagctactttgaaatcctcttcctgttccaggccctgctcacagtggtgtcccaggtgctgtgtttcctggccatcgagtggtacctgcccctgcttgtgtctgcgctggtgctgggctggctgaacctgctttactatacacgtggcttccagcacacaggcatctacagtgtcatgatccagaaggtcatcctgcgggacctgctgcgcttccttctgatctacttagtcttccttttcggcttcgctgtagccctggtgagcctgagccaggaggcttggcgccccgaagctcctacaggccccaatgccacagagtcagtgcagcccatggagggacaggaggacgagggcaacggggccn

SEQ ID NO: 7311 - DNA, 405 bp, Homo sapiens
taattagatgcaaatgagagagcagtttagttgttgcatttttcggacactggaaacatttaaatgatcaggagggagtaacagaaagagcaaggctgtttttgaaaatcattacactttcactagaagcccaaacctcagcattctgcaatatgtaaccaacatgtcacaaacaagcagcatgtaacagactggcacatgtgccagctgaatttaaaatataatacttttaaaaagaaaattattacatcctttacattcagttaagatcaaacctcacaaagagaaatagaatgtttgaaaggctatcccaaaagacttttttgaatctgtcattcacataccctgtgaagacaatactatctacaattttttcaggattattaaaatcttcttctttcacta

SEQ ID NO: 7312 - DNA, 404 bp, Homo sapiens
  misc_feature (1)...(404): n = A,T,C or G
tagaggtacctgctccgcccttgctgctgcagtgggtcaagacggatcaggctctcctcatgctgtggagggatggcactgtccaggtgaacttctacggggaccacaccaagctgattctcagtggctgggagcccctccttgtgacttttgtggcccgaaatcgtagtgcttgtacttacctcgcttcccaccttcggcagctgggctgctctccagacctgcggcagcgactccgctatgctctgcgcctgctccgggaccgcagcccaagctaggacccaagccctgaggcctgaggcccgggcctggcaaggtcttgccctttgctttgtgggccttccccttaccttggttgccttacgggggctttgggccgaatcccccatggaatcanggaccan

SEQ ID NO: 7313 - DNA, 408 bp, Homo sapiens
ttcagaggctctgcatgcccaggaggcttctctgagactgggaaggagtggaaactcagtagcccgtggtcctggttgcgcgctccctcccatgtcttcattatctgatttggtaaaatatctacaagacgggggagtccgggctgctttctttgacactggtcatcactccacacctagacgctatgtccatgtctggaagctgcttttaaggaagttttgatgcagagaagagtggccggtgctcttcctcgcatgccaccatctgcttacttccagaagctaattattttcatgtgactgatgtgactaatattttttaacgcctgcagcccacttgaaggcatccttacctggacactggtgacatgcccacaaaccctgggagaggcattttgatggttctga

SEQ ID NO: 7314 - DNA, 393 bp, Homo sapiens
tggctagttcatttcattaagtggctacatcctaacatatgcatttggtcaaggttgcggaagaggactgaagattgactgccaagctagtttgggtgaagttcactccagcaagtctcaggccacaatggggtggtttggtttggtttccttttaactttctttttgttatttgcttttctcctccacctgtgtggtatattttttaagcagaattttattttttaaaataaaaggttctttacaagatgataccttaattacactcccgcaacacagccattattttattgtctagctccacgtatctgtattttatgtaatgtaattgacaggatggctgctgcagaatgctggttgacacagggattattatactgctatttttccctg

SEQ ID NO: 7315 - DNA, 390 bp, Homo sapiens
  misc_feature (1)...(390): n = A,T,C or G
agagcgtatgacccctcttcccgctgctaccgaggctgtgtgttgaggtcgaagagggatgtgggctcctaccaggaaaaggtggacgtcgtcctgggtcccatccagctgcagacccccccacgccgagaagaggagcctcggtaggtggtcgctctcagaccccactgtccaccagggcgcagacccctgactcggggacttgggatgttcctcttggtgtcatattccaactcagattgagccctacattgtgctgcacctggtcatacggagttgaatcagacctggttcccgcctcccccaaggctcatggtccttggaggacccgttgcagggcgaggtcaagagagttctgacctggatggcccatagacctgacgtcccaan

SEQ ID NO: 7316 - DNA, 391 bp, Homo sapiens
ctcacctgaaaactctaaaaagtaatgggatgaataaaattggactcagagtttccattgacactgatatggttgaatttcaggcaggatctgaaggccaacttctgcctcagcattatctaaatgatcttgatagtgctctgatacctgtgatccatggtgggacctccaactctagtttaccattagaaatagaattagtgtttttcattatagaacatcttttttagtgaaagaatgtgccatattacatattgcaacctaatttgttaaaactaactccagcactaaagctgaaatgccacaaacactaaaagtataaatatgtctgatttttgaaacacataagctttgctctttaagcaggaatgatcttttcaaatcattagca

SEQ ID NO: 7317 - DNA, 397 bp, Homo sapiens
atgatgaaaaattatttaacgaatacaatgtatgttattcgagtgatggatactctttataaaagagttgatttcaccactatgcaatctatgcaagtaacaaaagtgtacttataccccataaatttattgaaattaaaaaataaaaaataaaaggcaaatgtaagtatggtttgttaaaaaatgtatggaatgaatgcatcattcatataaaatatacggactgaacactcaacattaatgatgagcgataattcattcattggataaatatttgtaaatttcctactgagtagatttatctctgcaatgccactgccactgttcataagaagttaagcatcttaactataacaacagctacattaatagagtatttaatctgtcaggagctatg

SEQ ID NO: 7318 - DNA, 387 bp, Homo sapiens
  misc_feature (1)...(387): n = A,T,C or G
gttaggcatgaaggagaggctctgttctcaggtacggggccggcggagtcaaggctgccatacccattgggcttatctcaggaagaggcagaaaaaagtcttcaagcctatggttattataaatcctacacgctcctgatctcaagcgatccacccatcttggcccctcaaggtgctgggattaccggcgtgagcgacctcatttggcccaccactgtaaccattttaaggcacacagttcagtgacatttagcccattcacaaggccgtgcaaccaccacttccctccatttccagaacttttatcatcaccccaaaaggaagccccagccccattatcagcaccattttcaagacattctggaggcagagacacttcctcccttn

SEQ ID NO: 7319 - DNA, 398 bp, Homo sapiens
tctggatctcgttcatagacagctactttgaaatcctcttcctgttccaggccctgctcacagtggtgtcccatgagctgcgtttcctggccatcgagaggtacctgcccctgcttgtgtctgcgctggtgctgagctggctgaacctgctttactatacacgtggctgccaacacacaggcttctacagtgtcatgatccagaaggtcatcctgcgggacctgctgcgcttccttctgatctacttagtcttacttttcggcttcgctgtagccctggagagcctgagccaagaagcttggcgccccgaagctcctacaggccccaatgccacagagtcagtgcagcccatggagggacaggaggacgagggctacggcgcccattacaggagtatg

SEQ ID NO: 7320 - DNA, 452 bp, Homo sapiens
  misc_feature (1)...(452): n = A,T,C or G
ctactctgaacaacctgantcggaaaacctcggaanngccccacgcgtncggaggtgagaacgacccccggaccgaccaaagcccgcgcgccgctgcatcccgcgtccagcacctacgtcgcgctgccgtcgccggcgccaccatgcccaatagaaaggctgaaggggatgctaagggagataaagcaaaggtgaaggacgaagtaagtcattctctcttcaagggtcaaagccttggactagcagaggccactggactcggtgattaaccgtaacctgtgtcctgaatttacactcctataatctagagcaaattgataccaaactttcaaagcgacttacctgtcctatttctaactttctcgttgcctttaatagccacagagaagatccgcgagggtgtctgctgtaagtgtatgcttttgaattttcgtgcttgtccctgaaactat

SEQ ID NO: 7321 - DNA, 397 bp, Homo sapiens
catttatcattatactgacctttgagcatttcccccaactcacagtattttgtttctcagttatgggatattcgcttgctttgtgaaaaacatgaaaatgttagcagagctcagtgctttgcccagcagatggcatttgtgtgagtttttcaagatcctttggaatctgtcacttgccaattacccaatttgttttgaatactctgtatttccagttaatattgcaccatttacataaagagaatgtgccaaaattgctgtaatctgttctgtaatcaaatctgtctgctgtagatgtataatttacttttgttaagttgtttactgcaaaatggtctcaagaaaatccttttctattcaccataattactaagatattaatcagctctcagacata

SEQ ID NO: 7322 - DNA, 406 bp, Homo sapiens
cctctctgagcctttatttccttgcagacaagctgtttatgacagaggcgtttactggcatgaacaagggggctgacatggctgccatgaggggcgggacccaacaaatcccaccatgctgagcacgcgggacgagccaagggaatggaaggcattccagaacaacccatgacccctgagaaaggcttgcggaataacgtgcgcagggagaggtttgggaggcgacctgctgggatttgtggatgttctcacatctgacacagggaggacttactcaagatccagccacctgccaagcgcagaggctcacgcctgtaatcccatcactttacgaggccgaggcaatggattgcctgaggtcacgagctcaagaccagcctggaccacatggtgaaacctgtctgtg

SEQ ID NO: 7323 - DNA, 386 bp, Homo sapiens
atggagaacgtgacagtgctgggtgaggacgtcatagttaatgatgagctctacctcaacggagccagcgtgctgccccacaagtctattggcgagtcagtgccagagcctcgtatcatcatgtgaggggatgcagtggggctggccgagccccggttttcccatcagcaaggggagtgctggcctgacacatcaaaagaccctggacttgtcattatttgtctggggggcactgggtgaagctgaagctgttggacacctgccttctcatgtggacatcatctggcaggatccctgctgggcacaccccacaaaccccactccctcaagaagggccagggccagggctgtatggaataataatttaatgctcactgtgaaaaaaa

SEQ ID NO: 7324 - DNA, 456 bp, Homo sapiens
  misc_feature (1)...(456): n = A,T,C or G
ctcactctgaatacggtcggaatgggatgacctcgcgagnccacccacgcgtgcgnggacgcgtgggcaacgacttcatccagacgaccatttcccgcttcgaggccctcaacctgagcttcaagaacatgtgcaaactcaagcccctcctggagaagtggctcaacgatgcagagactatgtctgtggactcaagcctgcccagccccaaccagctgagcagccccagcctgggtttcgacggcctgcccggccggagacgcaagaagaggaccagcatcgagacaaacgtccgcttcgccttagagaagagttttctagcgaaccagaagcctacctcagaggagatcctgctgatcgccgagcagctgcacatggagaaggaagtgatccgcgtctggttctgcaaccggcgccagaaggagaaacgcatcaacccctgcagtgcggcccccg

SEQ ID NO: 7325 - DNA, 387 bp, Homo sapiens
  misc_feature (1)...(387): n = A,T,C or G
atcacaggaagcgattgcaggcagttcaggccagactgcatgcaatatctatatgagtgtattccaatgccttgcaggaatcagcaaacagtatcttgtataatggcttgatagaggagttggtatatgtccttcagataacggataagcagcttatggagattaaagcagcttctttacgaacattaacatcaattgtccacttggagagaactcccaaactcagcagtattattgactgtactggaactgcctcctaccatggatttttgccagtgcttgtaaggaactgtatccaggccatgattgatccttccatggatccataccctcaccagtttgccactgctctcttctcttttttataccatctggccagctacgatn

SEQ ID NO: 7326 - DNA, 289 bp, Homo sapiens
caggatgtggcccagaggtgcaaggagctgggtatcaccgccctacacatcaaactccgggccacaggaggaaataggaccaagacccctggacctggggcccagtcggccctcagagcccttgcccgctcgggtatgaagatcgggcggattgaggatgtcacccccatcccctctgacagcactcgcaggaaggggggtcgccgtggtcgccgtctgtgaacaagattcctcaaaatattttctgttaataaattgccttcatgtaaaaaaaaaaaaaaaaaggggg

SEQ ID NO: 7327 - DNA, 435 bp, Homo sapiens
cggacgcgtgggcacctggtggcacttttggggggcaatgttaacaactatcacattttactcatcaagtctctttcatttcggcagtttaaagacacaactgtgggctttctgaggcgatgcccgttgggcaaacttaggtttatgtgtttggtttttcagctgacgtggaagccctgggtgggcgtcccctggctggcctggcttttgggttcaagtctgtatgtatggagtgggttggggccccaaagctttgctgctattgatttgtccccgacagcaggcaaagcctcacattgccctcaattttccccctttcatttgaaggaccagcttttcatggtacttgtcttgatctttttcatagtgttcaaatctgtatttttgtatgtagagggaaataattttctcaacactaatcgttaataactattg

SEQ ID NO: 7328 - DNA, 402 bp, Homo sapiens
aaacaagttctctttttgcagattcacatactaatggtttaattctgtgctctgtttaaagtactattataactagagtagatctgaatgaggataaccctaaaatcatgaggaatggaagaatggaccttgaaactacctaggcttttatgcatggcacctctttataatgaagacactttttaaagtttttgtttttgtttcaattaccgctagatttttttttctctttttttaaaatccattttactggaaagttggccagcagagggagtagaaattattaaaattctagtgtttggattgggcccttctctaacagtacatactcattcccaaagcaatccaaaaacaaaatgtgaaccatttgggtttcaaatgttaagaacactaaatagcatg

SEQ ID NO: 7329 - DNA, 420 bp, Homo sapiens
aatcaacctgttaatccaaggtctttagaaaaacttgaaattattcctgcaagccaattttgtccacgtgttgagatcattgctacaatgaaaaagaagggtgagaagagatgtctgaatccagaatcgaaggccatcaagaatttactgaaagcagttagcaaggaaaggtctaaaagatctccttaaaaccagaggggagcaaaatcgatgcagtgcttccaaggatggaccacacagaggctgcctctcccatcacttccctacatggagtatatgtcaagccataattgttcttagtttgcagttacactaaaaggtgaccaattatggtcaccaaatcagctgctactactcctgtaggaaggttaatgttcatcatcctaagctattcagtaataactctaccctggcactata

SEQ ID NO: 7330 - DNA, 416 bp, Homo sapiens
  misc_feature (1)...(416): n = A,T,C or G
gagatatttcggatgataatctacctcactttccttgtggctatgttctgggtttccaatcaagccgagtggtttgaggacgatgtcatacagcgcaggagggagctgtggccacctgagaagcttcaagagatagaggaattcaaagagaggttacggaagcggcgggaggagaagctccttcgcgacgcccagcagaactcctgaggcctccaagtgggagtcctagcccctcccctgatgaaatatacatatactcagttccttgttnnnaaaaaaaaaaaaaaaaaaaaaaaaaaaaaaaaaaaaaaaaaaaaaaaaaaaaaaaaaannnnaaaaagggggggcgcctttttaaagttccctgggggggccccatcttcccccctgaggaaaaatatttttttttttttttt

SEQ ID NO: 7331 - DNA, 409 bp, Homo sapiens
  misc_feature (1)...(409): n = A,T,C or G
cgctgttctacagaacctaccctatcaatgggcatgttcccaaccatccagatttcctcttttacggaccatcctcaaaggcactctcaggacagacggcgaggggagcacaaaggaggctggcaaagctggggactgagggcattgttgctgattctcactcaccggggcagcctgccgcatatgcacaggccccaggtgcaggccaccacctccgggtcggcaccaggactggcctcggtgctcataacgcccggctgggcccacggaaggtcggcctgggatgcggactgggactgaagctctgccggctgctgtgtggatgcttttcctggagcacttttcaaggggatcatcagtcccaaacctgcacgcatntgtgactcagggactttatatggggccccgn

SEQ ID NO: 7332 - DNA, 467 bp, Homo sapiens
  misc_feature (1)...(467): n = A,T,C or G
ccccctattaaanttangagcctccgcannngaannnnngggnngagccacgcgtccgcttcaccaaccgncatcaataggttttcttagaaactacaactttaagcaaaatgaggtataatgaaactaattttggctgggcagggtggctcaggcctgtaatccctgcactttgggagaccgaggcaggcgtatcacctgaggtcgggagctcaagaccagcctggccaacatggcaaaaccccatctctactaaaaatacaaaaattagccaggcctggtggcgtgtgcctgtaatcacagctactcgggaggctgaggcaggagaatcgcttgcagccaagaggcagaggttgcagtgagctgagatcgcaccactgcactccagcctgggcgacagagcgagacttcgtctcaaaaaaagaaatggcgactttaagcaaaatgatatataatgaaactaattt

SEQ ID NO: 7333 - DNA, 404 bp, Homo sapiens
attctgccgggtagaagagctgggcctggaacccagtcctgaggacatcctgcggcccaggggcaagtgacacctgctgagagaggcccaggatggtggaggctgaggaactggcacagctgcggctgctcaatctggagctcctgaggcagctgagggtggggcaagatgctgtgcggcggtcagtggccagggcagcctcggagtcaagcctggaatccagcagcagctacaactcagagactccatcgaccccagagacgtcctcaacttccttgagcacctcctgcccacggggccggtcctacgtgtggggcccaccagatgcctgtcgaggggacctccgtgatgtggccagatcggaggtggcctctctcccacctgccaaatgccagcaccaggag

SEQ ID NO: 7334 - DNA, 489 bp, Homo sapiens
  misc_feature (1)...(489): n = A,T,C or G
cgtgggattccaattgacngcttgcgaactggaccccctgcgaaccgcccacgaaatcgcgggacgacccacgcggccgggctgtgaattctgctggcttcgtatgagagagagctcagacttgcattacctcaacccctctggctgtacgttctggggcgagaagccatggagccgtaagaagaaaattctttggcagctgggcacgttgaatggtgctccagtggggatttctctcattgctggcattgccattcctgccatggtcattggcattcctgtttatgttggaaggaagattcacagcaggtatgagggaaggaaaacctccaaacacaagaggaatttggctatcactggaggagtgactttgtcggtcattgcatccccagttattgctgcagatagggttggtattggtgtccccattatgctggcatatgtttatggggttgcgcccatttctctttgtcgtggaggcggctgtcg

SEQ ID NO: 7335 - DNA, 413 bp, Homo sapiens
  misc_feature (1)...(413): n = A,T,C or G
gacttgacccagctttgtgccagagaacccaatatgagtgttgttggcagcttgccaagaaggactgtctttttcaagacatactggtttcatgtgacacctccatggatttttttccagcctctaagtcaccaacttgggaactgcttgtctcacgttgctttgttttttacaataataaaagcattattatttaagctacctttatcttggcatttgattcactctttgaggtggttcaaaaacagaatcgggccctgccagctttacagagtaaacacctttggagggagagggaggtgtcatatgcctcagtgacaacagtataatggaaaaatacaactgtctttccagctttggcctaatctgaatttgaattattgcccaaggccttctaagaaatactgcaggan

SEQ ID NO: 7336 - DNA, 412 bp, Homo sapiens
agtctctttgcggcgctacactaaagcagagtacgagtctgaggcggagggagtaatggcaggacaagcgtttagaaagtttcttccactctttgaccgagtattggatgaaaggagtgctgctgaaactgtaaccaaaggaggcattatgcttccagaaaaatctcaaggaaaagtattgcaagcaacagtagtcgctgttggatcgggttctaaaggaaagggtggagagattcaaccagttagcgcgaaagttggagataaagttcttctcccagaatatggaggcaccaaagtagttctagatgacaaggattatttcctatttagagatggtgacattcttggaaagtacgtatactgaaataagtcactattgaaatggcatcaacatgatgctgcccattccacg

SEQ ID NO: 7337 - DNA, 417 bp, Homo sapiens
  misc_feature (1)...(417): n = A,T,C or G
cggacgcgtgggcggacgcgtgggtgatgcttcatttctacttaatggaacttgtgttctgagggtcattatggtatcgtaatgtaaagcttggatgatgttcctgattatctgagaaacagatatagaaaaattgtgccggacttacctttcattgaacatgctgccataacttagattattcttggttaaaaaataaaagtcacttatttctaattcttaaagtttataatatatattaatatagctaaaattgtatgtaatcaataaaaccactcttatgtttattaaactannnnaaaaaaaaaaaaaaaaaaaaaaaaaaaaaaaaaaaaaaaaaaaaaaaaaaaaaaaanaaannnnnngggggggggctttttaaaaaatttttgggggggccccttccccccctcccca

SEQ ID NO: 7338 - DNA, 409 bp, Homo sapiens
atctaaatcccactctaactcacagtacccactcttttaccaatattatcgaatagggagaaagtggggcctttttcagtgaaaaagtagcccttcatttacaacagacaacacatccaagggaaaaaccttatgaaagtcatgaatgtggaaaaaccttcacccagaagacaacccacacaagacatcagacaacacacacagggaaaaccctatgaactgtcacggatgtgggaagaccttctataagaactcagacctcattacaaatcaaacacttcacacacgggagagaccttactcatgtcatgaatgaagaaatccttccctgaaaaggcatcccttactcaaaatcatagaacacacgcggcgagaaatcatgaacgtcatgaacgtggccaaacctccg

SEQ ID NO: 7339 - DNA, 414 bp, Homo sapiens
cggacgcgtgggcccaccgagacgcgccggcggaccgcgggcgagtgcagccggtgacccggcgagaggcggcgccgctcccaagatgtcgcagacggccatgtccgaaacctacgattttttgtttaagttcttggttattggaaatgcaggaactggcaaatcttgcttacttcatcagtttattgaaaaaaaatgtccgtgacgagaagttattaccgaggcgcggccggggctctcctcgtctatgatatcaccagccgagaaacctacaatgcgcttactaattggttaacagatgcccgaatgctagcgagccagaacattgtgatcatcctttgtggaaacaagaaggacctggatgcagatcgtgaagttaccttcttagaagcctccagatttgctcaagaaaat

SEQ ID NO: 7340 - DNA, 459 bp, Homo sapiens
  misc_feature (1)...(459): n = A,T,C or G
ctccctcggtatgacgtcgtgatttgacgacttcccgggnccacccacgcgtccgggtaacaaatattggagttataatggctttcatatattgaacattacgcaacatggaactgtgaatcccaagagaagggacggaggatgcataaattctgagtggaggcagtttccatgtctcactgaagggagtcagggctcagtcagaaatcagcagtctcaaggacttcaagagaaagttatggtgtctgcagaagtaaaagctcctaaagagttataccaacaaaacatatttcagagtttaaaacaataccctcccaaagaggctaagcctagatgcnngnggttttatacaaaaaaaatcaaactataagacttaaaaaaaaattatagggggggggcgccgtttaaaaattcttttgggggggcccaacatacccgggtggaggcgttgattatttt

SEQ ID NO: 7341 - DNA, 409 bp, Homo sapiens
  misc_feature (1)...(409): n = A,T,C or G
agtagactaaatttgaaagagaacgtaataatttttttcgtagctctttatccagttttagtttgtattagagattttacctggtttagactttgtcttaatttgtgcttcttattgataatgttttgaagggaaaaatagcagcaaggattaagaaaatgaaaatattctttattagtgtggtacactagttaaagcaggggttggtaaaccatggcccttgggccaaatctggcccaccacttgtttttgtaaagcctatgagctaagaatagttttcacattttttaattgtttggcgaaaaagagattatgtgatagagactatatgtagtctacaaagcctaaaatatttattacctagccttatgctgaacaagtttgccaacctcttatctaaagtagcatn

SEQ ID NO: 7342 - DNA, 489 bp, Homo sapiens
  misc_feature (1)...(489): n = A,T,C or G
aggcgngnggttttnaatgatcccgtcggaccgcattgaataccgtgtcgacccacgcgtccgaaacaaaataggaaagaagggaacttcttcaacctgaacatctatgaaaaactcacagtgaacatcatcattattggtgaagattggatgcttacccctaagatcaagaagacaagaatgtctacccttaccacttctattaaacattgtactagaacttctagccaggtggtatggactgaatgtttatgtacgccccgaatttatatgttgaagcctaaaacaatatgtattcatgtattgttgggcctataacatataggaatgtaatttgctaataattgcacaaaggaagccagtagaggcaaagctgtactggataaaggaaatgaatccagataattcatttctggattcttgaatctacaggaagaaagagaaatagcattttttttttttaaggttaacataaggctgggcgcagtg

SEQ ID NO: 7343 - DNA, 490 bp, Homo sapiens
  misc_feature (1)...(490): n = A,T,C or G
ggcgngnnntttgataccgaagacgtcggatnngctactgagaacattcgaaancncngncggcgggcagaagcactgtaggcagggaatgcatattcatattcagaatatgttggtgccagtgaggacaaattcctgtcccctccatgtatgtagaggtcttgctttgctttctttttttaaggtatggtattatccactgtcattaatattttggagcattttacttccacattaaaaaaagatcaaaataggtaataattatctgaccaagaaatgctttaaataaattgtagacttatgacagctatatcatctatctaataaccttggagtaactgtaaaatagtgacttttgaactgtagactttactcatgcagatatctcactaattttgttgaaatctaccagatagaaatccattgttatggcttgtatggttgaaaactttttaagctgtcatttgtttcaagatacagattgactcgg

SEQ ID NO: 7344 - DNA, 491 bp, Homo sapiens
  misc_feature (1)...(491): n = A,T,C or G
cggcgngngntttgatccgaaagccgtcgaaccggctctgagaatcgtgtcgacccacgcgtccggtgtgtgtgtgagagagagatatatatatagagaagttaatagttttgtattttaagctaactacaaagctaccttctaaaagctggaaatctttaacttgatgaagtgtccaattattctgtgtgtgtatgtgtgtgcgtgtgtgcgtgtgtgtgagagagagatatatatatagagagatgtcttttagggggtggtgnaaaacaaccacaaaggtaccttctttaagctgggcatcctttacttgatgaagagttctcttattctgtgtgcggatttgcgtatttgtgtgtgtgggggcgacacagaaacctctttttaaaggggtggctccctgcgggggtggtggttttttcctttttacatatctaaaagagaaaccctcctccaacttttttaggggcggtgttccacctaaggaggac

SEQ ID NO: 7345 - DNA, 434 bp, Homo sapiens
ccctgccccgcgggtctctggattgggacgcacagtgcagttgaggtctgcgtcgggcttggcttttcacaaaggctgatgtcttaactgtcacccatatggtccctgggccaccgggcagcctggggcggtgtgtgtgccatgtcacagcatggcctctcggccttgggaaggaaggcagtgcctgctctgctgtgagccgccaggaaccctcctcctgtcaatgggggtgtagtatttttgccaaaatatcatgttcaatttcagtactttgatcacttgaaggctagaagtgtgaagtgcagatgagtgtgtgttcttccccaaggtccccccacagctccaggacaccgctgtcctggcatttgtggccactcactttgtaggaaactcatctccttcctgaggagccgggaggctggaccagtcccgtg

SEQ ID NO: 7346 - DNA, 486 bp, Homo sapiens
  misc_feature (1)...(486): n = A,T,C or G
ggcggggggatgnatactgggtcgtggaccgcatgaaaccgtggaganccccgcgtncgattcaatgggagccccaagtagcaaaagtggacggactatgcctaacattcttgatgacataattgcttcaggggctgaaaacaaaattccaccaagtaaaacctccaagataaatgtaaaaccagagcttaaagaagagcctgaagaaagcataatatctgcagtggatgaaaataataaattatacagtgatataccacattcttggatctgtgagaagcatattttatggcttaaggattataagaatagcagtaattggaagcttttcaaagaatgttggaaacaaggacagcctgcagtggtttctggtgtgcataagaaaatgaacattagcctatggaaggcggaatcaattagtcttgattttggagaccaccaagctgatctcctgaactgcaaagatagcatcatttcaaatgccaa

SEQ ID NO: 7347 - DNA, 487 bp, Homo sapiens
  misc_feature (1)...(487): n = A,T,C or G
gggcgggggttttnttggagcgcggtcggacgccatgagnccgtggcgaccacgcgtccgctctgcgcgtgtgcgttttccctcctccccgccctcagggtccacggccaccatggcgtattaggggcagcagtgcctgcggcagcattggcctttgcagcggcggcagcagcaccaggctctgcagcggcaacccccagcggcttaagccatggcgcttctcacggcattcagcagcagcgttgctgtaaccgacaaagacaccttcgaattaagcacattcctcgattccagcaaagcaccgcaacatgaccgaaatgagcttcctgagcagcgaggtgttggtgggggacttgatgtcccccttcgaccaggcgggtttgggggctgaagaaagcctaggtctcttacatgattacctggaggaggcctagcacttcaaacctcatgggttctccagcgacaaggctaacgcgggctcctccgg

SEQ ID NO: 7348 - DNA, 491 bp, Homo sapiens
  misc_feature (1)...(491): n = A,T,C or G
gggcggggnnntttgnaatgagnccttcggatcgccatgagnatngtgtggacccacgcgtccggcagaaaatagactggggaaagggactgtcatgctctcttgatgtcaggaaaagagtacttacaattgaaatttattttcttcttaatcactttcaaaccacccagggttaattgacagtatacagttatttagaaaaccataatccaaatggttttatgttcttttctatctcatttccatttttattaacaaactgaacaaaaatatagaaagcaggcataggctgcacacagtgactcacgcctgtgatcccagcactttgagaggctgaggcaggaggatcgcttgagcccaggagttggagaccagcctgagcaacatggtgaaaccccatctctacaaaaaatacaaaaattaaccagatatggtggtgcacgcttgtggtcttggctacccaagaggcagagatgggaagatctcttgag

SEQ ID NO: 7349 - DNA, 409 bp, Homo sapiens
tccttctttcctctactgttttccctgttcctagcacagtgcccaggtacattgtagatgctcaataaatatgttgaataatcaactgggttgaatgaatgaatcaatgaactctgagctctcacagctcccatacttggccctatggaaatacttctccctttgtattataattattatatattataattataattacctggttactttccatcctcctttctaatctgggggctcctttgggatggaaattgtctcagtgctgtattcccaatgtccagcacaaaacctggcacatggtaggcaatatttattgactgttgaacattcatggaaaatctaccaattggtttgacaaaacaattttttttcctctggacatgtgtaatttggctgagattttatactg

SEQ ID NO: 7350 - DNA, 418 bp, Homo sapiens
cccacgcgtccgggaagaggcaggcagaactggcgctgcaagtccagtttcaacaaactattttctatctgatatgctaacacattgttggagcttgtctcccttaaaaaaaaaaaaaaaaaaaaaaaaaaaaaaaaaaaaaaaaaaaaaaaaaaaaaaaaaaaaaaaaaaaaaaaaaaaagaaaaaaaaaaaaaaaaaaaaaaaaaaaaaaaaaaaaaaagaggggcgggcccattgtttgaactttgcttcccctccccccttttcgtggggggaaaaaaatatttttctttttttttggggggggaaaaaaaaaaaaagggggggggttgagaaaaaaaaacttttttttgggggggaaaaaaaaaaaaacaccccccccccccctttttcttggtttggggaagtaaaatcttt

SEQ ID NO: 7351 - DNA, 407 bp, Homo sapiens
agtcacacctgctgcagaggctgctgctgctgctgaccacgctctgtggcccaggcactgctgcctggaccagctcatccttggcctgtgcccagggccctgagttctggtgccaaagcctggagcaagcattgcagggcagagccctaaggcattgcctacaggaagtctggggacatgtgggagccgatgacctatgccaagagtgtgaggacatcgtccacatccttaacaagatggccaaggaggccattttccaggacacgatgaggaagttcctggagcaggagtgcaacgtcctccccttgaagctgctcatgccccagtgcaaccaagtgcttgacgactacttccccctggtcatcgactacttccagaaccagattgactcagacggcatctgtatg

SEQ ID NO: 7352 - DNA, 409 bp, Homo sapiens
aggtccttgtttaagaggccacaggaagccgccagccgaacgctgataccaaagaggaggccaagaagcggactgtggcttggtgacctgtttggtattgccaaattttcagcttttattaaagctgaaacaccttggctgtttaaaacgttcgacaaggacttttttatgaacgttaacggcacagcatacgggttttttggaaaaaaaaaaaaaggggggatttcagcccgcccgcccccttgggcaggcccattcatgaacctcgagttaaaggccttttttctgaaactcaaaatctataagggaaaacctgtgtaaacaaataaaaataaatccttcacagcttgttaagggctgggacaaaaaggcagggaaatcctgcttgaggccatctgccttgctaaaa

SEQ ID NO: 7353 - DNA, 405 bp, Homo sapiens
  misc_feature (1)...(405): n = A,T,C or G
aattaccacgcctgaccagaaaaagctcttttactataggagagcaggctgagtgctctctatatataccatatatgtgtctgtgtgtataatagagagcaccttttatatggtatacatatgtgatacatacatatacacacacacacacacacacacatatatatatacatatgagagcattcgctcttgaggacaagttcatatgtagtcttctctgctcaagacaagataatgctttcatattagttagtgttaagctccaaaggaagaattatttcttaactagaaggtagaatatatttttgtaacttgttaagactgtatattgattcaggacaggcgctgtggcttatgcctgtaatcccaacactttgggaggcagagatgggaggattgcttgan

SEQ ID NO: 7354 - DNA, 404 bp, Homo sapiens
gcacttgaatgttgaatgtcaccgtatgtgaaataatatattttggggtagtgtgagcttttaatgttaagtctgttaaacttgagtcaaattaagcagacccggcattggcaatgtagctgtaattttctgacaaaatttaagacaaaattgtcaacttgaaactaaaacatgccaaggttttgatatacttgtcttaagatattaatgagacacttctgaacactgataggaagtgtccacatccacaaagtttctcttgagttttgttatgtgttttgttgtgtttgattttcagtgattgtctggtatatttacagtcctcaaacatggttatttctgtcagtgacttaacattcggttttatcagccagcagtattcttcagtaaataaagaatggaat

SEQ ID NO: 7355 - DNA, 407 bp, Homo sapiens
  misc_feature (1)...(407): n = A,T,C or G
cccacgcgtgcgtccacgcgtncggaatcccagctccacttaccaggccgcggctaccccgccgtcccccccgactcccgccaccccgctctctcaggctcttaaagatccaagtccgcaggccctttaaagggactagttgccgcttgcgaggccctgggactttggtcccagacagcggggatccggatggcttccgtgcggatccgagaggccaaggagggagactgtggagatatcctgaggctgattcgggtgaagactgcaggccggagctagccgaattcgaaaaactctcggatcacgtgaagatcagtgaagaagccctgagagcagatggctttggagacaatcctttctatcactgtgtgagagcagagattcttccagcgcccgggaagctactg

SEQ ID NO: 7356 - DNA, 382 bp, Homo sapiens
aggaaaggcccctatgctgggtctgggtgcttgtcggcggcggcttcctccccgctcgtcctccccgggcccagaggcacctcggcttcagtcatgctgagcagagtatggaagcacctgactacgaagtgctatccgtgcgagaacagctattccacgagaggatccgcgagtgtattatatcaacacttctgtttgcaacactgtacatcctctgccacatcttcctgacccgcttcaagaagcctgctgatttcaccacagtggatgatgaagatgccaccgtcaacaagattgcgctcgagctgtgcacctttaccctggcaattgccctgggtgctggcctgctcctgcccttctccatcatcagcaatgaggtgcg

SEQ ID NO: 7357 - DNA, 475 bp, Homo sapiens
  misc_feature (1)...(475): n = A,T,C or G
agatgcgtcggcncttttnaactgaggtcgtagaaccgcnncgaatttccggtcgacccacgcgtccggagaacgccagtatcccaaggcccatacatacatcgagtttgctatggaacaacctgcacagatcctgagcgacggacgtataacgatgaatggctctttggatggaagctaacacgtcctattgtataatccttgctgctgccaggaaaaggggtaagagactaaaagccgagtgtgcagccttgccctgaaggctagggtgacaatttggagtctgtccaaacaccctggcctctagagctggcctgtctatttgaaatgccggctctgatgctaatcggtgaccctcaggcaagttacttaaccttacatgcctcagttttctcatctggaaaatgagaaccctangtttagggttgttagaaaagttaaatgagttaagacaagtgcctgggacacagtagct

SEQ ID NO: 7358 - DNA, 409 bp, Homo sapiens
  misc_feature (1)...(409): n = A,T,C or G
attaaatcacttgctttatgacagtgggctgttgtcatgtgtaggaaagtgatttaatttgatgggagaggtggagggtggcccaggaaagagccctaggctgggaggtggggccggagaggtttggatcatctgctgtcctttctcaagtgtcttaaagaatcccctgatttctgggagaaggtgcatttttcagggcagccccagcactttccctcagagtgccccgagattcctaactgggtgtaagtcagcaatgctaacagcctcccagaggtggccttgggagctagtgtgtgtgtgctgtgctacagggagttgtgccattgagcctgagcctacatgccgagtgggcccctcggctcagtggtgcagcgcagactcagagcagtgggagaaggttctagtn

SEQ ID NO: 7359 - DNA, 413 bp, Homo sapiens
tcgattaagttggggtagaattctctttattggtggcatcacagctcccacagtgagacagtactacgcttacctcaccgacacacagtgcaagcgcgtaggaacacaatgctgggtgtttggggtcattggtttcctggaggccattgtttgcataaaatttggacaagatctcttctctaagacccaaatactctatgttgtgctttggcttctttgcgtggctttcaccactttcctctgtctgtacggcatgatttggtatgcagaacactatggtcaccgagaaaagacctactcggagtgtgaagatggcacctacagtccagagatctcctggcatcacaggaaagggacaaaaggttctgaagacagcccacccaagcatgcaggcaacaacgaaagccattctt

SEQ ID NO: 7360 - DNA, 478 bp, Homo sapiens
  misc_feature (1)...(478): n = A,T,C or G
aggatgcgcggncccttttnaactgagtgtctctgaacagcnnncgatttctggncgacccacgccgtccggaaaaaaaataaacacttctagatcacctgagttttttttacattcctttggtatttgcaaaataaataaaaaactacgaaacaaatatactgagatcctcctatctccatcccaacccggatgccccagcatcaagggtcgaacgggacctccattcagccccattccagggcctgaatctccagggagtccctgcagggatctcactacctctcagctgtgttgcttcactatttgagaatcaagttctttcccaggcgttagccactgtgcccggccagtgatttagttctgattaagtcctgcccccggccctccgggcatgtttctcatccctaagccctccgcccagccctcacgttctgccccgccctctcgtgctctgtcccgccctggcactccgctt

SEQ ID NO: 7361 - DNA, 417 bp, Homo sapiens
ccgctctccagcccgcttgaacgctccccgcagccaccgccacccattggaatggccaacaggggacctgcatatggcctgagccgggaggtgcagcagaagattgagaaacaatatgatgcagatctggagcagatcctgatccagtggatcaccacccagtgccgaaaggatgtgggccggccccagcctggacgcgagaacttccagaactggctcaaggatggcacggcgctatgtgagctcattaatgcactgtaccccgaggggcaggccccagtaaagaagatccaggcctccaccatggccttcaagcagatggagcagatctctcagttcctgcaagcagctgagcgctatggcattaacaccactgacatcttccaaactgtggacctctgggaaggaaagaacatg

SEQ ID NO: 7362 - DNA, 406 bp, Homo sapiens
tggaggaggcggcggcggtggaggtggaggtggtggcagacgtcgagattcttactatgatagaggatatgatcgtgggtatgacagatatgaagactatgattaccgatacagaagacgatcaccttctccttattatagtcgatatagatcacgatcaagatctcgttcctacagcccaagacgctattgataacggaatggttgcaattaaggacattttttttcctcttttttttttttttttttaaatccggaaattcccccaggcgggggatttttcctactccttaaaaaaaaaacttgggtttatttaccatttacactttggccagggggggggcggtttcccccccattttattatactttaaaaaagaggaatggtggtctttttaaacagtaaa

SEQ ID NO: 7363 - DNA, 164 bp, Homo sapiens
agttacagagcccgagtaaatcttgagagtaaattaaaaggtatggtggaactttggaattcttttcatacatggaaaggtgatgtacagttaaatcaccaagccctggaagacttcttatatttaagcacagagaaggaaaagtagctgctgagggcaaaact

SEQ ID NO: 7364 - DNA, 492 bp, Homo sapiens
  misc_feature (1)...(492): n = A,T,C or G
aggtgcggggnnnttttaccttataggcttgtanngnactgangtcctcgnagannccncgnnnngaattttnnacaaaccattattctccactgagagcactcttaacttcttactaatacagaaattcttcggaatgctctatcatttctgtgctggaggcccagaaattgcagaatcggaaaggtgtaatttgttttccagtggagagagaaagaattttggctgtgaattttaatttctgtttaaataaaggcccatagcctgccaaaagaagtaattctttcttactttttttttcgagaaacggccttgttgacaactcacattttaaaatgtaatccatattaaggaacaaagacttccaaatttaatttggagcaaacaaactaccataataacttttctgaaaactgtaaaaatgttacccagtataaacgcgcatacaatatgttttaaaacttaggttactgaagattgagttcatccttt

SEQ ID NO: 7365 - DNA, 377 bp, Homo sapiens
cgcatatggaaccaaagaccagatgttacgcgccatccttgctctacagccgaacatgcaggactctaagaacccgcgagatgatggaatagcgatgcaaatccttaaaaaaatcttaacgaaatcctggctgacattgacttctccactggaaccatcgagatcattgtctcctacaccttgccatgaaggcctgtggcacctgagccagccattatcatcaccagcacttacatgagctactagctggacccactgcagtcctcctgacacactgaaatcagagcctgcacaccaagcaccagatgcttcaatgcgaaggacatttccaggtccttgacaggcgtgcatctgggccagatccatggccataacct

SEQ ID NO: 7366 - DNA, 387 bp, Homo sapiens
gatcccgaccagtcctgaccgcacgggggccgcggccacggagcgcatgggccatggcgcgcggcaggatcttccggctctcggtccggtacgtgcgcttccccacgtcgcttgggggccacggggcggacgccatgcacacggaccctgactactcaggtgcctatgtcgccatagaaactgatgcagaagatggaatcaaggggtgtggaattaccttcactctgggaaaaggcactgaagttgttgtctgtgctgtgaatgccctcgcccaccatgtgctcaacaaggacctcaaggacattgttggtgacttcagaggcttctataggcagctcacaagtgatgggcagctcagatggattggtccagaaaagggcgtggtgg

SEQ ID NO: 7367 - DNA, 477 bp, Homo sapiens
  misc_feature (1)...(477): n = A,T,C or G
cgcggttcccactgatactccgttgancngcnctcgaanncccgggncgacccacgcgtgcgctaggagttcagaatttttaaagtaccatttgaattatcttaatttttctttcatgacaacacattcgaaaatgaatgatgcttatggactaagagggaaaatgtatttaagttaagggtgagagacttaagttataggtgaccttagagacctaaggtgagagacttgacacatggaaggagtaacattagggtctacctctacctcaatttagttagcgatttactacaatttcagagctttaacaaaagataaaaataaatcgtcaccaattgttattgcttctcatctttcatttttcaatgaacaagtaaggtattttcattcttatttttaggattttagcttttagtgtatggtacaaatgaacacagtttatattctaattcttactgcagctcattttaattttta

SEQ ID NO: 7368 - DNA, 476 bp, Homo sapiens
  misc_feature (1)...(476): n = A,T,C or G
catgcgtnngttccctcaaaannctctctctaatngcgtcccggaaccgccccggaannnngggggcgacccacgcgtccggggacagaagggctttgaaagacatttttctttggggcaaatttcgtgtgccagaactacagtttaaatggttttatgagcaagggaaggtagcattgattcccatagctttctaattagatacatgctgtcatggatgtaagccttaaaggagttaatactaatcttgtacatacacaaattttcctcaggtttttttattttaaaaaatgatttgttaaaagtactgtctgctagacccttgcctttgagtggctttgaaacttaatatactttttaaaaagtgcaatgggatgagattatgctattagtatnnttanncccccgcttctccccacatgcgtctgcttagaggtatttttacttaaaaaaaattgactggtttccgtatgctg

SEQ ID NO: 7369 - DNA, 458 bp, Homo sapiens
  misc_feature (1)...(458): n = A,T,C or G
ggaaggcgggccggtttaaatgaaactgaggcatcccgatccggcgccaccgtcgggacgctgggcaaatagtatgggacttccaagatatgtttttaaagtcaggggcaggcctttcttcatgccttcttcctctttgctggctggaacgcaaagaccatggcaggaggccaagcagccatcctggaaggtgaaagcctcatactaaggacgtcagacagcgaaataagagcctgggtccttgaccctgtagacatctccctccccatcctggtctgtctgccttgactcctttcatatgagagaaataaacttttaacttgcgtaaaccaganaaaaaaaaaaaataaaaaaaaaaaaaaaaaaaannngggggggggccttttaaaaattccctgggggggcccaactttcccggggggggggaaggttattttttttttttttaggggaagaaa

SEQ ID NO: 7370 - DNA, 462 bp, Homo sapiens
  misc_feature (1)...(462): n = A,T,C or G
gtgcgcnggttccttagtcagctgcgangagaacgtccacccgcncgaccacgcgtgcgtcgtccttccgaggaagctaaggctgcgttggggtgaggccctcacttcatccggcgactagcaccggggacggcagcgcgagccctacactcgcccgcgccatggcctctgtctccgagctcgcctgcatctactcggccctcattctgcacgacgatgaggtgacagtcacggaggataagatcaatgccctcattaaagcagccggtgtaaatgttgagcctttttggcctggcttgtttgcaaaggccctggccaacgtcaacattgggagcctcatctgcaatgtaagggccggtggacctgctccagcagctggtgctgcaccagcaggaggtcctgccccctccactgctgctgctccagctgaggagaagaaagtggaagcaaagaaagaagaat

SEQ ID NO: 7371 - DNA, 411 bp, Homo sapiens
accacgcgtacgttgacttgaaccctagccgggagcgctgtggggtgcccttctcctgctgcgtcagggaggctgcggaggaggtcctcaacacccagtgtggctaccacgtccggctcaaactggagctggagcagcagggcttcatccacaccaaaggctgcgtgggccactttgagaagtggctgcaggacaacctgattgtggaggcgggagacttcatgggcattgccctcctccagatctttggcatctgcctggcccagaacctcgtgagtgacatcaaggccgtgaaagccaactgttgaggccgccagaggccatggccacatgcctggcctacacaggcctctggggggccccccaggaccctcctactatactcctgacgggcaaggctgcaagagatgg

SEQ ID NO: 7372 - DNA, 395 bp, Homo sapiens
  misc_feature (1)...(395): n = A,T,C or G
cccacgcgtccgctagaaaaaggtattgtttatgtaatgtaaggcaagactagaaaaagatatctgaacacatagaactgagacaggattgaatccataatatgtaaagagctctggcaaatcggtaagacactaacttcccagtaggcaaatgggcaatgagcatgaccagacagacagttcctgaaagagaacatccaaatggccagtaatcattacttgtctatgctgatggcaaattaccataattggtggattaaaacaacacacacacgtttattatcccagtttctgtgggtcaggagcctggcacagcttagctggagcctcgcttatggtgtcacaatgcaacaatcaaggtgttggctggagctgggttctcatcagaggcttgn

SEQ ID NO: 7373 - DNA, 482 bp, Homo sapiens
  misc_feature (1)...(482): n = A,T,C or G
ggcagttccgatagaagccttnccaggtgngcgnagnanccgcgccgacccacgcgtncgatcaccttgactaagttcgattcaatagaaacaagtcacaaggtccagtcccacacaaaggtacatggtcaaaggtatgattacagaaggtgggctctttgggagccatttcagaagcatctaccaaagccaggactagggtgaagtgagtgacatgccaggggtgcaaaattgaaggtaacactttttctagcacagccctgagagtgaatcccatcagatacctcattcaccttaccctagtcctgaccctgttgcctaccacatgcccctaacacacctattctgatttctgcctacccaattagtgctccctgcagagacactaacctgagcctgtcttctcaggcaactgttccatggtgctcattttctttcctccatgaccctctcctgaatcttagttgttttttattccaatt

SEQ ID NO: 7374 - DNA, 481 bp, Homo sapiens
  misc_feature (1)...(481): n = A,T,C or G
gggagttccttgangccctaggactgataacatctgaagggtcgacccacgcgtccgcagaaaattcattctggcaagaaaccttatgaatgtcatgaatgtgggaaggctttttgtgatggcttacaactaaccctacatcagaggattcatactggtgagaaaccctatgagtgtaaggaatgtgggaagacttttagacagtgttcacacctcaaaagacatcagagaattcatactggtgagaaacctcatgaatgcatgatatgtggtaaggcctttagacttcattcacaccttattcaacatcaaagaattcatactggtgagaaaccctatgaatgtaaggaatgtgggaaggcctttagctatcattcaagcttctcacaccatcagagaattcattctggaaagaaaccttatcaatgcgggaggcgtttaatcatagattacaacttaacttacatcagactcttcatan

SEQ ID NO: 7375 - DNA, 413 bp, Homo sapiens
aacaaagtataggcgatagaaaatgatacctgacgcattaaatataagaccgcaagggagagaataaaaactatgtccaagcgtaatataccttggactaacccctataccttctgcgtagagaattaactagaaataactttgcaaggagagccaaagctaagacccccgaaaccagacgagctacctaagaacagctaaaagagcacacccgtctatgtagcaaaatagtgggaagatttataggtagaggcgacaaacctaccgagcctggtgatagctggttgtccaagatagaatcttagttcaactttaaatttgcccacagaaccctaaaaaaaaaaaaaaaaaaaagggcgcccgctttaaaggatccttcaaggggcccaagtttacccgggcatgcaacgttt

SEQ ID NO: 7376 - DNA, 432 bp, Homo sapiens
  misc_feature (1)...(432): n = A,T,C or G
ctcccctctgcactttgtttacttgttttgcacagacgtgggcctgggccttctcagcagccgccttctagttgggggctagtcgctgatctgccggctcccgcccagcctgtgtggaaaggaggcccacgggcactaggggagccgaattctacaatcccgctggggcggccggggcgggagagaaaggtggtgctgcagtggtggccctggggggccattcgattcgcctcagttgctgctgtaataaaagtctactttttgctaagaaaaaaaaaaaaaaaaaaaaaaaaaaaaaaaaaaaaaaaaaataannngggggggggcccttttaaaaaattcttgggggggcccaactttcccggggggaggagaatattttttttttttttttgggggggggaataaaaacccccggggggatttttggga

SEQ ID NO: 7377 - DNA, 417 bp, Homo sapiens
aacggcgagagctgccaagggccatgtggaccccgctgctcttcgatgtcatcatatagacgaaccctgcctgttgcgaagatggtcaacggacctagaaaccgcacaaccttctgttcgaacagcggcaagcatcatcctaacaatgtgactcattatatgaagggcaaagattctttgtatgcccagggaaggaggggctatgatcggaagcagagtggctatggaggtcacacaaagccacttttccggagcaaggctaataccacaaagaagattgtgctaaggctggaatgtgttgagcctaactgcagatccaagaggatgctggccattaagagatgcaagctttttgaactgggaggagataataagagaaagggccgagtgattcagttctaaactttgggatatttt

SEQ ID NO: 7378 - DNA, 417 bp, Homo sapiens
gttcctgctgccctcaaggtcgtgcgtctgaagcctacaagaaagtttgcctatctggggcgcctggctcacgaggttggctggaagtaccaggcagtgacagccaccctggaggagaagaggaaagagaaagccaagatccactaccggaagaagaaacagctcatgaggctacggaaacaggccgagaagaacgtggagaagaaaattgacaaatacacagaggtcctcaagacccacggactcctggtctgagcccaataaagactgttaattcctcaaaaaaaaaaaaaagggggggccgttttaaagaatccttgggggggccaaagtttacgggggatggcaaggtaatatttttttccttatagggggccgtataaaaacctacttgggaattttggaaaggaacctttt

SEQ ID NO: 7379 - DNA, 411 bp, Homo sapiens
  misc_feature (1)...(411): n = A,T,C or G
ggaagggtacagccacttctgactgggtggtcagggccggctcctctgaggagacttggaaggtaaggaggagccaaccctgtggagagctgaggaggagcattctgagtagagggaatggcaagggcaaaggccccttgtgtttaggaaaaggaaggttgaccagtgtggccgcagaggagggagtagcagggagacagtgagtgggctggaaggggagccagggctgcgccctgtaggccaccagaaggaggagtctgtattttgtaataggagcagtaggaaacttgtggaaggttttgagcaggacagtaaagtgacctgatttgtaaaggaccttaggatccagttggcccatcttccctgtccctgtcccatcttccctccctcctgcaacacagatacatcccn

SEQ ID NO: 7380 - DNA, 409 bp, Homo sapiens
  misc_feature (1)...(409): n = A,T,C or G
tagttttgttatatggttccccaccgaccatttttgtgcttttttcttgttttgttttgttttgactgcactgtgagttttgtagtgtcctcttcttgccaaaacaaacgcgagatgaactggacttatgtagacaaatcgtgatgccagtgtatccttcctttcttcagttccagcaataatgaatggtcaacttttttaaaatctagatctctctcattcatttcaatgtatttttactttaagatgaaccaaaattattagacttatttaagatgtacaggcatcagaaaaaagaagcacataatgcttttggtgcgatggcactcactgtgaacatgtgtaaccacatattaatatgcaatattgcttccaatactttctaatacnagtttttataatgttaaan

SEQ ID NO: 7381 - DNA, 467 bp, Homo sapiens
  misc_feature (1)...(467): n = A,T,C or G
cttttgactccctacggttacgtgccgagaaccgcnccggaannaccggggcgacccacgcgtccgcatgaatgggttaggaaatactgaggagaaaatggacttggaagagaatcctgatgagcagtccgaaataagagatatgtttgttgaaatgctggatgattttagggacaatcattaccagataaacagtatccaaaaaaagcagttatttaaacattctgcctgcccttttcgatgtcctaattgtggccagcgttttgaaactgaaaatctagtggttgaacatatgtctagctgcttagatcaagatatgtttaagagtgccatcatggaagaaaatgaaagagatcacagacgaaagcatttttgtaatctgtgtggaaaaggattttatcagcggtgtcacttaagagaacactatactgttcatactaaggaaaaacagtttgtttgtcaaactg

SEQ ID NO: 7382 - DNA, 416 bp, Homo sapiens
tgattagctactagattctgaatcagacatcacatctgactagagaccagtttctttcgaatgattcttttatgtatgtagatctgttcttctgaggcagcggttggccaactatagcccaaaggccaaatttggacttctttttataaatgcagattgtctatggctgctttcccactactccagcctaaggtaaacagctgcaatagaagccaaatgagaatcgcaaagcccaaaatgtttattaacctgccctttacacaaaatcacacaaaaagtttcctgatctctgttctaagaaaaggagtgtgccttgcatttaaaaggaaatgttggtttctagggaagggaggaggctaaataattgatacggaattttcctcttttgtcttcttttttctcacttaagaatccga

SEQ ID NO: 7383 - DNA, 409 bp, Homo sapiens
atccgatacacaccatctcagcaaggagtggcattcaactctggagctaaacagagggttattcggatggtagaaatgcagaaagatccaatggagcctccaaggttcaagattaataagaaaattccccggggaccaccttctcctcctgcgcctgtcatgcattctcctagccgaaagatgactgtaatggaacaacaagagtggaagattcctccttgtatttctaactggaaaaatgcaaagggttatacaattccattacacaaacgtctggctgctgatggaagaggactacagacagtacacataaatgaaaatttcgccaaattggcagaagccctctacattgctgatcggaaggctcgtgaagctgtggaaatgcgtgcccaagtagagagaaaaatgg

SEQ ID NO: 7384 - DNA, 417 bp, Homo sapiens
gcgaaaccaatagctccagctccgggtgcagggaaaggagaaacaccagacactggaagtctcactgtctcgagattcccctctaaagaccctcatgtcccactatgaggaggccatgggactgtcgggacggaagctctccttcttctttgatgggacaaagctttcaggcagggagctgccagctgacctgggcatggaatctggggacctcattgaggtctggggctgacaccccactccctgtttgacggcccagcctggacttggggagaatgactttcccttttttgccccataagggctagcataagctgaggtagaacttatctttaagctgcagcaaaatcaaggagtgacttttgtcccctctcctgttgaccctggtttagagccgctaaccacttggtgagttat

SEQ ID NO: 7385 - DNA, 480 bp, Homo sapiens
  misc_feature (1)...(480): n = A,T,C or G
agcggcgggtttcnnnnaaggctttagnagngacncgacnnnngggnngancacgcgtgcgatgccttataatttactgagcaaactaattaccatgatgaaagagatgtattttgaaaatattatcccttattgaggaaattgatgacagtgctgaagacttacttggatacctccagcagaggggagcaatgtgagccaatcctaagaacgctgaaggctttggaatatgtgttcaagttcattgttcggtcgaggacattattttcacagcgagtacttgttatgtaagagtgattgattagctctgcaattcctctgggatacaacagtatttttactgtaggagaaactcgtttaaaaaattataaccagctgtcgatcaaaaacagctcaagaatccaacctagagagtaatgaatatgtaataattgtaccctctaagttcatttgggaaaaaaaagaaatcttaacaggttg

SEQ ID NO: 7386 - DNA, 482 bp, Homo sapiens
  misc_feature (1)...(482): n = A,T,C or G
agtggcggtggcttctcagtcctccgtancgacncggcncgnantcccggncgacccacgcgtccgcaacatcttcctgtacatcctcaccatcattggccgcgccaaggagtagccgagctccagctcgctgtgcccgctcaggtggcacggctggcctggaccctgcccctggcacggcagtgccagctgtacttcccctctctcttgtccccaggcacagcctagggaaaaggatgcctctctccaaccctcctgtatgtacactgcagatacttccatttggacccgctgtggccacagcatggcccctttagtcctcccgcccccgccaaggggcaccaaggccacgtttccgtgccacctcctgtctactcattgttgcatgagccctgtctgccagcccaccccagggactgggggcagcaccaggtcccggggagagggattgagccaagaggtgagggtgcacgtcttccctc

SEQ ID NO: 7387 - DNA, 486 bp, Homo sapiens
  misc_feature (1)...(486): n = A,T,C or G
atgcggcggtttcnnnccgacctgcncgcaccggcncgacnnnccgggncgacccacgcgtgcgcccacgcgtccgctcagagggcctggggccctcactcctgcccacgcctcccagaccccagaacggagcttcaagtcagacagatccctgccttggtgggcagttctgccttccaaggaagaaggggaagaaaaggacctgtgggtggctcaggcccaagcagaccccgggctccaccccagccccgcccaggctgctgccagtgcacacttttacaaatttaatataaagcaagtccagtcttaaaaagaaaaaaacataaaaaaaaaaaaaaaaaaaaaagggggggggcctttttaaaaaacccttggggggcccaaatttacccggggctggaaaagaattatttttttccttaaggggggccatttaaaaaccacctggggaactttggaaaagaacctttcttttggggggggaaa

SEQ ID NO: 7388 - DNA, 406 bp, Homo sapiens
aaatcgcttgaacctgggaggtggaggttccagtgagccgagatcgtggcactgcactccaacctgagcaacagagtgagacaccagctcaaaaaaaaattttttaataataataaaagtcctattattcaactggttatgtacattatggttgaaagggaacgttttaatccagtctcaatccagggcaatagaattacaaagcatgttgtatttcagttcaaatggtattgtattataaaattacagttacattttcctttctgtgatcttcagcataatttcccagaggcccctttttcctccctataggccatcttattaacagattttaaaatttatagtaatgacaaatgacttatcagtgttcatcatctgaaagctaagtggttcgttcaatcacttt

SEQ ID NO: 7389 - DNA, 479 bp, Homo sapiens
  misc_feature (1)...(479): n = A,T,C or G
aggcgcggtttcnnnggaaacttanngancgaccggacnnnngggnngancacgcgtgcgcctaaactgtgttttttatgtccactaaacaacttgattaaaagacggaattttgactcgtgtctgtatcatacgagtacaaatactaattttgccctatgtatccgtaaatgtcatttgtgattttgacttatttatttaatgccctttcttatgccgtgggttttcaagtttactcatttctatggttgcaaataactctaaaacttattatataaactttcatattataggcagaacacaatggctaaatatctgttgcatgtactttaaagtttattataaaatataaacagatatataaagatgttgactcttacctgtgattttgcatggtcagactcggtgtcaggtacggagaggattctcatgactgtcttacctctactgaatattctagtgagttatatgatttacgg

SEQ ID NO: 7390 - DNA, 414 bp, Homo sapiens
  misc_feature (1)...(414): n = A,T,C or G
tcagcgaagtgatcacaggggacctgttgatcatcatggcccagatcatcgttgccatccagatggtgctagaggagaagttcgtctacaaacacaatgtgcacccactgcgggcagttggcactgagggcctctttggctttgtgatcctctccctgctgctggtgcccatgtactacatccccgccggctccttcagcggaaaccctcgtgggacactggaggatgcattggacgccttctgccaggtgggccagcagccgctcattgccgtggcactgctgggcaacatcagcagcattgccttcttcaacttcgcaggcatcagcgtcaccaaggaactgagcgccaccacccgcatggtgttggacagcttgcgcaccgttgtcatctgggcactgagcctggcactgn

SEQ ID NO: 7391 - DNA, 407 bp, Homo sapiens
agtcagtatagagaagttatttaaaataagattttcgtcccacggaattgtcccctttgttattgtatatccttcaggtttatgggacagcactagaggaaagtgacagcctcagaggaccttcagatggtgtcctgggtagctgaaactgtggaaagcaaaaccgtggataagggggaactactatactgaaaatgtacaaaacagagaagatttcattgaagaagtctgctgcttctggaatgggaaattaagcacaactggaacagttatcgactgtgattcttgctgggaccaataaccttctacaaataccaacatcagtttttatgaaaggcaaagagctgacaggtttacagactgcaccctaacattaagctaccaggagaaacttccaagttaccctt

SEQ ID NO: 7392 - DNA, 413 bp, Homo sapiens
agcgtggccatggataatcgggcttcctactggcccagggtatttgagagtgacccagtggcggcatccgtccttctgcctccccagttcctgttcccgacatccggacgtgccacttctgcctcgtagaagacccttctgtaggatgcatttcaggctcagagaagtgtaccatcagcagctcatccctgtgcatggtgatcaccatctattatgatgtcaaggttcgcttcatcgttcgaggctgtggacagtacatttcctaccgctgccaagaaaaacgcaacacctactttgcagagtactggtatcaggcccagtgctgtcagtacgattattgcaactcctggtcaagcccccaactccagagctctctgccggagccccatgacaggcccctggccctgcctctg

SEQ ID NO: 7393 - DNA, 483 bp, Homo sapiens
  misc_feature (1)...(483): n = A,T,C or G
atgcgcggtttcnnggggaagtttagnanagtcaggacnnccgggngaacacgcgtgcggaggattttgaaatttggcttaactgggaggataactgctcagcacaccactgaaacataaccactgacaccattcatttattttaactgagattcttgacatttttctctcctataaaaaaaaaaaaaaaaaaaaaaaaaaaaaaaaaaaaaaaaaaaaaaaaaaaaaaaaaaaaaaaaataaaagataaaaaaaaaaatgaaaaatgggcccctgacaccatacatttattgaaactgacagccttgacattctcctgtcctatttncttcctgcaaagtgataaattataatgaactggtcctgccaaacagaaacattcacttacctgctgggggggaaaaataaccaaaaaaccccttctaatgggagaacctaaaacaaaaacctctttgtttgagagtccgtgggcgcaaagcccct

SEQ ID NO: 7394 - DNA, 483 bp, Homo sapiens
  misc_feature (1)...(483): n = A,T,C or G
ataataccgaaanacccgtaaaactcgacgnactagnanagncncnaannnngggtcgacccacgcgtgcggggaggcccacttccttctttgggcacaggaaacattggcctgtggctgtccctcagatggcggcagtctctagagggccgtggcccttcccctgaggtcttttggcctagctctgtacaaccaggacacaggaagccctgctgggctagcctgaggcctagtctctgcttggtccccgagatggggttggaggggacttcgtttctgggtcttcctcttcccctctttaccatcccccactccctaatcccctacccctgtctccccttcaaggacttctcccttgtggttttgtaaagtgcaaacttaagaataaagtgactgctgtggtttttcaaaaaaaaaaaaaaaaaaaaaaaataaaaaaattaaggggggccccctttttaaaatatccctggggggcccatt

SEQ ID NO: 7395 - DNA, 447 bp, Homo sapiens
  misc_feature (1)...(447): n = A,T,C or G
cgacaacgattaacgagtgcagacgcaaaccaaactttttacggcacggtactgtatgtgaacaatgcgaccctcgcaccatatgcgaacacggagaggaccaggagtgcgcactcgccagcgacacccaccgtaaagaagaaagacccacatttaacatggggggggtgtgccttgttgtttcgccaataacactaattgtttgggtgaagagaaaggaagtacacaaaacatgcccaaagcacagaaaggaaaaccaaggttctcatgaatctccaaccttaaatcctgaaacagtggcaataaatttatctgatggtgacttgagtaaatatatcaccactattgctggagtcatgacactaagtcaagttaaaggctgtgttcgaaagaatggtgtcaatgaagccaaaatagatgagatcaatattgacaatgtccaagaan

SEQ ID NO: 7396 - DNA, 448 bp, Homo sapiens
  misc_feature (1)...(448): n = A,T,C or G
ctgaattcttactcttttaagaaaaatatcaaaagacattgtctcattctgtcacctaggctggaaatgcactggtgcaatcacagttcactgcatcctcaagcaatcctcccacctcagcctcccaggtagctgggaccacagagtcaaatgccaacgctaatctgaacttctttggatctataacaatctgcaagccataaaaacccaaagagcaaatctgtgatttcttaacctgacaaaaaaataataataatgaccactggaacctaggtggtggctttttatctaaaatccctgcttcatacggtgagacaatggcaggattgataaatctgaggaacatggcacttcctactgcaccgatgctgttctgagggaaacgctggctaaccacctaaaaacaaggagttgagaattgagtataaggtttgaattaatataaaan

SEQ ID NO: 7397 - DNA, 488 bp, Homo sapiens
  misc_feature (1)...(488): n = A,T,C or G
ggggggnatttacctagcnggtangtaccnnactgatacctgcgcaanncaccgnncgntatncttaggatggagaagcaggttcatttggggaacctggtatgtgcttcagtgagaactgttggataggtaccagaatcaagtatttggtatgaaaagaccattacgtttcttaaaacagtgaagtaacatgaaattagtttcaggaagattcaactgttcatattttgtggcactacaaaaactaattgagcacttactgtgtactgagcactgtcctaaagggctttattcatttaatcctcacagcaaccctttgagacataggtagcccttatgttacagatgaacttgagtcacaggggggtgtacctattggcccaaggtcacgccataactgataatgccttggctatgaactggcagtctgattccagagcctatacacttaaccactacactgtgtccctgtgaaggtgaattagacn

SEQ ID NO: 7398 - DNA, 388 bp, Homo sapiens
agaatggctcccgcaaagaagggtggcgagaagaaaaagggccgttctgccatcaacgaagtggtaacccgagaatacaccatcaacattcacaagcgcatccatggagtgggcttcaagaagcgtgcacctcgggcactcaaagagattcggaaatttgccatgaaggagatgggaactccagatgtgcgcattgacaccaggctcaacaaagctgtctgggccaaaggaataaggaatgtgccataccgaatccgtgtgcggctgtccagaaaacgtaatgaggatgaagattcaccaaataagctatatactttgggtacctatgtacctgttaccactttcaaaaatctacagacagtcaatgtggatgagaactaatcgctga

SEQ ID NO: 7399 - DNA, 514 bp, Homo sapiens
  misc_feature (1)...(514): n = A,T,C or G
aatagatgccgttgnaccggccgtttgagacgccctacccacgcgtccggctttttttcttaaaagtactttaaaaaggaaatttgtttgtattttttatttacattttatatttttgtacatattgttagggtcagccatttttaatgatctcggatgaccaaaccagccttcggagcgttctctgtcctacttctgactttacttgtggtgtgaccatgttcattataatctcaaaggagaaaaaaaaccttgtaaaaaaagcaaaaatgacaacagaaaaacaatcttattccgagcattccagtaatttttttgtgtatgtacttagctgtactataagtagttggtttgtatgagatggttaaaaaggccaaagataaaaggtttctttttttttccttttttgtctatgaagttgctgtttattttttttggcctgtttgatgtatgtgtgaaacaatgttgtccaacaataaacaggaattttattttgctgagtngttctaacaan

SEQ ID NO: 7400 - DNA, 466 bp, Homo sapiens
  misc_feature (1)...(466): n = A,T,C or G
gggcggggggatttaaatgagngctgcggaattgatcnccactcgccggnncgacccacgcgtccgcaggaaggctttgatataatgctgatgtattaatctaccaatgccatctcacattaacagcctatcttgttccactaagacagttgtacttaaataatttactgtgcatttgctataagacaggagcagaaactgctgcatagagttctaaataaggtataaggaataattggttgacaaagaggattattaagtaatgaatgggtaatttgcctggaaggcgttagaaggaagaaaagtcttcattctagggtgttataacagtgatcttgcctgaagatgacatcttccataggtatctaattgtttattgatttatttggccattaaaagtacaacagcatttctgaccaacataggagccaaatgtaggtaatgtggcaccaatggagagaatgtc

SEQ ID NO: 7401 - DNA, 419 bp, Homo sapiens
tttcatcttgaagttacacataacttcttactagccagtatggcaaaagtaggcatctaaagaatataaagcctcaaatcttccttactgtctctcttgtcacatggaatctacatgtgtttgaactattgctttaggatttaaaataggggagcctgtggtggcctggtgcacagggctagaacgagagtgcctccccttcttgtgtcctggctggctgggatgctggtggctcttcagaggagcatcagctgtctgtcatctgctgcgatccggcagcctctcttcactgctacatgtgctggaaggacaaataaataattgtggttgtgttcttaaaaaaaaaaaaaaaaaaaaggggcggccgttttaaagaatccttggaggggccaaaccttacccgggcttgcaacgttttt

SEQ ID NO: 7402 - DNA, 457 bp, Homo sapiens
  misc_feature (1)...(457): n = A,T,C or G
cggcggngnattctccgaagctgcggtaggacagcatcgccgnncaccacgcggccgactttccaggacgcgctggatccgcgacagcccggctaccagcccccgaatccccatcctggtccctcgggcccgccagccgcgccagcgtccaagaggagcctaggggaacccgcagctggagaaggctccgcgaagcgatcgcaacccgagccaggggttgcggacgaggatcagacggcctgaaactccggactgtgggccacctagtccggcaggatcttccgccagcgcctccaccttcagatgtacctccagcctttcactcctcggtcctccggagcccacaacctggacacagctcctcaagacaggtagcatggaccttaaggcgacaagagaggggccccaggagtggcaggagaggatccccgaccaccctagggaaacttcgtgcgag

SEQ ID NO: 7403 - DNA, 390 bp, Homo sapiens
  misc_feature (1)...(390): n = A,T,C or G
cgctgctccggcctccggggccttgcggagactcaccccttcagcgtcgctgcccccagctcagctcttactgcgggccgctccgacggcggtccatcctgtcagggactatgcggcgcaaacatctccttcgccaaaagcaggcgccgccaccgggcgcatcgtggcggtcattggcgcagtggtggacgtccagtttgatgagggactaccaccaattctaaatgccctggaagagcaaggcagggagaccagactggttttggaggtggcccagcatttgggtgagagcacagtaaggactattgctatggatggtacagaaggcttggttagaggccagaaagtactggattctggtgcaccaatcaaaattcctcgtggtcctgn

SEQ ID NO: 7404 - DNA, 419 bp, Homo sapiens
  misc_feature (1)...(419): n = A,T,C or G
tgcctaccgatcagctgcatctaaaacaatgaatatttatttccctaaaaaagaggctgtcacatttgaccaagcaaaccctacacaaatattaggtaaactgaaggaacttaatggaactgcacctgaagagaagaagttaactgaggatgacttgatacttcttgagaagatactgtctctaatatgtaatagttcttcagaaaaacccacagtccagcaacttcagattttgtggaaagctattaactgtcctgaagatattgtctttcctgcacttgacattcttcgggtgtcaattaaacaccccagtgtgaatgagaacttctgcaatgaaaaggaaggggctcagttcagcagtcatcttatcaatcttctgaaccctaaaggaaagccagcaaaccagctgcttgctctcn

SEQ ID NO: 7405 - DNA, 501 bp, Homo sapiens
  misc_feature (1)...(501): n = A,T,C or G
agaggccgnnncggcctcnccatgatcgccctcgatagagcccggtaaggccgngccgacccacgcgtccggatggaccgtggaagggaagcgtctgtggggagtgagcgcttatatggccagcagctgctccttctgggaagctcgcaccttggcaacagaacagccctctagcagagcgtcagtgcagtcgtgttatcccggcttttacagaatattcttgtcctattttagaattttccggagtagtttatttgcagtctgttgattatgtgcagtagacccgggacactgcgttttaccgatcaccttgaatgtggtgcctggatgtgcctttttttttttccctgaaattattataaattttctatggggagtccatcagttcatagtttttttagtaaagaagcaaaattaaaaggcttttaaaaaggtacaacttcaaaattataatctgtgggccaaatatttgttattaaacatttctgtaatatgaagtgg

SEQ ID NO: 7406 - DNA, 477 bp, Homo sapiens
  misc_feature (1)...(477): n = A,T,C or G
gtgggattcctaatgcncgtgcggacggacagtcatcgcaannnccacccacgcgtncgnggacgcatgggaaaagaatgtatttgaaatgcttagttttgtaccctgtacaagcagagcacgtaataaatggcagctgttactcttaccccagctgtggctgatgacattaacataataatttttttctttttttttgagacggagtctcgctctgtcgcccaagctggagtgcaatggcacgatcttggatcactgcaacctctgtctcccaggttcaagcagttctctgccttagcctcccaagtagctgggattacaggcacctgccaccaacacccgggtaatttttatatttttagtagagacgggatttcacctcttggccaggctggtcttgaactcctgacctcgtgatccacctgcctcggcctcccaaagtgctgggatgatagatgtgagccaccacacccggcc

SEQ ID NO: 7407 - DNA, 494 bp, Homo sapiens
  misc_feature (1)...(494): n = A,T,C or G
ggcggtgggattttacccaggtgngcccgcacannactgannntcatngcaanncacgcgggngntgngtncaccgagagcctcccggtgcccatggctcctgtcacagggcagctcagtcccgaggagcctccctggtccagcggcttcacaatgggaatgcctctcctccgagggagcccatccctccacctgcaccggaacccccatggcactgaggagaccggggtgactgcggagaccggggagacgtgggggacaggggagacaaacagcagggcatggcacggggtcgggggcctcaatggaaacgaggcgcccgagggggcaacttggtgactggcacacagcgtttcaaggaggccctgcaagatcctttcaccctgtgccttgccaatgtgcctggccagccagacctccgtcatattgtcattgacggcagcaacgtggccatggtgcatggcctccagcactacttcttcagccggtgcaat

SEQ ID NO: 7408 - DNA, 496 bp, Homo sapiens
  misc_feature (1)...(496): n = A,T,C or G
nggtggcggggnnnngtttaccttgaaaccgtcgtaatnactgatgccctcgnanngncncgaannnngggnngacacgcgtncgggctaagagtcgcgctgtaagaagcaacaacctctcctcttcgtctccgccatcagcgcggcagtcgcgaagcagcaaccatgcgtgagtgcatctccatccacgttggccaggctggtgtccagattggcaatgcctgctgggagctctactgcctggaacacggcatccagcccgatggccagatgccaagtgacaagaccattgggggaggagatgattccttcaacaccttcttcagtgagacgggggctggcaagcatgtgccccgggcagtgtttgtagacttggaacccacagtcattgatgaagttcgcactggcacctaccgccagctcttccaccctgagcaacttatcacaggcaaagaagatgctgccaataactatgcccgagggcactacaccattg

SEQ ID NO: 7409 - DNA, 421 bp, Homo sapiens
  misc_feature (1)...(421): n = A,T,C or G
agggtttctccatgttggtcaggctggtcacgaactcccaacctcatgtgatctgcccacctcagcctccggaagtgagtccttctactgtatttctatagcagacatctactgttgctacatccatggttgagctctcttcaatgttctataagcatctcttgacataatgtttgagacctttcttgtgaacagggccatatcttagtagtctgtgtacccagcaacaaaacatagctatcaggcactcagaggtactgttaaatatacttacttaataagaggcagatatgaatcaagaggacagagattttatattaggcttataagcaggtcttcatcaaaatgatggtgtcaggttgggcatggtggctcatgcctgtaatccagcactttgggaggccaaggcatgcggattacn

SEQ ID NO: 7410 - DNA, 502 bp, Homo sapiens
  misc_feature (1)...(502): n = A,T,C or G
cggtgcgnnnnnnnnttttaaactggtnatcgtncgtaaaccttgatgngctttgnannnncncnnaannnngggnnganccacgcgggcggatcaagaccctggagggcgagttctcggtcaccatgtggtcctcagatgaaaaaggagatattgaccatgagagagtggttgaagaacagatcattggagagaactcacctcctgattattcagaatatatgacaggaaagaaacttcctcctggaggaatacctggcattgacctctcagatcccaaacaactggcagaatttgctagaatgaagccaagaaaaattaaagaagatgatgctccaagaacaatagcttgccctcataaaggctgcacaaagatgttcagggataactcggccatgagaaaacatctgcacacccacggtcccagagtccacgtctgtgcagaatgtggcaaagcttttgttgagagttcaaaactaaaacgacaccaactggttcatac

SEQ ID NO: 7411 - DNA, 389 bp, Homo sapiens
attttttaaaaagtgacaagttattttatatatagtaaagaaattaggcaacattcattttctgaaaaaatatttttgtcttggttaaattacttaagatacaataaaatagaaaatatgttaaagaagtaacaaaatagttgctctccttttggccactgattttggctgtcaacttattaagattaattaaattacgtaactcagtaccaaaataagtttatttctatgtgtaatataatctggaatcctattgttaacttaatcttttttactcctaatgtacacttcctttggacaattagatctttaaggatattatagttttattaacagggctgcatttttgcatgtgtgctttaagatttttttttaaacaagccccaaaa

SEQ ID NO: 7412 - DNA, 478 bp, Homo sapiens
  misc_feature (1)...(478): n = A,T,C or G
tggggtgttttncccaaaanctagngcancgaccggacnnnngggnnanccacgcgtgcgcgcacgcgtccgccacgcgtccgctcaaggctgtgcaggcacataggctggtggccttgggccttggggctcagccacagcctgacacagtgctcgaccttgatagcatggggcccctggcccagagttgctgtgccgtgtccaagggccgtgcccttgcccttggagctgccgtgcctgtgtcctgatggcccaaatgtcagggttctgctcggcttcttggaccttggcgcttagtccccatcccgggtttggctgagcctggctggagagctgctatgctaaacctcctgcctcccaataccagcaggaggttctgggcctctgaaccccctttccccacacctccccctgctgctgctgccccagcgtcttgacgggagcattggcccctgagcccagagaagctggaagcctg

SEQ ID NO: 7413 - DNA, 480 bp, Homo sapiens
  misc_feature (1)...(480): n = A,T,C or G
agcggtggtttcnnnnaagttttnagnanctgacncgacnnnngggnnanccacgcgtgcggactagttctaggccccagcactccctctctcttctccactatggacagagcctccactgagctgctgcctgcgggccgcatacccagctgacatgggcaccgcaggagccatgcagctgtgctgggtgatcctgggcttcctcctgttccgaggccacaactcccagcccacaatgacccagacctctagctctcagggaggccttggcggtctaagtctgaccacagagccagtttcttccaacccaggatacatcccttcctcagaggctaacaggccaagccatctgtccagcactggtaccccaggtactgtgtcattcagactacaaatgccatccagggagggcccagtgaggaccccaacagtttctgctctaaaagagaatatagactggggcgagcgggaacagacaag

SEQ ID NO: 7414 - DNA, 387 bp, Homo sapiens
ctgctagttaagccaggattcaaaatgcccacagctacagagctggggataggggagggggcatgtttgaagggaagtcctgcagctggtaccatggctgaccctcactttcctcaagtataaaattaggataatacctacctcacagagtttttaaagggttatgaggcaacatgggtagattaatgcttttgcttagatagaacccaataagtttaagttgctttccccttcccttggagttttggttattactagagtgaaaaactgggacccaaagagaagaaatcaggaataatttcctaacatctaaagccatctgggaacagattaaactgcctcatgatttggacttatgcagaggtaatgtgcacagtatgctgcagg

SEQ ID NO: 7415 - DNA, 461 bp, Homo sapiens
  misc_feature (1)...(461): n = A,T,C or G
ctaccctcggtttcacctcggaacttgnacggacttcccgggncgccccacgcgtccgagaaaaaaaaatgttttatggtagcttttactttttatgaaaaaaaaattatttgccttttaaattcttttgccccatccccctccaaagtcttgatagcaagcgttattttgggggtagaaacggtgaaatctctagcctctttgtgtttttgttgttgttgttgttgttgctttatataatgcatgtattcactaaaataaaatttaaaaaactcctgtcttgctagacaaggttgctgttgtgcagggggcctgtcactactggtctgtactccttggatttgcatttttgtattttggaccaaggaaaaataaactgttatgagtagtaaaacttcccaaaaaaaaaaaataaaaaaaatcttaacttgtttaaaaacagtggctgctgtggcacgccg

SEQ ID NO: 7416 - DNA, 457 bp, Homo sapiens
  misc_feature (1)...(457): n = A,T,C or G
aaaaatgggaggacggtganatcggaatgacctgcgaaccgccccggaatccgggtcgacccacgcgtccggtgggtggcggggcggctgtaggagcaggggcctatcaagcgcccagcggagcgagccctgcctggccgtggctagcatggcccctacgctgttccagaagctcttcagcaagaggaccgggctgggcgcgcccggccgcgacgcccgggacccagattgcgggttcagttggcctttaccagagtttgatccaagccagattcgactgattgtatatcaagaccgggaaagacgagggagaaatgttttgtttgactccagtgttaagagaagaaatgaggacatatcagtatcgaaactctgcagtgatgctcaagttaaagtctttgggaaatgctgccaactgaaacctggaggagacagttcttcctctttagataggacg

SEQ ID NO: 7417 - DNA, 494 bp, Homo sapiens
  misc_feature (1)...(494): n = A,T,C or G
acgggtcccnattgatcgctgtgcggnaccttcgacggcctttccgggtcgacccacgcgtccgcttttctctgctggcaggggctttgtttaccagctcactgtttaggctaaatgttagggaccagatcactgcagttgaaaacgggcactccaggcttagtgacagtggcagcagaaacagtgttggctgcctttctgaccaccccactttcctgccctgagacagcagcccagggcaggtgcttcatattcagaccaggtaagcctcatttgcacaacagtcaaattgtttgttcctttaaaaaggacacaattagcctggcacggtgactcatgcttgtaatcccagcactttgggagggcaaggcaggcggatcacctgaggtcaggagtttgagaccagcctcaccaacatggaaaaaccccatctctactaaaaaaatacaaaattaaccaggggtgatggcacattcctctgcctcccagattca

SEQ ID NO: 7418 - DNA, 415 bp, Homo sapiens
acggagccgggcgcctctcccgaggacccttgggtcaaggtggagtatgcctacagcgacaacagcctggaccccgggctttttgtagaaagcacccgcaaggggagtgtagtgtccagagctaatagcatcggttccaccagtgcctcttctgtccccaacacagatgatgaggacagtgattaccaccaggaggcctacaaggagtcctacaaagaccggcggcggcgcgcacacactcaggctgagcagaagaggagggacgccatcaagagaggctatgatgaccttcagaccatcgtccccacttgccagcagcaggacttctccattggctcccaaaagctcagcaaagccatcgttctacaaaagaccattgactacattcagtttttgcacaaggagaagaaaaagc

SEQ ID NO: 7419 - DNA, 289 bp, Homo sapiens; identical to SEQ ID NO: 7326

SEQ ID NO: 7420 - DNA, 468 bp, Homo sapiens
  misc_feature (1)...(468): n = A,T,C or G
cccccctaaggaagtcgaggnagcatccgcancggaannnngggnngacccacgcgtccgcagtgacaatgtttggaacaaattttggttgacacaatagggttctcttctgatatttaatgagtagaagccaggaacactgctagagaacctacaatgttcagaacagcctccgccatcaacaaagaattatctggtccaaaatgacaatagtgctgaggctgagagcactggttcacgctgagctctttttgaaaaatctacactcacatctgttatacactcaccacacaggtgttttttatagtttatttttgcttgttccattataaaaaaaatagacagttgcataaattcaaccactttcttgttgaatacacttagtcaatgcaagcttaatattttcatatttaatttttgacttatgcaatatttttcaacattttcatgagttgttgggcattaccc

SEQ ID NO: 7421 - DNA, 404 bp, Homo sapiens
cccacgcgtccgccaatactcggggctccgctcggcttcttcgcgccgagatgcctaagaaggctggtgcgacgaccaagggtaaaagccagagcaaggaaccagagagaccacttcctcccttaggtcctgtggcagttgatcctaaaggatgcgtcaccatagccatccatgcaaaacctggctccaaacaaaatgctgtaacagatttgacagcagaggctgtaaatgtagctattgcagcacctccatcagagggagaggctaatgctgagctctgtcggtatctttccaaggtcctagaactcaggaagagtgatgtggttttggataagaagttgagagacttactcaagattgtaccatgcaagctggcaactagaacccaaatccttggactactt

SEQ ID NO: 7422 - DNA, 464 bp, Homo sapiens
  misc_feature (1)...(464): n = A,T,C or G
ccccctattgaattagngcntccgcancggcannnnngggnngacccacgcgtccgctggtatagttcagaatatcacatttggaaaatatgataaaactcatgtttgcaatttgaagaaatttaaagtctttggtggaatgaatgaagaaaatatgacagagctgttgtccagtggcttaaagaatgattataacaaagaaacattcaccttgaagcataaaattgatgaacagatgttcccttgtcgattcattaaaatagttccactcttgtcctggggacccagctttaactttagcatctggtatgttgaacttagtggcattgatgatcctgatatagtacaaccttgtctcaactggtatagcaagtaccgtgaacaggaagctattcgcctttgcctaaaacacttcagacaacacaactatacagaagcttttgagtcactgcaaaagaaaacct

SEQ ID NO: 7423 - DNA, 506 bp, Homo sapiens
  misc_feature (1)...(506): n = A,T,C or G
aggtgccnnnnnggggggggttagaacgcctgtagactgacttcatctgaagggtcgacccacgcgtccgcttttgtttatattgttttgtctcctaaattgttgtaattgcattataaaataagaaaaatattaataagacaaatattgaaaataaagaaacaaaaagttaaaaaaaaaaaaaaaaaaaaaaaaaaaaaaaaaaaaaaaaaaaaaaaaaaaaaaaaaaaaaaaaaaaaaaaaaaaaaaaaaaaaaaaaaaaaaaaaaaaaaaaaaagggggggggggggggttaaaaatggtgagaggggggggcccccccccttcggaaaaaaaaaattttttttttttttttttggaggggaatgaataaaagatcttggagagcaaaaaaaaaaaaatttttttttgggggggaaaaaaactacccaaaaacaacaaaaaaaaaaaggacgtgtgggggggatttttttttttggggggggggggggccccctactcgtgtg

SEQ ID NO: 7424 - DNA, 376 bp, Homo sapiens
attttttatttttatacacatgacaagattttacatcaagaatagtcagttaaatagtacaaatttacattcatgaggaatgttaaaaaaaattcaactaaaaaacccactttttcctgtgacccataatcccacattttacagtgcatgggagaaggggattagggggcatccaaaacaagtctctcccaataagaaaaaaaaaaataatggggcggcctttttaaagaatccctaggggggccaaactttacccggccatccaaggcattacttttttccttatgggggggcgaattaaaacctacttgggtaccttgggaaagaacccttacttcgggggggggacttaatggaaaaaactccctacaaaaat

SEQ ID NO: 7425 - DNA, 419 bp, Homo sapiens
cccaacccctcctaggatgtgcgggcagtgtgctggcgcctcacagccagccgggctgcccattcacgcagagctctctgagcgggaggtggaagaaaggatggctctggttgccacagagctgggacttcatgttcttctagagagggccacaagagggccacaggggtggccgggagttgtcagctgatgcctgctgagaggcaggaattgtgccagtgagtgacagtcatgagggagtgtctcttcttggggaggaaagaaggtagagcctttctgtctgaatgaaaggccaaggctacagtacagggccccgccccagccagggtgttaatgcccacgtagtggaggcctctggcagatcctgcattccaaggtcactggactgtacgtttttatggttgtgggaagggtgggtg

SEQ ID NO: 7426 - DNA, 474 bp, Homo sapiens
  misc_feature (1)...(474): n = A,T,C or G
cgaagcgcgtcccatcagtacttgcatcagtagctaccggaaccgcnccgnaannnnggggngganccacgcgtccgatggaggcggccaccggaccctctttttggctggtgtatgaaaccctgaaggtgccgcgggcgctctttggcttgaaccggcagcgcctgtgtgagcgcctgcggaagaaccctgctgtgcaggccgcctccatcgcggtcctgcagggcggggaggagactcagcgctactgcaccgacaccggggtcctcttccgccaggagtccttctttcactgggcgatcggtgtcactgagccaggctgctatggtgtcatcgatgttgacactgggaagtcgaccctgtttgtgcccaggcttcctgccagccatgccacctggatgggaaagatccattccaaggagcacttcaaggagaagtatgccgtggacgacgtccagtacgtagatgagattg

SEQ ID NO: 7427 - DNA, 425 bp, Homo sapiens
ggattcaaagatcaggggatatggttcttgcattcgaaaagttgaggaggctgacctaaaaacatacagtccactaaaaatagattgtaagttttgcaaaagtgggaattcttgtttgtttttgtttattgctgtgttgccagtaaataattgtttgggagagttagaaaaacctctcagggactggccatggtgacttattcatgtaatctcagtactttgggagaccaatgtgagagggtcgcttgagcacaggagttcgacaccagcctggataccatagcgagaccttgtttccactaaaaatagagaaaaaaaaattagccaagcatggtgacatatgcctgtggtcccagctactctggagcctaaggagggagaattggcttgagtccaggagttcagggttgcagcaagctatgatc

SEQ ID NO: 7428 - DNA, 377 bp, Homo sapiens
catggggggagggaactgatcgctgtcggtaccatagaggacctctcgggtcgacccacgcgtccgcccacgcgtccgggaaagcaccaaaatctgcatgtggtgtgtgcccaggcagacttcgaggggttcgtgctgtaagacctaaagttcttatgagattgtccaaaacaaagaaacatgtcagcagggcctatggtggttccatgtgtgctaaatgtgttcgtgacaggatcaagcgtgctttccttatcgaggagcagaaaatcgttgtgaaagtgttgaaggcacaagcacagagtcagaaagctaaataaaaaaatgaaacttttttgagtaataaaaatgaaaagacgctgtaaaaaaaaaaaaaaagg

SEQ ID NO: 7429 - DNA, 314 bp, Homo sapiens
cccacgcgtccgggaaagcaccaaaatctgcatgtggtgtgtgcccaggcagacttcgaggggttcgtgctgtaagacctaaagttcttatgagattgtccaaaacaaagaaacatgtcagcagggcctatggtggttccatgtgtgctaaatgtgttcgtgacaggatcaagcgtgctttccttatcgaggagcagaaaatcgttgtgaaagtgttgaaggcacaagcacagagtcagaaagctaaataaaaaaatgaaacttttttgagtaataaaaatgaaaagacgctgtaaaaaaaaaaaaaaaagggg

SEQ ID NO: 7430 - DNA, 505 bp, Homo sapiens
  misc_feature (1)...(505): n = A,T,C or G
agggggcnagggaattgacgccttcaggtaccatagaggaccntccgggtcgacccacgcgtccggttcaagcctcaagctcttcttgaggaatcaagccatccttggttgatttttgctttatcaagaagagcttgaggcttgaacatttttgccaagatttctggtgacgtgattggttgactgacagcaagtataccaggattgccttctgacaaagcactgtcaccaaaccaagcagaagttggtgacaaggggcttccatcatgagcatcataagtgggggtcattgttttactatacagtcctgggcttgaatatatacttcctgatccaggagtgataagaggcccctctaattcaagtgcctcatcttcagactggtcatctagcttcttcttttttttctttgttggatctctgggtttctttaagagagaaagttcttcggggtgtctgatattaaaagtcttacagatgtcagaaacagctntgaagactctan

SEQ ID NO: 7431 - DNA, 425 bp, Homo sapiens
agagggcgctgcgctcgttctacccaatgcgtggactatctgccgccgctgtttgtgcaatatgctggagctccagaacagctaaccggagtcgccacaccactgtttgtgctggatcgcagcgctgccttttcttatgaagaagacacaaactcggattctcacttgcatttatcttcagctgctcctatttaatcctctcggcaaaactgatgggatctgcaggaatcgtgtgactaataatgtaaaagacgtcactaaattggtggcaaatcttccaaaagactacatgatatccctcaaatatgtccccgggatggatgttttgccacgtcattgttggataagcgagatggtagtacaattgtcaagacagcttgactgatcttctggacaagttttcaaatatttctgaaggcttgagc

SEQ ID NO: 7432 - DNA, 415 bp, Homo sapiens
cccacgcgtccggttctcccatgatccaactgtgtaatttctggtcagtgattccaggttttaaataatttgtaagtgttcagtttctacacaactttatcatccgctaagaatttaaaaatcacattctctgttcagctgttaatgctgggatccatatttagttttataagcttttccctgtttttagttttgttttgggttttttggctcatgaattttatttctgtttgtcgataagaaatgtaagagtggaatgttaataaatttcagtttagttctgtaatgtcaagaatttaagaattaaaaaacggattggctaaaaaatgcttcatatttgaaaaagctgggaattgctgtcttaaaaaaaaacaaaacaaaaaaaaaaaaaaggggggcggcctttttaaaatct

SEQ ID NO: 7433 - DNA, 499 bp, Homo sapiens
  misc_feature (1)...(499): n = A,T,C or G
ggagtcagggttggatagcagtggnactanatgagaccttccggancgacccacgcgttcgcccacgcgtccggttcctgcagcgaatgggcgagctctttgaatgtgtgctgttcactgctagcctcgccaagtacgcatacccaggggctgacctgctggacaaatggggggccttccgggcccggctgtttcgagagtcctgcgtcttccaccgggggaactacgtgaaggacctgagccggttgggtcgagacctgcggcgggtgctcatcctggacaattcacctgcctcctatgtcttccatccagacaatgctgtaccggtggcctcgtggtttgacaacatgagtgacacagagctccacgacctcctccccttcttcgagcaactcagccgagtggacgacgtgtactcagtgctcaggcagccacggccagggagctagtgagggtgatggggccaggacctgcccctgaccaatgatacccacacctt

SEQ ID NO: 7434 - DNA, 424 bp, Homo sapiens
  misc_feature (1)...(424): n = A,T,C or G
catgttcttcatcggtttcaccgcgctcgttatcatgtggcagaagcactatgtgtacggccccctcccgcaaagctttgacaaagagtgggtggccaagcagaccaagaggatgctggacatgaaggtgaaccccatccagggcttagcctccaagtgggactacgaaaagaacgagtggaagaagtgagagatgctggcctgcgcctgcacctgcgcctggctctgtcaccgccatgcaactccatgcctatttactggaaacctgttatgccaaacagttgtaccactgctaataaatgaccagtttacctgannaaaaaaaaaaaaaaaaaaaaaaaaaaaaaaannngggggggggccgttttaaaaaaattttgggggggcccaaatttaaccggggggggagagaaatttttttttg

SEQ ID NO: 7435 - DNA, 422 bp, Homo sapiens
ttagccacggccgtttccttttccctgcaggacgttagggtcgccttggttggggaacccgcgaccgggggaggacctatcccggagtggggcttcccgacttcgaaagaatctcgctgtacccccgcccacagttcagaccatgcgaaaagttatttgataggccttgggggcgcggggtgaggagtcttggcggaggccttggtcggtgcgccgtggatatccccgagttaccgcgttcctctcctgcagctcccgcgtcgctgggaggagcgagggagcgagcgggaaggggtctagctggcctttgctcggtccttcccagcgcccggctctgaacccgccctgcactgctgtctgggcgggtccggggactcatcactctacccaaaggtgcaagcgcgcgagcacatcccatggct

SEQ ID NO: 7436 - DNA, 439 bp, Homo sapiens
tgaagcaactgctcagcaaatattactcatttttttaaaaagttgaattaaagggaaatatatttttaaaaccaaaatagatcaaaatgatcccagttttaagggattttgcctattttggaagaataaaactaaaatgttaaaactgttgaattacagagaacagatgtactctgagacataattttaaacaaatatttaaaataaggcaggttaacatttgcgtttaggcacaataaatctgtattaaagggaagcacatcaaggaaatatatacatgttgaataatgtaactgaaaaatattttttaaaaaccacttaaaaagaaaaataatttgatgggtactttaagcattgtagatagaaattaatgtataatagtgtcctcccagtctttgtatgaaaaattaaaactctctagtcctttaatgagcatgag

SEQ ID NO: 7437 - DNA, 424 bp, Homo sapiens
ctgccatcgccatccaccgcatctcaccaacagactgtggctcctagtgatgtggactcacctcggaggtatccgagctggacacagcccctggacagtgatccagacagctggccgtcccccaaggagcctgtcaccttcagcgagacccatttcctccccatccccagagacctcttgtgttcctgccacatagctgccagggcttaagtgtgcctggcaaccaaatcgaatctctcattttctcctgtggaccagttagttttgcctagaatcctgttttcttctgaatttgcagctgtctctctgatgggtgccttttgttcaacacagtaagccctgctcccttccctgctctaatacactacctgtacaaaggttttttccttatttttaataaatgtcagacactattaaatagaaa

SEQ ID NO: 7438 - DNA, 507 bp, Homo sapiens
  misc_feature (1)...(507): n = A,T,C or G
ggcagcnnaggggttatgacagcagtagtaccatagaggactntccggatcgacccacgcgtccggttctgtttaatggccattcataaattcaagcactaccactggtcagttttgtgtgatagaataaaaatatgttacctgcagtgtaagtacagcacactgtcaaattcttttccttaaggtgcacagtaaatgtacagatagttataggccactgttttgtaatgtagtacatttctaatctattattcctaacctattataactgtttgcagaaagaaaagaatttttctaataatctgtaaaattatgctaacttctacaagtaggcttctaaataaaatttttaaaaagagcacaacaaaaaaaaaaaagtccaaaaataaaaaaaaaaataaaattaaaaaaaaaaaaatgatatacactaaaaaagaaaatatttctatttttttgagaaaaaacctcccttttttgggggggcgtggttaatataaaaattaaaag

SEQ ID NO: 7439 - DNA, 424 bp, Homo sapiens
atattaagaatgtatgcattatgtaaaaagctcaattatatatttttgttgagttttttaattaaagacttgtaaaaaaaaaaaacagtttattgcaaatgtttcttaaataggttagggggagtactttctctctgtctccattgtaaggtggatggtacaccacaggcaaattaagcaaaaaggacaatgaagaaagaatgcgggactcaggcgctgctttaaaattcattcagggctccccgagtgcagcagctcttatgggggttttgtttttaggagaactgttgtaataatgcatattttaaaagcatagggaagctctagaacacaggaaggtgactactaagcaagagaaaagtttcttttagtggggaactaccagcctatagtaagtctatctggttaaagtagttattatgaa

SEQ ID NO: 7440 - DNA, 495 bp, Homo sapiens
  misc_feature (1)...(495): n = A,T,C or G
ggagccaggggaagacgcagtcggactctgagaccctcggancgacccacgcgtccgtggctgagtcacacctgctgcagaggctgctgctgctgctgcccacgctctgtggcccaagcactgctgcctggaccacctcatccttggcctgtgcccagggccctgagttctggtgccaaagcctggagcaagcattgcagtgcagagccctagggcattgcctacaggaagtctggggacatgtgggagccgatgacctatgccaagagtgtgaggacatcgtccacatccttaacaagatggccaaggaggccattttccaggacacgatgaggaagttcctggagcaggagtgcaacgtcctccccttgaagctgctcatgccccagtgcaaccaagtgcttgacgactacttccccctggtcatcgactacttccagaaccagattgactcaaacggcatctgtatgcacctgggcctgtgcaaatcccggg

SEQ ID NO: 7441 - DNA, 424 bp, Homo sapiens
  misc_feature (1)...(424): n = A,T,C or G
ctctcacaagggaactggctattattcaaggacctcctggaacaggcaaaacctatgtgggtctaaaaattgttcaggccctcctaaccaacgagtctgtttggcaaattagcctccagaagttccccatcttggttgtgtgttatactaatcatgctttggaccagtttctggaaggcatctacaattgtcagaagaccagcattgtgcgggtgggtggaaggagcaacagtgaaatcctgaagcagttcaccctaagggagctgaggaacaagcgggaattccgccgcaacctccccatgcacctccgaagggcctacatgagtatcatgacacagatgaaggagtcagagcaagagcttcatgaaggagccaagaccctggagtgcaccatgcgtggtgtcctacgggaacagtacctgcn

SEQ ID NO: 7442 - DNA, 392 bp, Homo sapiens
agaaaaagatgtaccatttctctgttgtatgttggattatgtaggaaatgtttgtgtacaattcaaaaaaaaaaaaaataaaaaaagttcctggggatgttttgggtagaattttggctttggatttgatagttaaaattcccttccaaataaaaaaaacccccatgatgctaaatttgatgggggcccaatttaaacaggggttgattgacccctgtaaaatttgttgaaacgttccttttaaagggaaatttagtaatcttatgtttttttttgggggaagggcttttttaccatttataagggaaacctggcaggtgggttagttgggctcatatttaccgcggaattttatcaaaaggagagcctatacttccaattttttttttttg

SEQ ID NO: 7443 - DNA, 414 bp, Homo sapiens
gtggcgcagggatggcacataagaaatatctttaagcaaaattgacccagtttttaagggaagacaggattcaactttggaaacctccatatacagatgaaaataaaaaagttggtttggcattaaaggaccttgctaagcagtactctgacagactagaatgctgtgaaaatgaagtagaaaaggtaatagaagaaatacgttgcaaggcaattgagcgtggaacaggaaatgacaattatagaacaacgggaattgctacaatcgaggtgtttttaccaccaagactaaaaaaagataggaaaaacttgttggagacccgattgcacatcactggcagagaactgaggtccaaaatagctgaaacctttggacttcaagaaaattatatcaaaattgtcataaataagaagg

SEQ ID NO: 7444 - DNA, 407 bp, Homo sapiens
  misc_feature (1)...(407): n = A,T,C or G
cccacgcgtccgttagctgggagtcttcccacatgtggcacttcaaaaggcagcaccactgggcgcctgcacttatttgaaaatggaactttgggagaagtatccctgctagtggctctgtaacttaacagatgacaattaggcttttgtcattgttgccatcatatggaagataatgtttacatccttttaaacatttttatatgacaattcctcaggatttggtaaggcttccaagttgtagcttttagtgtaagtgctggggtggtaataaaatgttacctcctgtcttattaaaaaaaaaggaaaaaaaagaaaaaaaaagaaaaaaaaaaaaaaaaaaannnnnggggggggcctcttttaaaaatttcttggggggccccatttttcctctcttttttaaa

SEQ ID NO: 7445 - DNA, 403 bp, Homo sapiens
aattatcaacacaggaaataattccctgtcgcattcacttggtctggtaccctggcaaacctcttaaagtgaagtaccactgtcaagagctacagacaccagaagaagcctccggaactgaagaaggatcagctgtagtaccaacagagcttagtaatttctaaaaagaaaaaatgatctttttccgacttctaaacaagtgactatactagcataaatcattcttctagtaaaacagctaaggtatagacattctaataatttgggaaaacctatgattacaagtaaaaactcagaaatgcaaagatgttggttttttgtttctcagtctgctttagcttttaactctggaagcgcatgcacactgaactctgctcagtgctaaacagtcaccagcaggttc

SEQ ID NO: 7446 - DNA, 444 bp, Homo sapiens
  misc_feature (1)...(444): n = A,T,C or G
aggatggcgggcccttttnaactaagagtctgatgtaccgccncngaaattcccggtcgacccacgcctcccgagagataacattttggtgaatagactaagatgtcacagatggaagtcaagggaagtggcaagagcacatggaagaggatgcaagaagaatcatgatgagggatgggatgaaggcagcaaggggtaaccatcttgaccttctgttttttctctcccctgcaggaagccacaagcagcccagccctccttaatcaacttcaaggagcaccttcattagtacagcttgcatatttaacattttgtatttcaataaaagtgaagacaaaaaaaaaaaaaaaaaggggcgcccgttttaaaggatccctgggggggccaaagtttacgcgggcaggcaacgtaatagttttttccttaaaggggagcatttaaaac

SEQ ID NO: 7447 - DNA, 406 bp, Homo sapiens
atttgcctgacattgacttcagcaaaagcacggggctgtaaattaccatttactagattagccaaatagtctgaatttccagaaaacaaggcagaatgatcattcccagaaacatttcccagaaaatgtttcccagaaaactagacagcatgatcattcaatggatcacagtgaagcaaaggacacaactttttattgtaccccttaattgtcaacaggagttaactgatttgttgtggtgctcagacttttttatacaggtgctagcgttttatcctatgtattttaactcattagtgcataaaggcaagccccatataatgaagtctcagggtatatgaaagtagctggcttcaaaataaaatttttgagtgcatattttgttttaaaaaaaaaaaaaaaaaac

SEQ ID NO: 7448 - DNA, 488 bp, Homo sapiens
  misc_feature (1)...(488): n = A,T,C or G
agagcgcgggggnttttnaaactgagcagcatcgaaaaactnccggaanncccgggncgacccacgcgtgcgagtgctcctagtttcttgtaaaggaagccagagttgacagtacaaagggtcgtggccagccctgcagcttgagcacctgccccacccagagtgggagtcaggtggagccacctgctgggctcccccagaactttgcacacatcttgctatgtattagccgatgtctttagtgttgagcctctggattctggggtctgggccagtggccatagtgaagcctgggaatgagtgttactgcagcatctgggctgccagccacagggaagggccaagccccatgtagccccagtcatcctgcccagccctgcctcctggccatgccgggaggggtcggatcctctaggcatcgccttcacagccccctgccccctgccctctgtcctggctctgcacctggtatatgggtcatggaccca

SEQ ID NO: 7449 - DNA, 470 bp, Homo sapiens
  misc_feature (1)...(470): n = A,T,C or G
gcaggggggggttttaactagagtctctggaccgcnnncgattccggtcgacccacgcgtccggaggaggttgtggcggtggctggagaaagcggcggcggatgatggaggaaggaggcggcggcgtacggagtctggtcccgggcgggccggtgttactggtcctctgcggcctcctggaggcgtccggcggcggccgagcccttcctcaactcagcgatgacatccctttccgagtcaactggcccggcaccgagttctctctgcccacaactggagttttatataaagaagataattatgtcatcatgacaactgcgcatannaaaaaaaaaaaaaaaaaaaaaagggggggccgttttaaagaatccctgggggggcccaagtttacgggggcgggcaaggtaatatttttttccctatagggaggctataaaaaacaacctggggatcttgggaaaggaccctta

SEQ ID NO: 7450 - DNA, 405 bp, Homo sapiens
tgacaaccgcgtgcacctcgcaggtgcgccagaactaccaccaggactgagaggccggcatcaaccggcagatgaacctggagctctacgcctcctacgtttacctgtccatgtcttactactttgaccgcgatgatgcggctttgaaaaactttgacaaatactttcttcaccaatcttatgaggagagggaacatgctgtgaaactgatgaagctgctaaaccaacgaggtggccgaatcttccttcaggatgtccagaaaccagactgtgatgactgggagagcgggctgaatgcaatggagtgtgcattacatttggaaaaaaatgtgaatcagtcactactggaacctgacaaactggccactgacaaaaatgacccccatttgtgtgacttcattgaca

SEQ ID NO: 7451 - DNA, 409 bp, Homo sapiens
aggagccccactatcctgtgcccgggcatggcctgacagctctccagcagggcagagtgtttgcccaccagctgctatccctaggaaggccaggagcccagtagccatgtggccagtctaccatggggcccaggagttggggaaacacaataaaggtggcatacgataaaaacacaaggataaaaagggggggggccgttttaaagaatccttgggggggccaacttttacccgggtttggaaaacattatttttttcctttttgggggggttttaaaaacctggttgggaattttcgaaaaggaccttttcttttgggggggaaaaaattggggcacattccttcaaaagtttaagagcctgagggagaaattaaacttttaaggggttatgggggtaaaactcttcc

SEQ ID NO: 7452 - DNA, 408 bp, Homo sapiens
caccattcggaccaagatgtctcgctccgtggccttatttgcgctcgcgctactctatctttctggcctggaggctatccaacgtactccaaagattcagctttactcacgtcatccagcacagaatggaaagtcaaatttcctgacttgctatgtgtctgggtttcatccatccgacattgaggctgacttactgaagaatggagagagactcgtaaaagtggagcattcacacttgtctatcagcacggactgcgctttctatctcttgcactacactgaattcacccccactgtaaaagatgattttgcctgccgtgtgaaccatgtgactttgtcacagcccaagataattcagtgccatcgagacctgtaatccgcatcatggaggcttgaagatgccgcatt

SEQ ID NO: 7453 - DNA, 491 bp, Homo sapiens
  misc_feature (1)...(491): n = A,T,C or G
gggagcagggcctagaaccgaaatactacggggtcgtgnancngcncnnnaannnngggnggacccacgcgtccgcacctgctgcagtggctgctgctgctgctgcccacgctctgtggcccaggcactgctgcctggaccacctgatccttggcctgtgcccagggccctgacttctggtgccaaagcctggagcaagcattgcagtgcagagccctagggcattgcctacaggaagtctggggacatgtgggagccgatgacctatgccaagagtgtgaggacatcgtccacatccttaacaagatggccaaggaggccattttccaggacacgatgaggaacttcctggagcaggagtgcaacgtcctccccttgaagctgctcatgccccagtgcaaccaagtgcttgacgactacttccccctggtcatcgactacttccagaaccagattgactcaaacggcatctgtatgcacctgggcctgtn

SEQ ID NO: 7454 - DNA, 393 bp, Homo sapiens
  misc_feature (1)...(393): n = A,T,C or G
ggacagaagggctttgaaagacatttttctttggggcaaatttcgtgtgccagaactacagtttaaatgggtttatgagcaagggaaggtagcattgattcccatagctttctaattagatacatgctgtcatggatgtaagccttaaaggagttaatactaatcttgtacatacacaaattttcctcaggtttttttattttaaaaaatgatttgttaaaagtactgtctgctagacccttgcctttgagtggctttgaaacttaatatagtttttaaaaagtgcaatgggatgagattatgctattagtntntnnnnnncncnnncncnncncccccccctcccttccaaaanttnnnttttcttcccccccctctgcttttcccttctct

SEQ ID NO: 7455 - DNA, 471 bp, Homo sapiens
  misc_feature (1)...(471): n = A,T,C or G
gtgcagcggtttcccctagtangctgcgactgaggccgtgccacccggcncgacccacgcgtgcggtaaatataagaagatactgattgattctggattgtggtatagggatatcttgtcttattttttgtactttgctgtatttttaaaatttctcaaaataggaatgggagtgaggatgggaatgctgtatctgtggaagtcatgttatactggattcatttccaattaaatactaaacattttatagaaaatatttctaaaattttatcacggatgaatggatggacttgctctctatgtaatatgaaattaatctattttattaaaatttaaaaggaccgcgnannaaaaaaaaaccaaaaaaacaaaaaaacaaaaaaaaaaaaaaaaaangggggggcgctttttaaaaaaatttcggggggggcccaaattttcccgggggagggaaattattttttttttttt

SEQ ID NO: 7456 - DNA, 394 bp, Homo sapiens
cagcctcttctgcgcacccacctgctgcatcttatttcagtcggctcttacagtaggaaccgccagaagggagtcggaagaggtctcacgaggctgtcatcaccgccatgcccaagaataaaggtaaaggaggtaaaaacaggcgcaggggtaaaaatgagaatgaatctgaaaaaagagagttggtgtttaaagaggatggacaagagtatgctcaggtaatcaaaatgttgggaaatggacgattggaagcattgtgttttgatggtgtaaagaggttatgccatatcagagggaaattgagaaaaaaggtttggataaatacatcagacattatattggttggtctacgggactatcaggataacaaagctgatgtacttttaaagtacag

SEQ ID NO: 7457 - DNA, 500 bp, Homo sapiens
  misc_feature (1)...(500): n = A,T,C or G
gtgcgtgnnattgnaccctccgnngctttgtanaanactgangnactngnanaancncnagnngaggaaagaccacgcgtgcggaagccctctagatgttgaatttctcaagacaactactgatctatttcatagcaagggagaaagtggattttgtggggaactccaggctcttagagctgaatcagtggctaccaaagcacaacttgccacttataaagaaaaggctgaaaaacttcaagaagagcttttggtaaaagaaacaaatatgacatctcttcagaaagacttaagccacgttagggatcacctcgcagaggcaaaagagaaattgtccattttagaaaaagaagatgagactgaggtacaagaaagcaaaaaggcctgcatgtgtgagccacttcctataaaactgagtaagagcattgcatcccagacagatgggactctgaagatcagtagcagcagtcagactccacaaattcttgttaaaaatgcag

SEQ ID NO: 7458 - DNA, 473 bp, Homo sapiens
  misc_feature (1)...(473): n = A,T,C or G
agtgcgccgcttcctaggaaactctctangaaggtcctgngaacngcnccggaannnnnggggggacccacgcgtccggtggctgcagcctgcaccgttgctgcccgctgcccatgacgcggggtgggggacaggagccagagtggtgggtcctgcagaccaatctgcgggcccaaggtggggggccctacagagatgctccgaggcatgtacctcactcgcaacgggaacctgcagaggcgacacacgatgaaggaagccaaggacatgaagaacaagctggggatcttcagacggcggaatgagtcccctggagcccctcctgcgggcaaggcagacaaaatgatgaagtcattcaagcccacctcagaggaagccctcaagtggggcgagtccttggagaagctgctggttcacaaatacgggttagcagtgttccaagccttccttcgcactgagttcagagaggagaa

SEQ ID NO: 7459 - DNA, 453 bp, Homo sapiens
  misc_feature (1)...(453): n = A,T,C or G
ggcggggtccctagngctagcagnactctacaccgcccannnagggggggcctttcccgaacactctgcttaggtttcatttttgccacttaaaattgtatgtcttacgtgttggggtgggggggtccatgcctctttccactctanatatcaggcactttcccatcatcctccatagcctcacacataatgggcattcaataatgtttgccaaaattgaaatagacaaaattgacccattttcaaataatgtttataaccaggggctgttactgttttgttttttttttcctagctcacaatggtaaagcagcgagaacaaccagaaatggttttccgacagttcctggtagaagacaaaggactttacggaggctcttcttatgtggatttcctttgttgcgtgcacaaggagatctgtcagctgcttaattaattgaaacttctctgtcn

SEQ ID NO: 7460 - DNA, 406 bp, Homo sapiens
  misc_feature (1)...(406): n = A,T,C or G
atcagtgctctctattgatgttcttgctggtctccagacacattcctgttgcattaagacttgaaagacttgtagatgtgtgatgttcaggcacaggatgctgaaagctatgttactattcttagtttgtaaattgtccttttgataccatcatcttgttttctttttgtaggtataaataaaaacactgttgacnntaaaaaaaaaaaaaaaaaaaaaaaaaaaaaaaaaggggggggccctttttaaagattccttggggggcccaaatttatcgggggtgggaaaaaaattatttttttctttttggggggggttttttaaaccccctgggggtttttgggaaagaaccttttttttgggggggggactttttggcccaccccccctacaaaaatttagcgtt

SEQ ID NO: 7461 - DNA, 401 bp, Homo sapiens
agcagtgtcccagccgggttcgtgtcgccatggggcagatcgagtgggccatgtgggccaacgagcaggcgctggcgtccggcctgatcctcatcaccgggggcatcgtggccacagctgggcgcttcacccagtggtactttggtgcctactccattgtggcgggcgtgtttgtgtgcctgctggagtacccccgggggaagaggaagaagggctccaccatggagcgctggggacagaagtacatgaccgccgtggtgaagctgttcgggccctttaccaggaattactatgttcgggccggcctgcatctcctgctctcggtgcccgccggcttcctgctggccaccatccttgggaccgcctgcctggccattgcgagcggcatctacctactggcg

SEQ ID NO: 7462 - DNA, 360 bp, Homo sapiens
ggagcccagtgtcttcatgcagaggagctcaatgtcgcgggactagctacaccaacatatgcactttttacatttagaaacactgtgattagaccacagaacaataaatatgtgccatcagaccaaaaaaaagtagagaaaggaactgaactccactctcgatgctatttacagaggacatctgtaaagtcttcataaaagaccttgaatgatgcctaggatggcagagcccctgggtcctactccatcctccagcctttgtcctttcctggcctcctgctctccagatctgtaaactgggctcaaggactgtacaagcagagtacaactaccccctccccggtgccagggcgcctgttg

SEQ ID NO: 7463 - DNA, 368 bp, Homo sapiens
  misc_feature (1)...(368): n = A,T,C or G
ggctactctggaggctgaggtgggaggatcattttagcctgggaggctgaggctacaggaagccgtcaaccactgcacactcgagcctgggcaacagagtgtctaaaaaaaaaaaaaaaaaaaaagggggggggccttttttaaggcaaagttaacccttgcggggtggaagggggaaaaaaaaaaaaaaactggcgtttttttttaaactttaaaaataaggcccaaagaaattcggaatcagggggggtcccaacagaggaaaaaggccgaactagggaaactgcaacaaacataccctgttttgaactttaaggccaccttttatggggagcagggggattactattaaacgtttttcaaacccn

SEQ ID NO: 7464 - DNA, 349 bp, Homo sapiens
gtgatattcctcccaagatatataacctgaatctaatcagtgggatcatcacacaaagctaaattaaggacatctaataacaaaactgtgctgatatctctacaagggacaagatcatgcaagttgggtaaagactaaagaactcctaatctgagggggatgaaagggacatgacaaaggcatgaatctggactgatccttttgctataaagaacttattaggaaaattggcaaaatttgattggagttttaggattagatggtggtaatgtataaatgtaatttattggtgctgatggttatattgtgattatgtaggagagttttcttattatgggaaacttgatct

SEQ ID NO: 7465 - DNA, 359 bp, Homo sapiens
caaagccaaggggacagggggcctggcctcacatccatgagtacttgaaaaactgataatcaagatgaaatgacgtgtttttctttataaaggaaaggcagagataatggctaacaagaaagagttgttttcatcgggaactctgtgaaagattttcacaattgttcgcctggcaattcttggattacctaatcaccttctccattccacttcttgtctctctcagagctgttcagatggtgatgatgacctaaagatccccaagagtgggaatccatttggtccatagccaattttcaggggctccatctccaaagcagggccagatattatcccagaaaggaatttctgagtctatg

SEQ ID NO: 7466 - DNA, 366 bp, Homo sapiens
aatttttaatacaagacatctaaagtcttaaacattaagttgatcccatcaggaacaaaatatggcacgaagttcagaaacaagaacatcttttttttttttttttttgctctaaggtttttcagcccttttgcagggattttggtttccccggggccggtaccggtcaatttttaaaaaaagggaaatgggaaaaccttttttttttttttttaaagggggaaaaaaaaaattttttaaaattttccccctcaaaaaattttaaacctttaaaaagggcaatttttttttttaaaagcccaggcctttttaaaaaaattttaccagggccctttggccctcaaaaaaaaacttgcgggcccttgg

SEQ ID NO: 7467 - DNA, 358 bp, Homo sapiens
ctcacttctcttttaaagaggtttaaattttcatctccagctctgctcttcaaagctcttctttaactttccaacatcctgctgaataatactggcaagcactttgaatgccacatgtttctaattcaatttattattctcctcaaactatattttccacctgcatactacatccagattaatgacatcattatcatccctgggcagcaacagtagacatctaatctctttttctccattagtactctattaccaaattctgtctattctaccttcaaaatgagtcctaagtagattccttcatttccaacttaattagcactgtctgaattcaggttgttacaacggtgtatgtacc

SEQ ID NO: 7468 - DNA, 374 bp, Homo sapiens
cttatgagtctcaccggtcaacccaggaggcctcactacaagagccttgacaaggcactgttttttgtgggactgggagttcacactgatgaagcaaacctttgaatttttgcacagctcttgtcagaaagccctgagttccccctggataaagagttaattttaatccttccctataattatacttcaaaatatttgacatctgctattatgccttctttagatctttcttctgcggagcaaacatttctagtaagtgtttgactacttgtatggcattagctttcacagaaaattgtttcacttaaaactgtggattggcctatgcttttgacaaaaataaactaagtacctgtagcggaaaaaaaaaaaat

SEQ ID NO: 7469 - DNA, 396 bp, Homo sapiens
  misc_feature (1)...(396): n = A,T,C or G
nnatcgtggtgtnacctgtagtcgctgcctatcctcaaggcaaagaaggagtnggtttgatgcccaggagttcaagggctgtggtgatgctataaacancgccacttgtactttccagtctgggcaacnagaataaagatacttgtgcttaaaacaacaacaaccagcaagaaaaggatctgtattatgctatggcgggattattntttaagtttttttttttacctaccttccaaaatgtcatttgattgacaaaatcagtctcttaaatcagtatcattaattgttaaatttatgctcaaatatataaagtaactagatattagataactagttatccagtcccatactaatacacaatgtttccttgaggccacataagaatctacttccctt

SEQ ID NO: 7470 - DNA, 282 bp, Homo sapiens
cttgatgtcattcttgtgcctgtaaaatatgttatgtgaatttgcacctctctgattaaaaatggcttagaatatcttttcatgtctttatcggccattcatattcctgtctttatgaactgtcctctatttttctattaaatcttttggctttttctttatttggaattctttattctggataccaaaactatcccagttatatttgttgaattattttctctagttggggctattcttttcactattttgattgtcttatttacaatgtccttttatgaa

SEQ ID NO: 7471 - DNA, 375 bp, Homo sapiens
gcagtgtcagggacctctaaaacagcagagctggggaggaaaacgggacccccaagtcctttacttcatggatgggtaaactggggcccaaggaaggaagtgacttgtccagaactgtacagcaagtcagaagcggagctgggatttggtccaggtcttctgacttccttactacacagggaactgggattcctggctggcagtaggagttcttgagttttattgccaactgttatgtgttggcccccatttctgggctttaggtctcagttttccttttctggaacaggaaaagggagatctgcctgtcaccctcctttccagcctgctttcagtattctcaagctgaagcatttgagcaggaagaacatggac

SEQ ID NO: 7472 - DNA, 285 bp, Homo sapiens
gcctcctgatctttaaacagagccatgggcttaatcttccttttgctgccatctaaaatttaataattctaatattcatttcctcagggccttagcttgtggacaagctaatgtatgccaacatacccagagttcttatgatctaaaagtgttattctcctgggtaagtggtaagtagtttgcatttcaacaaggataaataaatgccttggttaaagaatgacagggtagggttgttaaaaatattacttcctccaggaagcttctgcctcgtcgacgcggccg

SEQ ID NO: 7473 - DNA, 368 bp, Homo sapiens
  misc_feature (1)...(368): n = A,T,C or G
gtactattaacagcccctttttacagatgggtaaactgaggctcaaggcacagagccaggaggtgggagggctgggattcaaatccaacatagcctgactgttctctttttttgagatggagtctcactctgtcgcccaggctggagtgcagtgttgcgatctcggttcactgcaacctccgcctcctgggttcaagcaattctcctgtctcagcctcccgagtagttgggattacaggtgcacaccacaatgcccagctaatttttgtatttttaatagagacagggtttcaccatattgtgggtagggncctgaactcctgacctcaggggatccatccaccccggcctcccaaaatgctgggact

SEQ ID NO: 7474 - DNA, 349 bp, Homo sapiens
  misc_feature (1)...(349): n = A,T,C or G
gtgtgtgtgtgtgtatgtgtgtttgtgtgtgtgtgtctgtcgtggaatactgagccatacaaagaataaaataatgtcttgcagtgcagcaacttggatggaactggaggccattatcctaagagcagtaactcaggaacagaaaaccaaataccacatgttctcatttataagtgggagctaagctataggtatgcaaaagcataagaatggtataatggacactggagactcanaagcaggaaggatgagagagggttgagggataaaaaaaaatcacctatcggatacactgcacactattcgggtgacaggggagaggagaagggagagaagggaccctaaggat

SEQ ID NO: 7475 - DNA, 265 bp, Homo sapiens
cgcggctttgtcgactcagtcttgatggtgccatggaattagccatgggtgtaatcatattggaacatgtaaaccatgtatttgatgtcaaagaaagggtcattgttgacaacaatatgcactttaccacagttaatagcagccctggagaccaggcgcccattacgaccaaatccgttgactccgagcttcaccttccccatggtgtctcaacgatcgaggatcggctgcagacgcaaaagaagatgcggcggcgatgcggacg

SEQ ID NO: 7476 - DNA, 349 bp, Homo sapiens
ggagaattgcttgaacctgggaggcggaggctgcagtgagttgagatcgcgccactccgctccagcctgggtgacagagcaagactccatctcggggggaaaaaaaaaaggttgcaacagagcaagaccctgtctctatctttttaaaaagttaaaaaaattcaaaagatgtagctgcataatgaagtatatttaggtttctggctgtttgtattcttggaatgtattctcttcaccagggttattgatctcattcatgaacagggtaagcattccccacttgaagtgtgttgcctaggactgtcttgtgtggggaacttggaaaaacctgctgcacctgaaaataact

SEQ ID NO: 7477 - DNA, 365 bp, Homo sapiens
  misc_feature (1)...(365): n = A,T,C or G
gtgcaatttaaaacttatgaattgtttatttctggaattttccatttaatatttttgtactagagttgaccatgagaaattgaaaccatggaaagcgaaactgcagataaggggagactgctgtgctagagtgctatagaggatttcatttggaaaaaaaaagttttggtcctggaaaaaaagtttaagaacatagtcgtattccatttcttcatatgtttgagatatttctggctttggtgaaacataggctaggaaaagaacctaacatcttattagtgtaactgaacaacagtaacagcagacttagcctttcttccttatgtgcaacattacctgtgacctgactcttgaaacatagctgn

SEQ ID NO: 7478 - DNA, 346 bp, Homo sapiens
cagaatgatgataagccaatcttcttggtcttataagttgcttactgttttgcctaaatacccaaacaaaggccattttttcttttgctttgaagcccagtaattttactaaaatgtgtctgggtgttgtgggtcgtccatggtcagtgttctcatatatgctgctgagtgttttcagtaagtactttctaatctttttttaatttcagggagaatgttcttgaattataggtttaagcatttgttctgttccttgtatttggttttggtctctatggaaactcctattacccatataattggagttaggtcctctgtggagttgggtcccctgtggagttgggtt

SEQ ID NO: 7479 - DNA, 365 bp, Homo sapiens
ctctcaacccctagctgtcacttctctgttctttctcagttgccccttaacagtctattctaacccctgtaaaacagggactaaaagtactcatgcttgcctcagtagcacacatacttaagttggaacaatagagagattggcatggcctctgtgaaagaatgacgtgcaaatttgtgaagcattccgtattttttaaaaaaaaaaaaaaaaaaaaaaagggtcgacccggccggaattcccaaatttttaaacggaaaatccggaaaacccccgaaggttcatttaaatggggcttggggccccatctaaatttttttatttaaaacatggttgggcctttttttatgaaacaaaccccctct

SEQ ID NO: 7480 - DNA, 347 bp, Homo sapiens
cttggttgtaaacattaagaatataaaacctcctgtatatagaaacaagaattttgttaaaaagagaatttgaatcccttcctatactataaaatgctctatagggagacaaagagtttcttttttcttttatgtttactggttatgtggagggaaatataaggctcttggatgtataacatactcaaaagctgttacactttctctgatctgctgcgatccactgaaaatgtgctggggattggtatgctgtcactgtttatgctgctggaacttagcactgtcttgatttgaagcatatgattgacagccatttgaagcaatcttcatttatgcagataaaacag

SEQ ID NO: 7481 - DNA, 364 bp, Homo sapiens
  misc_feature (1)...(364): n = A,T,C or G
ttctgtaatttctttatttaaaaaagtaaatgtaacaagatacttaaaaaaggctagatacaaaagtagttaagctgctcacgaacatttaaaattttccaaaatgtatcttcaataatcatgatcttataaaacattttacagttatcagaaagtgcccaggctgagtttacataactgaaataccttagtacaaatgtctagttagaactgaagtgcagtaacctcttgagactgactgctcattgaaatagggatacaaagaaaaagttgattgtgataaaagtattgtgcattggccccatcatatgtacaaaaaaagtgccctcactcaaatgagcaaattacatgcaaaaaaaaacan

SEQ ID NO: 7482 - DNA, 192 bp, Homo sapiens
gttgggggtacaggactctatttacaatgaaacaaaatttgaagtaaaaaggaactgggtgggaagcaagcgggaggatgaggccaactgctagtaacataggataaagccaggagatggatcagacaagagcagtttgctttttgtggaaggagtaaaacttacaaggtcacagggaagtcgacgcggccg

SEQ ID NO: 7483 - DNA, 355 bp, Homo sapiens
tggaaaactaatgagccaccgtgcctgtccttggactatatatttttaattctgcttttgcccagtcacttgagtatgcttttaatcagcagccaatacatttcttatcaaaatgttctgataggggctagaggtcatagcaacaaattcaaagtgcctatcctttagtaaccttaagtggattaatgttttagaaaagatagtcaggactgggcacggtggctcacaagccctgtcatcccagcacttcgggaggcctagacaggaggatcacttgaggccaagagttcaaggtcagcctggacaaagtagcctgagacccccgtctctataaaaatatatatattttttaatt

SEQ ID NO: 7484 - DNA, 289 bp, Homo sapiens
cccgctcagctcctggggctcctgctgctctggctcccaggtggcaagtgtgacatccagttgacccagtctccttccacccttcctgcatctataggagacagagtcatgatcacttgccgggccagtcacaatattactgactggctggcctggtatcagcaacaggcagggaaagcccctaaactcctgatccatgatgcctccactttggaacgtggggtcccatcgaggttcagcggcagtggctttgggacagacttcactctaaccaccgtcgacgcggccg

SEQ ID NO: 7485 - DNA, 369 bp, Homo sapiens
  misc_feature (1)...(369): n = A,T,C or G
ccctacaaacatttcacttcaaaacaaccttctttgccaaattagttttcaggaattttatttaaaacaatctttttttttgagacaggatttcactctgtcgcccaggctagactagtgcagtggcgcaatcatggctcatcactgcagccttaacctcccaggccaagcaacctcccacctcagcatcccgagtagctaggactacaggtgcatgctgccacacatggctaattttttatattctttgtagagacaggggcttcgccatgttgccctggctggtcttgaactcctgggctcaagcactcctcccgccatgggcctcccaaagtgctgggattacaagtataagccaccaaacccagn

SEQ ID NO: 7486 - DNA, 350 bp, Homo sapiens
gttgttgataggcttctgctgaacatatgccaacccacctgcataatatatttttgttgcttttataaatcatgaatatatgtagtaacactatccttttagcacaaagaaaatataatgcccttttaaagtttagtacatatttcagaatgccaacttcaaggaaatccacagaacttataaataccatagttttgctattgatttcagtctaagacaaatttcttttgtcggaacccaataacctaagtgtggttatgtgaaatttattgaatattgctttctgggggtggtcgggagctgcaaccccaagagacatggccagttttctatgttctgggaaaaaagaa

SEQ ID NO: 7487 - DNA, 351 bp, Homo sapiens
ctgagctgttggtacagaaacaacttgaaacaggtattaaccttccttaccaatgaaagtttagttacaaagtctcttgctccaaaaaagaggtagttctttgcaacttatgtttcaaataatttcagtgtcattttctaaagaaagattctgcgctaggacaagacagcttggatggtcttttccaagggattaaccgaggaaagtttcccccaaataaatctcggtggagcagagttcctgcctccctgccctgccccacttcttccccagtggaccccgcctccctgaaacggccagtgcacactcgggccccagtcctgccctcctttctcagtggctctggagtgt

SEQ ID NO: 7488 - DNA, 346 bp, Homo sapiens
aaattatctcattatcgaggccctgctatgctgagtgtctgggcgtgttgtatgtcctgctgccgatgccttcattaaaatgatttggaagagcatagaaaaaaaaaaaaaaaaaaaaaagttcgacgcggccgaaaattccaaatttttaaatcgtaaaatcggaaaacccccccaggtccatttaaattgggctttgggcaccttttaaattttttttttttaaacaccgtttggcctttttttatgaaactatacccctttaagttaaaattttggccatgaaacctttgatttataaaattttttaaaagactaaaattaaggcccattttttttttggacg

SEQ ID NO: 7489 - DNA, 349 bp, Homo sapiens
cgcggccgcgtcgaccagaaagacaggaagcccaagaggtcaacctggaggtttaatttggaccttactcatccagtagaagatggaatttttgattctggaaattttgagcaatttctacgggagaaggttaaagtcaatggcaaaactggaaatctcgggaatgttgttcacattgaacgcttcaagaataaaatcacagttgtttctgagaaacagttctctaaaaggtatttgaaataccttaccaagaaataccttaagaagaacaatcttcgtgattggcttcgagtggttgcatctgacaaggagacctacgaacttcgttacttccagattagtcaagatg

SEQ ID NO: 7490 - DNA, 347 bp, Homo sapiens
tgcccatccacattttttcctatcttcacaccatttagttggtctatctcccacctccttcactagaatgcaagctccatacaacagggatttttgtctttgctgttcatagcagtatttgtcacttattaaaatttgtaattactgccttacttattttctagactcttttttttttttttggaaaaaaagtttgtttttgccccccaggttgaagggcggggcccaaatttaagttcattgaaggctccccctccggggttaatgcctttttcgggggacggggccggaatttccaaatttataaactggaaatccggaaaacccccgggggttcctttaattgg

SEQ ID NO: 7491 - DNA, 369 bp, Homo sapiens
  misc_feature (1)...(369): n = A,T,C or G
ttctttccctgtgtgtgaggcacttgtgaattctctcccacccttcaggacacgtcactggaggtgcggataccaagatcaataaagactgaggtcaggaaggcactcccatttctcaagagttgcttgatttggatcagtaaacaggcgtttccttgaaatcaagagctcctagggctttcaagtttaaacagctatgcagaagctccccatctgctcacaccaggggtctggcaccaaactctcgcatatctcaagttagagtcttattgcatgggaggttcggatggagcctangaagatctttttcaaaatcagaatttcttagcagctctaagaaagttctgggacgacagctccctctgctgg

SEQ ID NO: 7492 - DNA, 362 bp, Homo sapiens
gctccactcagggtcaggggaaattttgcccatttgaatggctttctgatatacatagtttgaaaaacaaatgtccacaaataagaatataaaagtcacttagtattctacaccatcacaaacaaagaatgtggggctactgaacacacaacaactttatttctcattattggctataaaattattttcttgcctaatttgcttgaatcagacatttattgacgtatacctaattgtctttcattaacaataacactcaatataaatgatgatttatgcttgatgtcatactgaatttataataatttggaaacaagagacaacttatagggaattgaatggaataaactcactaagatacg

SEQ ID NO: 7493 - DNA, 361 bp, Homo sapiens
  misc_feature (1)...(361): n = A,T,C or G
ttttttcagggcagtggtgggtgctttatttccatgctgggtgcctgggaagtatgtagacggggtacgtgccaagcatcctcgcgcgaccccgagagcccggggagcgggggcttgccggccctggcactcatttacccagagacagggagaggctcttctgtgtgtagtggttgtgcagagcctcatgcattatgcacctccacgccatccacgtaccagttgaactggacctcggggtcttcctggctcacgtccaccaccacgcacgtgacctaggggtccggnagatnatgaaagngtncttgggttntgggggangngggngggaattccccatttatgaattgaagataatgag

SEQ ID NO: 7494 - DNA, 101 bp, Homo sapiens
tatatattacattcttattccttttcttccacacttagaatcctggctctttggtcacaagggaaatagactattgcgtaatgacctatttgattacccca

SEQ ID NO: 7495 - DNA, 171 bp, Homo sapiens
atttgatgactggatacctggagggcttattcttatacttaggacttttatcccatgaggtcgctttcattcacatttgccccctttcattcaaatgactgatggtcacatgttcttcacaggttctgtttcttgctttactcattaactggctttcttattgcaggtggg

SEQ ID NO: 7496 - DNA, 361 bp, Homo sapiens
ggacagcctgctgaaacctgtatgggtacttatactgccctcagtctaaccatacctactgggcctttaattcctttctagcccttcttacataatataatcttgcgcttttccttagtaggatgattggtagaacgacttgatgtcatttatgaatggactacaaaggctgaccctttttttttgagacgactatgatcattgagcctgtcttacgaccctgaatgattgatacttggtctctgaagacggacattggggcggcattgtgaggagctgtgctctggagccaccttgcctaggtttgaatcccggctttgccacttgctagctgtgtaatgttgggcaagtgccttgggtt

SEQ ID NO: 7497 - DNA, 366 bp, Homo sapiens
taaaagccaagccacccatttgcttttaatccaaagaacatgtatagtttttgtacccagagactatgatttatattgattgcacttgcctgccatgatttacataagattttttttgcatggtttttattctttcctaatggatcctgttttataatacttccaagcctgtccatggatatatcaaatgtcttcacttgtatattttcatggctaggtatttctaatgtttattcttccctgtgtacttctacacatagctatgcactatgaaaattaaatggaatgaatgatatgtatattactcaaaataaagtttctttcacttgaaaaaaagtcgacgcggccgcgaattccagatctatg

SEQ ID NO: 7498 - DNA, 363 bp, Homo sapiens
ctgtctctacaagaaatacaaaaattagttgggtatggtggtgtgtgcctatggtcccagctactctggagaccaataggaggattgcttgaagcccagaggtggaggttgcagtgagctgagattgtaccactccactgcactccagcctgggccacaaactgacagactctgtctcaaaaaaaacaaaaccaaaaaccctgtctcaaaaaaaaaaaaaaggaacctgttattttaatatggtaaaaaaaccgggggcccatcaatattaggggatactttgcaaactttaagtggcgatgcaaaatgttattgaaggacgggggcaaacaatatactgtttaagtgaaaaaataagttaac

SEQ ID NO: 7499 - DNA, 364 bp, Homo sapiens
gttttatatacctcattctgacacctgcatatagtgtgggaaattgctctgcatttgacttaatcaaaaaaaaaaaaaaaaaccgggaacccatttccttagaaacctggggcagaaaaattgtttaaccccaggaggcaaaggttgcagggacccaaaaccttcccattgccctccacccggggcaacaaaccccttttaaaaaaaaaaaaaaaaaaaaaacccggggggttttttttttttgggcccccttttttttttttgcggaaaactgggaccggtttttttttttgcccaaatttttccaatctttaaaaacccccccaaaaaaaaaaaaaaaaaaaaccaaaaggggccccccccc

SEQ ID NO: 7500 - DNA, 345 bp, Homo sapiens
ctctaataaggtgtagtcaacctagatgtcctactgcatacctaatcactatggtgtatcttattgcttataggctacaaatgtggacatcatgttactgtactgaatgctgtaggaaattataacaatagttaagtatttgggtcttcaagcatagaaaagctactgtaaaaatgcagtataaaaaaaaatgatgccgggcacagtggctcacgcctgtaagcccagcactttggtaggccggggcgggtggatcacctgaggtcaggagttcgagaccggcctggccaatatggtgaaacctctgctctcctaagaatgcaaagattggctgggtgtgttggc

SEQ ID NO: 7501 - DNA, 360 bp, Homo sapiens
  misc_feature (1)...(360): n = A,T,C or G
ctcctctcctatgtttctgtcttaatagatggcatcataatcatcacccaccatggcacacaccataagtttggacaccatttgtttggatttccccagaagcggattgtgagacaaatttgggtgcaatttttgggtttttttgttttgttttgtttccaagacggagtcttgctctgtcgcccaggctggagtgcagtggcacgatctcagctgactgcatcctccacctcccaggttcaaggaattcttctgcctcagctcctgagtagctgggattacaggcgcatgccacaacgcccggcgggcgacgcgnnnnnnnnnnnnnnnnnnnnnnnnnnnnnnnnnnnnnnnnnnnnn

SEQ ID NO: 7502 - DNA, 356 bp, Homo sapiens
gtcaacgcggccgggggaaaaatgcattaaatacaactagggcctaaaataaagcacctgaaataagaatagttgattttgtggcgttgtgatgtttaatgcaaatcatttttcactttatatggaagattaaagattgatcatgatcggctttgagaaagtgttaattctccattaaattatggcatatttatcgcatttgcttaaaggtaattattcatagagatttggttctctcttagtaaaaatgtctttccaaagggagtctggatattatgggtgtatcagttttctgttggttttatgatgtgtgaagacacaaaattttggcggcgcgtcgacgcggtcgtgaattt

SEQ ID NO: 7503 - DNA, 363 bp, Homo sapiens
taaaaatattatgtgctgcttatggcaatttgggggaagtaaagagaaatacaaagaagcaaggaaagaaattacctataattccaggaccttaacacagtaattaacatttgaagtacttctacttaatccactgggggagggcatgcttttttgcaaatttaattccatcttatatgttacttttgtttttgtttaacatcgtgtcataagtatttttccttatcattacacttctctgtgattgtcatgttaaagacagtgtagtcatttcatcctgctcagtttcctgcttgttggccagtagtagggagcagcaggagtgtgtgatgtccctgcatccttcttcccatcctagaggcg

SEQ ID NO: 7504 - DNA, 336 bp, Homo sapiens
aatactttggtctctggcactcagtgtcaggagattttatgttatgttaataatacaaaagaacaaatagaaccagtcaattttcagaatcattcatttatcaggaactctgctagatgctgaggatacaatggtgatctagttgtttatctcttgtccctcagcctgcctcataccagccgttccctatcctgatctgtaagcagggtagggaggctacaaacattatttcccaggctcctactgccaattggaagaactgacaaaagggggaagcacgggttaaaggttttaatgctttaccgaaactgtaatactatactgtagttttaatgt

SEQ ID NO: 7505 - DNA, 338 bp, Homo sapiens
gcagctgttctaagtcctaaatgtgcggccattttagtaactcgacttagtttttcagttgacaagaaagtgacgatttaaggaaaaaagaagaccagctattaaatcacttttttcttttttttttttttaacccactacttttaaaaaaacttttaaggctcactggaatcttttttacccttttcaaagccaaggctaccaccattaaaaaagggttacggcccaaatcaaatcatttttaaaaaacagtaggggcctaaagtggcttgggaggaaaataaaaccggaaaaggtaaaaggagccctccttaaactctggggacccataacaaaag

SEQ ID NO: 7506 - DNA, 191 bp, Homo sapiens
cagcaggggaacatcttctcatgctgcgtgatgcatgaggctctgcacaaccgcttcacgcagaagagcctctccctgtctccgggtaaatgagtgcgacggccggcaagcccccgctccccgggctctcggggtcgcgcgaggatgcttggcacgtaccccgtgtacatacttcccggtcgacgcggccg

SEQ ID NO: 7507 - DNA, 384 bp, Homo sapiens
  misc_feature (1)...(384): n = A,T,C or G
cccacttaacctcaggattccaaccacttaacctgcttgcccatcttctgcttagtattttttcacatcatttctagccagggcagttctacttcttatgaaggtggcttctaagctttaccctggaacatctgtaggcataacttgcctattctaggtctcccttaatctcagtatctcctctgtggagatttccctagccactcaaggacacaagagttagagccctcactccataatgatagaacacatgatatgcttcactctcctgcaccactcttgctgctgtctagcataaatgctgcatgggttttagatttttggttgcttttttgagccggagtctcactcttgttgccaagctgtagtgtggtggtgccctcn

SEQ ID NO: 7508 - DNA, 361 bp, Homo sapiens
ctcacaaataaggggaacggcaacaaatccatgactcaggatgctttcctgcagatacttcagttatcatttccttatgtgttcctttattttgtttgttctgcaactgtcaaatatttacaatgttttctccccaagaagaatctgtgttctcttaagagttgcattacagctgggcgcggtggctcatgcctgtagtcccagcactttgggaggccgaggtgggcgagaaaacttcagtttaacagtttctgcaatacaagcttgtgatttatgcttactctaagtggaaatcaggattgttatgaagacttaaggcccagtatttttgaatacaatactcatctaggatgtaacagtg

SEQ ID NO: 7509 - DNA, 376 bp, Homo sapiens
gcctgatgagtgaagaggctaagcgaggagcacccaacccttggctctttgaggagccagaggagaccagaggcttgggttttgatgaaatccggcaacagcagcagaaaattatccaagaacaggatgcaggccttgatgccctttcctctatcataagtcgccaaaaacaaatggggcaggaaattgggaatgaattggatgaacaaaatgagataattgacgaccttgccaacctagtggagaacacagatgaaaaacttcgcaatgaaaccaggcgggtaaacatggtggacagaaagtcagcctcttgtgggatgatcatggggattttactggtgcttggggctatacggggtggtgcaatctggccgcc

SEQ ID NO: 7510 - DNA, 381 bp, Homo sapiens
aaaaatttccctattatacatttattaaaaaattctaaatatatatttgcacaatgttttcttatggaaacatctgtaaggaattattaacttactcatttccacacgggatttttttttttttttttttttttgaaaaaaaaaaaaaacaccttttgttatcccaacccggcaaaaacctttgaccctatacctttgggcttcccctttgaacccccctgggatttttttcggccctcaggggggggcaaaaaaaaaacataattgttttcctacccggaattaaaaattcccctccctttcggattccctaaaactttttaaaaaatcatcagtcttttttccaaaccccgccttggggggaggtggattttgcccttt

SEQ ID NO: 7511 - DNA, 209 bp, Homo sapiens
gtccatctcctttgttgtaatgttggcaaatttctggcaaaagccaggggtcgttctgaaacaagagttggcatagctcattatagctcaggtggtcaacgccatgagttctcagcacactcaggttgtgttcggttgtcaagctgtgactattcctacagttcttcccggctctcaggaacttgcaggcgccgtagtcgacgcggccg

SEQ ID NO: 7512 - DNA, 361 bp, Homo sapiens
agcttacaggcaagtaataaattgtatcatttatcttgaatgtatcatagataagctgctatataacgattgccacttcagatagctgtgaaattaggtgattaactagttgttatttagccttctaatttctgtataagtctaattacatgaatagaaattggggttttgattttttactttgcttttctgtttggagtgtcattgtaactactgtattgtaaatggtggaaaataattgcatttgttactttggggtggttatttgcatcagtattttatctctattaatggttgtgctcatcactgcatattaaaaaaacttggatgtatcagtgtaacttaattttttattttcata

SEQ ID NO: 7513 - DNA, 351 bp, Homo sapiens
aaaaaaagtgtttattcatcaagtctttaaagatacaaagacacgtgtcccagtaagagatctgaaaccagccatagtgaaagtctatgaggactacgagaccgctgagtttgcaatagatgaaaacaatgcttcttgcagcgaagatcttgtttatgcttgaagaccacaaggctgaaaagtgctttgctggagtcctgttctcagagctccacagaagacacgtgccggtggatctttaaagacttgatgaataaacacttattctggtaagggggcgaagagataaatgctttgaaacctaaaaaggggttggggaaattttaaatttacatttcccacatcacagag

SEQ ID NO: 7514 - DNA, 361 bp, Homo sapiens
gaaactttcacctgagaggaggatttcagatttctcgattctgcccccgcaacgagttgcttctcttctttctctgcacagtcttcactttcatgaagccaaatgcctccttgcaattcagctcctggttttgagtgtgtaaggaagacacacgcttctcgtgaaattctggagaatgtctccggactgcgtgggaagcttatgaaccagaggtgcctgtactgacagaagcctgtgagcaaagagggttccgagaactggttagctctttctagccgggaatattaagctgtaaagaacaaggaaatggagggagcattcacatatgtactgcagttggcatgggggtctccttggagag

SEQ ID NO: 7515 - DNA, 351 bp, Homo sapiens
  misc_feature (1)...(351): n = A,T,C or G
atttcacatggttttattacaaaacaagccacaaaacagttttagaaaatttttgctacataccaattaggagatcacataaaatgagaagcgtaacagtttccatgcactcagcctagagcttacagcgagtgcatttcacagctgaaacatcactgctttaaaacacagaatcatgctaccccttcataagcagagggggaggaggtcaaacagtatgtttttgccaaacgtttgctttatctgaactctatctagtatgaaggactggctgccgcaggcaataacacagagaggaaaaggaacaaaggaagaaaagggtgctggcagacaagatttaacaaacctgtn

SEQ ID NO: 7516 - DNA, 365 bp, Homo sapiens
  misc_feature (1)...(365): n = A,T,C or G
ccctctttcatcatgacgtgcaggtaggtctccttctgggtccacgggtgcctgtataaaccctgcctgagctccttttgctgaacaggcccctctggggattagggagcccacagggcatcaggcaccacattattgccaagagcacctgggcttattctcctgattccctggagagcctggcctcagggtcacgtgactgatagctcagatgggcagtcccaacgcattgccactcaaccaagggcctgagccccatgccattctggttgtgtcttttcacagcaatgagacccaacctcaggcctcctggggggcagcagccacactgcccgtggcgctctgcgccaaacactgtccagggn

SEQ ID NO: 7517 - DNA, 265 bp, Homo sapiens
gtgaggccaaagaagctggcggttgagcccaaagggtccctcgaataccttctcatccgatcctggacagcagatcagggtgaagagggccacagtcagggtcctgtaaccgaaagaggacatctctggcagtctccacgggctcgcagggaccagccaagggctgcccctgtgggctccaagaagggtagctctgggatcccgggcaggaaattggtgacaaggtgacaaggtgcgcgtgtcacagctgccgtcgacgcggccg

SEQ ID NO: 7518 - DNA, 348 bp, Homo sapiens
gaaagaaataagtcatctaatactcctcagggggcactgggaatcgtaggactatggaccagaaatttactcctgagaatttgaaatttgggccagaagcccagttctgcagccatttgttgttacttagaaatgatgtagtatgccaaaaatgggagcaattggatctcaagatagaatgatcatgatttaactatttgtaaatattttttagtggaatatgtgcttttttttttttccctttttttttaaaagggggccaacccgcccgcaaatcccaaatttatgaatgcgaaatcctgaaaacccccgcaggttcatttaaatggggcttggggccccatttaa

SEQ ID NO: 7519 - DNA, 80 bp, Homo sapiens
  misc_feature (1)...(80): n = A,T,C or G
ctcccgtcaatgtcttactccgggcagaatcagactgtgccttccacttcctctctctgatacacctaagaaggtnggng

SEQ ID NO: 7520 - DNA, 264 bp, Homo sapiens
cgcggccgcgtcgactcagccttgacggtgccatggaatttgccatgggtggaatcatattggaacatgtaaaccatgtagttgaggtcaatgaaggggtcattgatggcaacaatatccactttaccagagttaaaagcagccctggtgaccaggcgcccaatacgaccaaatccgttgactccgaccttcaccttccccatggtgtctcagcgatgtggctcggctggcgacgcaaaagaagatgcggcgtcgacgcggccg

SEQ ID NO: 7521 - DNA, 368 bp, Homo sapiens
  misc_feature (1)...(368): n = A,T,C or G
ctggaagctggatgatatggaagagttcatgtgcctggacacacagttccctgtaatcctgccatctagggagataaactctgttaacattttgatgttgtgtttttgcttatttttctatgcatagttatgcatttatattctcaaaaatgaagtcataatgtacattgctttgtagtctgctctatatattgtcaatatgttcccatattaaaaattttgcnnnnnnnnnnnnnnnnnnnnnnnnnnnnnnnnnnnnnnnnnnnnnnnnnnnnnnnnnnnnnnnnnnnnnnnnnnnnnnnnnnnnnnnnnnnnnnnnnnnnnnnnnnnnnnnnnnnnnnnnnnnnnnnnnnnnnnnnnnnnnnnnn

SEQ ID NO: 7522 - DNA, 176 bp, Homo sapiens
  misc_feature (1)...(176): n = A,T,C or G
nngtcgactcttcatttctacatgttatgcgtttgcatataaaatgattcttattctagtggtacccaatctcaacaaataccttaatcatcgttcctaaagccctgagttgaaaaacttccctctacgaatgtgtatgcatatatgtgtatgtgtgtttgtggtcgacgcggccg

SEQ ID NO: 7523 - DNA, 299 bp, Homo sapiens
tccctgacccgctgccactgaacctttctggcactccagagaaccggctggaaacttcactgattaggagatgtggagactggcctgccctctgcaggtaccaatacaaataggtccttccatctctatgcaggaggctctgactagacttgcacgagatggaggccggctgtccaggggtgacggacagcgagagtggagtctgggtcatcacaatatccgcactggatccagggatccagagcattagcagccccaggagctgagcagggagcctcatggtgaggtcgacgcggccg

SEQ ID NO: 7524 - DNA, 317 bp, Homo sapiens
  misc_feature (1)...(317): n = A,T,C or G
agagtcttgagtggctttattttcaacttgggttttttaagcgcttctcatgtcacctttgtttgtgtactgggcctgtctcaagtttccagagggagatgaaagacaagaaaagctaactgactggttcttcagtgagtttcccagagtggcttcttctcattccagcactgcctaactctcaccatggctgacgccgngggcaggcatccgcattcatggaaagccaggtcctagctggaagtgacacagggatcttcagatctctcttagcccactgttcctctgaaaaaaaaacaaaagcgtcgacgcggccg

SEQ ID NO: 7525 - DNA, 348 bp, Homo sapiens
tgtgttttgacttcttcatatttaaagccctctcacctgaccgtttcacctgaccagcattcctgagaatgcagagtgtcagctggggagacacagcgcagcatcagagagctgctgaaagctgctgagccacacctggctgcagctgggttgaagatgggtctgagttctgagaaagactgcatactctcctattggaaagacagacttcatttcgggaaatattcaataaaaagttttgagacacagagtcccattcatggtgagagagattgaaggtagctgttttccctcttaaggcttggcgcagtctgtaaggatactatttaatgtaatcaagaactgatt

SEQ ID NO: 7526 - DNA, 348 bp, Homo sapiens
  misc_feature (1)...(348): n = A,T,C or G
gggaggctcaagatcaaggtgcgggcagattcactatctggtgagggcctgttccttgcagtcttctccatacacagagagaattcatgatagtggctgacaatattgcagtgttttccatgagccaggcattattcacaaggttttacggatatgaatacatctatgtataggttaccactagaagctccactttgtagatgagaaaacaggggtgggatgttatgtaattggtcgacagtcacacggttggtaaggaacaggttgagattcgagcccacagtgggctgcctctagactctgtccctgacctctatgccaatagtgattcaatttcccaaatgtcan

SEQ ID NO: 7527 - DNA, 384 bp, Homo sapiens
  misc_feature (1)...(384): n = A,T,C or G
nncgaaagcctcatgaagagaatttttccctgtgaaaagtaagaccaagaaaaaacagactaaagacatgtgacttattcaatgaaagggaaaaagaagctctaaaacagtgtcattgattaaaaagaatatctggaatgtagccccactctttgagggggattcatttcttactgcttatgaactttcaatttagcagtcagaaaccatggactcattttactgcacaatgtgaagtttacattttattaacacttgagtagtctgatttagagactacgcacttcgatttgttaaaatagtggagtaacacatcacagaagagctaaataaatttttaaaaagatctcacagccgtaaaagatatccatcccaaaaaggact

SEQ ID NO: 7528 - DNA, 363 bp, Homo sapiens
ctctgctttcactgtgctcaaataacctgaaatatatagttgtttctgagtagttctgagtaggaaagaaccaaatgtaaatttccttagagaccatcctggagaagacagttctaaatcggggcttgatttttcatctatgatcctagatgttctcctgaaagaatgactagcctttttataacgatacaaagttttttaaaaatacataaatgtcataaagtttattcctgtgtatacacactctgggttcaggaggttttgtgcttacatttcactactcaaatgccttcgcaaatttcagaacattcctcaccatcactgcaggcctgtgaacagataactttcatcaattaggatggg

SEQ ID NO: 7529 - DNA, 367 bp, Homo sapiens
ctgacagtgaggtaacatgtgcttgtcatcatgttgtttgttagtaaatatctggcagcatgtttgttgacaaagtcctgcaaaagccatctttgtctaattgttgttgttgttttttcctgacacttctagcaaatgtggagccagtgttttccaccttcgtgtatggatccatgtagcttttctctggttctgttttgatggtcaccaacaaattatggcctgtttttgtaattgccttattgagtgacttgccatggagatttgacaaggtgtggctcctgcttgggccttcatttgctggcatactacatgaggctgagagccgtgttagtcctcgcagtgggcagccaggaaagcagggctt

SEQ ID NO: 7530 - DNA, 167 bp, Homo sapiens
  misc_feature (1)...(167): n = A,T,C or G
gcttcccttcattggcttttctttcctgccagagctcctatgagatgaactgatccttctaactttccttattttctgcctctgcctttttgctttgtattctagttgatttccttgaccctttcttccagaacactcgatcagtattcagctgtgtcatgacgtan

SEQ ID NO: 7531 - DNA, 342 bp, Homo sapiens
  misc_feature (1)...(342): n = A,T,C or G
tcccagtggaatgtgctctgaataacctggggagtacattcccacggaggggcccgttggtacgtggtgaaaaataaaccaaaatccagtttcctcagatcctgcagcggcacagttgatgaggttgttgttgggattggccatccagaaggtggacacagcattgcagtcttgcctgggcttggggatgtaccctgggtaggagtcctctgtgatcatcttgcacatcttgctgtcacggtccgaggggaggagggttccagacttgacaaggaggccaaggcagtggtcaaaagtgttgcgttcctccggcccatcttccgtgaagaagcagtggcccan

SEQ ID NO: 7532 - DNA, 479 bp, Homo sapiens
  misc_feature (1)...(479): n = A,T,C or G
ccgggtnnnnaaatcagtttgctccgcaaaaancancannnangangaatcttactgtatcggaaaacaaagagancnctggaggaaccgaactcgcggccgcgncgacattatgactatgaggagggcagagnagaggggaactctctgtatacttgctgaaagtcttcttgtacacattgctttttgtacccgccgcttctagctatgtatcttcctgttctctgccctcgtctcaaactatgttgccacctcaattaatcaggcacttgaattcacattgtgtagaatactcaaggttgatgatagactgggaaggaggaggaaggaggcagagataagcgatgggggatactgagccctatttagactttggtccgccagcttttggatgaacttagcacattactggctatgcaggactaacctctatgggatgcaaaatgactccaagtatggaacaacattgcaaaaatggg

SEQ ID NO: 7533 - DNA, 363 bp, Homo sapiens
attatgactatgaggagggcagagtagaggtgaactctctgtatacttgctgaaagtcttcttgtacacattgctttttgtacccgtcgcttctagctatgtatcttcctgttctctgccctcgtctcaaactatgttgccacctcaattaatcaggcacttgaattcacattgcgtagaatactcacggttgatgatagactgggaaggaggaggaaggaggcagagataagcgatgggggatactgagccctatttagactttggtccggcagcttttggatgaacttagcacattactggctatgcaggactaacctctatgggatgcaaaatgactccaagtatggaacaacattgcaa

SEQ ID NO: 7534 - DNA, 380 bp, Homo sapiens
  misc_feature (1)...(380): n = A,T,C or G
gcatatcattattacattgatagtgttttcaatgaatattgaaaagagaagtcataaaagttggtaagtttggctacatttttaaaaaacttatataagtcaaaacactcctggccaagcactgtggctcacacctgtaatcccagcacaatgggaggccaaggtgggcagatcacctgaggtcaggagttccagaccaacctgaccaacatggtgaaaccccatctctacaaatatacacaaattanccaggcatggtggggcccacctgtgcaccaccaaaaacagaattcctataaataaacaaatgcgaccaccgtatactgcctatacaatggtaaagcgtttcacagagccgaaattttttttttttggatacn

SEQ ID NO: 7535 - DNA, 359 bp, Homo sapiens
ctggcttccctggctttctgtgatgccatagcctattggcacactttcttcttttctgatccttgttggcatatcacttccataccctcaaatattattcatccttggattcattgttggctcttgtttctatgcatactgtttggattccttggtgaagttgctctgtatgtgcctgttattcttagtcatacccacagcccagagcacttcctcgaactctgtctcatgaatgtctctatttggtgtacagcacgggcttgtcagtctccaaaactgaattctgatcttcatccatatgtggtcctgggtttcttgcttagaaaatggctctggcctttacccaggtcccctggaca

SEQ ID NO: 7536 - DNA, 385 bp, Homo sapiens
cggtcttctaaggcttttatgggctgaattgtacccccatccccaaatgcgtactttgaagccctaacctccaatctcagaatgtgactatatttggagacagggccttgaaaggggtgactgagttaaaatgaggctattagggtgggccataatccaatttagtcacactgaggcacaccagcgatgcctgtgcaaaggaaaggccaagtaagaacacgtgagaagaagtccatctgcaaaccacgagaggcctcagaagaaaccacacctgccagtaccttggacttccagtctccagaactgtgagaaaacaaatttctgtagctttaaactaccgggggctgtgggacttttttgtagcatcctgagctgactaatatga

SEQ ID NO: 7537 - DNA, 377 bp, Homo sapiens
cagagccaaggtgacagggtacctggcctcacatccatgagtacttgagaaactgataatcaagatgaaatgacgtgtttttctttagaaaggaaaggcagagataatggctaacaagaaagagttgttttcatcgggaactctgtgaaagattttcacaattgttcgcctggcaattcttggattacctaatcaccttctccattccacttcttgtctctctcagagctgttcagatggtgatgatgacctagagatccccaagagtgggaatccatttggtccatagccaattttcaggggctccatctccaaagcagtgccagaaattatcccagaaaggaatttctgaatctataggtcacacacaagaaagg

SEQ ID NO: 7538 - DNA, 358 bp, Homo sapiens
tatctcctaaaatgatcaggagcttatgcctgcacttcattaaaattatcatgttcatctagggtttcatctcctgagataaggttttaagtctgtatagttagcttacttttggggacttttgtctcatgtattattgggacacattgcagaatctttcttctaattggcttttggatataactaccaatactaatcagctgtgggactcaccttatacttagttactaaagggcacctccagtgctgattgggtcttcttgtttgtagcataattccttcttttggctagtgctgttttgctcactactaattgtattcatgctgttcttcttacaaagataataacagacacatg

SEQ ID NO: 7539 - DNA, 360 bp, Homo sapiens
  misc_feature (1)...(360): n = A,T,C or G
cgggagcagcgaggggccgggccacaaggtgaacttctatgtttaaggtcccaatttttattggcacttgggcaacattttcaacctaaagttttaagtgtaaggattcgatacttagaacactcttatctttcaggaatatataccaaatcattttttccctacttctcccatgaagaggaatacaagaagacacgtaggtggtggagcaccgtggctcacgcctgtaatcccagcactttgggaggctgaggtgggcggatcacccaaggtcaggtcccctcactactttcaaaagaagagaaataaagataatgtggccaaatcttaattagccattgtcagagaggagaatttagn

SEQ ID NO: 7540 - DNA, 356 bp, Homo sapiens
gttatctcaaaggcacaaaatatgaattctgcaagaaggctattttttattgtagtttgaatgggttaggaaaagcctcaatttttcactcttaagtccttcagtacatttttctttcatcttattacttatgcaagttaaggttctttggtaacagaattcttgcaactgtaaaataaaactacatagatgtaagaagtcatgtaaacggttaacaagcttaccaaggttagcaaaactttcattgtaaatcagtctgtactgagcaaataaaaatcattattagttgtataaacacaaattccattttgactttcaggatgtcatactacttctgtacctagcattttcagtcc

SEQ ID NO: 7541 - DNA, 362 bp, Homo sapiens
cccacgtggaccaccgggacctcgaacgttgcgcctaatatccctgcgatcatcaccaccacctgtggtttctagctctattgcagctcttggctttttctcttccacatttaaacgtactttccctcgaaacataattcgggttgcaagtaaaattctctgaactggtttcgagtcatcaaaaaccacaaaaccaaaatttggaaactttcccccaacacccttggtattgatgcgaagttccacatcgcttccacaactcatgaagaattcctttatctcattttcatcaatatcatgaggcaagttaccaacaaaaagttgaggactatctggatagcgaattattctacggttgacag

SEQ ID NO: 7542 - DNA, 251 bp, Homo sapiens
ctcatttaacttttttaatgggtctcaaaattctgtgacaaatttttggtcaagttgtttccattaaaaagtactgattttaaaaactaataacttaaaactgccacacgcaaaaaagaaaaccaaagtggtccacaaaacattctcctttccttctgaaggttttacgatgcattgttatcattaaccagtcttttactactaaacttaaatggccaattgaaacaaacagttctgaggtcgacgcgccg

SEQ ID NO: 7543 - DNA, 141 bp, Homo sapiens
tttttttcccagggcagcgctgggtgctttatttccatgctgggtgcctgggaagtatgtacacggggtacgtgccaagcatcctcacgcgaccccgagagcctggggagcgggggcttgccggccgtgtcgacgcggccg

SEQ ID NO: 7544 - DNA, 326 bp, Homo sapiens
cccacttcttagaatgtgaagcaagtccataaggattaagtttcaaagaactggatgtggtggctcacccctgtgatcctggcactttgggaagccaaagtgggaggattgcttaagcccaggagtttgagacaagcctgggcaacatagcaaaacctcatctctactaaaaataaaaaacattagctgggtgtggtggtgcacacctgtggtcccagctgctcaaaggctgaggtaggaggattgcttgagcctgggagtttgaggctgcagtgagctatgatcctaccactgcattctagctggggcaacagtcgacgcggccg

SEQ ID NO: 7545 - DNA, 338 bp, Homo sapiens
atcttgctccaataaaggaacataaagattcctgatcggtatacagtgatgtatttactaaacagagacctgtgcagaaattacatactatccatctagataggttgttacacttttgcctattgatggaatagttccatttatcaagttttatacatcaaaaagcttttgaagttcaccagactgtccattaattcacctctgaaaaagtggcatttaatttcagcgactatattttacagcattaaaaagcttatgcattagggtgcttctctgcacaatggcattgagcagacagagctgagtccattatcccacccagattcacatggtcacag

SEQ ID NO: 7546 - DNA, 357 bp, Homo sapiens
cgcggcttcgtcgactttaaagatgtgtttaactgtcacatttaaaaaaagttcatatacaatacaaaaatacaaaacaaacaccctacaatacacaaatctaacaaagtatatgtggtgagattccaaaaaatgtttgaagatgcattttctttccttcaatttcagtatctaaaatgtgctttttcagaggccattggtcaatatgtacgcatttaaaataaaccatataattttaccagtaagaaagccgatagttaagttcaattcaaattggagttcataagttagtaatttaaatccttagacaaagttacagaaagcgcatcttcttattttccatcttcatacaatgtt

SEQ ID NO: 7547 - DNA, 340 bp, Homo sapiens
gccacaatttaggttttcctagattaaaatcagaagtgattttattgttggaagatacattaattctttgaagtcagaataagaggcttgacaatttaatttctaattaagtgactgaatagacaaaggatcaaatacaaacagtagtgcaggaagaaaataaattggaagaaataattgttcaaccagtagtaataattaagaccaccattttaaaattttctatacacaaagaatgagaaaatattgggattattattatacttctttcttcttcagtattagtggacccacattatctcctgtcaattcattgggtttattatgtgaaccatcgcag

SEQ ID NO: 7548 - DNA, 375 bp, Homo sapiens
cgaatataaagcattaaagaaagatgatgagcagctttgtaaacgaattgaagagctgaaaaaaagtactgaccaatctttggaacctgaacggttggaaagacaaaaaaaaatatcttggttaaaagagagagtaaaggcctttcaaaatcaagaaaattcagtcaatcaagagatcgaacagtttcagcaggccatagaaaaggacaaagaagaacatggcaaaattaagagagaagaattagatgtgaagcatgcactgagctacaatcaggggcaactgaaagaattgaaagatagtaaaactgatcgactcaaaagatttggccctaatgttccagctcttcttgaagccatagatgatgcttatagaca

SEQ ID NO: 7549 - DNA, 373 bp, Homo sapiens
  misc_feature (1)...(373): n = A,T,C or G
cttgaatccgggaggcagaggttgcagtgagccgagatcacactattgcactccagcctgggcaagacagtaagactctgtctccaaaataaaaataataacaaaatgaaaaagtaagataaacaatgaaggaaactggaaattgttattggtgctgttgatcccagcatgtgagtttcatcaaaacacctcacatggcatctgtgtcacgatcaggtccctgcctgtgagggcgtattaccattttgcaagatgctgcattacagggaacttggtgacgggtacagggaagtgtctgagtcattcccgaccactgcatgagactctgccataagctcagcatgaaaagtttccctgaaggacggcacgctgn

SEQ ID NO: 7550 - DNA, 384 bp, Homo sapiens
cgcggccgcgtcgacgtcagaagttcttgggcacgtgactgctgtaggtgttaagctgagcactcggaggtcaacggaaaaagtaagcactgcaaactggagtttttggaaagtcttcacttattccatggagaggcaaagctgaccgtatctggttaggtggagacaagggcactgcaggacctaaggagagcataaggcaagtttggagaaaaaaagacctgtggtggatgtggaacttaaataagaacatgcctggggagaagaattaagatgatgacattacagagggccacactaatgctcagaaaaaactaaagacattctttaaaaagacacaagaaacttctatgtcagcaatccgaaattatggaaaaattgaga

SEQ ID NO: 7551 - DNA, 286 bp, Homo sapiens
tttgggttcatttttctttgcataatccagggaatcataaatcatgccaaagccagttgtcttgccaccaccaaaatgagttctgaatccaaatacaaagatgacatccggtgtggtcttgtacattttggctagtttttcccgaatttctgtcttaggcactgtcgccttcccggggtgaaggacatcaatgaccatttgtttcctctgaagtagtcggttggtcatgaactttctagtgcggatagttacggtgtcgttcatgatggcgatgtcgacgcggccg

SEQ ID NO: 7552 - DNA, 353 bp, Homo sapiens
gaatatttcaataaatattcttcttgccctgagcccatagtaccaggaggatacaaaattagaggctctacaccctacagacatggtgattctgtgacatttgcctgtaaaaccaacttctccatgaacggaaacaagtctgtttggtgtcaagcaaataatatgtgggggccgacacgactaccaacctgtgtaagtgttttccctctcgagtgtccagcacttcctatgatccacaatggacatcacacaagtgagaatgttggctccattgctccaggattgtctgtgacttacagctgtgaatctgtgtacttgcttgttggagaaaagatcattaactgtttgtcttc

SEQ ID NO: 7553 - DNA, 405 bp, Homo sapiens
taatttttggattttttggtagagatgggggtttgccatgttggccgggctggttttgaactcttgacctcaggtgatccacctgccttggcctcccaaagtgttaggattacaagtgtgagccaccgagcctggccaagatagtttaaaaaaaaaattatatctacattaaagccacaagtcaccctttgctgaagtcagtattagtagttggaagcagtgtgttattcttgaccccatgaagtggcacttattaagtagcttgcttttccataattatggcctagctttttaaaacctactatgaacaccacaagcatagagttttccaaaagttcaagaaggaaaggaaaccaattatactgaatcaggtagattcttaactgaaataattagatgttttaa

SEQ ID NO: 7554 - DNA, 361 bp, Homo sapiens
cgcggccgcgtcgaccgcggccgcgtcgacatttgtattctagactgtttagtaaaataatacaggaatttgagaaaacctttgcaaaagtgttagtgaaaattacttagggtgagaagcatggctgagcgctgagaggagggttggggacgggagacaaggagagagaaagtaggagcatgagagaggcagagaaaatcgaggcaaaagagaaagagaaaatgagacagaaacccatgtatttgatcccagaaaaaatataaaaactgtttctgggtttgatccctttgaggtcattctccaggaagggtctctgacatggctacagttttgactgatctctggtcgacgcggccgcgaa

SEQ ID NO: 7555 - DNA, 199 bp, Homo sapiens
gttcgtttgatctccaccttggtccctccgccaaaagtgaggggagggaaatgatgatagtttagacagtaatatgttgcaatatcgtcaggctgcaggctgctgatggtgaatgtaaaatctgtcccagatccacttccactgaaccttgatgggaccccttcttccaaatcggttgcatcgtaggtcgacgcggccg

SEQ ID NO: 7556 - DNA, 343 bp, Homo sapiens
attctttgttaatcattagaggaaaagggctatatgaataaaaatctggcagtatatgtcatgtgctgtggcacacacctgtagtcccagttacttgggaggctgaagccggtggatcacttgagcccagaagtttgaggccagcctgggcaacattgcaggacttccatctctagagtaacaaccaccacaataacaaaactggtgacagaaaggcagagtctgcagtgtgtactctcccctccccctcttgaaattttcctgtagaagctgtgaacatcccaggcctctctggctcatgaaaaactgtgtaattgtgtaacatataaaagctcacagcatg

SEQ ID NO: 7557 - DNA, 366 bp, Homo sapiens
ttcaaatccagggagagaatctttagtgttttctgggccctcataaatacgtttttctcatttgagaaaattgtgactttatgttggtcacttagtttttatagtttatgatgaagaattaaagagaaacaaatgaaaggcaaggtctactcaaatatcagacaactaaaaggctatacagcccctaaatcctttgctatctacttccccagaataatgcataacctaaattccattatttcatttatcagaggtttaagccgttgttgtcaattgtgtgcagtaacgcctctgacttcccttttgtggaattttgtatcgattttggatttttaagtcaaaggagactttaaaatcattttgatt

SEQ ID NO: 7558 - DNA, 358 bp, Homo sapiens
gccgcactggcgttttccgtcatgaacccctgccatgtagtgttgacttgaaggggatttagccatgggattgggaagagcagggagttagggtcagaagacctgagctcaaatcctgattctgccacttacggtgttatcttggggaaacaattttattcctggagtctcagttttaccatctataaaatagggatagtgctatcaatgtcccagtaagggtgtgggatttattttttaatttttatttgtttatttatttttttgagacaggacaggctctggctctgtcgcccaggctggagtgcagtggtgcaatcaaggctcacagcaacctcccctcctgggttcaagtaat

SEQ ID NO: 7559 - DNA, 365 bp, Homo sapiens
gtccattactgaatcttgggaatgagtgattaatctgaaaattgacaggtaagcattgagcatttttaagaaagtaattgaaaaaatatctggaatctaccactgcctaacagtaatactagttttatgacattcttggcttactgtattatctaattactttaaaaatgtaattgaaagcggtgagtgtttatcatctggagagcattttattataaattaatcagaacagtagctttgaatccacaagtgcagaaagtttcaatgctactttgattggcagaacccaccaagtgaatttaggcagccagaagggattttgattattgggaaagtcttttttggttctgaggttaaggtggatt

SEQ ID NO: 7560 - DNA, 365 bp, Homo sapiens
gaaatgcttctttctcagggtattgggtgaatgtgtatctatttgagtctggaaataactaatgtgtttgataattagtttagtttgtggcttcatggaaactccctgtaaactaaaagcttcagggttatgtctatgttcattctatagaagaaatgcaaactatcactgtattttaatatttgttattctctcatgaatagaaatttatgtagaagcaaacaaaatacttttacccacttaaaaagagaatataacattttatgtcactataatcttttgttttttaagttagtgtatattttgttgtgattatctttttgtggtgtgaataaatcttttatcttgaatgtaataagaaaaaa

SEQ ID NO: 7561 - DNA, 360 bp, Homo sapiens
  misc_feature (1)...(360): n = A,T,C or G
ttttgagaaggggttttgctgatgttgcccaggctggagtgcaatggcacgatttcagctcactgcaacctctgcctcctgggtttaagtgattctcctgtctcagcctcccgagtagctgggattacaggcgtctgccaccacgcccagctattttttgtatttttagtagagacagggtttcaccatgttggccaggctggtctcgaactcctgacctcaggtgatccaccctccttggggcctcccaaagtgctgggattacaggcatgaaccaccacacctggcctaaaacattttctttaaatgaaaaaaacatatggagaaaacatatatcagctttcattatagatggtgccn

SEQ ID NO: 7562 - DNA, 366 bp, Homo sapiens
  misc_feature (1)...(366): n = A,T,C or G
attaactgctcctctgtgcttccactgtgtagcatctcccaaacttcacgcccatccagaacttcagaatgtcacctcatttggaaagagagtttttggagctataactagttaaggatcttgagatgcaatcacattggatttagtgtgtgccctgaatccaataactagtgtccttataagaagatgatgggggtgggcacggtggctcacacctgtaatccgagcacttcgggaggctgaggcaggtggatcacctgaggttgggagttcgagaccagcctgaccaacatggagaaaccccatctctactaaaaatacaaaatgagttgggcatggtggcacgccacgcctgtatcccagctn

SEQ ID NO: 7563 - DNA, 293 bp, Homo sapiens
cttcgatgcctatgtgcttgccaagctgtatgtgaagctacattactgtgtgagttgtgcaattcacagcaaagtagtcaggaatcgatctcgtgaagcccgcaaggaccgaacacccccaccccgatttagacctgcgggtgctgccccacgtcccccaccaaagcccatgtaaggagctgagttcttaaagactgaagacaggctattctctggagaaaaataaaatggaaattgtaaaaaaaaaaaaaaaaaaaaaaaaggtccacgcggccggaatttccaaattttaa

SEQ ID NO: 7564 - DNA, 167 bp, Homo sapiens
cagaagggtgggaagccagagccgcctgccatgccccagccagtccccacagcataacagggtctccttggcagctgtattctggagtctggatgttgctctctaaagacctttaataaaattttgtacaaagacaaaaaaagaaaaaaaaaaagtcgacgcggccg

SEQ ID NO: 7565 - DNA, 370 bp, Homo sapiens
  misc_feature (1)...(370): n = A,T,C or G
aacgcggtctgagtggtatataccaataaatgtgggntncttttttttttttttcttttttttttttttttttttattatttttttactcctttctttttttttttgagatcatttttttgtctcacttctgtttatttccaactttgtatttttattccctatttttatttttactgtgttccaagcccatttatttatttgcttactttttttccctatttgtatgtttttaaacttattttttcctaattttaattattacttttaccctttccccctctttttttatctacttttttttttttttggatgattctttaaccaccttttttacttaggaaattttctttctttctttgttgcatcat

SEQ ID NO: 7566 - DNA, 360 bp, Homo sapiens
gccgattatggagcccaagggcttgagcaaacgtagtggtagccaggtagtggtaacagcaggcattgggagagacccaatgctgtcccggtttctgaccagcacagtaatagtggtggtggccacaggggtgcttgtgtcacaacactcccagctccaggtggctcacaacagaaagaggaggtggggagagagagagagagagactattcgtttgggagaaagcaaaagaagagaacaagagtctctgcctggtaatccagagaattcttctggatcttacctaagaccatcaaggtggcacctctataagtctgcaagaaacagagtgtcactggcttgaggtgccccctaatataa

SEQ ID NO: 7567 - DNA, 382 bp, Homo sapiens
  misc_feature (1)...(382): n = A,T,C or G
cttgtcttgagatccttggtgaccctaccacagtactcacattccaatgaggccctatcaaaaaccagccttaggctgtgcacggtggctcaaacctgtaatcccagcactttgggggtgggaggatcgtctgagcccaggagtttgagaccagccagggcaacatagtgagatcccatctctacagaanaaaaaaaaaaaaaaaaaaaaaaaggccccccccctcctttaacagaaaaaaaattttccaagtaagaatttgggccagaaaaacttggggagctgcttttaaccccccggaaaaaaaaaaaattcggcagggggcccccggccccccggtaaaaggagttttttcaccaccctttttttttaaccataaggn

SEQ ID NO: 7568 - DNA, 370 bp, Homo sapiens
  misc_feature (1)...(370): n = A,T,C or G
gcggccgcgtcgacctttctctcaggatttccgctggcttcaggttccggtcaggcgtcgggacagagcctgatccaggcttcggcggccggtggcagctctcgatcagctctcgcagtcggagaggcggctaaggaaaggtgccacagcagagacgcgaaggagaggccctagaaccttttcaaagaagaatggaagaaaccatgaagcttgctacgatggaagacacagtggagtactgcctgttcctgataccagatgagtcaagggactcagataaacataaagagattcttcagaagtacattgagagaataatcactcggtttgcacctatgctggtcccctacatctggcagaatcagccttn

SEQ ID NO: 7569 - DNA, 369 bp, Homo sapiens
  misc_feature (1)...(369): n = A,T,C or G
ccacagttcgcctgatctccaccctggtcccgccgccgaaagtgagaaagacattatcatagtgttgacagtaatatgttgcaatatcttcaggctgcaggctgctgatggtgaaagtaaaatccgtcccagatccactgccactgaaccttgatgggacccctgtcctcaaattggatgcatcgtagatcaggagcttaggggcttttcctggtttctgctgataccaatttaaataacgactaatgtcctcactcgcctggcaagtgaaggtgactctgtctcctacagatgcagacagggaggatggagactgggtcatctggatgtcacatctggcacctgagagccagagcagcaggagccccn

SEQ ID NO: 7570 - DNA, 291 bp, Homo sapiens
agatggtggtgttaatagagctaaatattcatcctttaaaaagtcaaaaaatggcatctaaaatgggggaaaagggctgagtgtggtggctcacgcctgtaatcccaacaatttgggaggctaaggtggaggattgctttatcccaggagtttgagaccagccttggcaacatagtgagatcttgtctctataaaaaaatcaaaaaaattagccaggcatggtggcatgcacccgtggtcccagccacatgagaggttgaggtgggaggatcacccgagtcgacgcggccg

SEQ ID NO: 7571 - DNA, 205 bp, Homo sapiens
cccaagtctccaacatgcctctcttcatcctttggcccaccgtgttttctggatagaggattaaagtgaggacctgcactggtacagcctgctgtattatctccaaactcatgaacatggaatccatgcaggccttcagtcagtcctttaatgcttccccacaccttcactggtccattactttccttccgcgtcgacgcggccg

SEQ ID NO: 7572 - DNA, 350 bp, Homo sapiens
  misc_feature (1)...(350): n = A,T,C or G
gccgcnngtcgaccctcagttgtataatagaaagaatctagattcaataaggctctgtatcagcgccccatgaaaaaaaaaaaaaaaaaaaagaaaaaaaagaaaatatggaaaaaaaaaaaaggaaggaatgcttaagcccaggagtttgagacaagcctgggcaacatatgcaaaacctcatctctactaaaaaataaaaaacattagctggggggggtggtgcacacctgtggtcccagctgctcacaggctgaggtaggaggattgcttgagcctgggagtttgaggctgcagcgagctatgatcctaccactgcattctagctggggcaacagtagacgcggccg

SEQ ID NO: 7573 - DNA, 286 bp, Homo sapiens; identical to SEQ ID NO: 7551

SEQ ID NO: 7574 - DNA, 360 bp, Homo sapiens
caatatttcaataaatattcttcttgccctgagcccatagtaccaggaggatacaaaattacaggctctacaccctacagacatggtgattctgtgacatttgcctgtaaaaccaacttctccatgaacggaaacaagtctgtttggtgtcaagcaaataatatgtgggggccgacacgactaccaacctgtgtaagtgttttccctctcgagtgtccagcacttcctatgatccacaatggacatcacacaagtgagaatgttggctccattgctccaggattgtctgtgacttacagctgtgaatctgggtacttgcttgttggagaacagatcattaactgattgtcttcgggaaag

SEQ ID NO: 7575 - DNA, 360 bp, Homo sapiens
ctcactcctgggaagttgagaacacagaactctccagtttgtccaccttctttaaaccctctaaacttgtgcttctctgagaagccagatatagaaaagtatttagttctcctcatcccaactcaccatgctaggtgccctccacccaccgccccttctcttcctctcctctccccgtcagtgttgcagaggagcaaagtaaaatgtcagcattgccatttcttggaatataaaaattctaatgcttttgttttttaaaaaatattgaagggacaacaaataaatggcatggggagaaaaggagagtgaccttattaaaagacaaaatgtgtgagctgtttggatcttgatgttaaaaaa

SEQ ID NO: 7576 - DNA, 348 bp, Homo sapiens
ctgagattgtttcaaggttttattcctacagacatgttaggatttgtgtatcactgatttctccaataaaattcgaatatttcaggttatttcctttttcctaacttatgttagcattttgtatatatatatatatttgaattttggcttgtctggagtcttaaatatttggtatgccttcacatttggatttttagttttatttttacattgagacttctacctatatcattgactttattttttcctatgattaaaggattcagttatacaaaaagatgtttcagaaacactgctatttacctaaaggtaattttcagtttctttataaggagttaggaaaatggg

SEQ ID NO: 7577 - DNA, 357 bp, Homo sapiens
cagacatgtgccaccacgcacagctgatttttgtgatttaaatcgtaacagcagctttggaggccgggtgtggtggctcacacctgtaatcacagcactttgggaggccaaggggggcagaccacctgagttcaggagttcgagaccagcctggccaaaatagcgaaacccccatctctaccaaaaacacaaaaatcagctgtgcgtggtggcacatgtctgtggtcccagccactatggaggccgaggcaggggaactgcccgaatccaggaagcagaggttgcagtgagccgagatcacgccaccgcactccagcctgggcgacaggacgagactccatctcaaaaaaagcagct

SEQ ID NO: 7578 - DNA, 316 bp, Homo sapiens
ccagtgttttttttgtgttcatgcgtttctgttttgctagttatattctttttccgagatgaggtattaggaacaactgcactagaaggtccacttgtagctggtttgctgcttgctttagtgctctttaaggtagctggtggtgttgggaggatctttgcaggtgtatacgtatttaaagatactttttttctcattattggactggaacgtaaagctgtagaggctgaaaaaaaataaacaaacatgttaatttaataatttcctgccaattatctcttaacatcatagaaagtttcgtcgacgcggccgcgaa

SEQ ID NO: 7579 - DNA, 562 bp, Homo sapiens
  misc_feature (1)...(562): n = A,T,C or G
aggaggtagccgggncgcttttncnaattgannngactgatgcccatgatgtatatacactatcgtattcgatgatcgaagatancccccaccaaacccaaaanaaagaagatcttctcgaggatctcgaattctgcggccccgcgtcgacnngggtttctctcatggttggccagagaatagatcttganntctccttttacctcatganntccgcccgcctttcagcctctccaaagtgcttgnnggattacaggctnctgagccnnaccgcgcccccnngccaaatttaagnnctttttggactctttgtgcttgtgcgtttcaacnacttttcaccaatggattttctggcttcttgatanaggaaggcaccccttgatncctgtcanntggattcatttagcacacatnntggaccacgataggnccctgctgacatgtttttttcattgtagacagcattataagaactttaaatctcacggcacaaacccctcgaagtctgtctgggcacatgccacatgccaatcttgtgcctttcccaaccttcttggttggn

SEQ ID NO: 7580 - DNA, 371 bp, Homo sapiens
gcggtgatggctccatggcctctcctggactggctgcgtgaccccgacggctgcttctggaggatcgacactgttgccagcttactacctgcagtctttccagtcttgatgcaacatcatgacaacagagaagagtttagtgactgaggccgaaaattcacagcaccaacagaaggaagagggtgaggaagccataaactcaggccaacaagaacctcagcaggaggaatcttgtcaaacagcagctgaaggagataattggtgtgaacagaagctgaaagcttctaatggagacactcctacacatgaagacttgaccaagaacaaggagcggacatcagaaagcagaggactttcacgactattctcct

SEQ ID NO: 7581 - DNA, 276 bp, Homo sapiens
tctgaacaaaatgaaattaaattagaaaccagtaactgaaagatacctaaaaaaaaaaatccccaaatatttggctaaaacaattaatgcacgaggtcctggaggttaagggggtgggaaacaaaggaactcagccccacctgggggtaaagggaatggtgatcaaagaaggcaggctggaaaaggtgatggatgggtgactaggagttgggtctgtgagaactacgaagaaataagtattactagatcaatttgagatgaaggtcgacgcggccg

SEQ ID NO: 7582 - DNA, 363 bp, Homo sapiens
caagattaaaaagtaccctatggcatcattgatgttttttaactttgatcttttgcagttgtgattcatctcggttataaaacttccctttaaaggaacatagccgatgacttattagaaccttcatcttaagtagcgtaaacatgaaaatggtacacatctttacaaaatgccatttattttctttgccagcttatcattttaagacatgacatcatacttaagatcccaaatttgtaagtcttgtgtttaggcaaggcattttgaccttctgttggcaagctagctctgaagaacaactgtcagccggagaagtggtgtagcagcagcagcaatagtaatgcatttagatacctagctctt

SEQ ID NO: 7583 - DNA, 361 bp, Homo sapiens
ccagagaatgatcatgaatgctaaaacacagaatccaaagggctcatgccagaaaacccaacagcaacttctgtgtcttattttataataagtaatttaaataattataaatcatgtaagttcatggtaaagaaaaaaaaatcaagcagtatagaagagtgcaaaatagaaaggaaaagtccctgtttctcagaccatcagaggtaagagcagagttttttcttttttcttttgagacagggtctcgccctgtcacccaagctggagtacagtggtgtgatcacagctcactacatccctgagctcccaggctcaactgatcctcctgttgcagcttcctatgtagctgggactagacata

SEQ ID NO: 7584 - DNA, 361 bp, Homo sapiens
ctgccttaaggcttccaaggtcaagtgtatgtacttaattttgtttagccttacaagaataacaacacattcatttattaacccagttctacagatgaggagacaaaggcacaaagaggttaaaaggcacccccctgtgtttaatcagtggtagatatggacacaaacacagatttttgagggaaaaaagttgtttccctttatacaaacattatattattatgttatatactattatgtattatatattgcacagctattatttcatgcaattttattattaatgaactcaaataagtgagtaataataacaattactgaatttttttatcaagctataggaagctgatttttccatatt

SEQ ID NO: 7585 - DNA, 287 bp, Homo sapiens
cgcggccgcgtcgaccccattttgaatatattgtttataattaaatgtgctttttacactgcaggtcaatataaaaactggttagtaaatttccagcgagcatttatgttcatttgctcacagcagctgtctggatggaaaattaatttcacagatggtccccagttaaactgggaagaaatataggcagcttccacccagatgctgagatgctacagtttaaccactacaataaacacttgtggtttttaatttaaaggatacacaaaactcagtcgacgcggccg

SEQ ID NO: 7586 - DNA, 149 bp, Homo sapiens
gcggccgcaaactgacacctcagggacaaagagatctggacagaatcgccggacaggtggcagctgccaacaagaagcattagaacaaaccatgctgggttaataaattgcctcattcgtaagaaaaaaaaaaaaagtcgacgcggccg

SEQ ID NO: 7587 - DNA, 361 bp, Homo sapiens
  misc_feature (1)...(361): n = A,T,C or G
caccgattttggaatcatgcttcttacaagaccctggccatccagccaaaccattggctacagcttatgaatcagtatataatcacacagctggccatttctccttccatgcaaagagtacaaccaagtgcactgctcaaagttctgttcactgggatgatttctcttcacttctgtccttcagtgttgtcctagaaaggggctgtagtgctgcaactgtccactttcatgtggcgcctgtgtaatgtgcataaccatctgtgaaccaggccccagtcttctcttcctctgtgaactgaatcatagggaacttccctataaggccatcaatgcgggctgggggatgagaacgcagggtggn

SEQ ID NO: 7588 - DNA, 350 bp, Homo sapiens
ctgggattacagggtgagccactgcacgtagctcggatataattgttgagtagctgaataggagacctaagtcagccttgaaaatcacctgttcctgcttattttcagggatctctttcctatttgccaataaacacattttagtggactaatcatgaatcgttttatggttggcctcacatttaaaatgttggtggtgctcctcctgccctccaaagccctttatggagcacattaacagagccctgccagcgttacaagctgggccccacctgaggttgtctccattgccccctccacccactttactggccacagaatgtttgtgctttggtgttttcatcagttga

SEQ ID NO: 7589 - DNA, 345 bp, Homo sapiens
atcacgatgcccaggagatcctgcggattgcccgggacctcgtccacaaggtacttccctgaaaaccacgtgtaagaagtgatgcttttgccagtggatgatctggaatgcgaccggagcacttgctctgaggaatcccagggtgactctgtcggggaagaatccggtcacagcctcccctcagagacaggcctcagttcgagggcagcccattatctgtcgcagacatctgccatgtccctgagactgcgggaggcaggggatgcatgggtgtccccatctgtccctggtgagaagcaaggctagctctgccttccacatgcttctcaggatgccaagaggcct

SEQ ID NO: 7590 - DNA, 298 bp, Homo sapiens
ctgcttacgacttggatcatgtttatgttgggcagcatagtttacatacatttatatctcaatgatgtttgaatgactgctacaactttttttttttttaattttaaaaataatttttggccgggcacgggggctcacccctgtaataccaccactttgggaggctgagggggccgaatcacaaggtccggaaattgaaaccattttggctgacatggggaaaccccatctttactaaaaatacaaaaaattatctgggcccaggggcaggcgcctgtggtccgtcaacccggccgca

SEQ ID NO: 7591 - DNA, 361 bp, Homo sapiens
gccagtttctcctcatctccctcttttaaatactcttatcctcaggcctcctcttttctttgtctacaatcactttctgaatcatcccattctatctctgagaccatggaagttctaaataatgatgactaccaactttgtatcttcagcccctatctggatatctacttagtcccaaacccatttatctacctgcttactcaatgtccctacttggatgtcttcaaacttaacctgtccaaagcagaactcttacttttaccctccaaactctctttctgcctacttttcccatttcaggcaagatccataaaccaagtttcttacttagaaatccttctttctttctattctccaacac

SEQ ID NO: 7592 - DNA, 358 bp, Homo sapiens
ttcaccacatccaaggtcatctagcttttctcttatgttatcttttaggagttttatagttttgccttttacatttagatctgtaatccattttgagttaatttgtgtagagggtgtacaagtctgtgcttaagttcatttttttttttttttttggctttcgttaaaaacagtatgtctccgttccggaacttttccattggcttactattatgaaaggactacaaagctgttgggcgggaactacaatgccaaaaagaaaatgtgggtttaaagccaaactttttaccttttaagtcaaacctagttagggaaaggggacttggcccatatattctaaagagggatttgcactctt

SEQ ID NO: 7593 - DNA, 363 bp, Homo sapiens
  misc_feature (1)...(363): n = A,T,C or G
atcttggttccgcgttccctgcacaaaatgcccggcgaagccacagaaaccgtccctgctacagagcaggagttgccgcagccccaggctgagacagggtctggaacagaatctgacagtgatgaatcagtaccagagcttgaagaacaggattccacccaggcaaccacacaacaagcccagctggcggcagcagctgaaattgatgaagaaccagtcagtaaagcaaaacagagtcggagtgaaaagaaggcacggaaggctatgtccaaactgggtcttcggcaggttacaggagttactagagtcactatccggaaatctaagaatatcctctttgtcatcacaaaaccagatgtctan

SEQ ID NO: 7594 - DNA, 351 bp, Homo sapiens
tttactatgattgcgttaatttgttgaattaaatgcctttataaaaatatttacaaatgttttcttgccttaaaatgtaacattttctacttaaatttaatttccaagagagtgattatttgcattacaaaggaattcttaataattcctgtaagcctaggaaataggaatgccaaagtaacatttaatgtacttctctataacttttcataatcagaaattttaaattatgtttatataacccatttacttttattttaatgtgaatatatattcagaaattatttgatgtaaatttcaaaatgattataggaattaagctgaattctaatttttttgcttagatttaga

SEQ ID NO: 7595 - DNA, 360 bp, Homo sapiens
  misc_feature (1)...(360): n = A,T,C or G
ggagaaagttcctctctattcttattaggagaagcctcatttcctactgcagaggaaagtgccttggttacaatattacataaaatcatggcactatctgcagtggtcatatcaatgctttagttagtttcagtcattccatactatgtgtgttggtatttcaataccgctaggaatctcccaatactaagaaccaaatgctactggattgccttcaccttccattttattatttagaagtagtttaagtttgaccgttttataaatgtcactctacaaatctgctcttacttttcattaactgatttaaatgtccccatctgctttcatgtatgaacaatcacttcaaaaaatagctan

SEQ ID NO: 7596 - DNA, 359 bp, Homo sapiens
tttatttactcttttagtgtttactttttgatttcaagagaaattttacaattatgtattctaaattcaaatctgttctccttgttctcttctaaataggcaaggtatgagtcaaacttagagactgcagcttaaatttagagaacacattggtgcaattccacatcaaagattttacatgaaaattaagaggatgttggcagtttactaaatgtgagttaatataagtctatagagctctgccatattctttatttttccatatttccctaaatgtatcctatccttgaaaaacaaaatccgtaatactcatcaaggaatcgtgaaaaatgtcaagcaatattttctgtaggtgattt

SEQ ID NO: 7597 - DNA, 369 bp, Homo sapiens
ctatttttagcttgaattggggtaatggaagattctaaaatattttgtatattatgaaacattttcagaaactttttacttgttcttttttcatccagcgcttaacatttttgcttgtgatttcttgacacttaatcgactatgaagaaactattgttttttctgctgcttttaaagcgagtgttgatttgtttgaactaattggaggtgctttcatttaatcggggccttggttttggattcaaaagcctgctttaaagtactgtccttgcattgttaacaactgttctttttttgttgttcgctttgagaccctggctggggaagaaataaacataaaatgcccaatggaacgggagccctctttcc

SEQ ID NO: 7598 - DNA, 369 bp, Homo sapiens
  misc_feature (1)...(369): n = A,T,C or G
ctcaacctaacttgacatcagtgtttttcacctataaaataaattaaaataggtaatgattaaatactcttagtgctcttacattaggtaatggactggtattgagtaataaatacataatagccattcagttaatttaaaagttagttgatgaggttattatgtacaaataagtcggatttatttcattttagaaggatgagtactgttttggttaacatttcaaggaaaggaatgaagaagaggaatacgacttaatgaccatcttgccttgttttgaactgnncnannnnnnnnnnnnnnnnnnnncnnnnnnnnnnnnnnnnnncatnnnnnnnnnnnnnnnnnnnnnnnnnnnnccnnnnnnnn

SEQ ID NO: 7599 - DNA, 368 bp, Homo sapiens
  misc_feature (1)...(368): n = A,T,C or G
ctacgagaaacacaaagtctacgcctgcgaagtcacccatcagggcctgagctcgcccgtcacaaagagcttcaacaggggagagtgttagagggagaagtgcccccacctgctcctctggctctcaggtgccagatgtgacatccagatgacccagtctccgtcctccctgtctgcatctgtaggagacagagtcaccatcacttgccaggcgagtcaagacattggcaactatttaaattggtatcagctgacaccagggaaagcccctaagctcctgatctacgatgcatccaatttggaaacaggggtcccatcaaggagtagggnnannnnnnnnnnnnnnnnattntnnnntnnnnntttaa

SEQ ID NO: 7600 - DNA, 368 bp, Homo sapiens
cagtttctttcaaggacataaaagggttcacaatagagaaaaaccctgtaattctaagaaatgtggcaaagccttcagtttttccatttttccttgaaatatgtaagaagtcagtggagataagccttataaatttaaatgtgtagtaatttctttagttcataagtttcatttgatacttaaaagaactcatttttgaaaaattcctataaatgtacagagtgtgagaataccttcatttgtctaacacatgttcaaagacacatggtaacaaactgtagatggaccttataaatgtgagagcactctggattggaagcacagtggtctggaaaatacagaaatgttttcaaatttaacaattactg

SEQ ID NO: 7601 - DNA, 417 bp, Homo sapiens
  misc_feature (1)...(417): n = A,T,C or G
ctgcctagaaaatgcaaaatgaaataagagagagtagtttttcagctagtttgaaggaggacggttaacttgtatattccaccattcacatttgatgtacatgtgtagggaaagttaaaagtgttgattacataatcaaagctacctgtggtgatgttgccacctgttaaaatgtacactggatatgttgttaaacacgtgtctataatggaaacatttacaataaatattctgcntggaaaaaaaaaaaaaaaaaaaaaaaaataaaaaaaaaaaaggggggggcgtttttttaaaaatcctttggggggcccaattttaccggggtggagaaaaaattttttttttttttttgggggggggaataaaaaaacgagggggggtttttgaaaaagaacttttttttgggggggaaan

SEQ ID NO: 7602 - DNA, 393 bp, Homo sapiens
aatctggaagttttatgccagatagcccaggctctgggaacgcgaggcctaacaacccagactggggcacatttgaagaggtgtcaggaaatgtaagtccagggacaaggagagagtaccacacagaaaaactggtcacttctaaaggagataaagagctcaggactggtaaagagaaggtcacctctggtagcacaaccaccacgcgtcgttcatgctctaaaaccgttactaagactgttattggtcctgatggtcacaaagaagttaccaaagaagtggtgacctccgaagatggttctgactgtcccgaggcaatggatttaggcacattgtctggcataggtactctggatgggttccgccataggcaccctgatgaagctgccttct

SEQ ID NO: 7603 - DNA, 403 bp, Homo sapiens
cccacgcgtccggccagagtgatggggttccagccatggggaagcaacccaatcctctgtctccttgctccaatggaggcagaagagcccaggacccaagcgtcttggcaggggtgctgtgaatgtccagtggtcccagctccccaccctggccctgccccagcctgtgtagctcttcctgcatgtggatgctgcatgtctggtctggggcttggatgttgcactgccccactgcctgtcccttctggtaaaataaagaactcttaatgcccaaaaaaaaaaaaaaaaaaaaaaagggggggccctttttaaagaacccttggggggcccaaatttaacgggggatggaaaggaaaaattttttcccttaaaggggggcaaataaaaaccaaccggggaattt

SEQ ID NO: 7604 - DNA, 418 bp, Homo sapiens
agaaacaggcccggcgggaccaggatgacacctccatttctctccaggaagttttgagtttctctccaccgtgacacaatcctcaaacatggaagatgaaaggggaggggatgtcaggcccagagaagcaagtggctttcaacacacaacagcagatggcaccaacgggaccccctggccctgcctcatccaccaatctctaagccaaacccctaaactcaggagtcaacgtgtttacctcttctatgcaagccttgctagacagccaggatagcctttgccctgtcacccccgaatcatgacccacccagagtctttcgaggtgggtttggaccttccttaagccaggaaagggattcatggcgtccgacatgatctggctgaatccgtggggggaccgagaccaaactatttaccg

SEQ ID NO: 7605 - DNA, 399 bp, Homo sapiens
tagtgctatatttatagcgcgcccgccaccaaaattttgtttatgatttgaataaaattgcaaaagaaaggaagctgcctggagcctttagtcttggagcaggagcaggtccatttcagactctcgggttcaattctgagtttatgccagttattcagacagaaagtgaacacaagcctcctgtaaatggaagttactttgcccatgtgaaccctgcagatggagggtgcctactggagaaatacagcgagaaatgtcatgattttcagtgtgcattactggctaatctttttgccagtgaaggccaacctggcaaggtaattgaggtgaaagccaaaagaagaactggaccacttaactttgtgacttgtatgagagagaccctggaaaaacattatg

SEQ ID NO: 7606 - DNA, 395 bp, Homo sapiens
acgcctgaccagctctctgccccaccctgtcctctggaacctctgcgagatttagaggaaagaaccagttttcaggcggattgcctcagatcacactatctccacttgcccagccctgtggaagattagcggccatgtattccaatgtgataggaactgtaacctctggaaaaaggaaggtttatcttttgtccttgctgctcgatagcttcggggactgcgtgacctgtcacgggagccctgtggacatctgcacagccaagccgcgggacattcccatgaatcccatgtgcatttaccgctccccggagaagaaggcaactgaggatgagggctcagaacagaagatcccggaggccaccaaccggcgtgtctgggaactggccaaggccaat

SEQ ID NO: 7607 - DNA, 437 bp, Homo sapiens
gtttcttggagcttccacaaacttaaaaccatgaaacatctattattgctactattgtgtgtttttctagttaagtcccaaggtgtcaacgacaatgaggagggtttcttcagtgcccgtggtcatcgaccccttgacaagaagagagaagaggctcccagcctgaggcctgccccaccgcccatcagtggaggtggctatcgggctcgtccagccaaagcagctgccactcaaaagaaagtagaaagaaaagcccctgatgctggaggctgtcttcacgctgacccagacctgggggtgttgtgtcctacaggatgtcagttgcaagaggctttgctacaacaggaaaggccaatcagaaatagtgttgatgagttaaataacaatgtggaagcttgttcccagacctcctcttcttcctttcagtacatgtattt

SEQ ID NO: 7608 - DNA, 461 bp, Homo sapiens
  misc_feature (1)...(461): n = A,T,C or G
ngggtgcagnnnancnnacccttgaaaccactgatgaatctggcacggaaccccgggncgacccacgcgtgcgaaaattaaaaacaaattacgagtgtttaactggtatgcatcactgtgcatatataggcacgcatgcatctatccatccatctgtccccacgcagcaggtatctgtcctgtcgtggggatctgctgggtcatcttccctacctccaggccatagcatccttcaatccatccgtctctccccactctgcaggtatctgtcctgtcatggtgatctgctgggtcatcttccctacctccaggccgtagcatccttcagagtcctccattccttcctgtctcaccttgctccacttcagttccttttcaccctgatcctaaatcaatactataacttttaaatgactctccctgcttctagcccttcctggcccagtctgttccaagcacca

SEQ ID NO: 7609 - DNA, 385 bp, Homo sapiens
tcgcatcatcagcgaattgggctgaaatattttggggactttgaaaaaagaattcctcgtgaagagatgttacaaatgcaagatattgtactaaatgaagttaaaaaagtggattctgaatacattgctacagtctgtggcagtttcagaagaggtgcagagtccagtggtgacatggatgttctcctgacccatcccagcttcacttcagaatcaaccaaacagccaaaactgttacatcaggttgtggagcagttacaaaaggttcattttatcacagataccctgtcaaagggtgagacaaagttcatgggtgtttgccagcttcccagtaaaaatgatgaaaaagaatatccacacagaagaattgatatcaggttgatac

SEQ ID NO: 7610 - DNA, 434 bp, Homo sapiens
  misc_feature (1)...(434): n = A,T,C or G
agtagtcccagccacaaatgtgaacacagttttaataattcctcctaagtctctctgcaatgcaatcaatgtttacaacctcacctgcaataactgttcagaaaactgcagtgatgttctgtttagtaacaagattaccttcttaatggacctcctgatacaccagttgacggtttatgttccagatgaaaataatactattttggggagaaatacaaataaacaagtttttgaaggcttgacaactggacttctcaaagtcagtgctgtggttttgggctgcctgattgccaatcgaccagatggaaactgccagccagctaccccaaaaataccaacacaggaaatgaaaaacaaaccctcacaaggtgatccttttaacaatcgagttcaggaccttatcanctacgtggtgaacatgggtctgattgacn

SEQ ID NO: 7611 - DNA, 388 bp, Homo sapiens
agagagagagagagagagagaggagaggtgggggtgggggactgtggggtcagacaaatctgacttcaaatcctgactcatgggcacttccacccttgagcctcactcaggatgtgcatctgtaaattggggataataaataacgatctctgtatttttaggcctctgagttgtcccagatataacacacatgtgacccagattatacaaaaattgatggggaatttatgtgcaggcaccaaggcatcaaatagagatgaaggtggcctcagggactctgccgggatgctttgctcctctctcccgtgatcttcattccgttcttggccaataattcagttcaggcagaatatggctgccttccttagagaaaatatcagatcaaggg

SEQ ID NO: 7612 - DNA, 380 bp, Homo sapiens
ctcgcgggccgccgggtgctggtcaccggggcaggcaaaggtatagggcgcggcacggtccaggcgctgcacgcgacgggcgcgcgggtggtggctgtgagccggactcaggcggatcttgacagccttgtccgcgagtgcccggggatagaacccgtgtgcgtggacctgggtgactgggaggccaccgagcgggcgctgggcagcgtgggccccgtggacctgctggtgaacaacgccgctgtcgccctgctgcagcccttcctggaggtcaccaaggaggcctttgacagatcctttgaggtgaacctgcgtgcggtcatccaggtgtcgcagattgtggccaggggcttaatagcccggggagtcccaggggccat

SEQ ID NO: 7613 - DNA, 388 bp, Homo sapiens
  misc_feature (1)...(388): n = A,T,C or G
gcgaagacaaattcggatgtatgatctctctagctttgtcatagatatgtgattttcctttgtagctacttttgcaggataataattttatagaaaaggaacagttgcatttagcttctttcccttagtgactcttgaagtacttaacatacacgttaactgcagagtaaattgctctgttcccagtagttataaagtccttggactgttttgaaaagtttcctaggatgtcatgtctgcttgtcaaaagaaataatccctgtaatatttagctgtaaactgaatataaagcttaataaaaacaaccttgcntgagnaaaaaaaaaaaaaaaaaaannnnaaaaaaaaaaaaaaaaaaaaaaaaaaaaaannaagaaaaaaagggggg

SEQ ID NO: 7614 - DNA, 432 bp, Homo sapiens
tgccccctccgtcaccgccgccggccgccggcaggttccctggtcagcgtcccatcccggacgggagttctctccaggcggcacgatgccgaggaaacagtgaccctgagcgaagccaagccgggcgggaggaacttctgcaatgtcccatcaacctctcagctgcctcactgaaaaggaggacagccccagtgaaagcacaggaaatggacccccccacctggcccacccaaacctggacacgtttaccccggaggagctgctgcagcagatgaaagagctcctgaccgagaaccaccagctgaaagaagccatgaagctaaataatcaagccatgaaagggagatttgaggagctttcggcctggacagagaaacagaaggaagaacgccagttttttgagatacagagcatagaagcaaatgagcgtgg

SEQ ID NO: 7615 - DNA, 482 bp, Homo sapiens
  misc_feature (1)...(482): n = A,T,C or G
gagtggggcccnnnnttaatgagataacgtcncgatcaggaaccgcccccggaanncccgggtcgagccacgcgtccggaaggacacttgaatgctagnctatggtcatttgaggaatatgactgattttatatgcacatgtaacgcaaatgtccaatataaattgggttattttttaaaataattttaaaagttgggaaaagtgttattatttggcatgcttaaatattgaataagtattcttcatcagcatttaataaatgtataggcagaggtaaggtaatttctgtgtattttgagataatgtcaaaatcatgaatatttcaaaataaactggggagttataaaaatacaactatagatataaaaaaaaaaaaaaaaaaaaaaggggggacattttaaagaatccttgagggggccaaaattaacccgcctttgctagggattacctttttttttatgggggggcgttttattagcat

SEQ ID NO: 7616 - DNA, 405 bp, Homo sapiens
  misc_feature (1)...(405): n = A,T,C or G
agttgttgatttgtgaggacagatttaaagcaacttccagggtggccttgtccacctgggccatcnagagtatggctgccggcctctttgaagattgtggtctggcataaggagaggtgcatgcgcctggttctgagcaccttggaatttccagccgcacagcatctggtgccctcccctccaccctcacaaggagctgccatcctgtttggattttctgtttgtggaccagaaacaaacgtttttccaaaggattagcaaataggttgatttcctgtgtaacgctgctctgaggcctcttcctcatcctggcagaaggagcctggagcccatgaggcagccagcactgtgcccttgctcagtcgtgctgtcccctccctctccctcagtttcttctccatgccg

SEQ ID NO: 7617 - DNA, 476 bp, Homo sapiens
  misc_feature (1)...(476): n = A,T,C or G
cagggccnatcggataaccctcnttgacagcnctcggaaacccgggncgacccacgcgtccggagccaccgcagattatcatcaaccctgcccgacagaagatggtccagaagctggccctgtacgaggatggggccctggacagcctgcagctgctgtcgtccagctccctcccaggcttgggcctggaacaggacaggcaggggcccgaagaaagtgatgaatttcagagctgatgtgttcacctgggcagatcccccaaatccggaagtcaaagttctcatggtcagaagttctcatggtgcacgagtcctcagcactctgccggcagtgggggtgggggcccatgcccgcgggggagagaaggaagcggccctgctgatctaggctctgtgggcataggcaggcagagtggaaccctgcctccatgccagcatctggtggcaaggaaggctggcatcatccagagaggaggg

SEQ ID NO: 7618 - DNA, 430 bp, Homo sapiens
cccacgcgtccggatcacttgaggtcaggagtttgagaccagcctggccaacatggtgaaacacccgtctctactaaaaatacaaaaattagcggggtgtggtggcacgtgcctgtaatctcagctgctccgggggctgaggcaggagaatggcttgaacctgggaggcggagattgcaagatcgcaccactgcaccccagcctgggcaacaaagtgagactccgtctcaaaaaaaaaaaaaaaaaaaaaaggggcgcccttttaaaagaacccttggggggcccaaatttaccgggggggggaaaagttaaattttttcccttaaggggagccaaataaaacccaccttgggaattttggaaaggaacctttctttgggggggggaaataatgggcccacccccctcccaaaaattaaacgcttaaggg

SEQ ID NO: 7619 - DNA, 473 bp, Homo sapiens
  misc_feature (1)...(473): n = A,T,C or G
cagggccttcggataaccttggtatagcctcgaaanccccggncgacccacgcgtccgctgctgctgaagaaattgaagcagttggaggaaaggtcttgccatgtattgttgatgtgagagatgaacagcagatcagggctgcagtggagaaagccatcaagaaatttggaggaattgatattctggtaaataatgccagtgccattagtttgaccaatacattggacacacctaccaagagattggatctgatgatgaacgtgaacaccagaggcacctaccttgcatctaaagcatgtattccttatttgaaaaagagcaaagttgctcatatccccaatatcagtccaccactgaacctaaatccagtttggttcaaacagcactgtgcttataccattgctaagtatggtatgtctatgtatgtgcttggaatggcagaagaatttaaaggtgaaattgcagtcaatgg

SEQ ID NO: 7620 - DNA, 433 bp, Homo sapiens
ccctttgctggaagctgtgaagtcagcaagactcagaggcgccactgcccagcctgcaggttgcagaagtgcttagatgctggcatgaggaaagacatgatactgtcggcagaagccctggcattgcggcgagcaaagcaggcccagcggcgggcacagcaaacacctgtgcaactgacctccagctcatctgttcatccatcaccagcccttgcccaccctggcccctgtgctgcctctggtcacacacttcgcagacatcaacactttcatggtactgcaagtcatcaagtttactaaggacctgcccgtcttccgttccctgcccattgaagaccagatctcccttctcaagggagcagctgtggaaatctgtcacatcgtactcaataccactttctgtctccaaacacaaaacttgctctgcgggcct

SEQ ID NO: 7621 - DNA, 384 bp, Homo sapiens
ttagggaaaagacccaatatggatggagaggtagaaaatacagtcagttaaaaagatagaaaatataatcaattaaaaagaggtagaaaatatagtcaactaaaaagataaatcatgggggaaagtccataaagaataggaagagatgagatcaaggattcacatggaagaattagccactgaccagagaaaagacacctcttccactcaaacagaaggtaacacagatgcagacctccttagaaggtggacatccttgaaggacttcctacctaatgtcttcttttttctttttgagaaaggaatgatgttacctgatgagggagaaggagggcaggagatacctgggatagaaatcttggggagactggggaaggtctgaaa

SEQ ID NO: 7622 - DNA, 462 bp, Homo sapiens
  misc_feature (1)...(462): n = A,T,C or G
gtgcggtnnnnccaatgataccctggatagatcgcccctgaagnaccgggtcgacaccacgcgtccgggacatttatgatactttaagacaagccactgcctttggtcttctgaaggcaattttatcaagaaagctgttggtcccagaaatcgatgaggtcatgcggaaagtatccaagttggcagtctctgcacaaagcgaacctgccagggtccagtgtagacaggtttttctgaaatatattcttgactatcccctgggtgacaaattgagaccaaacttggaattcatgctcgctcaactgaattacgaacatgagaccgggagagagtccaccttggaaatgatcgcctatctctttgacacgttccctcaggggctgctccatgagaactgcggaatgatctttatccctctttgtctaatgacgatcaatgatgactctgccacgtgcaaaaaga

SEQ ID NO: 7623 - DNA, 458 bp, Homo sapiens
  misc_feature (1)...(458): n = A,T,C or G
cgtgcgtnncnccactagaccctggatgagcgccctgaaancaccggncgacccacgcgtccgcacacattctattcatcgtgggaaccatggtgtcaatacatatcatgtagcttctgaaaaactccactgtacacttatagaatgaagaaggcaaaaaactttttttttttttttttggaaacggattttctttttgccccccaggttgaagggaaggggcccaatctgggttaacggcgggctccccttttggggttaacccctttttccggcctaaccccccaaagaagctggaacaaaaggggcccccccccgggcggggttaaaatttggtttttttaagaaaaaacggggttcccccgggggggccaggagggtctcaatttccaaaccgggggacccccccccctcgccctcccaaagaatgggaataacccgggggagcccccgccccg

SEQ ID NO: 7624 - DNA, 383 bp, Homo sapiens
gagtgtcggaaagagctcacagcgctccttcaccactattacccaattgagatcgacccacaccggaccgtcaaggagaagctacctcatatggtggaatggtggaccaaagcgcacaatctcctatgtcagcagaagattcagaagtttcagatagcccaggtggttagagagtccaatgcaatgctcagggagggatataagaccttcttcaacacactctaccataacaacattccccttttcatcttttctgcgggcattggtgatatcctggaagaaattatccgacagatgaaagtgttccaccccaacatccacatcgtgtctaactacatggattttaatgaagatggttttctccagggatttaagggccagct

SEQ ID NO: 7625 - DNA, 394 bp, Homo sapiens
  misc_feature (1)...(394): n = A,T,C or G
atgaaacatacgttcccaaagagtttaatgctgaaacattcaccttccatgcagatatatgcacactttctgagaaggagagacaaatcaagaaacaaactgcacttgttgagctcgtgaaacacaagcccaaggcaacaaaagagcaactgaaagctgttatggatgatttcgcagcttttgtagagaagtgctgcaaggctgacgataaggagacctgctttgccgaggagggtaaaaaacttgttgctgcaagtcaagctgccttaggcttataacatcacatttaaaagcatctcagcctaccatgagaataagagaaagaaaatgaagatcaaaagcttattcatctgtttttctttttcgttggnggaaagccaacaccctgtctaan

SEQ ID NO: 7626 - DNA, 392 bp, Homo sapiens
  misc_feature (1)...(392): n = A,T,C or G
cctgggccacctacagcccctctttcaggacttttgcactaagatccagagggaagttgttagtcgtgagccattgaattgaaaagtcacagggtccaggctgagggtgccagctggggctcatttatgtgtcaaatgaggagggagtgaagtctcacagaatgtgaaacagaagggaatggctccagggagtagagtgaggcagagaaggcagaccgcgtggcccatgctggaaaggagcacccggcccctgctcttcagttccctggcccggttccattgctgggcttcaccttctgctcttgggtgccatattctatcactgtaaagcccctgttgccttccgtagcttgaactggtttctggtccttgtcatggacagatcaaaacan

SEQ ID NO: 7627 - DNA, 382 bp, Homo sapiens
  misc_feature (1)...(382): n = A,T,C or G
acttaaaagctaccttcagtgtcttcaaaaaggaacagcggcgcctgggcagtccaaagaacccgtggctgaggagcgagcaacaggtatgccagtggcttctctgggccaccaatgagttcagtctggtgaacgtgaatctgcagaggttcggcatgaatggccagatgctgtgtaaccttggcaaggaacgctttctggagctggcacctgactttgtgggtgacattctctgggaacatctggagcaaatgatcaaagaaaacccagaaaagacagaagatcaatatgaagaaaattcacacctcacctccgttcctcattggattaacagcaatacattaggttttggcacagagcaggcgccctatggaatgcaaan

SEQ ID NO: 7628 - DNA, 461 bp, Homo sapiens
  misc_feature (1)...(461): n = A,T,C or G
gggcggtnncncccaactggtantcttgcgatgatagctntcgaaancccgggncgacccacgcgtccgcccacgcgtgcgacagaaaataatgatggtagaacagacttgggatgaatccaagtttattataatttttaggagacatttatgatatacctctataggtatcagaatcttttctactattaaggtgaaaagatttgagattttgtgaaatcttttgtgtattctttttatttgagttggcttttaggtggcttatttttcaactctgaaatgaacataacatgttacatatgttacatatgttacaatttttttctaaagtgttgttgtttaatttctacaaagatagtccatataaagtttctaaagattgtaaatttaaaaggaaatgccaaatgaattatttgtaaaattgtttaaaaaaattaataaataatgagtgtgtatttaan

SEQ ID NO: 7629 - DNA, 381 bp, Homo sapiens
  misc_feature (1)...(381): n = A,T,C or G
nctgtcccactctgtcaagtggaatccttgccttttcaactctacctccctcactcgagctcctttcccctgatcagagaaagggatcaagggggttgggaggtgggaaagagaccagccttggtccctaagcctccagaaacgtcttcttaatccccaccttttcttactcccaaaaaagaatgaacacccctgactctggaatggtgtatactgccacatcagtgtttgagtcagtccccagaagagaggggaaccctcctccatcttttttgcaacatctcatttcttccttttgctgttgcttcccccctcacacacttgggtttgttctatcctacatttgagatttctattttgtgttgaacttgctgctttttn

SEQ ID NO: 7630 - DNA, 420 bp, Homo sapiens
  misc_feature (1)...(420): n = A,T,C or G
ttgatcccttttttgatacctaccttgtcccaattagtatcagttatgataagatcttggaagaaactctttatgtgtatgagcttctaggggttcctaaaccaaaagaatctacaactgggttgctgaaagccagaaagattctctctgaaaattttggaagcatccatgtgtactttggagatcctgtgtcacttcgatctttggcagctgggaggatgagtcggagctcatataacttggttccaagatacattcctcagaaacagtctgaggacatgcatgcctttgtcactgaagttgcctacaaaatggagcttctgcaaattgaaaacatggttttgagcccctggaccctaatagttgctgttctgcttcagaaccggccatccatggactttgatgctctggtggaaaaan

SEQ ID NO: 7631 - DNA, 381 bp, Homo sapiens
aaaaggtcatgagcaaacacctctggctgaaagtagccggaaaggcctggctacttatgggctaagggttttgaatctgggctgcagattgtgcagagagttaatttacaaccttagaacagtggacaatgcttgatagtgtcagactgtgggcactggaaaccggctggtctcaggatagggatcctatacctccaacacttggattgctgacctttcacttctcaacttggtcaacggaagtcaaaaaccccagcaaggccacctgctgaattctagaacttccaggacttcccgacctagagcacatggccaaacactttctgcagccaggatgtcactgccctcccctgattaagataaatagacttggcctaataa

SEQ ID NO: 7632 - DNA, 447 bp, Homo sapiens
  misc_feature (1)...(447): n = A,T,C or G
aacctgaaaaccacttgcaaanacgtggnccggaaccccgggtcgacccacgcgtccgcccacgcgtccgcggacgcgtgggcgctggagcggcgcctgagcgcgtgcgggtccgcctgtcagggaaccgaggggtccaccgacctcccgttagcccctgagagccgggtggaccctgaggtccttcacagcctgcagacacaactcaaggctcagaacagcaggatccagcaactcttccacaaggtggcccagcagcagcggcacctggagaagcagcacctgcgaattcagcatctgcaaagccagtttggcctcctggaccacaagcacctagaccatgaggtggccaagcctgcccgaagaaagaggctgcccgagatggcccagccagttgacccggctcacaatgtcagccgcctgcaccggctgcccagggattgccag

SEQ ID NO: 7633 - DNA, 382 bp, Homo sapiens
cccacgcgtccgattacttgaacccaggaggcagaggttgcagtgagccaagattgcactgctgcactccagcctaggtgacagagtaagtcacacacacatacacacacacaaaagaagtaatgagattgaattagtaataaaaagttccccaaaaaagaaaagttcgggactgaatggctttcctattgaattctattgctcctttaaataagaattaataccaatttttctcaagttattccagcaatgttgaagcagtgggaattcttcctaatttattctaggaggtcagcataaccctgataccaaaactaggcaagaacagaacagcaacaaaacaatctacaggccaatatccctgatgaacataggtggaaaa

SEQ ID NO: 7634 - DNA, 390 bp, Homo sapiens
  misc_feature (1)...(390): n = A,T,C or G
cccacgcgtccgcccacgcgtccgggctgtatgcccacgtatatggaaatgggcagagtgaaaagcctgatgaaaatgaaaaggcattccagtgcctctcaaaggcatacaagtgtgacacccagtccaattgttgggagaaagatattacatcatttaaggaagttgttcaaagagccttaggacttgcacatgtggccataaaatgcagtaaaaacaaatccagttcccaagaagctgtacaaatgctttcttctgttcgactcaatttacggggcttgttatctaaagcaaagcaactttttacagatgtggcaactggagaaatgtccagggaattagctgatgacataacagctatggacaccttagtgacagagctccaagacn

SEQ ID NO: 7635 - DNA, 393 bp, Homo sapiens
cggacgcgtggggctggagcaaaggctcatacagagatataaaaaactgagagatgtctttaagaaaggagacctctatttcaacagtggagatctcttaatggttgaccatgaaaatttcatctatttccacgacagagttggagatacattccggtggaaaggggaaaatgtggccaccactgaagttgctgatacagttggactggttgattttgtccaagaagtaaatgtttatggagtgcatgtgccagatcatgagggtcgcattggcatggcctccatcaaaatgaaagaaaaccatgaatttgatggaaagaaactctttcagcacattgctgattacctacctagttatgcaaggccccggtttctaagaatacaggacaccat

SEQ ID NO: 7636 - DNA, 381 bp, Homo sapiens
cggacgcgtgggcggacgcgtgggataatgagcaaccctctttggccaccagctccaatcagactagcatgcaggatgaacaaccaagtgattcattccaaggacaggcagcccagtctggtgtttggaatgacgacagtatgttagggcctagtcaaaattttgaagctgagtcaattcaagataatgcgcatatggcagagggcacaggtttctatccctcagaacccatgctctgtagtgaatcggtggaagggcaagtgccacattcattagagaccttgtatcaatcagctgactgttctgatgccaatgatgccttgatagtgttgatacatcttctcatgttggagtcaggttacatacctcagggcaccgaag

SEQ ID NO: 7637 - DNA, 387 bp, Homo sapiens
gctgcactagaatcctgcagagagacttccctggctgtggccaggacagtgaaaggcaatgggtagggctgagcttttatagcctttagctacatctggaaggtttttattgctgtgatctgaagggagaggctaagaagtacccaggtagctgtgatgtgctggcagtagtggctgatggcgggggtggggtgctggggattggagtgagggtatgctggtcatctgactgcccagttagaaaatgcatctggcgattgtgagcacctcatttgaatctctacagtggttcagacctccacccaggtttctaaagtctgattttcaggttagcctctgacccagaagctaccatttcatacccacctctggcatctccaatttcat

SEQ ID NO: 7638 - DNA, 381 bp, Homo sapiens
cggacgcgtgggcgactgtgacatgcctcttccttatcaactcagcaggggtcatagatcgaatagatgctgaaaagcgtaagatatatgcattccttgacatcatttttaaagacattccttcaaatagtttccacacagaaattcctcactcccattatgagagattgtggttatatgtcttaaatttattataagctgcttcaaagaaagggtctgaatgtttgaattatgagtgaaatcatgtgaaattttgagttaaactctgtgatttgattttcagggtctttaaaatatatcttaatatcttcttcctctttattcaataatttctgtcttgcacttacacactcataacagccaaatatgaggcacaaaaat

SEQ ID NO: 7639 - DNA, 420 bp, Homo sapiens
ttgatctccttcttttgatgaaagcattaacctttcagctgttggatacttcagaggttatgagtcagacatgaactgggagaaaggcgaaggccagcccttcgaatactttgtttatggagctgcctgttccgaggttgaaatagactgcctgacgggggatcataagaacatcagaacagacattgtcatggatgttggctgcagtataaatccagccattgacataggccagattgaaggtgcatttattcaaggcatgggactttatacaatagaggaactgaattattctccccagggcattctgcacactcgtggtccagaccaatataaaatccctgccatctgtgacatgcccacggagatgcacattgctttgttgcctccttctcaaaactcaaatactctttattcatc

SEQ ID NO: 7640 - DNA, 450 bp, Homo sapiens
  misc_feature (1)...(450): n = A,T,C or G
aatgaaagcctcggaccgcccgaatcccttgagactatgcgaccggcccaaccagatgaggagctcaagcccaagaagaaagtcttcgagaagttgcaggctgacttcaaaatttctgaggagtgcatcgcacagtggaagcaaaccaacttcatgaccaagctgggctccatttcctgtaaatcgctgaaaggggggaacattagctagccagcccagcatcttccccccttcttccaccactgagtcatctgctgtctcttcagtctgctccatccatcacccatttacccatctctcaggacacggaagcagcgggtttggactctttattcggtgcagaactcggcaaggggcagcttaccctccccagaacccaggatcatcctgtctggctgcagtgagagaccaacccctaacaagggctgggccacagcagggagtccagcn

SEQ ID NO: 7641 - DNA, 390 bp, Homo sapiens
cccacgcgtccggtggtcattggaaaggtgttcatgcaggagttcaaagaaggacgcagagccagccacacagccccacaggtcctctttagccacagggaacctcctctggagctgaaagacacagacgccgctgtgggtgacaacattggctacattacctttgtgctgttccctcgtcacaccaatgccagtgctcgagacaacaccatcaacctgatccacacgttccgggactacctgcactaccacatcaagtgctctaaggcctatattcacacacgtatgcgggcgaaaacgtctgacttcctcaaggtgctgaaccgcgcacgcccagatgccgagaaaaaagaaatgaaaacaatcacggggaagacgttttcatcccgg

SEQ ID NO: 7642 - DNA, 519 bp, Homo sapiens
  misc_feature (1)...(519): n = A,T,C or G
atatcgatagctgaatatcttaatcataatgacggatacagcttcagaaanaannntttgatgcctcggaanngcnnnnannnnattgatagcattcgggaaccgcnnccggaanaccggggcgacccacgcgnccggngaactatcccaacagnggaagggggncngcatactgtccaggcctcgagtatggagtggccaacaaaactgccaccttcaccatcgtcacagaggatgcaggagaaggtggtctggacttggctattgagggcccctcaaaagcagaaatcagctgcattgacaataaagatgggacatgcacagtgacctacctgccgactctgccaggcgactacagcattctggtcaagtacaatgacaagcacatccctggcagccccttcacagccaagatcacagatgacagcaggcggtgctcccaggtgaagttgggctcagccgctgacttcctgctcgacatcagtgagactgacctcagcagcctgacggccagcattg

SEQ ID NO: 7643 - DNA, 391 bp, Homo sapiens
  misc_feature (1)...(391): n = A,T,C or G
cccacgcgtncggcgagccatccttcagtctctgctactctttttctgtccagaaagccccagatacctttacatcaagttagatgaggaagtcaaagcaaaacaaagcttgaaaagactcagaggatatgatgatgtcaccaaagatattaatgaaatgagaaaagaaagagaagaagcatcgagtgagcagaaagtctctataattcagctcttcaccaattccagctaccgacagcctattctagtggcactgatgctgcatgtggctcagcaattttccggaatcaatggcattttttactactcaaccagcatttttcagacggctggtatcagcaaacctgtttatgcaaccattggagttggcgcttgaaacatggttttcact

SEQ ID NO: 7644 - DNA, 450 bp, Homo sapiens
  misc_feature (1)...(450): n = A,T,C or G
agagaaaatttgtccctgataggcctgccgnaccgcnccggaattcccgggtcctgctcaagacactgggtctttccacagcctgaagatgaccatgtacaagacgggtctcctgctgctcagtgacccagacaaagtgaccatcggcctgttgttctgggatggccgtggggaggggctccggctccttctgcgtgacactgaccgcttctccagccacgttggagggacccttggtactgagcccattaccggggcccaggccttcctcagaaaccagctgtgcttgggaacaggcagcgcccctcccctgcgtgtgtctcccaggcttcctctgtctctgacccttactgatccaccctttgtatctcaggccagttttaccaggaggtgctctggggatctccagcagcatcaaatgacggcagacgcacgctgagggttcagggg

SEQ ID NO: 7645 - DNA, 395 bp, Homo sapiens
ccgcggacgcgtgggttggttccgcgttccctgcacaaaattcccggctaagccacagaaaccgtccctgctacagagcaggagttgccgcagccccaggctgagacagggtctggaacagaatctgacagtgatgaatcagtaccagagcttgaagaacaggattccacccaggcaaccacacaacaagcccagctggcggcagcagctgaaatcgatgaagaaccagtcagtaaagcaaaacagagtcggagtgaaaagaaggcacggaaggctatgtccaaactgggtcttcggcaggttacaggagttactagagtcactatccggaaatctaagaatatcctctttgtcatcacaaaaccagatgtctacaagagccctgcttcagatac

SEQ ID NO: 7646 - DNA, 384 bp, Homo sapiens
  misc_feature (1)...(384): n = A,T,C or G
cccacgcgtncgtgctcccatagaccctttttcggtttatagactctctggagnccacagagaggggtgagctctacctgccaaagggttccatctcgagggactataacctgaacgacatacttctccacctgggagactgctaggtgggccataaggccgtgcttgctgtatttgaggagggcacagaagcatctgctgccacagcagacaaaatcaccctcctttctgcattattggagacaaggaccattgtgcgtttcaacaggcccttcctgatgatcattgtgcctacagacacccaaaacatctttttcatgaacatagtcaccaatcctctgctagcctagagcttgccatcaagcagtggcgcgctcataaagg

SEQ ID NO: 7647 - DNA, 395 bp, Homo sapiens
attggatcatcctgtttagccctcttttaagacaatttgttcttattctaacgatgtgtaaataggatatgaatggtgtttggggggacttattttattttattttattttattttattttattttatttattttattgagacagagtttcactccagcctggtcgacagggcaagaccccatctcaaaaatataaataaaaaataaaactgtggtgatggctgcatgcttgtgactgtacagaaagccactcattcaatgggtgagtcatattgtctatgaatcatgtctcagtaaatctgttgagaaaagtaaggcttcatcaagaaaattaaactttcagtgtgcgctttgtgtgctgctggacacctgctggggggaagaggtctgaatct

SEQ ID NO: 7648 - DNA, 442 bp, Homo sapiens
  misc_feature (1)...(442): n = A,T,C or G
caccgaaacctcnggtagatctgcgccgnaaccccgggncgacccacgcgtacggcatgctgacgccaaggtggagcacacccgaggaactggagctggacgagcttctagaagccatcgagcaaggcggagaggagcagcggcggcggcggcggcaggcagaacgtctgaagccatatgtggctgctcaactggatgtgctcccggagacctttaccttgggggacaagaagaactaccggggcttctacaaccggcccctgtctccggacttgagctaccagtgctttgtgcttgcctccttgaaggaacccatggaccagaagcgctatgcctccagcccctactcggatgagatcgtggtccaggtgacaccagcccagcagcaggaggagccggagatgctgtgggtgacgggtcccgtgctggcagtcatcctcat

SEQ ID NO: 7649 - DNA, 381 bp, Homo sapiens
cccacgcgtccgagaaatcttaaattcaaatacatttagttaaaatgagttgacgaagactccagtgatgttttaataccctaagattttgtgattccttgggcctggaatggatcttagaaaattaccttgccctcatgagcctgtaaaccgtgttgtttcccctcagtcttgctctgtccagtacagtagcccctcgccacacatggctgcggagcacccggaatggcttacagcacatgtgggaatggtgctgaatgctgaggaagcattcactcatacgtgctgcacttcttaaaggcctcccaatagcctgctttgcggagttctggcttttacttgctgtctactatgatcacctgatttgtgcttcacatacat

SEQ ID NO: 7650 - DNA, 387 bp, Homo sapiens
acaagaccaaactttgttgataatcctcagtaattgttgtaaggggtatatacatgtaggccagcatacatgcataaactacttcttattgctaggctaattgatccatatgtagcaaatacagcagttcagcaatatcttgtgcttacagggtcctaagcagaggtgacgagtcaagtgtaaatatatatatatatttttttatttttcatggcaattgtatattagtaacctggggagaaaaggtttattgacaaccactctgatccatctgctgctatttttactgctaatttggtgcacattaaaaagaatgatcatgaaaagatattactttgagttaaaaggatatatatatatatatatatatatatatatatacacacc

SEQ ID NO: 7651 - DNA, 384 bp, Homo sapiens
  misc_feature (1)...(384): n = A,T,C or G
ggaaaggataccgaggcaagagggcgaccactgtttctgggacgccatgccaggactgggctgcccaggagccccatagacacagcattttcactccagagacaaatccacgggcgggtctggaaaaaaattactgccgtaaccctgatggtgatgtaggtggtccctggtgctacacgacaaatccaagaaaactttacgactactgtgatgtccctcagtgtgcggccccttcatttgattgtgggaagcctcaagtggagccgaagaaatgtcctggaagggttgtaggggggtgtgtggcccacccacattcctggccctggcaagtcagtcttataacaaggtttggaatgcacttctgtggaggcaccttgatatccn

SEQ ID NO: 7652 - DNA, 403 bp, Homo sapiens
  misc_feature (1)...(403): n = A,T,C or G
acgtgcctcctggtctcagtatggcgctgtcctgggttcttacagtcctgagcctcctacctctgctggaagcccagatcccattgtgtgccaacctagtaccggtgcccatcaccaacgccaccctggaccggatcactggcaagtggttttatatcgcatcggcctttcgaaacgaggagtacaataagtcggttcaggagatccaagcaaccttcttttacttcacccccaacaagacagaggacacgatctttctcagagagtaccagacccgacaggaccagtgcatctataacaccacctacctgaatgtccagcgggaaaatgggaccatctccagatacgtgggaggccaagagcatttcgctcacttgctgatcctcagggacaccaagacctn

SEQ ID NO: 7653 - DNA, 381 bp, Homo sapiens
acaggacgtcgggctcctggagtaccagcatcactcccgcgactatgcctcccacctgtcgcccggctccatcatccagccccagcggcggaggccctccctgctgtctgagttccagcccgggaatgaacggtcccaggagctccacctgcggccagagtcccactcatacctgcccgagctggggaagtcagagatggagctcattgaaagcaagcgccctcggctagagctgctgcctgaccccctgctgcgaccgtcacccctgctggacacgggccaacctgcgggatctgaagacctcaccaaggaccgtagcctgacgggcaagctggaaccggtgtctccccccagccccccgcacactgaccctgagctgga

SEQ ID NO: 7654 - DNA, 382 bp, Homo sapiens
tggctgtagcccccacagaggcaatcatgccctatagattcaagagaagctaagcggaaatggagggcggaaggtgtgatctgtgggactgtctgggcctgttactcatcctgctatcaatttcttattaattaatcttgatgattcttattaattaatcacatttgcaggaaattcagatgaggcaagaaaattttattggcctgggtaagactgaaagcattccaaattaggcttagactgtgcaaagggcttagctaagttatcgagcttaaaacccgtcaattaaacaaacattatttgaacagttactgcatgccacgcactgtgttgggcttagtaataaaaaaaagaaaagataagtgcttgttctagcataaat

SEQ ID NO: 7655 - DNA, 484 bp, Homo sapiens
  misc_feature (1)...(484): n = A,T,C or G
natgatacccttgcggnaccgtttgagatcttccgggncgacccacgcgtccgtagaagaaattatgaaatatgaagcatcgattttaacacatgactcaagtattttatatttgcaggaaatatataattcaaataatcaaaagattgttaacctgaaagagaaggtagcccagcttgaagcacagtgccaggaaccttgcaaagacacggtgcaaatccatgatatcactgggaaagattgtcaagacattgccaataagggagctaaacagagcgggctttactttattaaacctctgaaagctaaccagcaattcttagtctactgtgaaatcgatgggtctggaaatggatggactgtgtttcagaagagacttgatggcagtgtagatttcaagaaaaactggattcaatataaagaaggatttggacatctgtctcctactggcacaacagaattttggctgggaaatgagaagatn

SEQ ID NO: 7656 - DNA, 401 bp, Homo sapiens
  misc_feature (1)...(401): n = A,T,C or G
tctcggtgcagcccagccgggcccccttccccaggccggagcgcccctcttccttccagctttcacttctgccggctccgcaactgagtgacacccagcgacaaccgactggggagtggtagaagcaactgaacggatgcgtgcgagctgaggacagggcgggaggagggggcacacatgccccaggggagcgaggagaactcttgaaatctccattttcaatcccttcgaaatcacgtatggtttccacaaagccgagtcgtgtcacgtggcaggtttacgtcaatagtccctctctctgctcctccattcgcaagtgtcttcctgggccagactcccctccacctcatgtacttgctatattgaggatgaagttttctatggtgggacactaaatatan

SEQ ID NO: 7657 - DNA, 418 bp, Homo sapiens
cccacgcgtccgcataaacaagacaagaatagccagcagccctgttctaggtgctcagatggagttataaaactaacacccatctcggctttctcgcaagataacatctatgaagttcagcccccaagagtagacagaaaatctacagagatcttccaagcccacatccaggccagccaaggtatcatgcagcccctaggaaaagaggactcctccatgtaccgagagtacatcaggaaccgctacctgtgaaaagagcgcaggtccacctggtggacacgtctgattagcttagaacctgtcttgtctcatcttcaaaaggtaacttattaaaagtcctttgcgtctgaagcctttctccttttctgtcacttgcaaattccaaattatagctaataaagatgactagataaaaaaa

SEQ ID NO: 7658 - DNA, 406 bp, Homo sapiens
tcgagaggtctagacttacacgagcatgcgatgtctgagctttctccatatcccgagcctgatcatagagctagctggacatgttcgaaaaggatcctaacttctacgcagacattgatgagctcatgcactgtacaaatatagcacgcactgaggctgacatcaacatgaaagagacctacagccgtacacaagctgcatatactatctgcttgacacatcggtgccatgaccagctcacggggctggactcggagaaggtcagtaagatcagtttggtggaccttgctgggagtgagcgagccgactcctcaggggcccggggcatgcgcctgaaggaaggagccaacatcaataagtccctgactacactagggaaagtgatctcggcccttgcagatatgca

SEQ ID NO: 7659 - DNA, 406 bp, Homo sapiens
cggacgcgtgggtagacattggcattgatttactgaccatttattccacttggatctcccacctctaggtcaaggagagcccctggatgactatgtgaatacccaggggccttcactgttcagtgtcactaagaagcagctgggggcaggaagcagagaagaatgtgcagcaaaatgtgaagaggacaaagaattcacctgcagggcattccaatatcacagtaaagagcaacaatgtgtgataatggctgaaaacaggaagtcctccataatcattaggatgagagatgcagttttatttgaaaagtaaatgtatctttcagagtgcaagactgggaatggaaagaactacagagggacgatgtccaaaacaaaaaatggcatcacctgtcaaaaatggagttcc

SEQ ID NO: 7660 - DNA, 402 bp, Homo sapiens
tatgcagaggtccacaacacacagatttgagctcagccctggtgggcagagagatccccaagcctggcaagggaatttcttcaactccctgccccccagccctccttatcaaaggacaccattttggcaagctctatcaccaaggagccaaacatcctacaagacacagtgaccatactaattataccccctgcaaagcccagcttgaaaccttcacttaggaacgtaatcgtgtcccctatcctacttccccttcctaattccacagctgctcaataaagtacaagagcttaaaaaaaaaaaaaaaaaaaaaggggcggccgttttaaaggatccttgggggggcccaagtttacccgggcatgcaaggtaaaatttttttccttatagggagccgaatag

SEQ ID NO: 7661 - DNA, 409 bp, Homo sapiens
tatgcagaggtccacaacacacagatttgagctcagccctggtgggcagagagatccccaagcctggcgagggaatttcttcaactccctgccccccagccctccttatcaaaggacaccattttggcaagctctatcaccaaggagccaaacatcctacaagacacagtgaccatactaattataccccctgcagagcccagcttgaaaccttcacttaggaacgtagtcgcgtcccctatcctacttccccttcctaattccacagctgctcaataaagtacaagagcttaaaaaaaaaaaaaaaaaaaaagggggggccccttaaaagaatccttaagggggccgagactaaccccggcatcgcaagccatagttttttccttatagggggggcaataaaagatac

SEQ ID NO: 7662 - DNA, 407 bp, Homo sapiens
  misc_feature (1)...(407): n = A,T,C or G
cgctgacccggctaaaacgctcttgctgcaccatacctataatgctacagagaatgacattgtccgtactctagcgctctatgtgcggaaaaccctgcttgtacagattgagaaggttgatctacaccctaactacgctcaggaagatattgggctcatcaaactcgcacagagtgtgacggttaatgaaagagggatgcgcatgtggctacctataaaggattatgcagaagtagggcgtgtgggttatgtttctggctgggggcgaaatgccaattttaaatttactgaccatctgaagtatgtcatgctgcctgtggctgaccaagaccaatgcataaggcattatgaaggcagcacagtccccgaaaagaagacaccgaagagccctgtatgggtgcagcccn

SEQ ID NO: 7663 - DNA, 391 bp, Homo sapiens
agataaaggttttgatcattttcatgaaataatgcatggaagtcatttctgctgtttctttactactccattcttggaggattagaacaagtcacactgtaattgactaaaacgaactttttattttaaaatattgatggtggggttttgcttttttttttttttttttagaaacttggttttcttttttcccccaggtaaaagggcagggcaaaattttgggttaactgaacctttggcttccgggttaaaaccatttttttccctcaccctcaggaaaactgggatttacagcccctccccccaccccggttaattttttttggttttttaaaaaaaaacgggggttcaacagggtggcccgggttgggtttaaacccccgaccctgag

SEQ ID NO: 7664 - DNA, 433 bp, Homo sapiens
agcttgtcctgctcaagctggagagatctgtgaccctgaaccagcgtgtggccctgatctgcctgccccctgaatggtatgtggtgcctccagggaccaagtgtgagattgcaggctggggtgagaccaaaggtacgggtaatgacacagtcctaaatgtggccttgctgaatgtcatctccaaccaggagtgtaacatcaagcaccgaggacgtgtgcgggagagtgagatgtgcactgagggactgttggcccctgtgggggcctgtgagggtgactacgggggcccacttgcctgctttacccacaactgctgggtcctggaaggaattataatccccaaccgagtatgcgcaaggtcccgctggccagctgtcttcacgcgtgtctctgtgtttgtggactggattcacaaggtcatgagactgggtta

SEQ ID NO: 7665 - DNA, 439 bp, Homo sapiens
  misc_feature (1)...(439): n = A,T,C or G
taaaaaaaattgatcccctngnnnnctganacntgggncnacnnggannngaggnnaacnncgcnnnnnnnaaagggcaaatactcactgatttgagaatgttctgtattaatcatgcctttccattatctgaattcctaatgctttgacatctagggccttgccgaccctggagggaccacccgtgcgagggctagcccattcctagcttaggagcatgcctttcatatacaaaccgacctggagcccatagcccagccacctcctctgtggcctttcatactctgggctactctccccctgccctaggtaccctagggccaggtaccagacaactagagacagtctctaaccccgcagcctactgaaattattcaaactagccaatccaaaacctgtgtaccctgtgttgcctgttttttcctgcataaaccacaat

SEQ ID NO: 7666 - DNA, 439 bp, Homo sapiens
  misc_feature (1)...(439): n = A,T,C or G
ntagatcccttnanaanncctagttaaccttnggnanannnnnnaanaaaaaananaaccaannnnnnnnnacaaaaacgtttcagagataattgctacaattatggaaaccctaaaaatgaaatgacaatgattttgtatcagtggtccaaacagaactaagcataaatcattgtgccatcccaaacctcgttccagccgccttgcccatactagattctaaatgtttctaaaggcaaaccccaatgtgtcaagacagacttgtttaggtgtaattttaggaattatgctggttcatcaggaagcagagggggagttttaaaagtcaagcttaaattgaagtttaaattcatctataaccaaatcaaatgatcagaggaaattctgtaatcaatgctggaaatcgttacattgtttagaacattcttgctcatgcctg

SEQ ID NO: 7667 - DNA, 489 bp, Homo sapiens
  misc_feature (1)...(489): n = A,T,C or G
agattgtcnncggcccccctaatacgccgtctaatgtggtcgtatgcccgggccgacccacgcgtgcggagatatactgagtccattgatgttgtcacttgtcatttaaacttatgagaccttgtcttagagaatctaaaagatattgtcatatgttttctgtgctgagtttgggttgttacactgtgaagcttttggtgaaacaaaataagacttatgaagtaaaaagaccaatcatatcgttgacaagctggctctgaaaataattcttgcagaagagttcctgaaaggcttcaccaaggggaagtattgtgaggagtgtttgtaaaaccaaggtacccaatatcagttttatgtttaaatcaataattgtttctttaaaaaaaatacaaaccgtttggcctgggggctccgctttataaaaaattctttggggggccaaattattcccttgttttcaaaaaaaaagcttttccttaatgtggaatg

SEQ ID NO: 7668 - DNA, 396 bp, Homo sapiens
ctttagaacgacagcgctaacattggtgaagaactgttcatgctgaaagggcacacatacagggaagaagaatgactgagggatacgtcggaacgcatatgaatctggcttaaataatgaactatgcttgagctcccttatcaaatgaaatattacagcacctggaagataatttagttttgcttgcttgcattgatcagtcttttacttgaggcattaaatatctaattaaatcgtgaaatggcagtatagtccatgatatctaaggagtgggcaagcttaacaaaacccattttttataaatgtccatcctcctgcatttgttgataccactaacaaaatgctttgtaacagacttgcggttaattatgcaaatgatagtttgtgataattggg

SEQ ID NO: 7669 - DNA, 388 bp, Homo sapiens
aaaacgccagtaagtgacagagtcaccaaatgctgcacagaatccttggtgaacaggcgaccatgcttttcagctctggaagtcgatgaaacatacgttcccaaagagtttaatgctgaaacattcaccttccatgcagatatatgcacactttctgagaaggagagacaaatcaagaaacaaactgcacttgttgagctcgtgaaacacaagcccaaggcaacaaaagagcaactgaaagctgttatggatgatttcgcagcttttgtagagaagtgctgcaaggctgacgataaggagacctgctttgccgaggagggtaaaaaacttgttgctgcaagtcaagctgccttaggcttataacatcacatttaaaagcatctcagcc

SEQ ID NO: 7670 - DNA, 395 bp, Homo sapiens
  misc_feature (1)...(395): n = A,T,C or G
cagtgtgactcatccacaatgatttctccagcgcttatcttgttctcgagttttctctgccatgttggtattgcaggacggacctgtcccaagccagatgatttaccattttccacagagggcccgttaaaaacattctatgagccaggagaagagattacgtattcctgctcgccggactatgtgtccccaggagggatgagaaagtttatatgccctctcacaggactgtggcccatcaacactatgagatgtacacccatagtatgtccttttgctggaatcttagaaaatggagccgtacgctatacgacttttgaatatcccaacacgatcagtttttcttggaacactgggttttatatgaatggcgctgattctgccaagtgcactgn

SEQ ID NO: 7671 - DNA, 387 bp, Homo sapiens
caggaagtgactgcgggagtggagccggcgagagagtggcagcgggggctgatggaagtgcagtgggggctggagagggcaccctactgtatccagcatgctccaaggccacagctctgtgttccaggccttgctggggaccttcttcacctgggggatgacagcagctggggcagctctcgtgttcgtattctctagtggacagaggcggatcttagatggaagtcttggctttgctgcaggggtcatgttggcagcttcctattggtctcttctggccccagcagttgagatggccacgtcctctgggggcttcggtgcctttgccttcttccctgtggctgttggcttcacccttggagcggcttttgtctacttggctgacct

SEQ ID NO: 7672 - DNA, 389 bp, Homo sapiens
  misc_feature (1)...(389): n = A,T,C or G
tagtgtttgatgggtacagagcttcagttggtgaggatggaaagttttggagatgggtaatggtgatggttgcacaataatgtgaatgtacttaatgccaccgaactgtatacttacaaatgattaagacgatcgcttttatgctgtatatattttaccacaattttaaaagagcaaatactaagtgaaaatcaacgtggaacgggtgatggtgtccaatcttactccaaaatttgagaaacactagagtgcacaatttaacacacatcccattagtatttgtggttgtttaagaatgaaataaaaatactatttttcttttaatttatttgtattattttttcaaacgactaataagctgttagtacatacatgttattgagttgttn

SEQ ID NO: 7673 - DNA, 393 bp, Homo sapiens
atcaactggcagtataattgaagttctgagtaaaatatattcagaaggaggagtttcagcgaatcatactagtcgtgcaacgtctacagcaacatcaagatttgctggagctattggccagaaactccctccattttcttatgcttatacggaactggaagctattatgtatgcccttggagtgggagcgtcaatcaaggatccaaaagatttgaaatttatttatgaaggaagttctgatttctcctgtttgcccaccttcggagttatcataggtcagaaatctatgatgggtggaggattagcagaaattcctggactttcaatcaactttgcaaaggttcttcatggagagcagtacttagagttatataaaccacttcccagagcagg

SEQ ID NO: 7674 - DNA, 399 bp, Homo sapiens
cgacccacgcgtccgcgggaggagcggcccctcttcccccagatcctggccacaattgagctgctgcaacggtcactccccaagattgagcggagtgcctcggaaccctccttgcaccgcacccaggccgatgagttgcctgcctgcctactcagcgcagcccgccttgtgccttaggccccgcccaagccaccagggagccaatctcagccctccacgccaaggagccttgcccaccagccaatcaatgttcgtctctgccctgatgctgcctcaggatcccccattccccaccctgggagatgagggggtccccatgtgcttttccagttcttctggaattgggggacccccgccaaagactgagccccctgtctcctccatcatttggtttcctct

SEQ ID NO: 7675 - DNA, 390 bp, Homo sapiens
  misc_feature (1)...(390): n = A,T,C or G
tgcagtggcgtgatcttggctgactgcagcctccgcctcctgggttcaagcaattctcgtgcttcagcctcctgaataactgggattacaggcatgcaccaccatgcctagctaacttttttgtatttttattagatacaggatttcaccatgttggccaggctggtcttgatatcctgacctcaagtgatcctcccgcctcagcctcccaaagtgctgagattacaggcgtgagccactgcacccagctggtcactgaatgtctaatgatagctatgtgttgagtccttattgtaatgtgtgctaagcattatacttagtgctttctatgcatcatctttttaaatcagtaacagtccagtaagataagacattcttaagttttatagn

SEQ ID NO: 7676 - DNA, 398 bp, Homo sapiens
cccacgcgtgcgcccacgcgaccggataaaatgggctgcatttagtagatgctggctggcctttcagtgcctcccaggaagacacatggactttccctcttcaaatgcctgaagggagcgctttgatgcatgtgatgtgctgggagtgagggcggactccctctggccccggggccctctgtggaccttggctccctccgaggacctgggcttggtggggagcactgcattcttcctgggcattccctccagcgccagcaccactgcatcatatagacctgagtgctattgtcttttggcttggtgtgtatgctcttcattgtgtaaaaatgatggccttttgacaatttaagggatagtgctgtttactgcatgttagacaagaataatgaagaact

SEQ ID NO: 7677 - DNA, 421 bp, Homo sapiens
  misc_feature (1)...(421): n = A,T,C or G
cacacacagatgaaactttttaggtctcaaagaaatctttacatttctggattttccctatttttttggctagttttgagacgtctggttacgcttattactcaactggcaaaagaactgtcaaacaaaggtgtacttaaaactcaagcagaaaatactaacaaggctgccaaaaaatttatggaagaaaacgaaaaactaaaaaggattttgaaaagccatggtaaagatgaagaatgtgttttggaagcagaaaataaaaaactagtagaagaccaggagaaactgaaaactgaattaaggaagacttcagatgccctttctaaggcacaaaatgatgtgatggaaatgaagatgcagtcagagagactttcgaaagaatatgatcaactcctgaaagaacactctgaacttcaggatn

SEQ ID NO: 7678 - DNA, 383 bp, Homo sapiens
cctactggagcataggaggttgtggcggaggctggttaaagcggcggcggaggatggaggaaggaggcggcggcgtactgagtctggtcccgggcggaccggtgttactggtcctctgcggcctcctggaggcgtccggcggcggccgagcccttcctcaactcagcgatgacatccctttccgagtcaactggcccggcaccgagttctctctgcccacaactggagttttatataaagaagataattatgtcatcatgacaactgcacataaagaaaaatataaatgcatacttccccttgtgacaagtggggatgaggaagaagaaaaggattataaaggccctaatccaagagagcttttggagccactatttaaacag

SEQ ID NO: 7679 - DNA, 471 bp, Homo sapiens
  misc_feature (1)...(471): n = A,T,C or G
ctcgacccccttnatttgatagcggtcaggaaccgcccacgaattcccggcgcgaccgacgcgtacgggactattacataggaccgataacagccatgcactgtgcaaagcatgcccttctgcacaggagagcaaggcacttgcagtagtgatctatgccagcaaaacatcattttgagacaaacatttttgtggcagatgtttttcctaaaaagtactatatcatccaagaaatatttgagtaaaatcccttgttcttttgggtgacattaactgacatttgctttttttcaagacctaatagaaaataagaaagcccataatgtatttagaaacaggaatcctcagagcaattctctgtattctcatataatttcaatgtaaaacagaaaacatattgatgtgttggtgataggcttgaattattaaaaacttcaaaaacaaaaaaaaaaaaaaaaaaaaaaagggggg

SEQ ID NO: 7680 - DNA, 402 bp, Homo sapiens
agtgatcctcccacctcagcctcctgagtagctgggaccataggctcacaacaccacacctggcaaatttgattttttttttttttccaaagacggggtctcgcaacattgcccaaacttcttttgggttagtaaaaaaagctttctcaccggcaaaaaaaaaaaaaaaagggggggcccttttaaaagaacccttggggggcccaaatttaacgggggagggaaagaaaaaattttttcctttatgggggggcatataaaaacctccttgggatttttgggaaagaacctttctttgggggggggaaaaaatgggcccaacccccccccaaaaattaaggcctttagggaaaaaaaaaatttttaaggggaaaagggggaaaaccacccggcatagcccgg

SEQ ID NO: 7681 - DNA, 467 bp, Homo sapiens
attgaacgcctgcaggatcgagacccgttttcccgggccgacccacgcgtccgcttctgtagaggactccctgacaaaagtgaagaattaacttctcctccagaacaagtgcaattcagaaggcagctctgcattctaccttgcttgactggaattgtctgaagctttttctggcctcttttctctagtcggccacccctgaagtgctgaggtctaagtggtttacctcgtgctgatagatggccacactctttagagtagttctcataagttctagaactggtagctcggtcgtttcgcacactaggtggcatacaggcagcagcaggtgttcatatccttgattttgagaatttcccctcaagtatgtggcagtaaatacaacaagacactctatgtattaatgtctccattgtcttaaccctgttccaaaacaaaattcacctcctttctttatgtgaatgtat

SEQ ID NO: 7682 - DNA, 404 bp, Homo sapiens
  misc_feature (1)...(404): n = A,T,C or G
agccaatccaaacggcagatactactggggtggacagtacacctgggacatggcaaagcatggcacagatgatggtgtagtatggatgaattggaaggggtcatggtactcaatgaagaagatgagtatgaagatcaggcccttcttcccacagcaatagtccccaatacgtagatttttgctcttctgtatgtgacaacatttttgtacattatgttattggaattttctttcatacattatattcctctaaaactctcaagcagacgtgagtgtgactttttgaaaaaagtataggataaattacattaaaatagcacatgattttcttttgttttcttcatttctcttgctcaccaagaagtaacaaaagtatagttttgacagagttggtgttcataatn

SEQ ID NO: 7683 - DNA, 415 bp, Homo sapiens
cccacgcgtccgcggacgcgtgggctggttaacatcagatcccagaaaacagtgttctaaagaagacggtggtggatggtggtataatagatgtcatgcagccaatccaaacggcagatactactggggtggacagtacacctgggacatggcaaagcatggcacagatgatggtgtagtatggatgaattggaaggggtcatggtactcaatgaagaagatgagtatgaagatcaggcccttcttcccacagcaatagtccccaatacgtagatttttgctcttctgtatgtgacaacatttttgtacattatgttattggaattttctttcatacattatattcctctaaaactctcaagcagacgtgagtgtgactttttgaaaaaagtataggataaattacattaaaata

SEQ ID NO: 7684 - DNA, 402 bp, Homo sapiens
ttcctttcgtgttacaccctccactgaaccctcaaccttcgaaatactccagttttgtgggtttggtcatttttacttataaatttacctttttgtattttgcaatttacatgtgtttggtttgttttaaattctgtgaaagtggcttgattaaaagactccttttaaatggaagccaccagtcagcagaatggaagcttagaggaacttgcctgtgagcgctggtctttgtgtttggttttgtgatgtaacgatctttgctggggttttttgctttgttttgagggaaatgtcttggagtaaattttaagttcctggagttaatttgttttacaggaattttgttttttaaaaaaataggatcattctgaactttggaatgacccccttatatattttctg

SEQ ID NO: 7685 - DNA, 402 bp, Homo sapiens
taagatattatttatataatatttatatagttaacttttaatgttttatacattattgatataatatttatatataaagaatgtataaaacattaaaagctaactatgtaagatattatttctgaaacaatttagctatatccactatgattataaactgtgtctcgacctgtgttatttacattagctgcttaaaaaagcattgagttaatttttttagatatcaactaaaatatcatagttctgtggtagacattggtttataatgaaataactgcaactagagaaaactgtataaaaacattaaattgtcagtatttttgtaaggttccattttgtaaagagaataatattcaaagacttttgtagcatacaaagtgaaaacttgtatctgcgaaactg

SEQ ID NO: 7686 - DNA, 414 bp, Homo sapiens
actttgagtagcaaggctgtaagagacattcatccttggagttctgtttggcttaaaaattgtgacccctctgtttcaatatttcccttgccccaaaagaaagtctcattaagtctgggtttgtgccttttttatgttggctattaacagccacgtcttttcctttttctaaatagcaaaacaccgaattgctcataaaccgcattccaaaccaaaaacttcagatatttttgaagcagatattgcaaatgatgtgaaatccaaggatttgctagctgataaagaactgtgggctcgacttgaagaactagagagacaggaagaattgctgggtgaacttgataggtacttgatgacaaattatctttccaagataatttgtttctatacacatttcctcattaatctttttct

SEQ ID NO: 7687 - DNA, 402 bp, Homo sapiens
cggacgcgtgggctagttctagatcgcgagcggcggccctttttttttttttttttttttttttttttgggggaaaaaaaaaaatttttttttttttggaaaaaaaaaaaaaatttttttttaaaaagggtggggggccttttcccggggggggggaaaaaaaaaaaatttcttttttttgaaaaaaaaattttaaaaggtttttttttaaaaaaggttttttttaaaaaaaaaggggcccgggttttttcctttaaatttaaaaaaaaaggggttttttattaaaaaaaaaaaaaaggggggggcctttttaaaaaatccctgggggggccaaattttcccgggggggggaaaaaaaattttttttttttttgggggggggaaaaaaaaccccgggggggt

SEQ ID NO: 7688 - DNA, 174 bp, Homo sapiens
aacagagagatataatatttttcctattggacaatggacttgcaaagcttcacttcattttaaaagcaaaagaccccatgatgaaaactccataacagatttatgctgatgataatttatctacatgcatttcaataaaccttttgtttcctaagactaacaaaaaaaaaaagg

SEQ ID NO: 7689 - DNA, 402 bp, Homo sapiens
gacaattacatagtaccgatttctatcgtgcactgtgcatagcatgcccttctgcactggagaaccaggcactcgcaggattgatctatgccagcagaacattgttttgagacaaacatttttgtggctgatgttattccttataggtactatgacatccaagaaatatttgagtagaatcccttgttcttttgggtgacattaactgacatttgctttttttcaagacctaatagaaaataataaagcccataatgtatttagaaacaggaatcctcagagcaattctctgtattctcatatagtttcaatgtagaacagaaaacatattgatgtgttggtgataggcttgaattattaaaaacttcggggacaaggggaaaaactaactgcatggggggg

SEQ ID NO: 7690 - DNA, 490 bp, Homo sapiens
  misc_feature (1)...(490): n = A,T,C or G
gcatggccnnncgttctgcctccattgagnacgtgaagagcccctccncccggccgaccacgcgggcggccgccatatggaataagcgaccctttctcctagggggttgtcgtggtccatacagtttagcanaacagcctgggcggctccggggagaagcagaggggttaaggatgcctgtaagaaaggccttantaggcctttctaagtctcctaaaggatgtgttcgaacaactgccacagcagcaagcaacttgattgaagtatttgttgatggtcagtctgtcatggtggaaccgggaacgaccgtcctccaagcttgtgagaaggttggcatgcagatccctcgattctgttatcatgaaaggttgtctgttgctggaaactgcaggatgtgccttgttgaaattgagaaagcccctaaggttgtagctgcttgtgccatgccagtaatgaagggttggaatatcctaacaaactcagaaaaatn

SEQ ID NO: 7691 - DNA, 487 bp, Homo sapiens
  misc_feature (1)...(487): n = A,T,C or G
agggtgcgnnnnnnngnnagactgaanccttgcggnacactgatggccntcccgggncgacccacgcgtccggttaagccatgatgaccttgttgaatccagccattttgcaagtgcctgtttttactttagggatggaagtccttccaggcatgccaagagggaaggaaacatggcaggtgcactggctttgaagttgccgtggtggttgcaatcctgcatctgtctgttcctgatggggtgacctcaggtagaggaaaatgtgatttggagacatagacacacatggagtgtgacgatggaggcagcgagtggagcgatgcagctgccagctgaggagtgccaagggttgatggtcaccatcggaagctagaggaggcaaggggggctctgtctggagtctcagagggacagcagccttgattttggacttcttgcctccagaaagttggcaagaatttccaaggcatctcatcaacaacttctg

SEQ ID NO: 7692 - DNA, 372 bp, Homo sapiens
cccacgcgtccgagcccctgaactttcagccgaatacatcttttccaaaggagtgaattcaggcccttgtatcactggcagcaggacgtgaccatggagaagctgttgtgtttcttggtcttgaccagcctctctcatgcttttggccagacagacatgtcgaggaaggcttttgtgtttcccaaagagtcggatacttcctatgtatccctcaaagcaccgttaacgaagcctctcaaagccttcactgtgtgcctccacttctacacggaactgtcctcgacccatgagattaacaccatctatcttggcgggcccttcagtcctaatgtcctgaactggcgggcactgaagtatgaagtgcaaggcgaa

SEQ ID NO: 7693 - DNA, 168 bp, Homo sapiens
  misc_feature (1)...(168): n = A,T,C or G
agtgnggaccnnnncnncnataacaccacctacctgaatgtccaacgggaaaacgggaccatctccagatacgtgggaggccaagagcatttcgctcacttgctgatcctcagggacaccaagacctacatgcttgcttttgacgtgaacgangggaaaaactggggt

SEQ ID NO: 7694 - DNA, 424 bp, Homo sapiens
  misc_feature (1)...(424): n = A,T,C or G
agatgccggaccgctccttcccagctcctccccgtgctcgctaacacagcacggccgcctgcagtctcctctctgggagatcgcgcgggcctaagatgtgtcctggggcactgtggctggccctgcccctgctgtccctgctggctggctccctacaggggaagccactgcagagctggggacgagggtctgctgtgggacacgcccacagcccactgggggtgcctggaggtggtctgcctgagcacaccttcaacctgaacatgtatctggagaacgtgaatgtggatttcctgcgcacacttaacctgagtggggtcccttcgcatgacaaaaccagggtggagccgccgcagtacatgattgacctgcacaacaggtacacgtncgataagacgactacgccagcgtncaacattgtgcg

SEQ ID NO: 7695 - DNA, 485 bp, Homo sapiens
aatggtacgccatgcggaaccgctgaggatctctcgggtcgacccacgcgtccggttaccttgccctgtaggccacaatgctgtttgctgagctgacctacactctggccacagaggaagcggaacgcattggtgtagaccacgtagcccgaatgacagcaacaggcagtggagagaactccactgtggctgaacacctgatagcacagcacagcgccatcaagatgctgcacagccgcgtcaagctcatcttggagtacgtcaaggcctctgaagcgggagaggtcccctttaatcatgagatcctgcgggaggcctatgctctgtgtcactgtctcccggtgctcagcacagacaagttcaagacagatttttatgatcaatgcaacgacgtggggctcatggcctacctcggcaccatcaccaaaacgtgcaacaccatgaaccagtttgtgaacaagttcaatgtcctctacgaccgacag

SEQ ID NO: 7696 - DNA, 479 bp, Homo sapiens
tatgatagcctgaggacccttgagatcttcgggtcgacccacgcgtccgggaagcctggaaccggagggccggggcggggtctcggcctgatggctgcccgtaccggccgcagactgctaccacggcgcgggggagcagtaccgcggcacggtcagcaagacccgcaagggtgtccagtgccagcgcgggtccgctgagacgccgcacaagccgcagtgaatccctggtgctcccggccccgccagggccctaaccctggggcggcatgctttgatgtctgggaccagagcctggaaatggttgagactaccctgccacgacttcgctcccgctcccgcctcggttcacgtttacctccgaaccgcatgcacaactggaggagaacttctgccagacccagatggggatagccatgggccctggtgctacacgatggacccaaggaccccattcgactactgtgccctgcgacgctgcg

SEQ ID NO: 7697 - DNA, 415 bp, Homo sapiens
  misc_feature (1)...(415): n = A,T,C or G
atgaatttgaagaaggctccatcatctttaataaattcaggtctgtcatctcctataagacagaagaaaagcccatcttttcccttaataccgttgcaagtgctgacagcatgagtatctatgacgatattgatgctgacgtgctgcaaaattaccaagaatacaatctggccaacatcatctactactctctgaaggagtccaccactagtgagcagagtgccaggatgacagccatggacaatgccagcaagaatgcttctgagatgattgacaaattgacattgacattcaaccgtacccgccaagctgtcatcacaaaagagttgattgaaattatctctggtgctgcagctctggattaatgaaaatcaagttccatcctcagacaagaggtanagaaggaaaattcagc

SEQ ID NO: 7698 - DNA, 408 bp, Homo sapiens
cggacgcgtgggtccggacgcgtgggcggacgcatgtgagcaagcctatgatctggcccgccgagccatctaccaagccacctacagagatgcctactcaggaggtgcagtcaacctctaccacgtgcgggaggatggctggatccgagactccagtgacaatgtggctgatctacatgagaagtatagtggctctaccccctgaaagagggcggatgcagctgcttgtgtttcttggggtgactgtcattggtaatacggacacagtgacccatcctccatcctatttatagcggaagggccttcaattgtatcagtacttttttttaagctctggcacattgacctctatgtgttaccagtcattaatgagctgctgcagaggtgactatttgctttactttcttg

SEQ ID NO: 7699 - DNA, 430 bp, Homo sapiens
aagggggtcaaaggaagacttgaagcacagagggctttggaggtggggtacatttctctgagcagtcagggtgggaagaaagaatgcaagagtggactgaatgtgcctaatggagaagacccacgtgctaggggatgaggggcttcctgggtcctgttccctaccccatttgtggtcacagccatgaagtcaccgggatgaacctatccttccagtggctcgctccctgtagctctgcctccctctccatatctccttcccctacacctccctccccacacctccctactcccctgggcatcttctggcttgactggatggaaggagacttaagaacctaccagttggccatgatggcttttcttctttttcttttttttaacaaaacagaacaaaaccaaaaaatgtcaaaaaaaaaaaaaaaaaaaag

SEQ ID NO: 7700 - DNA, 493 bp, Homo sapiens
  misc_feature (1)...(493): n = A,T,C or G
cgctgggnnnnnnnnaatcgatcgccntgcggtaccgcnccggaattcccgttgagaccactcgtccgcgggccctgggtgaccccgcgcctaccatgcactgggtcggtcctgacgaccggatggttggcaactcctcccgagcccgggctttccccaacgggaccttanagattggggtgaccggcgctggggacgctgggggctacacctgcatcgccaccaaccctgctggtgaggccacagcccgagtagaactgcgggtgctggccttgccccatggtgggaacagcagtgccgaggggggccgccccgggccctcggacatcgccgcctccgctcgcactgctgccgagggtgaggggacgctggagtctgagccagccgtgcaggtgacggaggtgaccgccacctcagggctggtgagctggggtcccgggcggccagccgacccagtgtggatgttccaaatccagtacaacagcagcgaaag

SEQ ID NO: 7701 - DNA, 402 bp, Homo sapiens
  misc_feature (1)...(402): n = A,T,C or G
cccacgcgtncgaatgaattaatgatggcttctgagtcaactttactggctcaggaaccacgagagatgactgcagatgtaatcgagcttaaagggaaattcctcatcaacttagaaggtggtgatattcgtgaagagtcttcctataaagtaattgtcatgccgactacgaaagaaaaatgcccccgttgttggaagtatacagcggagtcttcagatacactgtgtcctcgatgtgcagaagttgtcagtggaaaatagtattaacagctcactcgagcaagaaccctcctgacagtactggctagaagtttggatggattatttacaatataggaaagaaagccaagatttaggtaatgagtggatgagtaaatggtggaggatgggagtcaaaatcag

SEQ ID NO: 7702 - DNA, 486 bp, Homo sapiens
  misc_feature (1)...(486): n = A,T,C or G
gacgggnnnnnnncttgatntcctcggaccgcccggattcccgttgaactcactcgtccggtcctgagcctcctacctctgctggaagcccagatcccattgtgtgccaacctagtaccggtgcccatcaccaacgccaccctggaccggatcactggcaagtggttttatatcgcatcggcctttcgaaacgaggagtacaataagtcggttcaggagatccaagcaaccttcttttacttcacccccaacaagacagaggacacgatctttctcagagagtaccagacccgacaggaccagtgcatctataacaccacctacctgaatgtccagcgggaaaatgggaccatctccagatacgtgggaggccaagagcatttcgctcacttgctgatcctcagggacaccaagacctacatgcttgcttttgacgtgaacgatgagaagaactgngggctgtctgtctatgctgacaagccagag

SEQ ID NO: 7703 - DNA, 398 bp, Homo sapiens
ttttttataagtaatagtcttaaatttcttcacaggtagagcactagtttgcccccaaagtcataaatttgtctctctctctttctgactgtgcatgtctgtgtgtgtgtgtgtgtgtgtgtgtgtgtgtgtgtgtgtgtatgtgaaatggtctttggagtctccataccatgtaattaaagctatgggcaaaacccatgccttttgtatttttgaagcttattgtaaaagacgtgtggtggagatccccacacccacttagtggcgcctaatgataaaagagccccatactctcctgttcacttatgttctctgcgcctaaaaggatatagaggttaagagtacatgcagaccttatttttggaatggaagtctctaagacacccactttaccctaa

SEQ ID NO: 7704 - DNA, 490 bp, Homo sapiens
  misc_feature (1)...(490): n = A,T,C or G
cggtgggnnnnnnnnaattgatcgccttcggaccgcccggattcccgttgatatcactcgtccgcctggctccccctgctggtgtctagtgtttttttccctctcctgtccttgtgttgaaggcagtaaactaagggtgtcaagccccattccctctctactcttgacagcaggattggatgttgtgtattgtggtttattttattttcttcattttgttctgaaattaaagtatgcaaaatanaaaaaaaaaaaaaaaaaaaaaaaaaaaggggggggcccttttaaaagaacccttgggggggccaaatttaaccgggggtggaaaagtaaaattttttcccttaaagggggggaaaaaaaaacccccttgggaatttttggaaaaaaccttttttttgggggggggacatatggggccaccccccccccaaaatttaaggccttgggggaaaaaaaaaatttttaaggggtaaagggggaaaaacac

SEQ ID NO: 7705 - DNA, 401 bp, Homo sapiens
cacagttcccgaagagaagacaccgaacagccctgtttgggtgcagcccatactgaatgaacacaccttctgtgctggcatgtctaagtaccaagaagacacctgctatggcgatgcgggcagtgcctttgccgttcacgacctggaggaggacacctggtatgcgactgggatcttaagctttgataacagctgtgctgtggctgagtatggagggtatgtgaaggtgacttccatccaagactggggtcagaagaccataactgagaactaatgcaaggctgggcggaagcccttgcctgaaagcaagacttcagtctggaagagggcaaagtggacgggagtggacaggagtggatgcgataagatgtggtttgaagctgaggtgagccagccctgcg

SEQ ID NO: 7706 - DNA, 416 bp, Homo sapiens
  misc_feature (1)...(416): n = A,T,C or G
caagatgtctcacaccctagaagcctagggctgggggagacagccctgtctgggagggggcgttgggtggcctctggtatttatttggcatttataaatatataaactccttttttactctannaaaaaaaaaaaaaaaaaaaaaaaaaaaaaaaaaaaaagggggggcccttttaaaaaaacccttgggggggccaaatttaacggggggaggaaaaaaaaaatttttttttttaagggggggcaaaaaaaaaccccctggggaattttggaaaaaaaacttttttttggggggggaaaaaatgggcaaaaccccccaaaaaaaattaaagctttaagggaaaaaaaaaatttttaaggggaaaagggggaaaaaaaaccttaatttctttgtgtttaaaaaaaaatttttnnnn

SEQ ID NO: 7707 - DNA, 490 bp, Homo sapiens
  misc_feature (1)...(490): n = A,T,C or G
cggtgggnnnnnnnnaattgatcgccttaggaccgcccggaatcccgttgaacgcactcgtccggcgatctagttgggagataatggagtttaccccatatgaagtattcaatagttctacttgtgaatttggatttattttgagttatacttgacacagaattcctttttttaaaaaatatgtgtgtattttggaaaaaaaattcatagatgttaaaatttctgcatggataccagtttttctcacaacactgaatttggtagcttttcccgaaaaaatcttcacagaaattttttgtctgtatatatttgagggccttttttttgaaaaaaaaagccaacagaaaagtctgctggtttgatttttgagattaaaacaaccaaaaagagaggcattttcaaaatttcagaactttcaggagggcaggagaatatcaaacaaagatttctggaatatttttgccaaccttctgtgtgagctgcaagaaaa

SEQ ID NO: 7708 - DNA, 417 bp, Homo sapiens
cttaattccatttggaattggggatggctgtcacgtttcagaaaggatatgcttccatagcaggatctgaaagcaaaatagaaactggcgatacagaaaaggtcaatgagccaacacatttcaggcttctggaaagttctgagaacatgaaacatcatggtatatttaagaaattttaagcagttcagtgtggcagcagtacaaagagaaagtgacaagataccaagttaagccaagtaggcagagattagaccatacagactcacaccaaatgaaaaagtaccattttatcctgtaggctcagataatctaaacagattaaataagaggtcacttttatattctagtaatatcaatcttttggttgtaggaacctgaagggaccccccccccccaccaaaaaaaaaaaaagggggg

SEQ ID NO: 7709 - DNA, 438 bp, Homo sapiens
  misc_feature (1)...(438): n = A,T,C or G
taagaaacttttgaanccctcgccggaaccccgggncgacccacgcgtccgaacccggcagctggcgccatggtgctgttgcacgtgctgtttgagcacgcggtcggctacgcgctgctggcgctgaaggaagtggaggagatcagtctgctgcagccgcaggtggaggagtccgtgctcaacctgggcaaattccacagcatcgttcgtctggtggccttttgtccctttgcctcatcccaggttgccttggaaaatgccaacgccgtgtctgaaggggttgttcatgaggacctccgcctgctcttggagacccacctgccgtccaaaaagaagaaagtactcttgggagttggggatcccaagattggtgccgcaatacaggaggagttagggtacaactgccagactggaggagtcatagctgagatcctgcga

SEQ ID NO: 7710 - DNA, 375 bp, Homo sapiens
  misc_feature (1)...(375): n = A,T,C or G
tgcccctggagtacagctacggggaatacagagatctcttccgtgattttgggacccactacatcacagaggctgtgcttgggggcatttatgaatacaccctcgttatgaacaaagaggccatggagagaggagattatactcttaacaacgtccatgcctgtgccaaaaatgattttaaaattggtggtgccattgaagaggtctacgtcagtctgggtgtgtctgtaggcaaatgcagaggtattctgaatgaaataaaagacagaaacaagagggacaccatggtggaggacttggtggtcctggtacgaggaggggcaagtgagcacatcaccaccctggcataccaggagctgccgacggcggacctgn

SEQ ID NO: 7711 - DNA, 416 bp, Homo sapiens
agaagactgtccacccgtcctcagccccctctcttcgtgggctatctactcagttgatccctccctcgctggcttggctctgactcctgctcagacccatcacctttgccgggaatgatgtctggagaacccctgcacgtgaagacccccatccgtgacagcatggccctgtccaaaatggccggcaccagcgtctacctcaagatggacagtgcccagccctccggctccttcaagatccggggcattgggcacttctgcaagaggtgggccaagcaaggctgtgcacattttgtctgctcctcgggtaagtgatctgcttccccatcctgtcctctgctgtgtgtcctgggatcagacactctgcttctctgagccctggtttccccagcaatgtgccactgaaaacaatggca

SEQ ID NO: 7712 - DNA, 494 bp, Homo sapiens
  misc_feature (1)...(494): n = A,T,C or G
agatggccncccggccgggcaatgatgccctcgctaagcgtcatcggaaccgccccggaanncccggggcgacccacgcggccgcccacgcgtncgatgatgagatgcttgctgacttgccttcattaactgctgattttgttgagagtaatgaggggggcataaactatgctgaggcggaggatgtcttcctgggcatgtttttgtatgaatatgcaagaaggcatcctgattactctgtcgtgctgctgctgagacttgccaagacatatgaaaccactctagagaagtgctgtgccgctgcagatcctcatgaatgctatgccaaagtgttcgatgaatttaaacctcttgtggaagagcctcaaaatttaatcaaacaaaattgtgagctttttgagcagcttggacagtacaaattccacaatgcgctattagttcgttacaccaagaaagtaccccaagtgtcaactccaactcttgtagaggtctca

SEQ ID NO: 7713 - DNA, 492 bp, Homo sapiens
  misc_feature (1)...(492): n = A,T,C or G
agatggtcnnnnngttcggcccccaagtgcctccgattgagcccgtatgcccgggccgacccacgcgtgcgagcacctaacccttcaggtgctatgagtggctaatggaactgtacctccttcaagttttgtgcaataattaagggtcactcactggcagatactggctgtgatctatgataatgtgtgtgcaacacataacatttcaataaaagtagaaaatatgaaattagagtcatctacacatctggatttgatcttagaatgaaacaagcaaaaaagcatccaagtgagtgcaattattagttttcagagatgcttcaaaggcttctaggcccatcccgggaagtgttaatgagctgtggactggttcacatatctattgcctcttgccagatttgcaaaaaacttcactcaatgagcaaatttcagccttaagaaacaaagtcaaaaattccaaggaagcatcctacgaaagagggaacttctgag

SEQ ID NO: 7714 - DNA, 424 bp, Homo sapiens
gatcatttcattaatttctttcctaatttcttcttttctgtttccctttctgcatgtggattcctgtctcttcttctgacccctcacttgcctggcaccgctttcattttctcctcttggtttcttcacccacctctgctccccactcctccccttcccatccccatctaccttgtgccccatgtcccacagtcttatcagagcctgtagccccagggggcccaggtgaggggctgctcctgcaggataacgcaatctccactgagatccaggctttgctttcctcctattacagtgacaggtgatagggctgggtaggcttggggcctgagctctgactagcccaaccctcccccaaccccttcctggtgccacagctattgagccgctggatgacatcgcagcggtgacagacatcctgacc

SEQ ID NO: 7715 - DNA, 420 bp, Homo sapiens
  misc_feature (1)...(420): n = A,T,C or G
aagcacttccctagtgcccttcttttataatcagcctgggatcagactacagatctaaatgggcacatggagagttcagagccagtacctgggccccacgtaggcctggtcacatcataccacaacccagcatcttccttattctctggttatgtcccagatgttgtaaaaaaaatatggcgaagagagggtgcccagctatgtgttaaccacagccaccactcttggagacatgactcaaaattaagacctgctaatttggtttttagggtcatctgccaaggactattttgactggaaggagtcatggctcaagagctatgcccttctttgtcacccccagccaggacatttactcctccacttccctggggcaacataacactagtgtcaggcacgngggtctttgcaatcaatctt

SEQ ID NO: 7716 - DNA, 414 bp, Homo sapiens
  misc_feature (1)...(414): n = A,T,C or G
tccgggcactcagacatcatgagttggtccttgctcccccggaatttaattctctacttctatgctcttttatttctctcttcaacatgtgtagcatatgttgctaccagagacaactgctgcatcttagatgaaagattcggtagttattgtccaactacctgtggcattgcagatttcctgtctacttatcaaaccaaagtagacaaggatctacagtctttggaagacatcttacatcaagttgaaaacaaaacatcagaagtcaaacagctgataaaagcaatccaactcacttataatcctgatgaatcatcaaaaccaaatatgatagacgctgctactttgaagtccaggaaaatgttagaagaaattatgaaatatgaagcatcgattttaacacatgactcaagn

SEQ ID NO: 7717 - DNA, 426 bp, Homo sapiens
  misc_feature (1)...(426): n = A,T,C or G
taatcccttnaannttgataacntcgggagagncaangaanngaaannnaannaaaaannnnnaactgggctcgcctctgtcaaagatcggcatctagctgacggattcaccctacgtggtggccagcatgcggatcatgacgcggatgggcacgcccgtcctggaagcactgggcgatggggagtttgtcaaatgcctccattctgtggggtgccctctgcctttacaaaagcctttggtcaacaactggccctgcaacccggagctgacgctcatcgcccacctgcctgaccgcagagagatcatctcctttggcagtgggtacggcgggaactcgctgctcgggaagaagtgctttgctctcaggatggccagccggctggccaaggaggaagggtggctggcagagcacatgctggtgagcn

SEQ ID NO: 7718 - DNA, 435 bp, Homo sapiens
  misc_feature (1)...(435): n = A,T,C or G
ntaatnacctagaaaanctgganncccttaggagagnnanggaangggggaggaaaaaagaannnnnaacccattcagcatggggccgctgggctcgcctctgtcaaagatcggcatcgagctgacggattcaccctacgtggtggccagcatgcggatcatgacgcggatgggcacgcccgtcctggaagcactgggcgatggggagtttgtcaaatgcctccattctgtggggtgccctctgcctttacaaaagcctttggtcaacaactggccctgcaacccggagctgacgctcatcgcccacctgcctgaccgcagagagatcatctcctttggcagtgggtacggcgggaactcgctgctcgggaagaagtgctttgctctcaggatggccagccggctggccaaggaggaagggtggctggcagagca

SEQ ID NO: 7719 - DNA, 416 bp, Homo sapiens
  misc_feature (1)...(416): n = A,T,C or G
ctcacgcgtncacagaaacacagagctctatcttcgttaaaatgaatcactcattaaacgcacttctcattgtcctcatcataacatcggcgtggggtgggagcaaaggcccgctgtatcagctagagaaaggaggggaaactgctcagtctgcagatccccagtgggagcagttaaataacaaaaacctgagcatgcctcttctccctgccgacttccacaaggaaaacaccgtcaccaacgactggattccagagggggaggaggacgacgactatctggacctggagaagatattcagtgaagacgacgactacatcgacatcgtcgacagtctgtcagtttcacgacagactctgatgtgagtgctgggaacatcctccagctttttcatggcaagagccggatccagcgcn

SEQ ID NO: 7720 - DNA, 448 bp, Homo sapiens
  misc_feature (1)...(448): n = A,T,C or G
taataaaaaactgataccttcaaaannttgganaacnttaanaaanacanaanaaanannnaaaaaaaccaanannnnnnnaaaccattcagcatggggccgctgggctcgcctctgtcaaagatcggcggcgagctgacggattcaccctacgtggtggccaacatgcggatcatgacgcggatgggcacgcccgtcctggaagcactgggcgatggggagtttgtcaaatgcctccattctgtggggtgccctctgcctttacaaaagcctttggtcaacaactggccctgcaacccggagctgacgctcatcgcccacctgcctgaccgcagagagatcatctcctttggcagtgggtacggcgggaactcgctgctcgggaagaagagctttgctctcaagatggccagccggctggccaaagaggaagggtggctggcacagc

SEQ ID NO: 7721 - DNA, 418 bp, Homo sapiens
caagactgcttcaagaaaaagaaagaaagaaatgccatattcctctttgctagcgagctgtttttcaaggacaaatacaaaaaatggaagtaatcttcacacagaacccttattagccttttctctgcctcaagaatcttgacaatgtgctgaagttgctatggctttgtttgcgtccttgccaggtcctgcattaaatgaaaataaagagccacaaaaaaaaaaaaaaggggggcccgtttaaaagaatccttggggggcccaaattttacgcgggttggaaaggtaatatttttttccttatggggggccgattaaaaacctacttgggaattttggaaaagaaccttttttttgggggggggacatattgggacaacctccctacaaaaattaaaggctttagggaaaaaataaa

SEQ ID NO: 7722 - DNA, 432 bp, Homo sapiens
  misc_feature (1)...(432): n = A,T,C or G
gcgattacctaaaaaacctgatnaccctnanaanaacnnnnaanganaannaaaanaaaannnnnaacatcaatctgcctgcaaagattcagactggcccttctgctctgatgaagactggaactacaaatgcccttctggctgcaggatgaaagggttgattgatgaagtcaatcaagattttacaaacagaataaataagctcaaaaattcactatttgaatatcagaagaacaataaggattctcattcgttgaccactaatataatggaaattttgagaggcgatttttcctcagccaataaccgtgataatacctacaaccgagtgtcagaggatctgagaagcagaattgaagtcctgaagcgcaaagtcatagaaaaagtacagcatatccagcttctgcagaaaaatgttagagctcagttggt

SEQ ID NO: 7723 - DNA, 414 bp, Homo sapiens
ggaacacacaggtctcaccctgagatatagtgtcttcttagctgagaagaaatctgcagaacaatgcttagtgggtttatcaaggggccattaggcaaattgatgatatcgacgtgaggttccagaaagcagccagtggcaccactgggacctaccaagagtggaaggacaaggcccagaatctgtaccaggaactgttgactcatgaaggccaagccagtttccagggactcaaggataacgtgtttgatggcttggtacgagttactcaaaaattccatatgaaagtcaagcatctgattgactcactcattgattttctgaacttccccagattccagttttcggggaaacctgtgatatacactatggagggactttgcactatgttcataagggaggtagggaccggtt

SEQ ID NO: 7724 - DNA, 433 bp, Homo sapiens
  misc_feature (1)...(433): n = A,T,C or G
ctgganccgntnananannnctaaaaaacatcaganaaagcaanggannggaggaggaccgnccccnnnnaaacaaaagctggaagaaaagcgggcatttgactctgcagtagcaaaagcattagaacatcacagaagtgaaatacaggctgaacaggacagaaagatagaagaagtcagagatgccatggaaaatgaaatgagaacccagcttcgccgacaggcagctgcccacactgatcacttgcgagatgtccttagggtacaagaacaggaattgaagtctgaatttgagcagaacctgtctgagaaactctctgaacaagaattacaatttcgtcgtctcagtcaagagcaagttgacaactttactctggatataaatactgcctatgccagactcagaggaatcgaacaggctgttcagagccat

SEQ ID NO: 7725 - DNA, 420 bp, Homo sapiens
aacatcctccccctgtcaagatgtggcacctcaaactttgtgcagtcctcatgatcttcctgttgctgttgggccagatagatggctccccaataccagaagtgagttcggcaaagagaaggccacggagaatgaccccattttggagaggggtttccctcaggcctattggagcctcctgccgggatgattctgagtgtatcacaaggctatgcaggtactccctgaacctgggagcagggttgggccagagagccctgggaagctgggcagaggagtgacaaggggacacatgaacctaagaataaagctgggatggaggagttctagactgagactgggagctccatggaaaatcccttatgagttaggagccaagaacagctctatgtgggtaccatgtaagagtggtgcctttcc

SEQ ID NO: 7726 - DNA, 398 bp, Homo sapiens
ctttgggagagcctcacctttcactctgctttcccgtctcagaccaaggagctgaacaaaaaagtggcctccagcagtgaactggtacagagcagccgcagtgaggtgacgttgctccagagggtgttccagggcctggagatggagctgcagtcccagcttacatagtgtgaaggacccggcacagcagcagcccccaggtcaccagtaatggccaccaccccctcaacaagccacaatttagttccacctttcttttctcagggtgggaccagaggactcatgggacctgttatatagatagagaaactagccctagaatagtgggctagcatttctctatattgtctggcccatcagtaccccaactgggatcaaaatccaggcacctctcaaaa

SEQ ID NO: 7727 - DNA, 399 bp, Homo sapiens
aggcatccctcctgaccagcagaggctgatctttgctggaaaacatctggaagatgggcgcaccctgtctgactacaacatccagaaagagtccaccctgcacctggtgctccgtctcagaggtgggatgcaaatcttcgtgaagacactcactggcaagaccatcacccttgaggtggagcccagtgacaccatcgagaacgtcaaagcaaagatccaggacaaggaaggcattcctcctgaccagcagaggttgatctttgccggaaagcagctggaagatgggcgcaccctgtctgactacaacatccagaaagagtccaccctgcacctggtgctccgtcttagaggtgggatgcatatcttcgtgaagaccctgactggtaagaccatcaccct

SEQ ID NO: 7728 - DNA, 463 bp, Homo sapiens
  misc_feature (1)...(463): n = A,T,C or G
tgaatggggnncnnttcgatacccttcgtgagccctcgaaccccnccggaatccgggtcgacccacgcgtccgattcagcatagaaaacagcaccgatttccctgaccttttcgatctcaggtgggaccagagatcgaacagttcagcatagaaaacagcaccgataaccctgacctgtggtttctacatgaccaaaatagttctgctttcaaattctatcgaaagaaagtgtttgaactatgtccatcaatttgtttcacgtcatctccgcacaaccttcacactggtggtggtgacaccacgggttctcaggagagccccgtggacctcatggaaggggaagcagagtttgaagacgagccccctccgcgggaggctgagctggagagcccagaggtgatgccctgaggaggaggacgaggacgatgaggatgggggagaggaggcccccgctcctggagg

SEQ ID NO: 7729 - DNA, 397 bp, Homo sapiens
  misc_feature (1)...(397): n = A,T,C or G
agcagctgctccgggccgtggtggaagatgacctgttgctgttggtgatgctcctggcacatggctccaaagaggaggtgaatgagacctatggggacggggacgggcggacggctctacatctctccagtgccatggccaacgttgtcttcacgcagctgctcatctgggtgagtcacgtgcctctagcctgccctgacctcgctcttcttagccttgttctttgaaagcaacctcttctttcctcccctacaaccaatctctctcctcccatgtcttgccaactgtcaacatgtgttttctcctacagtacggggtggacgtgaggagccgggacgcccggggcctgactccactggcatatgctcgccgggccggcagccaggagtgtgcagan

SEQ ID NO: 7730 - DNA, 398 bp, Homo sapiens
ccttatagggcaggccctgccctctgggaaggtcccttcatgctggaggcacacagctttaaggaagtaggttgaagtaggactccttcgtcctctcactggctttggctccctcaataaactgtgtgggaacctgaaaaaaaaaaaaaaaaaaaaaaaaggggggggcccgtttaaaagaacccttgggggggccaaatttaaccggggctggcaaggaaaaatttttttccttaaggggggccgaataaaaacctccctgggaattttgggaaagaacccttattttgggggggggacaaattggcccaacccccctccaaaaattaaagcctttagggaaaaaaaaaaattttaaggggtaaagggggaaaaacaaccggcatatcctggggggg

SEQ ID NO: 7731 - DNA, 390 bp, Homo sapiens
ctcttccctcattaacttcaggtaagttgttaaagcaaatgttctggagttcagagtgttgcttttgataatgagaaaacaagtttagtcatcagaatctgtcatcttgtttataaaacagtcaaaccatatgcaacgcccttctgcatggtggattttgttttgttccttgaacctactggctcgcttcatccaatgcctacagatagtaaataaagaggtccatttttttaggtacattaaatactacaaattttgggaggggaggtagagtaggagggtggtgggcagaaggcagccgggccatttttttggcaactaattcaatatgagaaaaaagaaggtattgctctcataaaagtaatttatattcattgttttcaaccaacc

SEQ ID NO: 7732 - DNA, 396 bp, Homo sapiens
atttttttgtcttccttttggctttatttttaaactgctttagatattactgctcagtgtttgtgaactttcctaggtctctatgttgttagtgcagccagcacccagtggggacctactagaaaaaggaactggcatgcacacgtgcccagcaggaaaagcttcgtcttcacgtcggctgctgccatccagaagaggccctggagcctcacgccgtcgaggctgctctcaggcgttctgttccgggcgaggcttgtgctgcaaggaagggcaccagcatgcaggctgccactggagggtccgggtgctgcgggcatagttcagcgcttgtccaccctcccttagctctgactcagtgcatcctactgtggggacatctcgtgaggggacacgaaa

SEQ ID NO: 7733 - DNA, 454 bp, Homo sapiens
  misc_feature (1)...(454): n = A,T,C or G
ggggcagnnnnngnanaactgagaccctgcgaacattgaggccatcgcgggnccacccacgcgtccgggcaccaccactgacctgggacagtgaatcgacaatgccgtcttctgtctcgtggggcatcctcctgctggcaggcctgtgctgcctggtccctgtctccctggctgaggatccccagggagatgctgcccagaagacagatacatcccaccatgatcaggatcacccaaccttcaacaagatcacccccaacctggctgagttcgccttcagcctataccgccagctggcacaccagtccaacagcaccaatatcttcttctccccagtgagcatcgctacagcctttgcaatgctctccctggggaccaaggctgacactcacgatgaaatcctggagggcctgaatttcaacctcacggagattccggaggctcagatccatgg

SEQ ID NO: 7734 - DNA, 372 bp, Homo sapiens
cattcagatcatcagagaaatgcaaatcagaatctcaatgagatgccatctcatgccagtcggaatggcaatcattaaaaagtcaggaaacaatacatgctggtgaggctgtggagaaataggaatgcttttgcactgttggagggaatgtaaattagatcaaccatggctcttaagggctctttgactttaatgatccgcatttttattatgatgcgtctaggcagcaattattgcgattattctatttctttatttgctgtctatccaagatttgaggattaattctgtaatttctagaaaattcagaagcgttatctatttattcaattataacctctttctattatttcctaaataaaagaaaagggg

SEQ ID NO: 7735 - DNA, 421 bp, Homo sapiens
cggacgcgtgggggaggagactactgtgtctctgaatactgtggacagcattgagagttttgtggctgacattaacagtggccattgggatactgtgttgcaggctatacagtctctgaaattgccagacaaaaccctcattgacctctatgaacaggttgttctggaattgatagagctccgtgaattgggtgctgccaggtcacttttgagacagactgatcccatgatcatgttaaaacaaacacagccagagcgatatattcatctggagaaccttttggccaggtcttactttgatcctcgtgaggcatacccagatggaagtagcaaagaaaagagaagagcagcacttgcccaggccttagctggcgaagtcagtgtggtgcctccatctcgtctcatggcattgctgggacag

SEQ ID NO: 7736 - DNA, 385 bp, Homo sapiens
acaaccacccctctttcctccaggttggcaggggaccctcttctcccgtctgccctgcgggttgcccgcctcctccagagacttgcccaagggcccatcaccactggcctctgggcacttgtgctgagactctgggacccaggcagctgccaccttgtcaccatgagagaatttggggagtgcttgcatgctagccagcaggctcctgtctgggtgccacggggccagcattttggagggagcttccttccttccttcctggacaggtcgtcaggatggatgcactgactgaccgtctggggctcaggctggtgtgggatgcagccggccgatgagaaaataaagccatattgaatgatcgccaccaaaaaaaaaaaaaaaaggg

SEQ ID NO: 7737 - DNA, 168 bp, Homo sapiens
  misc_feature (1)...(168): n = A,T,C or G
gtgtcanagcctccacaccatgacctccaagaagctggtgaactcggtggctggctgtgctgatgacgctcttgctggcctggtggcctgcaaccccaacctgcagctcctgcagggccaccgcgtggccctccgttctgacctggacagcctcaagggccgggtggg

SEQ ID NO: 7738 - DNA, 384 bp, Homo sapiens
gcctctgcagctcagcatggctagggtactgggagcacccgttgcactggggttgtggagcctatgctggtctctggccattgccacccctcttcctccgtgagtaaagctgggactagaagcgaaggattgagttctgggctagggactagtgcccatgggaatgttgctgaaggcgagaccaagccagacccagacgtgactgaacgctgctcagatggctggagctttgatgctaccaccctggatgacaatggaaccatgctgttttttaaaggggagtttgtgtggaagagtcacaaatgggaccgggagttaatctcagagagatggaagaatttccccagccctgtggatgctgcattccgtcaaggtcacaacagt

SEQ ID NO: 7739 - DNA, 444 bp, Homo sapiens
  misc_feature (1)...(444): n = A,T,C or G
aattgacancccattggagatccgtcgccgaanccccgggncgacccacgcgtgcgggttttatgagtcccttattcttgatacatagtctatattcctatgtgcggnctttctgaagttcctgtagaagaactgagatctttaccaagcatgtcacacttggcagaactcaaattccaaactttgttttctctgcagtagatagcagctgaaactcagttttttctgccttcttaactgttgcttttcatgttggacttggttcctgtgtggttcagaagtcagccaaagatttaacaggaggttattgccagatttgggtcctacctcctttccaggatctccttcagtttccagataccagaagctctgaactctctatcctctaacaactcaagccaaaaaaggctacattgcagtggattggagcgcatcctcgtggaa

SEQ ID NO: 7740 - DNA, 264 bp, Homo sapiens
aacagagagatataatatttttcctattggacaatggacttgcaaagcttcacttcattttaagagcaaaagaccccatgttgaaaactccataacagttttatgctgatgataatttatctacatgcatttcaataaaccttttgtttcctaagactaaaaaaaaaaaaaagggggggccgttttaaaggatccctcggggggcccaagtttacccgggcatgcaacgaaatagctttttccttatagggaggcgaattataa

SEQ ID NO: 7741 - DNA, 401 bp, Homo sapiens
tggtcgtcatggtgaccaagaccaaagccggccagggtacctcagcacccccagaggcctcacccacagctgccccagagtcctctacatccttcccgcctgcccccacctcaagcatgtaccatcccccacctgccgccagagaggacaagagcccatcataggaatccgcccccacgacatccccagagtctgtgtcaggctctgttccctcttcaggtaacaccgggcgagaggaagacacggccttcacgctagtgacgggctctgagtgagacgatgctgacggagatcatgtccatgggctatgagcgagagcgggtcgtggccgccctgagagccagctacaacaacccccaccgagccgtggagtatctgctcacgggaattcctgggagccc

SEQ ID NO: 7742 - DNA, 399 bp, Homo sapiens
acattacctgtcgatgtgatccagggggctcagtgtgtacacagcccccgttttcctgcccagtacctgaagctgcgggagcgaatgcagatacagaaggagatggagcggctgcgcttcctactgtcggatcagtcattgctgctgcttcctgagtaccatcagcgagtagaggtgctccgaaccctgggttatgtggacgaggcgggcactgtgaagctggcagggcgggtggcttgtgccatgagcagccatgagttgctcctcactgagctcatgtttgacaatgcactgagcaccctgcggcctgaggagattgctgccttgctctctggcctggactgccagagccctggggacgctggggatcagctcccaaacaccctcaagcagggaata

SEQ ID NO: 7743 - DNA, 399 bp, Homo sapiens
  misc_feature (1)...(399): n = A,T,C or G
gagtcgtagcggtcgaggcttttgcggctccggcgtgccggaaacgtacgcgtcctttttcctaagagcgccctcaacaagaattgaaaatgaagcaattcctggctaaaatattccttaacatgaagatcgctgaggccccaaagactcattagtttcccgaggtcacagactaattgtactaaccacacaacctttagaatttcagtctcctcccatatgaagaaacgccggcaccttacaccgacaggaaaactacaattaagtgaggctgttctcctcaagcccgactgagttctctgtaattgtagggcatacctacaccctgttttagcattatgagacctgaaatacttttaaattactggcaccatttctcatctctgaattataagtttn

SEQ ID NO: 7744 - DNA, 398 bp, Homo sapiens
tcactgttttcacaatacacacagttctatgtttataaataacaggtttcaaaagaaactcaggacagtatttaaaacaagttcttaaactattaattgaacaatggcatttttaaatatgtaaacacagcggaattcgtgtatacactaacagaagctttaacaaaacatgtagcgtggtgggacactctgccacagcttagctgattggtatcaagccttgtctttggtttctgaggcctcctgagcccttctgtactgggagaccgcactccagagtctgcagaggagaccacccctgggaaacaaacacagctgtcttcagagtcagtgcttcaagccaacagagcttaaaactgcagtccctaatttaaaaacctaatgaaaataaaaacatt

SEQ ID NO: 7745 - DNA, 398 bp, Homo sapiens
ctccgctggcttattgtacaattgcgccatgtttgctgctcggctagcggcggcggcggcccagtgggtgtatgccttctcggcgcgcccgctggccggcggggagcctgtgagcctgggctccctgcggggcaaggtactacttatcgagaatgtggcgtccctctgaggcaccacggtccgggactacacccagatgaacgagctgcagcggcgcctcggaccccggggcctggtggtgctcggcttcccgtgcaaccagtttgggcatcaggagaacgccaagaacgaagagattctgaattccctcaagtacgtccggcctggtggtgggttcgagcccaacttcatgctcttcgagaagagcgaggtgaacggtgcgggggcgcaccctctct

SEQ ID NO: 7746 - DNA, 394 bp, Homo sapiens
agagccccaaaacacctagcagccccttgacccccttgtttgcctcttccatgtgtctcctggccccctgctatctcacaggggactctgtccgggacaagtgtgtggagatgctgtcagcagccctgaaggcggacgatgattacaaggactatggagtcaactgtgacaagatggcatcagaaatcgaagatcatatctaccaagagctcaagagcacggacatgaagtaccggaaccgcgtgcgcagccgcataagcaacctcaaggaccccaggaaccccggcctgcggcggaacgtgctcagtggggccatctccgcagggcttatagccaagatgacggcagaggatatggccagtgatgaactgagggagttgaggaatgccatgac

SEQ ID NO: 7747 - DNA, 464 bp, Homo sapiens
  misc_feature (1)...(464): n = A,T,C or G
cgtggggaaaaanagaactgataccntgaagacccgncctgattactcttcgaacccgcgtgcagaactatagctccacggccagaagataccagcagctctgcctttactgaaatttcagctggagaaaggtccacagcacaatgaggcttttcacaggcattgttttctgctccttggtcatgggagtcaccagtgaaagctggcgttcgtttttcaaggaggctctccaaggggttggggacatgggcagagcctattgggacataatgatatccaatcaccaaaattcaaacagatatctctatgctcggngaaactatgatgctgcccaaagaggacctcgnggtgtctgggctgctaaactcatcagccgatccagggtctatcttcagggattaatagactactatctatttggaaacagcaacactgtattggaggactcgaagtccaacgagaaa

SEQ ID NO: 7748 - DNA, 418 bp, Homo sapiens
ttttataattttgtgaagcaaaattttttctctaggaaatatttattttaataatgtttcaaacatatatacaaatgtaattcataatcattcttttaaaatacagcattgttatatatgtttgaaacattattaaaatgctgtattttaaaagaatgattatgaattacatttgtataaaataatttttatatttgaaatattgactttttatggcactagtatttctatgaaatattatgttaaaactgggacaggggagaacctagggtgatattaaccaggggccatgaatcaccttttggtctggagggaagccttggggctgatgcagttgttgcccacagctgtatgattcccagccagcacagcctcttagatgcagttctgaagaagatggtaccaccagtctgactgg

SEQ ID NO: 7749 - DNA, 398 bp, Homo sapiens
acccactcgtgcggacagagacattttgctcaaaaaaaacagcatgtgcaaatgtgccacaaccattcaaagcaagttgctgcttaagtgttgcccacaacttttcatctgaaaagaggagtaactgaagcaaccaatgctggtggctataattcttgaggatgcaacagtgcgaacggaaaggaaataacccccgaagcctttgcaactaaggacatgtatccttcaaacaagagtttactgggcaacttcttcgtgctgtaattgagtgtgggcgattgctcacaaagatgtttgcaaaatccctgctgtcccctaactcacttatccttgcagggtcactctgtcaacttctcctgtcgattggagaagactgttgctcctcccccttgaatatg

SEQ ID NO: 7750 - DNA, 420 bp, Homo sapiens
aaaaatcacttgcatgggtcttctcattctttttcacccctcttttctttctttttgggagtggataagacttaaaaaccacatacctcaggatacattgccgaatcaaaatttttctgatggtcgcagacttccgtgtctagaaagctgctagctttctactatttaaaatacaaattttgggatatggcaagcctcaccatttcttcactgtatgtagtactgcttgctgggcagcagacagtaaatattaagtaagctcttcaaaatcagtttcattccatcagagcatggtgacatttttttcccctgcttttaatctctaaggtgcaaattttgagggatgttaagtaattttaaaaatttatctactgtctttgtgtttgctgtgagatatctttctggagatagaaaattaag

SEQ ID NO: 7751 - DNA, 397 bp, Homo sapiens
cggggctgtgcacctctctgtctgcagccgtactctctaccctgtctcaacccctgctggaaaagaaaataatggaaacacgatttttttctggagttatttttatttagaattgtgattctagaagaatgaattcatccttttagaaactgttgtaagaagcacgtgacatgaaatcgaccctcttaagccatggttgagcgcgcactccccatcttacgacaggcacccttgtgcagcggtctctagaactcactcactttgcatagctcagggtctgtgctgcttcagcaccatctcctcgcattcctctccccgagctcctgctaaccgcagtctagtctcggtacttgagagttggactcccttaggtttcacatcaggacgagctcatgca

SEQ ID NO: 7752 - DNA, 476 bp, Homo sapiens
  misc_feature (1)...(476): n = A,T,C or G
aattgatcngccttcggnaccgccccggaattcccgttgagacccactcgtccgttccgttgtgccaagcctcggaagtctttgtgtcactgacgcccacttcagctttgtgttgctgaagcattctttggccctatccgagctgtccctctggtggtggtgcctgggggtttgggttccctctgtgttgtgatccaccatctcagcatcggcttccacagcagccatagcaggagaagaaaatgctgggggctctcagggtgcttttaagggcctggccaccgacctgcaaggggtgcgagttgccttcctgtgtggccagaactgatgataaactgtagactcatccctgctgaaactcggctccagagtgctcccaaggctggacagcgtgtgggcactggatcccacctgtgttagcactggcaattgtattctcatttcttcttttattctccaggtggcaaatggtagga

SEQ ID NO: 7753 - DNA, 479 bp, Homo sapiens
  misc_feature (1)...(479): n = A,T,C or G
nacttgatacgccctgcggnaccgcnccggaattcccggtgagatcactcgtccggcatggcccantcctgacggatgagcagaagtcccgaatccaggccatgaagcccatgaccaaggaggagtgggatgcccggcagagcatcatccgcaaggtggtggaccctgagacggggcgcaccaggcttattaagggagatggcgaggtcctagaggaaatcgtaaccaaagaacgacacagagagatcaacaagcaagccacccgaggggactgcctggccttccagatgcgagctgggttgcttccctgagggcccccgctggccaaggcctgtggacgacgctggcggcccagcctgggcaggtttcagggtgccagtgggaagcctgatgggtgctggtggcctttcccccgtggattggtctctggcccagcccagtctcttctcangggcagggggtggaggttggcgtcaccg

SEQ ID NO: 7754 - DNA, 468 bp, Homo sapiens
  misc_feature (1)...(468): n = A,T,C or G
atcgatccccttggaccgcccgaatccgttgaaccactcgtccggactgaacatgtcatagaagccctgttttcagtgagcccatcccaagcatggctttcaaatttggaaaaaaattcatccatctgctttggatagatgcaataacaagcataaagatggattttaatttagttttaatagacatttgagattttagattcaaatagaattatcagtgaacctgaaacgagcaggttctttcaaactttcaaactttactccatctccactgacttctagaatcatcttcaggtggtttggctttgacccatgtgttctcttccttccttcctggctaattatgttaggatgcctctgatcaattggtgtgtccagacctgaggctcatttatagccctgtaaacaaagtggctataggaagaaatataaatttagtgtttttgaggtttggggtaaagtgccaan

SEQ ID NO: 7755 - DNA, 402 bp, Homo sapiens
ccctcggccttgaagctccctcgggctgcggactctgcctcctgggtctgagcattagaaccaggagaggggtgtccctgggcagagccaggggtgcaaacagcctgcagccatctggccttttaagtatagtgtgtcgcatttccgggtaggaaggtagcatttcaagttcaaagagaggtcaagtcatgcaaccatctttcctccagcacttttggggtaaggaggacagtttttgttatggtttaggggaaattttcatgaaatttccaccattaccaatagattactgatgtccatggcaagtgatctgttcttggtattttgttttgttttgttttggtttttaaatgtaatcacccattggtcaggcccaggactggtcaccatgagctctgctag

SEQ ID NO: 7756 - DNA, 487 bp, Homo sapiens
  misc_feature (1)...(487): n = A,T,C or G
tggatgcgnnnnnnngnnaaactgatcccntgcggaacttcgatggtcctcccgggncgacccacgcgtccgctccccggctccgctcggttcctggccaccccgcattccctgcccaggtgccatggccgcattgtaccgccctggcctgcggcttaactggcatgggctgagccccttgggctggccatcatgccgtagcatccagaccctgcgagtgcttagtggagatctgggccagcttcccactggcattcgagattttgtagagcacagtgcccgcctgtgccaaccagagggcatccacatctgtgatggaactgaggctgagaatactgccacactgaccctgctggagcagcagggcctcatccgaaagctccccaagtacaataactgctggctggcccgcacagaccccaaggatgtggcacgagtagagagcaagacggtgattgtaactccttctcagcgggacacggtacca

SEQ ID NO: 7757 - DNA, 397 bp, Homo sapiens
tttgtatcggaggaggagcgggcgccatggcggttttactgtagaccactttaggcgacgtcgtcatcgacttgtacaccgaagaacggtcgcgtgcctgcttgaatttcttgaaactgtgcaaaataaaatattacaattattgccttattcacaatgtacagagggattttatcatacaaactggcgatcctacagggactggccgcggaggagagtctatctttggccaactgtatggtgatcaagcaagcttttttgaggcagataaagtcccaagaattaagcacaagaagaaaggcacagtgtccatggtgaataatggcagtgatcaacatggatctcagtttccaccacatttgcagttacttccttcactgaagtcttgagccactcg

SEQ ID NO: 7758 - DNA, 400 bp, Homo sapiens
  misc_feature (1)...(400): n = A,T,C or G
aatccaccagctacatccagctccctgagagttgttaatggagagaatgttacctctcctgactctggggctcttggcggctgggttctgccctgctgtcctctgccaccctaacagcccacttgacgaggagaatctgacccaggagaaccaagaccgagggacacacgtggacctcggattagcctccgccaacgtggacttcgctttcagcctgtacaagcagttagtcctgaaggcccctgataagaatgtcatcttctccccactgagcatctccaccgccttggccttcctgtctctgggggcccataataccaccctgacagagattctcaaaggcctcaagttcaacctcacggagacttctgaggcagaaattcaccagagcttccagcan

SEQ ID NO: 7759 - DNA, 483 bp, Homo sapiens
  misc_feature (1)...(483): n = A,T,C or G
tggcggnannnaggccaccttgatcccttgcggaacatttgacgtcctcccgggncgacccacgcgtccgacgggctggtggggcggaatgggttggggaagacattgttactgaagatgctggccacccggagtctgcgggttccagcccacatttccctgctgcacgttgagcaagaggttgctggagatgacactcctgccctgcagagtgtgctggagagtgacagtgtgcgagaggatttgctacggagggagcgggagctcactgcccacattgctgctggcagggcggagggctctgaagctgcagagctggcataaatctatgccaaactggaggagattgaggctgacaaggcacctgccagggcatcagtcattctcgctgggcttggctttacccctaaaatgcagcagcagcccacccgggagttctcatgtggctggaggatgaggctggacctggcccgggccctcttt

SEQ ID NO: 7760 - DNA, 405 bp, Homo sapiens
gccgccctgcgtgtcctgctgtcctgcgcccgcggcccgctgaggcccccggttcgctgtcccgcctggcgtcccttcgcctcgggtgctaactttgagtacatcatcgcagaaaaaagagggaagaataacaccgtggggttgatccaactgaaccgccccaaggccctcaatgcactttgcgatggcctgattgacgagctcaaccaggccctgaagatcttcgaggaggacccggccgtgggggccattgtcctcaccggcggggataaggcctttgcagctggagctgatatcaaggaaatgcagaacctgagtttccaggactgttactccagcaagttcttgaagcactgggaccacctcacccaggtcaagaagctagtcatcgctgctgtcaatggc

SEQ ID NO: 7761 - DNA, 406 bp, Homo sapiens
cggacgcgtgggcggacgcgtgggaccgtgaagacagaccatctggtcttgctgggcagcagccacaggtatgcgacctgggagaaaggaaacagtaaggacattttccaagggactgttttagcccttgttgggttttatggatccagttttcattttctcatgtgaatttcagctaccgccggctcccttatttgggattgttatctgtgcaggtctgtgcaaggagatgccccgtgggccccacattacagcattggcgggggcctcaggccacaggtcctcctctgcaaagaggtgggctgatgcctttgtgtggtattgtgccctttggccactgggtggcaccctggctccacaagctaactttgttcctttaaaaaaacaacattttacatgtggaggg

SEQ ID NO: 7762 - DNA, 243 bp, Homo sapiens
tatttctcacatcttttgttatcagagtaccattccaatctcttaacttgcagttgtgtggaaaactgttttgtaatgaaagatcttcattgggggattgagcagcatttaataaagtctatgtttgtattttgaaaaaaaaaaaaaaaaggggcgcccgttttaaaggatccctgggggggcccaagtttacccgggcttgcaacgaaatagttttttccttatagggagccgtattataac

SEQ ID NO: 7763 - DNA, 382 bp, Homo sapiens
ctaaattctaaaacaaaaattggaatacaaaatgcctaataaagaaaaaattcatgtacagaaaagcaaaagataatctactttgttaagataatttgtcactagctggttgaataatgcacagtttttgtttaaggttacacatttatgcctggattaaataacaatagtaaaacttgacaagtcttttgaaaaacagctgctaaacatattgctttctggaatgtaatcattagcaacaaatattctcttattctatacaattgcagaatgctagtggaactttcttgtaggttatttgacaatgaatgttaattgatttattttttaaaaatgtaaaatcctcttatccctttaaggccggtttaggctttcatgtccc

SEQ ID NO: 7764 - DNA, 393 bp, Homo sapiens
aagggggtgggcacactccagggcctcccatgcccctggcccccagggactggaagaggctcccaacccagagtgtccctgtgggaggcaggcagaaggtgacaattgacacgatttcctgcacgcgtcctcctctaccttggaagcagttagaatctaccaggcacagatgaggccgcccttgcctgacggagcttgatgagcagcccttggtctccggttccaggactgagagcccagctgcctctgcccacccttccccaggcctctgccagcctctggctgcacggtcaggccctgccccatggcaggcctgccagagcttggctggggacccctcccgcctctggctccctgatgggctggatgtaacttgtgtcttctagccgctta

SEQ ID NO: 7765 - DNA, 434 bp, Homo sapiens
cccacgcgtacagacggactagccaggctttgaatgctattgccccggaggtgggagctgggagacccctgtgcttggacgggacagggtcgggggacacgcaagatgagccccgcgaccactggcacattcttgctgacagtgtacagtattttctccaaggtacactccgatcggaatgtatacccatcagcaggtgtcctctttgttcatgttttggaaagagaatattttaagggggaatttccaccttacccaaaacctggcgagattagtaatgatcccataacatttaatacaaatttaatgggttacccagaccgacctggatggcttcgatatatccaaaggacaccatatagtgatggagtcctatatgggtccccaacagctgaaaatgtggggaagccaacaatcattgagataactgccta

SEQ ID NO: 7766 - DNA, 491 bp, Homo sapiens
  misc_feature (1)...(491): n = A,T,C or G
gaatgggnnnnnnnnattgatagccttcggaaccgcccggaannccgatggatagcctgcgaacgaccgccggagncaggtcgcctgactcccggcctcttgcgctcctaggggcggagaagggtgcggtctcttcgccctttgtgtcctccttctttcactaacttctggactttccagctcttccgaagttcgttcttgcgcaaagcccaaaggctggaaaaccgtccacgatgaccagcatgactcagtctctgcgggaggtgataaaggccatgaccaaggctcgcaattttgagagagttttgggaaagattactcttgtctctgctgctcctgggaaagtgatttgtgaaatgaaagtagaagaagagcataccaatgcaataggcactctccacggcggtttgacagccacgttagtagataacatatcaacaatggctctgctatgcacggaaaggggagcacccggagtcagtgtcgatatg

SEQ ID NO: 7767 - DNA, 424 bp, Homo sapiens
aaatctcttgattcctagtctctcgatatggcaccttcgtcagtctttgccgaggttccgcaggcccagcctgtcctggtcttcaagctcactgccgacttcagggaggatccggacccccgcaaggtcaacctgggagtgggagcatatcgcacggatgactgccatccctgggttttgccagtagtgaagaaagtggagcagaagattgctaatgacaatagcctaaatcacgagtatctgccaatcctgggcctggctgagttccggagctgtgcttctcgtcttgcccttggggatgacagcccagcactcaaggagaagcgggtaggaggtgtgcaatctttggggggaacaggtgcacttcgaattggagctgatttcttagcgcgttggtacaatggaacaaacaacaagaacacac

SEQ ID NO: 7768 - DNA, 398 bp, Homo sapiens
cctggctccccctgctggtgtctagtgtttttttccctctcctgtccttgtgttgaaggcagtaaactaagggtgtcaagccccattccctctctactcttgacagcaggattggatgttgtgtattgtggtttattttattttcttcattttgttctgaaattaaagtatgcaaaataaaaaaaaaaaaaaaaaaaaaaaaaaaaaaaggggggcccctttaaaaaaacccttgggggggccaaattttacccgggcagggaaagaaaaatttttttccttatggggggccaaataaaaacccccttgggaatttttggaaaaaaccctttttttgggggggggacaaattggcccaacccccccccaaaaattaaaggcttcagggaaaaaaaaag

SEQ ID NO: 7769 - DNA, 400 bp, Homo sapiens
tgaactgtcgttgcagagattgcggtcggctgagactccgcctgcctggcacctaggagcgcatcggagccccgacaccgccgccgccgccatggagtccgagaccgaacccgagcccgtcacgctcctggtgaagagccccaaccagcgccaccgcgacttggagctgagtggcgaccgcggctggagtgtgggccacctcaaggcccacctgagccgcgtctaccccgagcgtccgcgtccagaggaccagaggttaatttattctgggaagctgttgttggatcaccaatgtctcagggacttgcttccaaaggaaaaacggcatgttttgcatctggtgtgcaatgtgaagagtccttcaaaaatgccagaaatcaacgccaaggtggctgaatcg

SEQ ID NO: 7770 - DNA, 424 bp, Homo sapiens
gcgaattgttttaagccaatattttaaggtaaaactcactgaatctaaccatagctgacctttgtagtagaatttacaacttataattacaatgcacaatttataattacaatatgtatttatgtcttttgctatggagcaaatccaggaaggcaagagaaacattctttcctaaatataaatgaaaatctatcctttaaactcttccactagacgttgtaatgcacacttatttttttcccaaggagtaaccaatttctttctaaaacacatttaaaattttaaaactatttatgaatattaaaaaaagacataattcacacattaataaacaatctcccaagtattgatttaacttcatttttctaataatcataaactatattctgtgacatgctaattattattaaatgtaagtcgttag

SEQ ID NO: 7771 - DNA, 400 bp, Homo sapiens
cgcacgcgtccggaactatgacttttgaagctgctttattgttaccttattatagcaggggtcaatgcgacacctgggccagatgtggttaaaaagtgctaccaggtagcagcatgtctaccagaaaaatggtttgaaaattctgccatgatgacatctattccacagctagaaaacttcattcagtttttattgcagtctgcacataaattatctataagtgaattcagggatgaagtcgaataaatatttcttattttggtgaaaataaaagctttgaatcaagcagaatccttcataggagagcatcacctataccatcttaaatcactaattagagaagattgaataaactttattggacaatgctaaaattttaatatagttacactcagttgct

SEQ ID NO: 7772 - DNA, 396 bp, Homo sapiens
gatcacattcattgcacacaagatggatggtcgcctgcagtaccatgcctcagaaaatgttattttccttatttggaaaatggatataatcaaaattatggaagaaagtttgtacagggtaaatctatagacgttgcctgccatcctggctacgctcttccaaaagcgcagaccacagttacatgtatggagaatggctggtctcctactcccagatgcatccgtgtcagctttaccctctgaacttctgatcgaaggtcatccctctccagcttgagtggatcaaagatgacaagggccaatggaaccaagtttgagtcttgccaggtcaatacttgggtcctgagtatggtgactagtatctgttttgttatgtgtgtattattccagccagag

SEQ ID NO: 7773 - DNA, 396 bp, Homo sapiens
ccctaagcctaacagagatgaaggtaggctgggtccagacacggcacctacggagagccacggaccgaagccagagagcctttcctctgcaagtgggactgaaactcttgacagatgctgctcaatctgactggtatagcaggacagttaattccagggacgatatggatgaaaagacaaccctacagctgccaaattcctttgattaaatgtgtgagctggttgataggcatgagtgtgatacttctcaggcaagatgtgttaagaataccggggactgtaggcctatggtaataataaacacgtattttatgaaatgaaaaaaaaaaaaaaggggcggccgttttaaaggatccctggaggggcccaagtttacgcgggcatgcaaggtattat

SEQ ID NO: 7774 - DNA, 408 bp, Homo sapiens
tgcccaaccactctgtggtgaagctacgcaatgcaggccatgcctgttacctccacaagccgcaagacttccaccttgtcctgcttgccttccttgaccatctaccttgaactaacccactcccagctcccagcctggcatgagcttggacagtctggaccgccaccctccctgaaccagggagacagcctctgggattggaggccagaggccagggtcagacccagccaggactcctcatttcatctcacagacacaataaaaaagcatatttgtcctgcctgggaaaaaaaaaaaaaaaaaaaaggggggcccgttttaaagaatccttgggggggcccaactttacccgggctggcaaggaaaaacttttttccttatagggaggcgaataaaaacccacctggg

SEQ ID NO: 7775 - DNA, 397 bp, Homo sapiens
agaacttaaatgactggcttttgtttgcttgcagtgctttcttaattttatggctcttctgggaaactcctgcccttttccacacgaaccttgtggggctgtgaattctttcttcatccccgcattcccaatatacccaggccacaagagtggacgtgaaccacagggtgtcctgtcagaggagcccatctcccatctccccagctccctatctggaggatagttggatagttacgtgttcctagcaggaccaactacagtcttcccaaggattgagttatggactttgggagtgagacatcttcttgctgctggatttccaagctgagaggacgtgaacctgggaccaccagtagccatcttgtttgccacatggagagagactgtgaggacagaa

SEQ ID NO: 7776 - DNA, 478 bp, Homo sapiens
  misc_feature (1)...(478): n = A,T,C or G
nattgataccccttcggaaccgcnccggaattcccgggttggaccacgcttccgaggcaagaactttgccttatcataaacaggaaatgaaaaagggaagggctgtcaggatgggataatttgggaggcttctcattctggcttctatttctatgtgagtaccagcatatagagtgttttaaaaacagatacatgtcatataatttatctgcacagacttagaccttcaggaaacataggttaagcccccttttacaaagaaaaagtaaacatacttcagcatcttggagggtagttttcaaaactcaagtttcatgtttcaatgccaagttcttattttaaaaaataaaatctacttataagagaaaggtgcattacttaaaaaaaaaaaacctttaaagaaatgaaagaagaaccctcttcaaatacttacttgaagactgttttcccctgttaatgagatatagctagatatcgn

SEQ ID NO: 7777 - DNA, 476 bp, Homo sapiens
  misc_feature (1)...(476): n = A,T,C or G
aattgatcgcccttcggnaccgcnccggaattcccgggatggattacgcttccgggaagagttcccctttgctttaggagtgcagactctgcctcaaacttgtgatgaacccaaagcccacaccagcttccaaatctccctaagtgtcagttacacagggagccgctctgcctccaacatggcaatcgttgatgtgaagatgggctctggcttcattcccctgaagccaacagtgaaaatgcttgaaagatctaaccatgtgagccggacagaagtcagcagcaaccatgtcttgatttaccttgataaggcgtcaaatcagacactgagcttgttcttcacggttctgcaagatgtcccagtaagagatctgaaaccagccatagggaaagtctatgattactacgagacggatgagtttgcaattgctgagtacaatgctccttgcagcaaagatcttggaaatgcttgaagac

SEQ ID NO: 7778 - DNA, 394 bp, Homo sapiens
atgcggtgtccaaggttctgcagattgagaaggattgggccatccatagagaggagctggtctatgaactcaaccccttggaccaccgaggccggaccttggaaatacctggcaactctgatcccaatatgatccctgatggggactttaacagctacgtcagggttacagcctcagatccattggacactttaggctctgagggggccttgtcaccaggaggcgtggcctccctcttgaggcttcctcgaggctgtggggagcaaaccatgatctacttggctccgacactggctgcttcccgctacctggacaagacagagcagtggagcacactgcctcccgagaccaaggaccacgccgtggatctgatccagaaaggctacatgcggat

SEQ ID NO: 7779 - DNA, 469 bp, Homo sapiens
  misc_feature (1)...(469): n = A,T,C or G
aatgatacctntgcggaacaatcgatggtcctcccgagncgacccacgcgtccggttattatactgtagtactaagtgattcattactttatccaatatttaatgttaagggattcattacttcagccagtatttaatgtatacctgcattgagccaaacactattcttggtatgacgatacattggtgaacaaaaaaataaccatagttcccactatcatgtagcttgccatctagtaagggagctagacataaataattaggtaaacaagcattatatcaaatatatagcttcaaattgtgacaggtacataattggcataaagggaaagaatagaatagtataagggagaataacatgagggaaacgtacgttaggtggttagggaatctttatatgcagaggtaatatttaagccaagacctgaaggctaaggcggtaccagccatgtgaaaaacattttaggcn

SEQ ID NO: 7780 - DNA, 399 bp, Homo sapiens
atggatccctttgcaacccaggaacaactactgtatggccacttcaaacctgtatatgctgcaagtatgttatactaggtagggtaaataataggtcttagatataggtgcaaataattttcaaatatgggtaaatgctattgggatgtgtaaagtagaaatccattttaaagcgttattgaatccatactaacctgatcattacatatttactaattgatgattactaaaaatgtggacctttgtgaatttccgatgtcatagaagggtgttcttaactggaaaagtcagtagccaacattctgggaagtagaggcctcttcctcactgcttcattggtttaaaataaactccaacagaaaaacatgccatcatctttaatttcctgcatcagctaag

SEQ ID NO: 7781 - DNA, 415 bp, Homo sapiens
cagggatggaggagttttaggtagatgggaaaccctgggtgaggaagagtctgaagaagggatacactgggggggcagaagcaagcttcatcttggggcaggagcaagattccttcagtgggaactttgaaggaagccagtccctggtgggagacattggaaatgtgaacatgtgggactttgggctgtcaccacatgagattaacaccatctatcttggcgggcccttcagtgctaatggcctgaactggcgggcactgaagtatgaagtgcaaggcgaagtgttcaccaaaccccagctgtggccctgatgcccagctgtgggtcctgaaggtacctcccgggtttttacaccgcatgggccccacgtctgtggctctggtacctcccgcttttttacactgcatggatgcca

SEQ ID NO: 7782 - DNA, 469 bp, Homo sapiens
  misc_feature (1)...(469): n = A,T,C or G
cgcacagcncncctgataccncgtagatcccctcgaaanccccgtcgacccacgcgtccgcccacgcgtccgaaaggaagagctgctccctgcacaggatatcaaagctctgtttgtgtctgaggaggagaaaaagctgactcggaaggaggtctacatcaagaatggggataagaaaggcagctgtgagagagatgctcaatatgccccaggctatgacaaagtcaaggacatcttagaggtggtcacccctcggttcctttgtactggaggagtgagtccctatgctgaccccaatacttgcagaggtgattctggcggccccttgatagttcacaagagaagtcgtttcattcaagttggtgtaatcagctggggagtagtggatgtctgcaaaaaccagaagcggcaaaagcaggtacctgctcacgcccgagactttcacatcaacctctttcaagtgctgccg

SEQ ID NO: 7783 - DNA, 465 bp, Homo sapiens
  misc_feature (1)...(465): n = A,T,C or G
tgaannaatgccnggntnnnnnncacaattgagaccactgcattgaccggcactggaaacccgggncgacccacgcgtccgcggacgcgtgggaggtcccccacggcccttcaggatgaaagctgcggtgctgaccttggccgtgctcttcctgacggggagccaggctcggcatttctggcagcaagatgaacccccccagagcccctgggatcgagtgaaggacctggccactgtgtacgtggatgtgctcaaagacagcggcagagactatgtgtcccagtttgaaggctccgccttgggaaaacagctaaacctaaagctccttgacaactgggacagcgtgacctccaccttcagcaagctgcgcgaacagctcggccctgtgacccaggagttctgggataacctggaaaaggagacagagggcctgaggcaggagatgagcaaggatctggaggaggg

SEQ ID NO: 7784 - DNA, 372 bp, Homo sapiens
ttatttgcaagagaaggggtaaaaaaacagcatcagagtgcaacactgaagtgagcttactttaatttgtaagtgaagctgttgctgaacgtgaccactatcgttgctgaaatataaaattatactcactgattgtaatggttgaaattttcctgaataatcattagccaaagatcaactctctaatggtgctaatggcaatctagctaatgtgcaaatttaggaagtcttcagtactaagtacataattttcaaataatattttttaattgtctactttggatgttagctatgtcttgtgagtataaattccaattttaagcactattttgatgcaaaaaaatgaataaaaaatttaatttatgatatgtt

SEQ ID NO: 7785 - DNA, 383 bp, Homo sapiens
gctgatctcgaactcccgacctcaggttgcagtgagcagagatcgcgccactgaattccagcctgggcgatagagcgagtctgtctcagaatgaaatgacgtgacatgacatgacatgatgaaatgaataatgaaatgccgggtgtggtggcacactccagcctgggcaatagagcaagtctctgtctcgaaatgaaatggaatgaaatgaagagaataaatgaaataaatgaaatgaaataataaaatgaataatgaattgccaggtgaaatgaaatgaaatgatgaaatgaataatgaaatgccgggtgcagtggtgcactccaacctgggcaatagagcaggtctccgtctcgaaatgaaatgagatgacatgagatgaa

SEQ ID NO: 7786 - DNA, 371 bp, Homo sapiens
ttcttaagttcctcaagtttcttctttgcagtcttccacaggcatgtgggggtgtttttgttgttgttgttgttttttttgagatagcctgggtgacagagcgagactccgtctcaaaaaaaaaaggcattgcccgcaccaagcttggcatcctgagggtggggaggggaagtggctggggaccgcagtgctatagctgctgagactgagcactcctaacacccgaccctcactggccatgctgggaccggctgtgaacagtacccatctaatacctaacacagccctttcaggcgggggcttgttttcccatttgctcagttgtagacaccaggacacagaattgtctggggttccgagccagttctgcc

SEQ ID NO: 7787 - DNA, 382 bp, Homo sapiens
ggcagcaaatgttgtatacatcctgaagcaaaaagaatgccctgtgcagaagactatctatccgtggtcctgaaccagttatgtgtgttgcatgagaaaacgccagtaagtgacagagtcaccaaatgctgcacagaatccttggtgaacaggcgaccatgcttttcagctctggaagtcgatgaaacatacgttcccaaagagtttaatgctgaaacattcaccttccatgcagatatatgcacactttctgagaaggagagacaaatcaagaaacaaactgcacttgttgagctcgtgaaacacaagcccaaggcaacaaaagagcaactgaaagctgttatggatgatttcgcagcttttgtaaagaagtgctgcaagg

SEQ ID NO: 7788 - DNA, 380 bp, Homo sapiens
gcgccggccgtggaggcgccacgtcccttgcggtttcgggagagaaatcgcttggacttcggggcggcctcggacggccatggcctttaccctgtactcactgctgcaggcagccctgctctgcgtcaacgccatcgcagtgctgcacgaggagcgattcctcaagaacattggctggggaacagaccagggaattggtggatttggagaagagccgggaattaaatcacagctaatgaaccttattcgatctgtaagaaccgtgatgagagtgccattgataatagtaaactcaattgcaattgtgttacttttattatttggatgaatatcagtggagaaaatggagactcagaagaggacatgccagtaaaagttat

SEQ ID NO: 7789 - DNA, 390 bp, Homo sapiens
cgcgccgccgtcgctctccaacgccagcgccgcctctcgctcgccgagctccagccgaaggagaaggggggtaagtaaggaggtctctgtaccatggctcgtacaaagcagactgcccgcaaatcgaccggtggtaaagcacccaggaagcaactggctacaaaagccgctcgcaagagtgcgccctctactggaggggtgaagaaacctcatcgttacaggcctggtactgtggcgctccgtgaaattagacgttatcagaagtccactgaacttctgattcgcaaacttcccttccagcgtctggtgcgagaaattgctcaggactttaaaacagatctgcgcttccagagcgcagctatcggtgctttgcaggaggcaagtgaggct

SEQ ID NO: 7790 - DNA, 457 bp, Homo sapiens
  misc_feature (1)...(457): n = A,T,C or G
aatgatgaccatcgggaannctnttagaatcatcgtaaaccgcaccggaaatcccggaacgacccacgcgtccgcacttagctacgggatattatttaggcatccaaagtttctgaggtgagtggggcccccgagctctgtgaccttatgctccacactaactctggcctagcctccgtttcctcatagaacaaagaacagccaccatgcagctctttctcctcttgtgcctggagcttctcagccctcagggggcctcccttcaccgccaccacccccgggagatgaagaagagagtcgaggacctccatgtaggtgccacggtggcccccagcagcagaagggactttacctttgacctctacagggccttggcttccgctgcccccagccagaacatcttcttctcccctgtgagcatctccatgagcctggccatgctctccctgggggctgg

SEQ ID NO: 7791 - DNA, 418 bp, Homo sapiens
  misc_feature (1)...(418): n = A,T,C or G
taatcataaaataacagcaaattccagacctcaaaaactattatggcctgagcacagctgaaatctagcagagattaactcttctgcctccatgtctgtcacttataattcaggttctgctgttggcttcagaacatgagcagaagaatcgttttatgctagttattgcattcatggttgaaactcaacttagggaaagggttccaatgtattaagcaatgggctgcttctccccaatcctccctaacaattcgttgtgtggacttctcatctaaaaggttagtggcttttgcttgggatcagcgctctctattgatgttcttgctggtctccagacacattcctgttgcattaagacttgaaagacttgtagatgtgtgatgttcangcacaggatgctgaaagctatgttactatt

SEQ ID NO: 7792 - DNA, 324 bp, Homo sapiens
  misc_feature (1)...(324): n = A,T,C or G
naaagatacgctctgcggaaccgcttgggaatccctcgggacgacccacgcgtccggcagcccagctcaagcaagcggtaacccttggacattacttagcagcatatacaacctatgagggctacccaacttttgcagagactgcccgaggggatggatatggcaccttctgaagatgcttttttaaatttaagaataagacacacaaaactctattaaaaaaaaaaaaaagggggggccgttttaaaggatccttgggggggccaaagtttacgcgggcatgcaacgtaaaaattttttccttatagggagtcgaataaaaac

SEQ ID NO: 7793 - DNA, 448 bp, Homo sapiens
  misc_feature (1)...(448): n = A,T,C or G
nttgatcgcattaggaccgattgaaaccctcgggacgacccacgcgtccggtggattcccactttagccatcttgcctggataaatacaccaagaaagaatggtggtttgggccacatgaacatcgcactcttgtcagacttaactaagcagatttcccgagactacggtgtgctgttagaaggttctggtcttgcactaagaggtctcttcataattgaccccaatggagtcatcaagcatttgagcgtcaacgatctcccagtgggccgaagcgtggaagaaaccctccgcttggtgaaggcgttccagtatgtagaaacacatggagaagtctgcccagcgaactggacaccggattctcctacgatcaagccaagtccagctgcttccaaagagtactttcagaaggtaaatcagtagatcacccatgtgtatctgcaccttcg

SEQ ID NO: 7794 - DNA, 198 bp, Homo sapiens
cttcacttaggaacgtaatcgtgtcccctatcctacttccccttcctaattccacagctgctcaataaagtacaagagcttaacagtgaaaaaaaaaaaaaaaaagggggggccgttttaaaggatccttgggggggcccaagtttacccgggcatgcaacgaaatagttttttccttatagggagccgtattataac

SEQ ID NO: 7795 - DNA, 418 bp, Homo sapiens
aattcctacggcgtggctatgactgggactgaactttggagcctgaactatcaaccaaagccgatccgatggactcttccctagccgggctggccggagcctgcggaggccaaactagcaggggtttggcctgacaggactccctcttctccttgagtggctaggacagccgcttgaccttgcatttggagggggagttgggaagcgtttttaacccttggacacaacgaataaggggaagtcagagttgttctcagcagtttcatttccttgaggcgatgccccataaaagggctcctgaagctctttgtgaaggggtctgaaaagggcagatgagggtgtcctttgcggcggatgtggggtttgggacaattgcatgtgattgtcattctttagctgtctgcatcccacagaaact

SEQ ID NO: 7796 - DNA, 415 bp, Homo sapiens
attccaggacacttctgagtacatcatttcatgtcattctgttggcactgatgaagaacccttacagatcagggttcctggaacttctaccagtgccactctgacaggcctcaccagaggtgccacctacaacatcatagtggaggcactgaaagaccagcagaggcataaggttcgggaagaggttgttaccgtgggcaactctgtcaacgaaggcttgaaccaacctacggatgactcgtgctttgacccctacacagcttcccattatgccgatggagatgagtgggaacgaatgtctgaatcaggctttaaactgttgtgccagtgcttaggctttggaagtggtcatttcagatgtgattcatctagatggtgccatgacaatggtgtgaactacaagattggagagaag

SEQ ID NO: 7797 - DNA, 442 bp, Homo sapiens
  misc_feature (1)...(442): n = A,T,C or G
atgatcggaagacaccatgaacggacctgctgtgcgcgttgagtgtgtgaaaagcaatgtccgctcgaccttactaaactgcactgtaaggtgataagaatgagcagatagctcagcttattaacccttgacctgatggagtatacaaagaacatgacccaacgagagcagcatttatatactcgatctttctgggtgctgaaagcccttctgccgagaagaacagacgtacatgtctttgatgataagaacggttttgtgtggaccccacctactgggaggcggagagaatacatcaacaagcgaggcaagaactttccacaggctcacactggatacaggaccagagacaagaagctggcgaagcctatatgggttcccgatggcgcatcgcagctaccgcattggaggggtaagagccgctgacaaatctctttcgggn

SEQ ID NO: 7798 - DNA, 409 bp, Homo sapiens
agcctgagcagtctggtatcaggcttcctaatacctgtttattgtgtgagttaggtgtgttgagtgcttggtcctctggataccatgcagcaggataacacagtggtaaggaactgggaaagaccgtatgtgtatatggaattttgggggctaggttttagtacttaaggataaattgtatatttttaataatcttcagttaataggtgattttggacagtttccaaatacagttgtttttttaatactcacaaaagcaccttgggaagttgagtgttcagtgactgactatgcatttgcataaggactcttatgtaagagtccttatataattcagaaagactggaaacaaagtgatttttaagctacaattctatgttcaatatgtgaattcctaatttccagtaaa

SEQ ID NO: 7799 - DNA, 412 bp, Homo sapiens
gagatccgtgctactttccttcagaccgatttgctgaagttgctggtgaaaaagtgcagcaaagggactggctttagtaaaacgtggctcctccgggacctggaaattttgtccatcatgctgtactcctcaaaaaaggagatcaacgctttggctgagcacggagacctagagctggatgagcgaggggaccgagaggaagaggtggaacggccagtcagcagccctggcgacccagagcagaaaaagctggacccccttgagggcctggatgagcccaccagaatatgtttcttgatggctcatgatgccctcaatgcccctctgcacattctccgggccatatacgaactgcagatgaaaaagaccgattatttcttcctggaggttcagaagaggtttgatggtgatg

SEQ ID NO: 7800 - DNA, 412 bp, Homo sapiens
cgtcggtggggccggcggtcagtctgcggcagcggcagcaagacggtgcagtgaaggagagtgggcgtctggcggggtccgcagtttcagcagagccgctgcagccatggccccaatcaagacacacctgccagggtttgtggagcaggctgaggctctgaaggccaagggagtccaggtggtggcctgtctgagtgttaatgatgcctttgtgactggcgagtggggccgagcccacaaggcggaaggcaaggttcggctcctggctgatcccactggggcctttgggaaggagacagacttattactagatgattcgctggtgtccatctttgggaatcgacgtctcaagaggttctccatggtggtacaggatggcatagtgaaggccctgaatgtggaaccagatggc

SEQ ID NO: 7801 - DNA, 405 bp, Homo sapiens
  misc_feature (1)...(405): n = A,T,C or G
ctggaggatagttggatagttacgtgttcctagcaggaccaactacagtcttcccaaggattgagttatggactttgggagtgagacatcttcttgctgctggatttccaagctgagaggacgtgaacctgggaccaccagtagccatcttgtttgccacatggagagagactgtgaggacagaagccaaactggaagtggaggagccaagggattgacaaacaacagagccttgaccacgtggagtctctgaatcagccttgtctggaaccagatctacacctggactgcccaggtctataagccaataaagcccctgtttacttgnnnaaaaaaaaaaaaaaaaaaaaaaaaaaaaaaaaaaaaaaaaaaaaaaaaaaaaaaaaaaaaaaaaaaaaggggggg

SEQ ID NO: 7802 - DNA, 413 bp, Homo sapiens
  misc_feature (1)...(413): n = A,T,C or G
cgaagggaagggtggggggcagctgcggtggggagctaattgttgtgataatttgtaattgtgacttgttctccccggctggcagcgtagtggggctgccaggccccagctttgttccctggtccccctgaagcctgcaaacgttgtcatcgaagggaagggtggggggcagctgcggtggggagctataaaaatgacaattaaaagagacactagtcttttaaaaaaaaaaaaaaaaaaaaaaaaaaaaaaaaaaaaaaaaaaaaaaannnnnnnnnaaaaaaaaaaaaaaaaanaaaaaaannaaaannanaaaaaaaaaaannnnnnnnnnanaaaaaaaaaaaaaaaaaaaaaaaaaaaaaaattatataaaaaaaaaaaaatattttttttttataaataaaaaaaaa

SEQ ID NO: 7803 - DNA, 423 bp, Homo sapiens
ttgaagcacagtgccaggaaccttgcaaagacacggtgcaaatccatgatatcactgggaaagattgtcaagacattgccaataagggagctaaacagagcgggctttactttattaaacctctgaaagctaaccagcaattcttagtctactgtgaaatcgatgggtctggaaatggatggactgtgtttcaaaagagacttgatggcagtgtagatttcaagaaaaactggattcaatataaagaaggatttggacatctgtctcctactggcacaacagaattttggctgggaaatgagaagattcatttgataagcacacagtctgccatcccatatgcattaagagtggaactggaagactggaatggcagaaccagtactgcagactatgccatgttcaaggtgggacctgaagctg

SEQ ID NO: 7804 - DNA, 394 bp, Homo sapiens
  misc_feature (1)...(394): n = A,T,C or G
agaaggttgttctacaccctaactactcccaggtagatattgggctcatcaaactcaaacagaaggtgtctgttaatgagagagtgatgcccatctgcctaccttcaaaggattatgcagaagtagggcgtgtgggttatgtttctggctgggggcgaaatgccaattttaaatttactgaccatctgaagtatgtcatgctgcctgtggctgaccaagaccaatgcataaggcattatgaaggcagcacagtccccgaaaagaagacaccgaagagccctgtaggggtgcagcccatactgaatgaacacaccttctgtgctggcatgtctaagtaccaagaagacacctgctatggcgatgcgggcagtgcctttgccgttcacgacctgan

SEQ ID NO: 7805 - DNA, 422 bp, Homo sapiens
actagttctagatcgcgagcggccgcccttttttttttaaacatccacagttaaggttgggccagctacctttggggctgaccccctccattgccataacatcctgctccattccctctaagatgtaggaagaattcggatccttaccattggaatcttccatcgaacatactcaaacacttttggaccaggatttgagtctctgcatgacatatacttgattaaaaggttattactaacctgttaaaaatcagcagctctttgcttttaacagacaccctaaaagtcttcttttctacataggtgaagacagcaacatcttcactgaatgtttgaatagaaacctctactaaattattaaaatagacatttagtgttctcacagcttggatatttttctgaaaagttatttgccaaaactg

SEQ ID NO: 7806 - DNA, 393 bp, Homo sapiens
accaatgcataaggcattatgaaggcagcacagtctttcgttaagaagacaccgaagagccctgtatgggggcagcccatactgaatgaacacaccttctgtgctggcatgtctaagtaccaagaagacacctgctatggcgatgcggacagtgcctttgacgttcacgacctggaggaggacacctggtatgcgactgggatcttaagctttgataacagctgcgctgcggctgagtatggtgtgtatgtgaaggtgacttccatccagcactgggttcagaagaccatagctgagaactaatgcaaggctggccggaagcccttgcctgaaagcaagatttcagcctggaagagggcaaagtggacgggagtggacaggagtggatgcgat

SEQ ID NO: 7807 - DNA, 411 bp, Homo sapiens
gactaacgcgtcggttggcgcgcatcaggatctaggctgcaggcaggtcgaggacccgcggccccgccccggctcggcctggcagatagcagaggcagcatgccgtgccgggggggcatgttgctgtaaccagcggcccaggggatgttacggtggacagtgcacctggagggcgggccccggaaggtgaaccatgctgcagtggctgtcgggcatcgggtatactccttcgggggttactgctctggtgaagactatgagacactgcgtcagatagatgtgcacattttcaatgcagtgtccttgcgttggacaaagctgcccccggagaagtctggcattcgtgggcaagctcctgtgggaccctacatgcgctatggacactcaaccgtcctcatagacgacacagtt

SEQ ID NO: 7808 - DNA, 419 bp, Homo sapiens
ttcctgaacaatgaattcccattaatgagcagtcttcagtattaaaaccactgtcttgtcacctcattttgcattactgtcttccgtggatgtttcagttacaactgtaatgttatttatagaacaacattaatccattaaagctaacctatttttcaatatttatgataatctatgtacatatattgtctgtccatatgtatttgtaaataggttgtatataatgtcaggtttgggtcttgggttcaagtgtatatattcctgtaagtttcttaactgcattttgatgaattcacattatgtaactataagaattgtcccaaaagtacctgtacagaaaattgaatattgaaaaattgacaaattgtgtacaaacactaaaaaaaacttggttaaattgtatttgcaataaacaacat

SEQ ID NO: 7809 - DNA, 411 bp, Homo sapiens
aggagctggagacagtttgcaatgatgtcctgtctctgcttgacaagttcctgatcaagaactgcaatgatttccagtatgagagcaaggtgttttacctgaaaatgaagggtgattactaccgctacttagcagaggtcgcttctggggagaagaaaaacagtgtggtcgaagcttctgaagctgcctacaaggaagcctttgaaatcagcaaagagcagatgcaacccacgcatcccatccggctgggcctggccctcaacttctccgtgttctactatgagatccagaatgcacctgagcaagcctgcctcttagccaaacaagccttcgatgatgccatagctgagctggacacactaaacgaggattcctataaggactccacgctgatcatgcagttgctgcgaa

SEQ ID NO: 7810 - DNA, 475 bp, Homo sapiens
  misc_feature (1)...(475): n = A,T,C or G
aattgatcgccntcggaccgcccggaancccctgagacccatgcggccccactgcactccatggttctcttgttcccaacttccataaagaacagaaaactttggtttacacagaacacgggcatctgaggcaggacctcttccctgccctttgatctgactcacacctccacatatgacgtaatcaacccaaatttgacaccaattcactcttttctgcaaagggcatattttgaaacaagggacagcctgagggcggctataatgagaatgttcatgggggttactgggtccctaattctgaacttgcttatgacacccagagtgaatagattcagattcagaaccttctgagaaataacccaaagaaaatttgttacccagccaattcttcgaaagcttaatatcaaaatatatcttttcaagaagaaaatcgttagagagaagaatgtggaggggagagaaatgggtttct

SEQ ID NO: 7811 - DNA, 413 bp, Homo sapiens
  misc_feature (1)...(413): n = A,T,C or G
ctgagactgaccggtagccaggcaggcggacggactcacgcccggacagactgagcaggcgccggagaaccactcacagctgatcactggagattccatcgttagtgctgaggcagtatgggatcacgtcaccatggccaaccgggagttggcatttaaagctggcgacgtcatcaaagtcttggatgcttccaacaaggattggtggtggggccagatcgacgatgaggagggatggtttcctgccagctttgtgaggctctgggtgaaccangaggatgaggtggaggaggggcccagcgatgtgcagaacggacacctggaccccaattcagactgcctctgtctggggcggccactacagaaccgggaccagatgcgggccaatgtcatcaatgagataatgagcactg

SEQ ID NO: 7812 - DNA, 410 bp, Homo sapiens
atcaacgtgtatggatccagtgagcctatccaggagtttgaactcacaacggttggagagaaacctgaagagccgaaggatgaagtggaggtgtcatacgatgatgagaaggagcccgaggttgattaccggacagtgacaatcaatactgaacaaaaagtatctgacttctacgacattgaggagagattaggatctgggaaatttggacaggtctttcgacttgtagaaaagaaaactcgaaaagtctgggcagggaagttcttcaaggcatattcagcataagagaaagagaatatccggcaggagattagcatcatgaactgcctccaccaccctaagctggtccagtgtgtggatgcctttgaagaaaaggccaacatcgtcatggtcctggagatcgtgtcagg

SEQ ID NO: 7813 - DNA, 416 bp, Homo sapiens
  misc_feature (1)...(416): n = A,T,C or G
actgggcaagttctcagagggcactgcaggggattccctgagcctccacagtgggaggccctttaccacctatgacgctgaccacgattcaagcaacagcaactgtgcagtgattgtccacggtgcctggtggtatgcatcctgttaccgatcaaatctcaatggtcgctatgcagtgtctgaggctgccgcccacaaatatggcattgactgggcctcaggccgtggtgtgggccacccctaccgcagggttcggatgatgcttcgatagggcactctggcagccagtgcccttatctctcctgtacagcttccggatcgtcagccaccttgcctttgccaaccacctctgcttgcctgtccacatttaaaaataaaatcattttagccctttaaaaaaaaaaaaaaaaaaaaan

SEQ ID NO: 7814 - DNA, 391 bp, Homo sapiens
  misc_feature (1)...(391): n = A,T,C or G
gccaagatgctgaattatcatggacactttcactttttttgacacagtgctgtaaaagaataaaggatactgttcagaaattggcctccgaccacaaagacatccacagcagtgtttctcgggttggaaaagccattgataagaattttgattctgacattagcagtgtgggaatagatggctgctggcaggcagacagccaaaggcttctcaatgaggtgatggtggagcacttctttcgacaaggaatgctggatgtggctgaggagctctgtcaggaatctggtctttctgtacacccaagtcataaggaaccatttgtggagttaaatagaatattagaggcattaaaggtcacagttctgagacctgctctggagtgggcagtgtn

SEQ ID NO: 7815 - DNA, 399 bp, Homo sapiens
  misc_feature (1)...(399): n = A,T,C or G
accgggccgctggtcccttatgtgggagagaggtgaaaagcgtcccccactacggggctggcagtgcatgtgcttgagttaaatgtgcagggcagacagagccagaagggcctgtacccaggggctcgtcccctcctccggtttcccagacaaatccagacaccagcctttaaggtggccttgggaggagagggccaggctgtcctgggtgtgagagaactagatagagcctcccaaccctgatttagaaatgcattccttattttgtctagaaattaataaatgaactagcttgttttgacaggtttatttcacatcctatgaatgtatgtaaataaactgtacataggtccatccacataaaatatcttttaataacatatcaacatttgtgtaaan

SEQ ID NO: 7816 - DNA, 393 bp, Homo sapiens
  misc_feature (1)...(393): n = A,T,C or G
ctcttccctcattaacttcaggtaagttgttaaagcctatgttctggagttcacagtgttgcttttgataatgacaaaacaagtttagtcgtcacaatctgtcatcttgtttataaaacagtcaaaccatatgcaacgcccttctgcatgggggattttgttttgttccttgaacctactggctcgcttcatccaatgcctacagatagtaaataaagaggtccatttttttaggtacattaaatactacacattttgggaggggaggtagagtaggagggtggtgggcagaaggcagccgggccatttttttggcaactatttcaatatgaaaaaaaagatggtattgctctcataaaagcaattgatattcattgttctcaaccaactgan

SEQ ID NO: 7817 - DNA, 401 bp, Homo sapiens
  misc_feature (1)...(401): n = A,T,C or G
cggacgcgtgggctcggagctccgggcactcagacatcatgagttggtccttgcacccccggaatttaattctctacttctatgctcttttatttctctcttcaacatgtgtagcatatgttgctaccagagacaactgctgcatcttagatgaaagattcggtagttattgtccaactacctgtggcattgcagatttcctgtctacttatcaaaccaaagtagacaaggatctacagtctttggaagacatcttacatcaagttgaaaacaaaacatcagaagtcaaacagctgataaaagcaatccaactcacttataatcctgatgaatcatcaaaaccaaatatgatagacgctgctactttgaagtccaggaaaatgttagaagaaattatgaan

SEQ ID NO: 7818 - DNA, 483 bp, Homo sapiens
  misc_feature (1)...(483): n = A,T,C or G
ntttgtcgccttcggtaccgtagtagaacttccgggtcgacccacgcgtccgcccaatcttgctcatctaaataaggaaagacttggtgtatagtgtgatggtttattcttaaggattaagacatttttggtacttgcatttgacttacgatgtatctgtgaaaatgggatgatattgacaaatggagactcctacctcaatagttaatggaataataagaggctactgttgtgtctaatgttcttcaaaaaagtaatatcctcacttggagagtgtcaaatacatactttgaggattgactttatataaggtgccctgtagaactctgttacacatatttttgacccatattatttacaatgtcttgataattctacctttttagagcaagaatagtatctgctaatgtaagggacatctgtatttaactcctttgtagacatgaatttctatcaaaatgttctttgcactgtaacagagat

SEQ ID NO: 7819 - DNA, 399 bp, Homo sapiens
  misc_feature (1)...(399): n = A,T,C or G
aaggctggaacggaactggttaacttcttgagctatttcgtggaacttggaacacagcctgccacccagtgaagtgtccagaccattgtcttccaaccccagctggcctctagaacacccactggccagtcctagagctcctgtccctacccactctttgctacaattaaatgcgtgaatgaatccngaaaaaaaaaaaaaaaaaaaaaaaaaaaaaaaaaaaaaaaaaaaaaaaagggggggaattttaaaaaaatattggggggggaaaaaaataagggggggggggaaaaaaaagatttttttttttttgggggggataaaaaaaaatgggggggggttttttgggggggacccttttttggggggggggacaattgggaaaaccccacccaaaaa

SEQ ID NO: 7820 - DNA, 396 bp, Homo sapiens
cgacggggctgtgtgtgctgggcctggctcgcggcgaaccgagatggcagagcagtcggacgaggccgtgaagtactacaccctagaggagattcagaagcacaaccacagcaagagcacctggctgatcctgcaccacaagggggtacgatttgaccaaatttctggaagagcatcctggtggggaagaagttttaagggaacaagctggaggtgacgctactgagaactttgaggatgtcgggcactctacagatgccagggaaatgtccaaaacattcatcattggggagctccatccagatgacagaccaaagttaaacaagcctccggaaactcttatcactactattgattctagttccagttggtggaccaactgggtgatccctgcca

SEQ ID NO: 7821 - DNA, 396 bp, Homo sapiens
aaagcgctgagagctcgcaggttcattaaagaaggcaaagcactggtttctctccttagaaaagtaggtttcttggcttgatgtagactggcttgctttgatttttagtgaagggaatgtacgtaaaaacaaaatagggcttggctggtcaaaggagacaagcaggatggatggatggatggatgaatagatagatggtgtttgcatgtaaattgcagagaaaacaaaaccaaagctgattggaaacaattaattgtgggtgtctgagggggaaggtcgcagctttgggcagctttgagaagcggtacaagagctctgtgcctgtgtgtccagccctggagccagccagtgcatttattttaagctcttagaagcaactccttggcccaggaatgg

SEQ ID NO: 7822 - DNA, 399 bp, Homo sapiens
ctcacacaagacaccgcggatggcttgcaagacgcctttcttacgttctttttattcaagagcgagatgtgcataagggcatgtttgccaccaatgtgactgaaaatgtgcttgaacagcagtagagtacaagaggcaattgcagaagtggctgctgaattaaaccctgatggttctgcccaccagcaatcaaaagccgttaacaaagtgaaaaagaaagctaaaaggattcttcaagaaatggttgccactgtctcaccggcaatgatcagactgactgggtgggtgctgctaaaactgttcaacagcttcttttggaacattcaaattcacaaaggtcaacttgagatggttaaagctgcaactgagacgaatttgccgcttctgtttctaccagtt

SEQ ID NO: 7823 - DNA, 376 bp, Homo sapiens
  misc_feature (1)...(376): n = A,T,C or G
ttgtggtcctggccaagagctacaatgagcagcgcatcagacagaacgtgcaggtttttgagttccagttgactgcagaggacatgaaagccatagatggcctagacagaaatctccactattttaacagtgatagttttgctagccaccctaattatccatattcagatgaatattaacatggagggctttgcctgatgtctaccagaagccctgtgtgtggatggtgacgcanaggacgtctctatgccggtgactggacatatcacctctacttaaatccgtcctgtttagcgacttcagtcaactacagctgagtccataggccagaaagacaataaatttttatcattttgaaataaaaaaaaaaaaaagg

SEQ ID NO: 7824 - DNA, 483 bp, Homo sapiens
  misc_feature (1)...(483): n = A,T,C or G
atggtcnnnttttgaagccatgggaanccntgcgaaaccgcggcggacccacgcgtccgcggacgcgtgggcggacgcgtggggtatagacgaggtttcaccatgttggtcaggctggcctcaaactcctgaccttgtgatctacctgcctcggcctcccctagtagctgggactacaggcatgtaccaccatgctcagctaatttttttttttttaaaataataataaagacaaggtctcactatgttgcccaggctggtcttgaactcctgaactcaagtgatcctcctgcctcagcctcccaaagggctaggattacagccatgagtcaccacgcctgggctgggctatttttttttaaccttttatagagatggggatctttgtatgttgcccaggctgggttaaactcctggcctaaaacaatattctggccttgctcccttgagcactgggatacagggctgaacccacccccccgg

SEQ ID NO: 7825 - DNA, 431 bp, Homo sapiens
tggaaatacaacacatgttaaatcttaagtacaagggggaaaaaataaatcagttattgaaacataaaaatgaataccaaggacctgatcaaatttcacacagcagtttccttgcaacactttcagctccccatgctccagaatacccacccaagaaaataataggctttaaaacaatatcggctcctcatccaaagaacaactgctgattgaaacacctcattagctgagtgtagagaagtgcatcttatgaaacagtcttagcagtggtaggttgggaaggagatagctgcaaccaaaaaagaaataaatattctataaaccttcaaaaaaaaaaaaaaaaaaaaaaaaaggggggggcctttaaaaaaaacccttggggggcccaaatttacccggggagggaaaattatatctttttccttataagg

SEQ ID NO: 7826 - DNA, 427 bp, Homo sapiens
  misc_feature (1)...(427): n = A,T,C or G
ccggacagaggatcgcctcgctggcctagtctctcctcccgtacggcgccggaatcccagctccacttaccaggccgcgggtaccccgccgtcccccccgactcccgccaccccgctctctcaggctcttcaggatccaagtccgtaggccctttaaggggtctagttgccgtttgcgaggccctgggactttggtcccagacagcggggatccggatggcttccgtgcggatccgagaggccaaggagggagactgtggagatatcctgaggctgattcgggtgaagactgcaggccggagctagccgaattcgaaaaactctcggatcaggtgaagatcagtgaagaagccctgagagcagatggctttggagacaatcctttctatcactgtttggtagcagagattcttccagcgcccgggan

SEQ ID NO: 7827 - DNA, 383 bp, Homo sapiens
  misc_feature (1)...(383): n = A,T,C or G
ttcttggagcttccacaaacttaaaaccatgaaacatctattattgctactattgtgtgtttttctagttaagtcccaaggtgtcaacgacaatgaggagggtttcttcagtgcccgtggtcatcgaccccttgacaagaagagagaagaggctcccagcctgaggcctgccccaccgcccatcagtggaggtggctatcgggctcgtccagccaaagcagctgccactcaaaagaaagtagaaagaaaagcccctgatgctggaggctgtcttcacgctgacccagacctgggggtgttgtgtcctacaggatgtcagttgcaagaggctttgctacaacaggaaaggccaatcagaaatagtgttgatgagttaaataacn

SEQ ID NO: 7828 - DNA, 417 bp, Homo sapiens
  misc_feature (1)...(417): n = A,T,C or G
ccgaggcttgcagctgcctggctgcctggccctggctgccctgtgtagccttgtgcacagccagcatgtgttcctggctcctcagcaagcacggtcgctgctccagcgggtccggcgagccaacaccttcttggaggaggtgcgcaagggcaacctggagcgagagtgcgtggaggagacgtgcagctacgaggaggccttcgaggctctggagtcctccacggctacggatgtgttctgggccaagtacacagcttgtgagacagcgaggacgcctcgagataagcttgctgcttgagaagaagtaactgngctgagggtctgggtacgaactaccgagggcatgtgaacatcacccggtcaggcattgagtgccagctatggaggagtcgctacccacataagcctgaaatcacg

SEQ ID NO: 7829 - DNA, 393 bp, Homo sapiens
cgccctcccgccgacgaccgccctcgctctctcgcgctacttttccgccgcccgcggacctccgtcgggtctctcgttagaccacggtctggtctgcagctacccgccttcgtctgcgagtttgcgactcgcggaccggcgtccccggcgcgaagaggctggactcggattcggtgcctgagcaatggctgccatccggaagaaactggtgattgttggtgatggagcctgtggaaagacatgcttgctcatagtcttcagcaaggaccagtttccacaggtgtatgtgcccacagtgattgagaactatgtggcacatatcgaggtggatggaaagcatgtacagttggctttgtgggacacagatgggcaggaagattatgatcgcctgag

SEQ ID NO: 7830 - DNA, 422 bp, Homo sapiens
acggccggggcagaagttgagaccacccagcagaggagctaggccagtccatctgcatttgtcacccaagaactcttaccatgaagaccctcctactgttggcagtgatcatgatctttggcctactgcaggcccatgggaatttggtgaatttccacagaatgatcaagttgacgacaggaaaggaagccgcactcagttatggcttctatggctgccactgtggcgtgggtggcagaggatcccccaaggatgcaacggatcgctgctgtgtcactcatgactgttgctacaaacgtctggagaaacgtggatgtggcaccaaatttctgagctacaagtttagcaactcggggagcagaatcacctgtgcaaaacaggactcctgcagaagtcaactgtgtgagtgtgataaggctgct

SEQ ID NO: 7831 - DNA, 496 bp, Homo sapiens
  misc_feature (1)...(496): n = A,T,C or G
aggatgtgtccgccgtcncccccaactgacgcctgcggtagcagcccgtaanncccgggncgacccacgcgtgcgcaccaatactttaatgtagagcttatccagcctggagctgtcaaggtctactcctattacaacctggaggaaggctgtacccggttctaccatggggaaaaggaggatggaaagctgaacaagctctgccgtgatgaactgtgccgctgtgctgaggagaattgcttcatacaaaagtcggatgacaaggtcaccctggaagaacggctggacaaggcctgtgagccaggagtggactatgtgtacaagacccgactggtcaaggttcagctgtccaatgactttgacgagtacatcatggccattgagcagaccatcaagtcaggctcggatgaggtgcaggttggacagcagcgcacgttcatcagcctcatcaagtgcagagaagccctgaagctggaggagaagaaacactacctca

SEQ ID NO: 7832 - DNA, 399 bp, Homo sapiens
cccacgcgtccgcccacgcgtccgagcagataaatgacaaagagcgagtggcagctgcaatggaaaaccccaacttacgggaaattgtggaacagtgtgtccttgaacctgactgatagctgttttaagagccactggcctgtaattgtttgatatatttgtttaaactctttgtataatgtcagagactcatgtttaatacataggtgatttgtacctcagagcattttttaaaggattctttccaagcgagatttaattataaggtagtacctaatttgttcaatgtataacattctcaggatttgtaacacttaaatgatcagacagaataatattttctagttattatgtgtaagatgagttgctatttttctgatgctcattctgatacaacta

SEQ ID NO: 7833 - DNA, 425 bp, Homo sapiens
acgtgctctttcgtaataagacagaggtggacatttataactcaaaccccctgatctgccaggcactgctgaaagtgtgcttcggcatccaactggtgaatgccatcacacgggtggagcgcgccctccccaagctgactgtgcccttactgctgctccagggctctgccgaacttctatgagacaccaaaggggcctacctgatcatggagttaggcactagccaagacaagactctcaagatttatgaaggtgcctaccatgttctccacaaggagcttcctgaagtcaccaactccgacgtgcatgaaataaacatgagggtctatcaaaggacagccacggcaagaactgcgtacccaccctgaatgcgttgcacggagcccggctcatggtctggcggatgcaggaagaggaaggacaga

SEQ ID NO: 7834 - DNA, 304 bp, Homo sapiens
acagcatcggtgtctgctgctgtgtccccaggtcttgtgtgggtggcacagatctgggcagttagatagtgctctgtgcctaaggtgaagccacactagggtgaagcctcacttccctgtttgagcaatgcagtgcctgctgcccgtgtgcatgaaggtacagccattcagataagtggaactattgagttacataaagaaaatagatttgcatttgtcaggcagacgtttatacaacaccacggtgcttttatacattgtgcttattttaataaaactgaaattctaaaaaaaaaaaaaaaag

SEQ ID NO: 7835 - DNA, 426 bp, Homo sapiens
atcgttgccaggtctccggcaagaatatgcagccaccacgtctcggcgcagttctggttcatcttgcaattctacaagacggggtacttttagtgatcaggagcttgatgcacaaagtttagatgatgaagatgacaatatgcatcatgcagtataccctgctgttaacaggttttcaccatcaccacgcaattcacctcgaccgtcacctaagcagtcacccagaaattcacctcgttcacgatctcctgctcggggaatagaatatagtagagtgtccccacagcctatgattagccgcttacagcaacctcgcctttcacttcaaggccatcccacagatttacagacaagcaatgttaaaaatgaaggtaaaatagcagattttactaataattagacagtttctgctagcctgtgtaacat

SEQ ID NO: 7836 - DNA, 403 bp, Homo sapiens
gcgccactttggcctcccggagtgctgggattacaggtgtaagccaccacgctcggccaataaatttattaatattatattaagatgaactccaataagacctttggcatgtcagtttaacataagtgaaagggcctttttatgccttttgagccttccttcaccttccatccaacacacacatgtaccagtaaattgcagatgccatttctgggctttgcacactttctctggctttccatgttctgctcctgaccaactctcttgccacctgactcctcccagcctggctgcctgtgttgctttcagtagctgggccattgctgggaacactctgttgcctccctgtgctgtcctctgctgtgccattgtgtggaatgccctgcagcctgcctcaacacaa

SEQ ID NO: 7837 - DNA, 401 bp, Homo sapiens
  misc_feature (1)...(401): n = A,T,C or G
acctggcctgggggctgaggaggatgcaccccatgcccagaggagtctttgtcactgggcctgcgcccatgccaaggccaagccaaacacacccaggagactacgggagggagccaggagagctgattacaggccggagtctgtggggtgggtggggcaggcaggcccctaactccacacgtccagggagtagcggcccctggcagcacagcccagggcctgcatgggggcaccgggctccatgcctctggaggcctctggccctcggtggctgcacagaagggctctttctctctgctgagctgggcccagcccctccacgtgatttccagtgagtgtaaataattttaaataacctctggcccttggaataaagttctgttttctgtaaaaaaaaaaan

SEQ ID NO: 7838 - DNA, 361 bp, Homo sapiens
  misc_feature (1)...(361): n = A,T,C or G
agttttgagcacttgctataagttttttaattaacatcactagtgacactaataaaattaacttcttagaatgcatgatgtgtttgtgtgtcacaaatccagaaagtgaactgcagtgctgtaatacacatgttaatactgtctttcttctatctgtagttagtacaggatgaatttaaatgtgtttttcctgagagacaaggaagacttgggtatttcccaaaacaggtaaaaatcttaaatgtgcaccaagagcaaaggatcaacttttagtcatgatgttctgtaaagacaacaaatccctttttttttctcaattgacttaactgcatgatttctgttttatctacctctaaagcan

SEQ ID NO: 7839 - DNA, 413 bp, Homo sapiens
  misc_feature (1)...(413): n = A,T,C or G
acagaaaccaagaaacatggtaattactaaattatgaggctttgctttttgtttgcttttaagtagaaaaacatgttggcaacattgagttttggagttgattgagataatatgacttaactagttttgtcattccatttgttaaagatacagtcaccaagaatgttttgagttttttgaaagaccccaatttaagccttgcttatttttaaattatttccattcagtgatgttggatgtatatcaattatttagtaaataatctcaataaattttgtgctgtggcctttaaaaaaaaaaaaaaaaaaaaaaaaaangggggggggcctttttaaagaatccttgggggggccaaattttacggggggtgggaaggtaatatttttttctttatgggggggcgatttaaaggg

SEQ ID NO: 7840 - DNA, 398 bp, Homo sapiens
attctagattaaatatcaggactgatttcctggtgggaggattatggtccagttttaccaaagaaccaattccttgaatgttggaatctaactttttatattgtcattattattgttgtttttaaacggttctttgtcttttctgttttatttttctcaagctgctttcaggagctagcagaaaataactcaaagttgaagactctggaagattttgctttaacctaactcgcattgatgtattaaatttataattttagcattcccaatagatcctatcattccttaaacataataccctttgtcttggagtagaatactaagttagagttagtggatttctagtttatgagaggagctcaaaactataatctttaacaaattgaaaaatgaaatag

SEQ ID NO: 7841 - DNA, 349 bp, Homo sapiens
acccacgcgtccgcacaaacctgaaaagatgttgtgtcttgtgtttttgtcttatttttgttggagccactctgttcctggctcagcctcaaatgcagtatttttgttgtgttctgttgtttttatagcagggttggggtggtttttgagccatgcgtgggtggggagggaggtgtttaacggcactgtggccttggtctaacttttgtgtgaaataataaacaacattgtctgatagtaaaaaaaaaaaaaaaaaagggcggccgttttaaaggatccctgggggggcccaagtttacccgtgcatgcaacggaatagttttttccttatagggagccgttttataac

SEQ ID NO: 7842 - DNA, 458 bp, Homo sapiens
  misc_feature (1)...(458): n = A,T,C or G
nattgaaangcctgcggnaccgcnccggaattccattgacgactctcgcgaccgctaatatagaatcaaactgctcatttaatcccctttttgtctgattctatattagctgatttctattcttaaagcttaaattaggggtcaaaatcagagcctagttaaaaaagagacaaaggggggattaaatgagcagtttgagttacattattttattgtattaaatttatttgatttatattgtcatgttctcttgccagagagaatctgtaggaaaatactgtatcttgtatactgatcattggctttttctagaaaaactgtctctgattctggacaaagctcagttatagttacgagaaagatatggtacagggaggaaaatactgccttttttttttttttaaggaaattttcaaactaaataaaattgccaaaatgatgtataaagggtttttttn

SEQ ID NO: 7843 - DNA, 258 bp, Homo sapiens
acccacgcgtccgcacaaacctgaaaagatgttgtgtcttgtgtttttgtcttatttttgttggagccactctgttcctggctcagcctcaaatgcagtatttttgttgtgttctgttgtttttatagcagggttggggtggtttttgagccatgcgtgggtggggagggaggtgtttaacggcactgtggccttggtctaacttttgtgtgaaataataaacaacattgtctgatagtaaaaaaaaaaaaaaaaagg

SEQ ID NO: 7844 - DNA, 397 bp, Homo sapiens
  misc_feature (1)...(397): n = A,T,C or G
ggtctcttaatttgattgtggggttctttttgtggggaggggtggtataacttttcttcagaagacccatgtgggacacctccaaggctggcctcctcataagccctgcctacaccatgttccagtaaacctctccaccaaggaactgtgttcagctgccacaggcctggaggagtttcctggcctgtcacgtgaggtttgatcagtaaaccagtgcacgcttggccacccttgccatttctgctcccagagtctcaggctccccttctgacccagtgtgcgcccttgactgctttctttgctgcccttccagggagctgcccccctggtagggcatgtgcctgtttccctctcagcctggaggctggctggacatctcctagggtcactgtgcctn

SEQ ID NO: 7845 - DNA, 370 bp, Homo sapiens
ttttatcattgcacatccagatactgttttaggtgagctgagctatttcgttactgagaaaatgataagtatccatttagaatgttcatgtaatgtttggagagttttgtattatggattcaacttatatataatatatataaggtacataatatgcaattatatatctgatatatattatatataaaataatatacctaagtgtttttttaaactatgggagtgtattataaaatcaataataatatgcaaacagttgtgcctgtgtatttgaactacatacaggtatgttgttattaacagatatatttaacatttatttactatgggagccatttcctaattgaattgcgtaattactagaccagag

SEQ ID NO: 7846 - DNA, 435 bp, Homo sapiens
  misc_feature (1)...(435): n = A,T,C or G
naatgataccatgcgaaccctagagctccctgggtcgacccacgcgtccggaaactcagataagaccaatttaagtttcaagtttaagacaagggagggtcaatttccatatttatttattattattattatcattattatttgagatggagtctcactctgtcacccaggctggagtgcagtggcacgatctcagctcactgccacctctgcctcccaggttcaagcaattctcctgtctcagcctcccgagtagctgagactacaggcgcctgccaccatgcccagctaatttttttttttttttttttcaaaaaaaagggggtttccccttttggtgaaggagggtctaaacttccggccctcgggggacccccccccctggccctcccaaggggtggaaattacgggcttgaccccccaccccccaccttt

SEQ ID NO: 7847 - DNA, 395 bp, Homo sapiens
  misc_feature (1)...(395): n = A,T,C or G
ttggcttgggagcatgagaggtgagcccagggctatttctgttccaggccccggcagcactgctacttgggaggagccacttcacctttgtattagttattaaaaaatataatttgggctgggcgcagtggctcacgcctgtaatcccagcactttgggagtccgaggcatgcggatcacttgaggtcaggagttcgagaccaccctggccaatatggtgaaaccccatctctactaaaaatacaacaaagttagccgggcgtggtggcaggcgtctgtaatcccagctgcttgggaggctgaggcaggagaatcacttgaaccctggaggtggcggttgcagtgagcacagatcatgccactgcactccagcctgggcaacaaaacgagacttn

SEQ ID NO: 7848 - DNA, 416 bp, Homo sapiens
  misc_feature (1)...(416): n = A,T,C or G
caacttttgagtcgtggcgtgcgtctaactgagttgctgaagcaaggacagtattctcccatggctattgaagaacaagtggctgttatctatgcgggtgtaaggggatatcttgataaactggagcccagcaagattacaaagtttgagaatgctttcttgtctcatgtcgtcagccaacaccaagccttgttgggcactatcagggctgatggaaagatctcagaacaatcagatgcacagctgaaagagattgtaacaaatttcttggctggatttgaagcttaaactcctgtggattcacatcaaataccagttcagttttgtcattgttctagtaaattagttccatttgtaaaagggttactctcatactccttatgtacagaaatcacatgaaaaatanaggttccatt

SEQ ID NO: 7849 - DNA, 408 bp, Homo sapiens
cagcaaacagattgagggattgttgtggtttttgactaaggtgtatgttagtttcatcagaaacttaaaacatagactgatcactcagaaattaaagtccgttttactgtgaatatagcaatatagtactggacacagtactggtgaaactgaggagagcattgcttgtaaaatcctgagtttccataaggaaaatgaaaactccttttaaaaataaaatctgaggagtgtacaataagcatatgctttgactttcctttgctgtggaggtttttggtttttcattgatgataaacgactacagacttagtagtggagaaatggtgtcctctagtggaagaaatagtaggctcagctattcagatgcagagcactgcagcatccagcctttcaaagctgactcttctt

SEQ ID NO: 7850 - DNA, 414 bp, Homo sapiens
tttaaagtgatctcagaggggcccatggattaacgccctcatcccaaggtccgtcccatgacataacactccacacccgccccagccaacttcatgggtcactttttctggaaaataatgatctgtacagacaggacagaatgaaactcctgcggctctttggcctgaaagttgggaatggttgggggagagaagggcagcagcttattggtggtcttttcaccattggcagaaacagtgagagctgtgtggtgcagaaatccagaaatgaggtgtagggaattttgcctgccttcctgcagacctgagctggctttggaatgaggttaaagtgtcagggacgttgcctgagcccaaatgtgtagtgtggtctgggcaggcagacctttaggttttgctgcttagtcctgaggg

SEQ ID NO: 7851 - DNA, 389 bp, Homo sapiens
accacgcgtacacccacgcgtacgtgagaaattccaccacaagacggcggaccaccgcggcttcatggggactcggacctataccgagggaggaatgatgatgcaccggacaggcctctacaactactacgaccacgagaaggaaaagctgccaatcgtggagatgcccctggcccacaagctctccagccttatcatgctcatgccccatcacatggagcctctcgagcgccttgaatagctgataaccaaagagcacctgatgatctggatggggaagatgcagaacaaggctggcgccatctccttgccctaggggggggtggaggcgacccatgagctgcagaaacacctggctgggctgggcctgactgacgccattgacaaga

SEQ ID NO: 7852 - DNA, 390 bp, Homo sapiens
tgtgtgagcgtgtgtgcgtgcgtctactttgtactggttagaacacagcccatgtgctctgcatggacgttactgatactctgtttagcttgagtttcgaaaagcaggcaagatgtccagcacaccacatgaccccttctattcttctcctttcggcccattttataggaggcatacaccatacatggtacagccagagtaccgaatctatgagatgaacaagagactgcagtctcgcacagaggatagtgacaacctctggtgggacgcctttgccactgaattttttgaagatgacgccacattaaccctttcattttgtttggaagatggaccaaagcgatacactatcggcaggaccctcatcccccgttactttagcactgtgtt

SEQ ID NO: 7853 - DNA, 411 bp, Homo sapiens
cccacgcgtccggacccacgcgtccggtttcttggagcttccacaaacttaaaaccatgaaacatctattattgctactattgtgtgtttttctagttaagtcccaaggtgtcaacgacaatgaggagggtttcttcagtgcccgtggtcatcgaccccttgacaagaagagagaagaggctcccagcctgaggcctgccccaccgcccatcagtggaggtggctatcgggctcgtccagccaaagcagctgccactcaaaagaaagtagaaagaaaagcccctgatgctggaggctgtcttcacgctgacccagacctgggggtgttgtgtcctacaggatgtcagttgcaagaggctttgctacaacaggaaaggccaatcagaaatagtgttgatgagttaaataacg

SEQ ID NO: 7854 - DNA, 417 bp, Homo sapiens
  misc_feature (1)...(417): n = A,T,C or G
tggggcagaacctctgctggtaccagacagccccagttcattagccgggactggcacggtgtgccagggcaagtggacgcagccatggctggccgcatctacatctcaggcatggcaccccgcccctccttggccaagaaacaaaggtttaggcatcgcaaccgcaaaggctaccgttcacaacgaggccacagccgtggccgcaaccagaactcccgccggccatcccgcgccatgtggctgtccttgttctccagtgaggagagcaacttgggagccaacaactatgatgactacaggatggactggcttgtgcctgccacctgtgaacccatccagagtgtcttcttcttctctggagacaagtactaccgagtcaatcttcgcacacggcgagtggacactgtggaccctccn

SEQ ID NO: 7855 - DNA, 431 bp, Homo sapiens
cagctccgggcgtggggtgaaatctcttgattcctagtctctcgatatggcacctccgtcagtctttgccgaggttccgcaggcccagcctgtcctggtcttcaagctcactgccgacttcagggaggatccggacccccgcaaggtcaacctgggagtgggagcatatcgcacggatgactgccatccctgggttttgccagtagtgaagaaagtggagcagaagattgctaatgacaatagcctaaatcacgagtatctgccaatcctgggcctggctgagttccggagctgtgcttctcgtcttgcccttggggatgacagcccagcactcaaagagaagcgggtaggaggtgtgcaatctttggggggaacaggtgcacttcgaattggagctgatttcttagcgcggtggtacaatggaacaaaca

SEQ ID NO: 7856 - DNA, 385 bp, Homo sapiens
ccgtcctgcgcggttgttctctggagcagcgtttttttatctccgtccgccttctctcctacctaagggcgtgccgccacccgatggaagagtcgatggacatggacatgagccccctgaggccccagaactatcttttcggttgtgaactagaggccgacaaagattatcactttaaggtggataatgatgaaaatgagcaccagttatctttaacaacggtcagtttaggggctggtgcaaaggatgagttgcacattgttgaagcagaggcaatgaattacgaaggcagtccaattaaagcaacactggcaactttgaaaatgtctgtacagccaacggattcccttgggggctttgaaataacaccaccagtggtcttaag

SEQ ID NO: 7857 - DNA, 386 bp, Homo sapiens
cccacacgaacgggcacacgtgagcgaactttctttttaatacatcttttacaaaggagtgaattcagggccttgtatcactggcagcaggacgtgaccatggagaagctgttgagtttcttgatcttgaccaacctctctcatgctgtttgacagacaaacatgtacaggaaggctttggtgctttcctaagagacggatactttctatgtattcctgacaacaccgacaacgaaccctttgaaagacttcactgtgtgcctacacttctacacggaactgacctccacccgtggatacagaattttctccgctgccaccaagagacaagacaatatgattctcatattttggtctaaaaatatacgatacagatttacagtggg

SEQ ID NO: 7858 - DNA, 477 bp, Homo sapiens
  misc_feature (1)...(477): n = A,T,C or G
natcgatcccccttcggnaccgccccggaattcccgggatggaccacgcttccgggatggcccagtcctgacggatgagcagaagtcccgaatccaggccatgaagcccatgaccaaggaggagtgggatgcccggcagagcatcatccgcaaggtggtggaccctgagacggggcgcaccaggcttattaagggagatggcgaggtcctagaggaaatcgtaaccaaagaacgacacagagagatcaacaagcaagccacccgaggggactgcctggccttccagatgcgagctgggttgcttccctgagggcccccgctggccaaggcctgtggacgacgctggcggcccagcctgggcaggtttcagggtgccagtgggaagcctgatgggtgctggtggcctttcccccgtggattggtctctggcccagcccagtctcttctcangggcagggggtggaggttgnngtcacn

SEQ ID NO: 7859 - DNA, 384 bp, Homo sapiens
tgtgtatccgtcaggtaacatctgccggcacctgctgccccgggtccagtgccccgccttgattgtgcacggtgagaaggatcctctggtcccacggtttcatgccgacttcattcataagcacgtgaaaggctcacggctgcatttgatgccagaaggcaaacacaacctgcatttgcgttttgcagatgaattcaacaagttagcagaagacttcctacaatgagaatgcacactccagtcttggtggttccttcgtgtggggcttgatcgtgttgctgcctgttaacatgatgcctttgaaactctccgcctttgaaactttctacccctcccttcaatcttatcctaaccaaatgagaataatgacatattgaaaacagc

SEQ ID NO: 7860 - DNA, 389 bp, Homo sapiens
tgcccagctccagcaaggagcctgtcttccggctcagtgtggccactaatgtgtccgccaccttgaccttcaataccagcaagatcactgggttcctgaagccaggaaaggtaaaagtggaactgaaagaatccaaagttggactattcaatgcagagctgttggaagcgctcctcaactattacatccttaacaccttctaccccaagttcaatgataagttggccgaaggcttcccccttcctctgctgaagcgtgttcagctctacgaccttgggctgcagatccataaggacttcctgttcttgggtgccaatgtccaatacatgagagtttgaggacaagaaagatgaagcttggaggtcacagctggatctgcttgttgcatt

SEQ ID NO: 7861 - DNA, 476 bp, Homo sapiens
  misc_feature (1)...(476): n = A,T,C or G
aattgatcccccttcggnaccgcnccggaattccgggattgatcacgcttccgggcgcctgctgctgcacgctggaaccatgtgtgggtcggcaccgagactgggatcttgaaaggggtaaatcttcagcgaaaacaggcggcgaacttcacggccggaggacagccgcggcgcgaggaggcagtgagcgccctgtgttggggcaccggcggcgagacccagatgctggtgggctgcgcggacaggacggtgaagcacttcagcaccgaggatggcatattccagggtcagagacactgcccgggcggtgagggcatgttccgtggcctcgcccaggccgacggcaccctcatcacatgtgtggattctgggattctcagagtctggcatgacaaggacaaggacacatcctctgacccactcctggaactgagagtgggccctggggtgtgtaggatgcgccaagacccagcact

SEQ ID NO: 7862 - DNA, 386 bp, Homo sapiens
  misc_feature (1)...(386): n = A,T,C or G
tcccagcccgcgatgaggacgtggggtcgtgatcgttgggccacggtgaagggggcggccctgctggacccgctagctgggccgacgctttcccacccctaggggtttgctgggccctggccgcaaacttgtggggcgccgtcctcggggccactgcccggccaccctcacacccttgggccctcagctctggtgcattggtccgggctccgggaggcactgagacgtccccctagggcgctgcagggaagcgagggccaggcccttccaggtccccggtcctcccgggcaggatggaggctgctgaacgctcctcaagcttccaagtcagccgtggctgggcgggcggcagcagggaaggtttgggctccgccatgcttgcgagn

SEQ ID NO: 7863 - DNA, 423 bp, Homo sapiens
  misc_feature (1)...(423): n = A,T,C or G
cccacgcgtccgattttcctcttacttagagaaaaataaattatgttgcatgaggatcttttgaaagagttggaattgtttagggtggacaagggaagaaaagcatatatctatgtatctctatatatctatctcaaggggaagagggactatgtatgttctatgtgatttcagaatataaaactagaatgaatgggtgtcagagttttggttcacttcaagaattttctaacaagtagaactgcccaaggtggagtcatctgtcttgtgatccaataagctctccaaccacataacattctcatgcaacataatttattttcctcttacttagagaagcatcaaatgttttatttctgagaaacgagtgtttcaagcacagaactaagtgaaaaaggggagatctttctgagggtagcggan

SEQ ID NO: 7864 - DNA, 397 bp, Homo sapiens
cccacgcgtccggtcaacgcccagtggcttggcgacattcttctgggaaactttgaggcactgaggcagattcagtatagtcgctacacggcattcagtctgcaggatccatttgcccctacccagcatttagttttaaatcttttagatgcttggagagttcccttaaaagtgtctgcagagttgttgatgagtataagactacctcccaaactgaaacagaatgaagtagctaatgtccagccttcttccaaaagagccagaattgaagacgtaccacctcccactaaaaagctaactccagaattgaccccttttgtgcttttcactggattcgagcctgtccaggttcaacagtatattaagaagctctacattcttggtggagaggctgcgg

SEQ ID NO: 7865 - DNA, 408 bp, Homo sapiens
ctcaggattcgtggtggctgccgatgggctcattgtttccaacgcccatgtggtggctgatcggcgcagagtccgtgtgagactgctaagcggcgacacgtatgaggccgtggtcacagctgtggatcccgtggcagacatcgcaacgctgaggattcagactaaggagcctctccccacgctgcctctgggacgctcagctgatgtccggcaaggggagtttgttgttgccatgggaagtccctttgcactgcagaacacgatcacatccggcattgttagctctgctcagcgtccagccagagacctgggactcccccaaaccaatgtggaatacattcaaactgatgcagctattgattttggaaactctggaggtcccctggttaacctggatggggaggtgat

SEQ ID NO: 7866 - DNA, 422 bp, Homo sapiens
  misc_feature (1)...(422): n = A,T,C or G
cccacgcgtncgcccacgcgtccgctcttgccagccactctaacttttctgattagttttccatttaaatttacaaaataaatagtccacctctctatcaagactactttcagttgccttgaaaggaggcagaagccctgtagctttgctacttgggagatatttaaaatatcatatcagaatcttctcccatccctccaaatatcttttctggttttactctttttttttgagatggagtctcactctgtcgcccaggctggagtgcagtggccagatctcagctcactgtaagctccacctcccgggttcatgccattcttctgcctcagagagtagctgggactacaggcgcccgccaccatgcctggctaantntttttcttttttcttttttcttttttggatttttagtagagacg

SEQ ID NO: 7867 - DNA, 396 bp, Homo sapiens
aagttagctccaaatcccagactagctgctaccccaagcccgggagcttctcaggtctacgaggcccttctcccccagtatgccaaactcgagcagagaatcttgtctcagacccgggggcctccggagtgaacaggcatccctgttgcccctgcctgcccagatttactgaccccatttgtcgacatggccccagacaggagggatccacttctctgttctgaacagctcttcctgcccctactgactccttggagtgtccaggaccatcttaaagccgccctcagcacatctgcatgaagatagataggcactcctgtccctgtgcccgtgtgccccagggcaggaaagcatctctcttttcctgtcttttatcccaggaggcaggacaacact

SEQ ID NO: 7868 - DNA, 428 bp, Homo sapiens
tacccacgcgtccgcttggttattagcacaaaactttaccatgttagatgttgaaagaagaaagggaaggaatgagagagagtgaaaaggagagggtaacagaaaaaaaggaaagaaaagtaagtcagggaaatattaaaactgcaagggaaagcaattgaaaaagaaataaagtagggaaagaaggagagaggaagcaagggaaggaggaagaaaggaaagaggagatgaaagggggagaaaagatagaagaaaaataattgaagggagaatcagaaaaataaagagaagaaaggaaagaaataaagagagaaagagaaagaagaaagagcaaaagaacacaagaaagaaagagagggagaaagagagggagaaagggagagaaaaaaattgtaaaaataaaaatagtaaaagaaactgataaagaa

SEQ ID NO: 7869 - DNA, 397 bp, Homo sapiens
  misc_feature (1)...(397): n = A,T,C or G
ctttttttcttttttaacaggtgtttctttncatatggggggaggtgggtcaagactataaccaactatataatgtcatagaacaagtgagagggtgtgctaattggaattcaccaatgcgcttgacttttgatttgttcttgccattttgctatgtggcttgtaatggacacaacttctctgtaggtttaatagttttgtaaattttatttatcagcatggatttgctgctgagtggaatttcttctctgtttcttaatgcctgctctgctacatttttctaggcacaggagaaactgggtccagtggacatgctggtaaattgtgcaggaatggctgtgtcaggaaaatttgaagattttgaagttagtacctttgaaaggctaatgagcataan

SEQ ID NO: 7870 - DNA, 421 bp, Homo sapiens
cagctcccgcgaccgcctctcctgcccctcgccggtacctcagcaaggtgccactagaagcgcctggctggggccgcctctgagcgccccgcgggggccatggatggtgaaacagcagaggagcaggggggccctgtgcccccgccagttgcacccggcggacccggcttgggcggtgctccgggggggcggcgggagcccaagaagtacgcagtgaccgacgactaccagttgtccaagcaggtgctgggcctgggtgtgaacggcaaagtgctggagtgcttccatcggcgcactggacagaagtgtgccctgaagctcctgtatgacagccccaaggcccggcaggaggtagaccatcactggcaggcttctggcggcccccatattgtctgcatcctggatgtgtatgagaacatgc

SEQ ID NO: 7871 - DNA, 397 bp, Homo sapiens
  misc_feature (1)...(397): n = A,T,C or G
gtttgtcttcaagatgcaatacttttcttagtaaaggaaaaacagcataaaaagatacctggtctgccttgtacaagaaaaggcaatattagaggaagaaaatttaaagaaaagctagaggaaaaaaaaatttttttaaaaaatacttattagaagcaaactgcccttgcatggaaaactgtttatttttttcagtgaaaaggaattctgctttcgtgtttttgggaaagcaggaactgagttcattacatctttaatttggcagaaattagcctttctgtgaaccagatgtggtttggggcagatctgtagtaaacaatggtgattttatttatttttactctctggaaaaggagataatacaattccagaaagtgaactcatatttctaaggttn

SEQ ID NO: 7872 - DNA, 406 bp, Homo sapiens
cggaagggtgatgtggctgcggcatcgccggcctcgctatgtctgccattttcaattttcaaagtctattgactgtaatcttgctgcttatatgtacctgtgcttatattcgatccttggcacccagcctcctggacagaaataaaactggattgttgggtatattttggaagtgtgccaaaattggtgaacggaagagtccttatgttgcagtatgctgtatagtaatggccttcagcatcctcttcatacagtagctggggaaaatgccagaatgtagttgccatcagatttgattgtgaacaaggactgactgcagaaaataatggaaaggatgtttaactcttttatctccgaacattgaatgagataaatttccagatgctgttctctattttaatgttat

SEQ ID NO: 7873 - DNA, 396 bp, Homo sapiens
  misc_feature (1)...(396): n = A,T,C or G
gcgacgcggttgctgcggggctttttttcttgggtctgttcacanctnaaattcggacctcctgcggacagacgggtgagtagggggggggcctatcccaacatccgggtctcttctcccttacctggaggaccgaagcctgttttctctacattttataaacaccaacagatttaaaccaaagtaaccaccttggataatgggcttctcgtggcatctcaaaataagtttggactgttttgtacagcaggaattcttatcaattcaggatcgacatatgaagcgaaataccttagtggaattgctcactttttggaaaaattggcattttcgtctactgctcgatttgacagcaaagatgaaattctgcttaccttggaaaagcatgggggtacg

SEQ ID NO: 7874 - DNA, 406 bp, Homo sapiens
agactagtgctttacctttattaatgaactgtgacaggaagcccaaggcagtgttcctcaccaataacttcagagaagtcagttggagaaaatgaagaaaaaggctggctgaaaatcactataaccatcagttactggtttcagttgacaaaatatataatggtttactgctgtcattgtccatgcctacagataatttattttgtatttttgaataaaaaacatttgtacattcctgatactgggtacaagagccatgtaccagtgtactgctttcaacttaaatcactgaggcatttttactactattctgttaaaatcaggattttagtgcttgccaccaccagatgagaagttaagcagcctttctgtggagagtgagaataattgtgtacaaagtaaagaa

SEQ ID NO: 7875 - DNA, 393 bp, Homo sapiens
cagaaggatacccaaagcatagactctccattttctttttctgctgaagataccctctcctgtccagtgacagaagtcatagccatcagtcactgtggaattaaagatagccctgtacaatcccctaatttccaacagacaggctctaagcttctgtccaatgtggctgcaagtcagcctgctaatatatcagtgttcaaaagggacctgaatgtgataacttctgtacccagcgaattgtgtttacatgagatgtcctcagatgcttcacttccaggggatccagaggcctatcctgctgctgtgtcaagcggtggagccattcatctgcagacaggagtggaaacagaagagatgagatcagcaattgctcctgatcccattcctctgacg

SEQ ID NO: 7876 - DNA, 386 bp, Homo sapiens
acctcgagtgatctgtccacctcagcctttctagtgctgggattacaggcgtgagtcaccacccagctcctgtaagcttttacatgagagaaatcaactaggttgtggaggctgagtcaggagaattgcttgaacccaggaggcggagggtgcagtgagccgagatcgtgccattgcactacagcctgggccacagggtgagacgctatctgaaaataaataaataaataaatagccaggcgtgatggcacacacctgtggtcctgtggcaggcgaatagagaattaggataacgggggttcggcaggtgcagccagttctcataagcaaaagaacagcaggtgcagccagctcctataagcaggagagcggcaggtgcagcatat

SEQ ID NO: 7877 - DNA, 452 bp, Homo sapiens
  misc_feature (1)...(452): n = A,T,C or G
aatgatcgcattcggnaccgattgagaaccctcgggtcgacccacgcgtccggataagttggccgaaggcttcccccttcctctgctgaagcgtgttcagctctacgaccttgggctgcagatccataaggacttcctgttcttgggtgccaatgtccaatacatgagagtttgaggacaagaaagatgaagcttggaggtcacagctggatctgcttgttgcatttccagctgtgcagcacgtctcagagattcttgaagaatgaagacatttctgctctcagctccgggggtgaggtgtgcctggcctctgcctccaccctcctcctcttcaccaggtgcatgcatgccctctctgagtctggactttgcttcccctccaggagggaccaccctccccgactggcctgggatatctttacaagcaggcactgtatttttttattcgccat

SEQ ID NO: 7878 - DNA, 395 bp, Homo sapiens
  misc_feature (1)...(395): n = A,T,C or G
acaagtatcaggccatactggagatgttactattcttacacagatgcagtcatttatgtagtagacagttgtgaccgagaccgaattggcttttccaaatcagagttagttgccatgttggaggaagaagagctgagaaaagccattttagtggtgtttgcaaataaacaggacatggaacaggccatgacttcctcagagatggcaaattcacttgggttacctgccttgaaggaccgaaaatggcagatattcaaaacgtcagcaaccaaaggcaccggccttgatgaggcaatggaatggttagttgaaacattnaaaagcagacagtaattcagtccattctttctccctgaaatgaagactacatcacctcttctcctttgggaacaggc

SEQ ID NO: 7879 - DNA, 372 bp, Homo sapiens
aaatccccaatttggttctgctttttgacctctctctaccttttcagggtaatctttgtggcacaaacgatagcatttccaagctttagagttttctgaattcctgcgccttcctgacgtgagccctgagcgatcttctatgcagttctgccatgcgtcctgttggtctctctgtgttctttgttacttgggtgcaatagcaacttccctaccccgtgcattccatctttcatgttgtgtaaagatcttcacttttttctctgagggctgggggttgggggagtcagcatgattatattttaatgtagaaaatgtgacatctggatataaaatgaaaataaatgttaaattaaatgaaaaaaaaaaaaaagg

SEQ ID NO: 7880 - DNA, 406 bp, Homo sapiens
tctgaccccaccgaccctggctcaggataactccaggtacacacacttcctgacccagcactatgatgccaaaccacagggccgggatgacagatactgtgaaagcatcatgaggagacggggcctgacctcaccctgcaaagacatcaacacatttattcatggcaacaagcgcagcatcaaggccatctgtgaaaacaagaatggaaaccctcacagagaaaacctaagaataagcaagtcttctttccaggtcaccacttgcaagctacatggagggtccccctggcctccatgccagtaccgagccacagcggggttcagaaacgttgttgttgcttgtgaaaatggcttacctgtccacttggatcagtcaattttccgtcgtccgtaaccagcgggcccc

SEQ ID NO: 7881 - DNA, 393 bp, Homo sapiens
acggctttggaatccaccaactacatccagctcccttagttttgagaatggagagaatgttacctctcctggctctggggctcttggcggctgggttctgccctgctgtactctgccaccctaacagcccacttgacgaggagaatctgacccaggagaaccaagaccgagggacacacgtggacctcggattaacctccgccaacgtggacttcgctttcaacctgtacaagcagatagtcctgaaggcccctgataagaatgtcatcttctccccactgagcatctccaccgccttggccttcctgtctctgggggcccataataccaccctgacagagattctcacaggcctcaagatcaacctcacggagacttctgaggcagaaattc

SEQ ID NO: 7882 - DNA, 389 bp, Homo sapiens
  misc_feature (1)...(389): n = A,T,C or G
tcagaggagaagagacatgtaccttgaccatttttcttcctctcaagctagccagagggtgggagcctaaggaagcgtggggtagcagatggagtaatggtcacgaggtccagacccactcccaaagctcagacttgccaggctccctttctcttcttccccaggtccttcctttatgtctggttgttgcaccatctgcttggttggctggcagctgagagccctgctgtgggagagcgaagggggtcaaaggaagacttgaagcacagagggctagggaggtggggtacatttctctgagcagtcagggtgggaagaaagaatgcaagagtggactgaatgtgcctaatggagaagacccacgtgctangggatgaggggcttcctgg

SEQ ID NO: 7883 - DNA, 393 bp, Homo sapiens
accaaccaagatgagtgccctgggagctgtcattgctcctcctgctctggggacagctttttgcagtggactcaggcaatgatgtcacggatatcgcagatgacggctgcccgaagccccccgagattgcacatggctatgtggagcactcggttcgctaccagtgtaagaactactacaaactgcgcacagaaggagatggagtgtacaccttaaacaatgagaagcagtggataaataaggctgttggagataaacttcctgaatgtgaagcagtatgtgggaagcccaagaatccggcatacccagtgcagcggatcctgggtggacacctggatgccaaaggcagctttcccttgcaggctaagatggtttcccaccataatctcacca

SEQ ID NO: 7884 - DNA, 388 bp, Homo sapiens
tttggaatccaccagctacatccagctcccttagttttgagaatggagagaatgttacctctcctgactctggggctcttggcggatggggtctgccctgctgtcctctgccaccctaacagcccacttgacgaggagaatctgacccatgataaccaggaccgagggacacacgtggacctcggattagcctccgccaacgtggacttcgctttcaggctgtacaagcagttagtcctgaaggcccctgataagaatgtcatcttctccccactgagcatctccaccgccttggccttcctgtctctgggggcccataataccaccctgacagagattctcagaggcctcaagttcaacctcacggagacttctgaggcagaaattg

SEQ ID NO: 7885 - DNA, 390 bp, Homo sapiens
caagcgtttactgggcagctgttacgctcagattccttatgaaaatgtttgagagcgctgactctacagccacaagatctggccaggatctctgggctgaaatttgttcctgtctgccaaatcctgaacaagaagatggtgccaacaatgcattctcagactcctttgtggattcttgccctgaaggtgaaggccagagggaggtggctgactttgctgtccagccagctgtaaagccttgggctcccttgcaggattcagaagtgtatttagcatctctagagaagaagctaagaagaatcaaaggtttaaatcaggaagtgacttccaaggacatgcttcgaactctggcccaagccaagaaggaatgctgggatcggttcctccagg

SEQ ID NO: 7886 - DNA, 446 bp, Homo sapiens
attgatcgctttaggaccgatgggaactctgggtcgacccacgcgtccgcagaaatactgtgtctcatgaaggatcacagagttcagggggaaaatgtgacagcacacgcacaaacgccttcactggatcagccgctggaactgagggagtgagcttggggacttccttcgtcagcactggctttctgttttcacaagacagacgtctgtcccgctgctctctccccatctcctaccccacatcctgtcttagccgcagtctccagaacccatgatgaactgtgatctgccgtggtcctgccgtggtcctgccgtggagcctgtccctacacatgaccttggagcctcttggccttcagagcagaggcaaacccaccacagggcagctgcgttttaggaagagcaaatgaaactccacaccattcttctagatctctggtgtctct

SEQ ID NO: 7887 - DNA, 390 bp, Homo sapiens
cagggcgtggagagtcagctctacaagctgccctggttgtgtgaggagggggccgggatccccaccgtcctgcagggccacatcgactgtggctccctgcttggctaccgcgctgtctaccgcatgtgcttcgccacggcggccttcttcttctttttcaccctgctcatgctctgcgtgagcagcagccgggacccccgggctgccatccagaatgggttttggttctttaagttcctgatcctggtgggcctcaccgtgggtgccttctacatccctgacggctccttcaccaacatctggttctacttcggcgtcgtgggctccttcctcttcatcctcatccagctggtgctgctcatcgactttgcgcactcctggaaccagcgg

SEQ ID NO: 7888 - DNA, 393 bp, Homo sapiens
  misc_feature (1)...(393): n = A,T,C or G
cagataatagagcaatgtttagtatattcagctgtatctgtagaaactctttgacgaacctcaatttaaccaatttgatgaatacccagttctcttcttttctagagaaagatagttgcaacctcacctccctcactcaacactttgaatacttattgtttggcaggtcatccacacacttctgcccccactgcattgaattttttgcttatgttgtttataataaaacttttcaattatctcanaaaaaaaaaaaaaaaaaaaaaaaaaaaaaaaaaaaaaaaaaaaaaaaaaaaaaaaaaaggggggggggggttttaaaaaattcctggggggggccccaattcccgggggggggaaaaattttttttttttttttaaggaagaaaaaaa

SEQ ID NO: 7889 - DNA, 394 bp, Homo sapiens
  misc_feature (1)...(394): n = A,T,C or G
attcaaagcaacaccaccaccactgaagtatttttagttatataagattggaactaccaagcatgtggctcctggtcagtgtaattctaatctcacggatatcctctgttgggggagaagcaacattttgtgattttccaaaaataaaccatggaattctatatgatgaagaaaaatataagccattttcccaggttcctacaggggaagttttctattactcctgtgaatataattttgtgtctccttcaaaatcattttggactcgcataacatgcacagaagaaggatggtcaccaacaccaaagtgtctcagactgtgtttctttccttttgtggaaaatggtcactctgaatcttcaggacaaacacatctggaaggtgatactgtgcn

SEQ ID NO: 7890 - DNA, 449 bp, Homo sapiens
  misc_feature (1)...(449): n = A,T,C or G
attgaacgccttcggtaccgcatgggaatccctcgggtcgacccacgcgtccgcggacgcgtggggtaaagacatgcgagactggtggcctgcaaatagcatccgttgatctgtgttaactgcatagggagggctctgcatagcacctgctatagcggtgtcatgttggatcgcttttgtgactgttcatctgtccttgacagtggctgtcatcttgactactttgttgatttgttggtattggggacattttaaaggctgagttatttttgaatgtcatgtttatgtcatagacgtagttttcgcatccttgaattaaactgccttaactccttttgtggtataagcaaaactacatggactctgtcctggtatccttttcctgtgtggntgccccgtgtcctctggcctagggttaagtgtgcaagataactactcgtgagtattca

SEQ ID NO: 7891 - DNA, 392 bp, Homo sapiens
  misc_feature (1)...(392): n = A,T,C or G
ccctcatcccctaagagagacaaagataaaagcccacctgcatccctaagtcttactgagatcagccaccccaggggagagaaactggatctacttacagccaccccctgtttccatccatatacttacttcccccaatttgcatgtgattatggaaacaagtcatgctcatgaaagcaactgtaaaataaaaggttatggagtagttcagcaacttcttcacagccagctttgtggagctggggaggacttanggcccattggagtctcttatgtgtacagcttcagggctgtccctttcagtttgattttaagcaatgcctcacttcatagcttatggggtaaggattccattcaggtaggttgtctaaaggaactaatgggacctctca

SEQ ID NO: 7892 - DNA, 451 bp, Homo sapiens
attgaacgcattcggaaccggatgagaagccctcgggtcgacccacgcgtccgacacttttgaccagctttggctcgggagagtggggctgcttgtagaactggaagtgaataactttttcaagcaatatcagtgagtgggtcccatcgacagggttccaggacctggaacactttaacagaaggaaatgccgaagcagcttgcacagttgctttacagacttccaagaggctgattctggcttcaagatggagccttggagttggttttttttttttttttttttctcccctaaaaaaacctgggggggcccttggggggtttggtttttgtttcccattgggggcccccagggaaaaaacctttggaactttttcttttataaactcccctggggtccttaaaagggccttttttttttttagggtggaaggtacctttttcattacgc

SEQ ID NO: 7893 - DNA, 385 bp, Homo sapiens
agctctcttgcctggtgttccctctgctacggctttcccctcccagccctggcccactaagccagacccaggtgttgccattcccactgctggtcctgccacctcctgagctgccttcccgcctggtctgggtagagacatggcctcgagcacaggtgaccggagccaggcggtgaggaatggactgagggcgaaggtgctgacgctggacggcatgaacccgcgcgtgcggagagtggagtacacagagctgtggccccatagtgcagcgagccttggagctggagcacgagctgcgccagggtgtgaagaaacctttcaccgaggtcatccgtgccaacatcggggacgcacaggctatggggcagaggcccattaccttccg

SEQ ID NO: 7894 - DNA, 401 bp, Homo sapiens
  misc_feature (1)...(401): n = A,T,C or G
cccacgcgtccgcttggctcagtgagcaagacggaggaggagctgcaggccatcctggaagccaaggagaagaagctgcggctgaaggcgcanaggcaggcccagcaggcccagaatgtgcagcgcaagcaggagcagcgggaggcccacagaaagaagagcctggagggcatgaagaaggcacgggtcgggggtagtgatgaagaggcctctgggatcccttcaaggacggcgagcctggagttgggtgaggacgatgatgaacaggaagatgatgacatcgagtatttctgccaggcggtgggcgaggcgcccagtgaggacctgttccccgaggccaagcagaaacggcttgccaagtctccagggcggaagcggaagcggtgggaaatggatcgagg

SEQ ID NO: 7895 - DNA, 408 bp, Homo sapiens
cggacgcgtggggtggatttaatcatcttccatcagcaacctccattaacatagtgctttacagtttgccccctgcagcgacccatggagatacatgtcatttattagcccatttttccagtgaggaaactgagtttagaaaagttgaatgacacacatagtaaaagggagaactgctgcctttgaatttagtgttctctgcaaaggacttagctgctctaattgcccgagaacgttgaaacaaagagttatttgaatgacacaccattactttctgtatgtacacagtatctagtttgtggtttataaagggtctcaaagtatattgcaggattttatgatagaccggatttgtttattgccggcagttgctgtctatttccggtgacattctttaggttctagtaa

SEQ ID NO: 7896 - DNA, 366 bp, Homo sapiens
acccacgcgtccggaacggtctcagaactgtttgtttcaattggccatttaagtttagtagtaaaagactggttaatgataacaatgcatcgtaaaaccttcagaaggaaaggagaatgttttgtggaccactttggttttcttttttgcgtgtggcagttttaagttattagtttttaaaatcagtactttttaatggaaacaacttgaccaaaaatttgtcacagaattttgagacccattaaaaaagttaaatgagaaaaaaaaaaaaaaaagggggggccgttttaaaggatccttgggggggccaaagtttacgcgggcatgcaacgcattagttttttccttatagggagccgaattata

SEQ ID NO: 7897 - DNA, 399 bp, Homo sapiens
aagcactatgcaatattgccttacaaaaaaccaattaaggatagatctctgaaggcttagctatcttgatttcactacagctcagtagcagttcagtgctttggctttggagtcacagccaagttcaagtcatggttgtgtgactttggattttattaactatatatttctgttttccatctgctgctaaggtgatgccatctggtataatgagaatgaaatgagatgtttattaaacactgaggatcagtgcctagcatatacaagcacttagtaattatatttttatcattagtctaattctggtctcttgatctttctttagttcctaaagtccttactatggtttctattcatgtggctcttacatgaacaatacatgacacaaatatgatagtg

SEQ ID NO: 7898 - DNA, 411 bp, Homo sapiens
ctgggttttgctgtgtcatgattgctttatcacttctgaaaatcaactctggaacattttccgtgccctgatttaaaatgaagaagttctccgatttttcctttagatatccgatttaaaatcttgatatcttgaaatcttgatatctagatctcttggggatttgtcttttacattctgtagtgtatagtatgtatattctatatatgtatgtgtgtatatatgtatatttgaatacccagagtgttctagtgatattaattggatcagtaaatatttgagcacctactaagtgcgaacattgttctacatgagccagttgctgacattttggtgtataaagatacaggcagtaaatggctgggcgcagtggcccatacctgtaatctcagcactttgggaggctgaggc

SEQ ID NO: 7899 - DNA, 403 bp, Homo sapiens
cccacgcgtccgacaaagttagagaactaaactactttttcctatcatgttaacctctgcttttatctcagatgttaaaataaatggtttggtgctttttataaaaagataatctcagtgctttcctccttcactgtttcatctaagtgcctcacatttttttctacctataacactctaggatgtatattttatataaagtattctttttcttttttaaattaatatctttctgcacacaaatattatttgtgtttcctaaatccaaccattttcattaattcaggcatattttaactccactgcttacctactttcttcaggtaaagggcaaataatgatcgaaaaaataattatttattacataatttagttgtttctagactataaatgttgctatgtg

SEQ ID NO: 7900 - DNA, 413 bp, Homo sapiens
gcaggtgctggccaaggacatcatctaggcagggggagagcctgggctgaacagctgtgaccaaaactcccttctgccccaccctgccccctccacttcctgccctctgttccatcttcccccttcccaaaggccacagcctttattccaggcccagggatgtaggagggggaaggaggaaacaggaagcccagagagggcaaagggcctacctcggggcgcgaaccatgccccagactattatctcagggctttctgggcactgcacttcagcgtggcccacctgcccatgccctgaggccagttggcgaggggtggctcctgagggtttttataccctttgtttgctaatgtttaattttgcatcataatttctacattgtccctgagtgtcagaactataatttattcca

SEQ ID NO: 7901 - DNA, 405 bp, Homo sapiens
aaagcagggaggttgggaaggcccttctgatcagcttatgtgttctcaagcaccaggtgactcacacaggagagaagtcacataggagctccaaaagtagggaggcctttcatgctggaaaaaggcattacaaatgcagtgaatgtgggaaagcctttggtcagaaatatttacttgttcagcaccagagactacatgctgggaaaaagacgtatgaatgcagtgaatgtgggaagttatttagagatatgtccaacctttttatacaccaaatagttcacactggagaaaggccttacgggtgtagtaactgtggaaaatcctttagccgtaatgctcacctcattgaacaccagagagttcacactggagaaaagccttttacatgcagtgaatgtggaaaag

SEQ ID NO: 7902 - DNA, 407 bp, Homo sapiens
  misc_feature (1)...(407): n = A,T,C or G
caaggggcagtcttgcaacagtgccatgttagggttatgtttttaggattcccctcaatgcagtcagtgtttcttttaagtatacaacaggagagagatggacatggctcattgtagcacaatcctattactcttcctctaacatttttgaggaagttttgtctaattatcaatattgaggatcagggctcctaggctcagtggtagctctggcttagacaccacctggagtgatcacctcttggggaccctgcctatcccacttcacaggtgaggcatggcaattctggaagctgattaaaacacacataaaccaaaaccaaacaacaggcccttgggtgaaaggtgctatataattgtgaagtattaagcctaccgtatttcagccatgataagaacagagtgcn

SEQ ID NO: 7903 - DNA, 413 bp, Homo sapiens
atttgtgcaaacatggagaaatctactgaattggcttccagattttaaattttatgtcatagaaatattgactcaaaccatattttttatgatggagcaactgaaaggtgattgcagcttttggttaatatgtctttttttttctttttccagtgttctatttgctttaatgagaatagaaacgtaaactatgacctaggggtttctgttggataattagcagtttagaatggaggaagaacaacaaagacatgctttccatttttttctttacttatctctcaaaacaatattactttgtcttttcaatcttctacttttaactaataaaataagtggattttgtattttaagatccagaaatacttaacacgtgaatattttgctaaaaaagcatatataactattttaaa

SEQ ID NO: 7904 - DNA, 404 bp, Homo sapiens
aaacaaactacacctgattgtattaaattgtggtcactattcccaaaacgctaggcaaaacaaagttcatctcctttcctttccagcggaacgaacagctgtctcccttgttgtgagagccatgcagacttattttgacaaggagccaagtaggcaccatttactgttcaattctgagacttctgatgataggaacagaatgcagttgatacagctcggagcttaaatttgccttcctgggtgcctagaaaagtcacctttgcacataaattggccatttctgaaaatctcctccaagagactgaaaccaaagctctaaaacgccgcttcttcagtctctggggagcacgttgagttggttcacatccacattctggctgtgtagccactccacagatgggtgg

SEQ ID NO: 7905 - DNA, 406 bp, Homo sapiens
  misc_feature (1)...(406): n = A,T,C or G
acagtccccatcacccaggagctttatgcacctttttatcaagacctcatanccagcggggtggcaggggtggtgaccacagtgatgggcagctcccatcccgtggtgacccgaggcaccaccgacaacctcatccctgtctattgctccatcctggctgctggggatgtgtgcctcgtggcctacatagccttcatgagggggaacagctgcaagcttaacaagcaaggagccaacagccggccagtgaaccatacgctcccaccagagggagaaaaactccacagcgacagtggcatctccttgtacagccagagcctggatgaccatcagtcccacactgcagacagcctcgggccatgcccttaagggtgacggaggcctctacagcagccttgccccatcg

SEQ ID NO: 7906 - DNA, 413 bp, Homo sapiens
tattaagggccttcaaggcaggaatgagaaagcaaagccaatctctcatttagacctggcttctttcttctgaacaaagtagggttcaaaatgcagactgtcatatccagcgagtccctgaccctttctgcgaatgtaacgagcaagcagtcagcacagcctgggctgccctggcccgggattgatgtagccccggtaggtttgcctctgcagaactaatggctgtgacttcagagaaagccctgcaggaagtttaacctgcgtgtcatctgcctggtcatctcagacccatgaaattaggcgccttgtttgagctgcgtttcacacttctttagagctagctgacctttggccaaaaataaactttgaaaagaaaaaaaaaaaaaaaaaagggcggccgttctaaaggatcc

SEQ ID NO: 7907 - DNA, 277 bp, Homo sapiens
tcgcggacgcgtgggtcgacccacgcgtccggacccagtttttcgcggacgcgtgggattttcatgaattgagaagccttcgcttcgaagcgagaagtcctaatagaataagaaccctccataaacctggagagactatatggatgccccccaccctaccacacattcgaaaaaaaaaaaaaaaggggcggccgttttaaaggatccttgggggggcccaagtttacctgtgcaggcaacgtaataactttctccttaaaccgaggcgaattaaaac

SEQ ID NO: 7908 - DNA, 370 bp, Homo sapiens
cgccgccgaggattcagcagcctcccccttgagccccctcgcttcccgacgttccgttcccccctgcccgccttctcccgccaccgccgccgccgccttccgcaggccgtttccaccgaggaaaaggaatcgtatcgtatgtccgctatccagaacctccactctttcgacccctttgctgatgcaagtaagggtgatgacctgcttcctgctggcactgaggattatatccatataagaattcaacagagaaacggcaggaagacccttactactgtccaagggatcgctgatgattacgataaaaagaaactagtgaaggcgtttaagaaaaagtttgcctgcaatggtactgtaattgagcatccgg

SEQ ID NO: 7909 - DNA, 404 bp, Homo sapiens
  misc_feature (1)...(404): n = A,T,C or G
aaggccatgccagccacgtccgccgaggggcgccagcctgaagctgccaggccctgaggttcagaccctggaccccatagctggaggcctgtggtgccagaagcccagattagggtggctgtccatccctggatagctatttgcacgaatcatggacataaatccaagttgaagaagatcanannaaaaaaaaaaaaaaaaaaagggggggggcccttttaaaaaatcctttggggggcccaattttaccgggggggggaaagtaaaatttttttctttttgggggggccttttaaaacccccctggggatttttgggaagaaccctttttttgggggggggcaatagggggccaccccccccccaaaattttaaggctttggggaaaaataaaattttttagg

SEQ ID NO: 7910 - DNA, 547 bp, Homo sapiens
  misc_feature (1)...(547): n = A,T,C or G
taccgtacttagttacgtccgtcgcgagtaagtgtttagttgcgattgcgcaactgtgggcagaagtaaaccgggagaggaagaaaggagagttggataacctggtgggannncntgtaattccgcggtcgacccacgcgtncgcagccgaatacatcttttccaaaggagtgaattcaggtccttgtatcactggcagcaggacgtgaccatggagaaactgtggtgtttcttgggcttgaccagcctctctcatgcttttggccagacagacatgtcgaggaaggcttttgtgtttcccaaagagtcggatacttcctatgtatccctcaaagcaccgttaacgaagcctctcaaagccttcactgtgtgcctccacttctacacggaactgtcctcgacccgtgggtacagtattttctcgtatgccaccaagagacaagacaatgagattctcatattttggcctaaggatataggatacagtcttacagcgggtgggtctgaaatattattcgaggttcctgaagtcacagtagctccagta

SEQ ID NO: 7911 - DNA, 394 bp, Homo sapiens
  misc_feature (1)...(394): n = A,T,C or G
cccacgcgtncgcgtgaaccacagggtgtcctgtcataggagcccatctcccatctccccagctccctatgtggaggatagtgggatagttacgtgttcctagcaggaccaactacagtcttcccaaggattgagttatggactttgggagtgagacatcttcttgctgctggatttccaagctgagaggacgtgaacctgggaccaccagtatccatcttgtttgccacatggagagagactgtgaggacagaagccaaactggaagtggaggagccaagggattgacaaacaacagagccttgaccacgtggagtctctgaatcagccttgtctggaaccagatctacacctggactgcccaggtctataagccaataaagcccctgtttat

SEQ ID NO: 7912 - DNA, 410 bp, Homo sapiens
cttggccatctgttcagccctgaagagtacaaactcccatgtattggtgcagaaggccgaaatgacctctatgtgtcagatgcattccataaggcatttcttgaggtaaatgaacaacgcagtgaaacagctgccagtaccgctgttgtgattgctggccgttcgctaaaccccaacagggtgactttcaaggccaacaggcctttcctggtttttataagagaagttcctctgaacactattatcttcatgggcggagtagccaacccttgagttaaggaaaatgttcttattctttgcacctctttctatgtttggattgggaacagaagtaaaaataaatacgaactacttgcaagaaaaaaaaaaggggcggctccttgtatacatcctactgagggtccaaaatt

SEQ ID NO: 7913 - DNA, 404 bp, Homo sapiens
  misc_feature (1)...(404): n = A,T,C or G
accacgcgtgcgatcacctcacctgcctactatacaggctgactcgccaggagcctgtctggggaaggatgatgcctttgttggtctgatcgtgctgagtagcaggcgggctactgcgactggggagttaagcattttgtgcagcgatagagaagtcaagcatattgttagcgctctctcaacttgggcagttcacaagctccttcccagctcagaagccctctctatgctctcaggggaagcagatggggtggatcagtacatctgtgttacccttccagaatattatttgaaaattctacaggatgttctactttctccccttcctgcttccatggnttcactgtggaatcctataagatattctcctgagcagtattatttcagtttccttcagcttttag

SEQ ID NO: 7914 - DNA, 395 bp, Homo sapiens
cctgaagctgcatgtggctggtaacctaaaaggagcctaccaaaataatgaaataaaacacgtctatgccatctcttctgctgccttatcagcaagctataaagcagacactgttgctaaggttcagggtgtggagtttagccatcggctcaacacagacatcgctgggctggcttcagccattgacatgagcacaaactataattcagactcactgcatttcagcaatgtcttccgttctgtaatggccccgtttaccatgaccatcgatgcacatacaaatggcaatgggaaactcgctctctggggagaacatactgggcagctgtatagcaaattcctgttgaaagcagaacctctggcatttactttctctcatgattacaaaggctccg

SEQ ID NO: 7915 - DNA, 384 bp, Homo sapiens
  misc_feature (1)...(384): n = A,T,C or G
taggacttctagcccctgaactttcagccgaatacatcttttccaaaggagtgaattcaggcccttgtatcactggcagcaggacgtgaccatggagaagctgttgtgtttcttggtcttgaccagcctctctcatgcttttggccagacagacatgtcgaggaaggcttttgtgtttcccaaagagtcggatacttcctatgtatccctcaaagcaccgttaacgaagcctctcaaagccttcactgtgtgcctccacttctacacggaactgtcctcgacccatgagattaacaccatctatcttggcgggcccttcagtcctaatgtcctgaactggcgggcactgaagtatgaagtgcaaggcgaagtgttcaccaaacn

SEQ ID NO: 7916 - DNA, 456 bp, Homo sapiens
  misc_feature (1)...(456): n = A,T,C or G
nattganacgctatgtcggnaccggatggagaacctcgggtcgacccacgcgtccgcgtctgtctacccccagcatgagcggcctgcgcgtctacagcacgtcggtcaccggctcccgcgaaatcaagtcccagcagagcgaggtgacccgaatcctggatgggaagcgcatccaataccagctagtggacatctcccaggacaacgccctgagggatgagatgcgagccttggcaggcaaccccaaggccaccccaccccagattgtcaacggggaccagtactgtggggactatgagctcttcgtggaggctgtggaacaaaacacgctgcaggagttcctgaagctggcttgagtcaagcctgtccagagttcccctgctggactccatcaccacactccccccagccttcacctggccatgaaggaccttttgaccaactccctgtcattcc

SEQ ID NO: 7917 - DNA, 397 bp, Homo sapiens
  misc_feature (1)...(397): n = A,T,C or G
aacttgaaacctcattgaaaaatgaaggtgatcatgcaataacagtagcagactttgtggaccatcatccaattgttttttggaacctggtatggtatttnaanacgtcttgacttgcccagtaacttacctggattgattctttcttctgagcactgtaacaagtattcaaagattccccgccactgtatgtctgaagatagcaaatatgttttaatacaaatgttatgggacaatatgaagttacatcaggatccgggacagcccttgtacattctctggaatgcacacacccaaaaatatccaatggtccatttattgcaaaaaagtgataactcatttaaccaggaactgttgaaaagtatggtaaaaagcattaaaatgaatgatgtctatg

SEQ ID NO: 7918 - DNA, 394 bp, Homo sapiens
tttcaaagttcaccaatactttaatgtagagcttattcagcctggagcagacaaggtctacgcctattacaacctggaggaaagctgtacccggttctaccatccggaaaaggaggatggaaagctgaacaagctctgccgtgatgaactgtgccgctgtgctgaggagaattgcttcatacaaaagtcggatgacaaggtcaccctggaagaacggctggacaaggcctgtgagccaggagtggactatgtgtacaagacccgactggtcaaggttcagctgtccaatgactttgacgagtacatcatggccattgagcagaccatcaagtcaagctcggatgaggtgcaggttggacagcagcgcacgttcatcagccccatcaagtgcaga

SEQ ID NO: 7919 - DNA, 395 bp, Homo sapiens
  misc_feature (1)...(395): n = A,T,C or G
tggcttcatgtttagaggggcactgaggatagtgatagtttttcttgtttaaagcttcatttaagtgagtaactctgacaagtcagtggttagagggtggcagcattatgtaaacagccacgttggtgcctctgcttgattaatgatgtttgcatttctttcaggcataaagacagtgtttgcaggatccagttgcaatgatattgtctgcacagagcaatgtgtaatgagtggacattttgacaagaaaattcgtttctgggacattcgatcagagagcatagttcgagagatggagctgttgggaaagattactgccctggacttaaacccagaaaggactgagctcctgagctgctcccgtgatgacttgctaaaagttattgatctccgan

SEQ ID NO: 7920 - DNA, 452 bp, Homo sapiens
  misc_feature (1)...(452): n = A,T,C or G
nattgaacccttcggaccgccccgaatcctggacgacctcgcgtccgattttgatcttcggtctctggcagaagcgaacaacctgagctttcccttggagcccctgagcagggagagggctcacaagcttgaggccatctctcgcctctgcgaggacaagtacaaggacctaagaagatccgcgaggaagcgctcagccagtgcagacaacctgactctgccccggtggtccccagccatcatctcttaactacggaggcccgccggaggccacaccatcccttagtttctcctttagtttgagaaaagacagacttggggtgggtttggttttggtttttctttccttttctttttttacgcatagctccgtcaagctgcctggatgagcgcccatgcagcaaggcttggaggaagcgtcagtgccctggagatcccagctcgctctcccg

SEQ ID NO: 7921 - DNA, 384 bp, Homo sapiens
cggacgttttggtcctgactcgtgggacgacccattttttcgggtggacaaggtgaacgagaacgccgagaacgacctgaaggaaggcctgctgctgtaccacaccgagaacaacgtggggctgaagaacgcctggaacatcatccaggctgagatgcgatgctgaggtgtcactgactacacagactggtacccagtgctgggggagaacacggatcccgaccgctgctgcatggagaaatcccatggctgcgggcgcaacgccaccacgcctttgaggagaacgggctgctatgaaaaggcgaagatgtggttctatgacaataaacacgtgctgggtacggtggggaatgtgcatccttattatgcaaattctgtgcatgg

SEQ ID NO: 7922 - DNA, 408 bp, Homo sapiens
  misc_feature (1)...(408): n = A,T,C or G
catgtccgtcctgacgccgctgctgctgcggggcttgacaggctcggcccggcggctcccagtgccgcgcgccaagatccattcgttgccgccggaggggaagcttgggatcatggaattggccgttgggcttacctcctgcttcgtgaccttcctcctgccagcgggctggatcctgtcacacctggagacctacaggaggccagagtgaaggggtccgttctgtccctcacactgtgacctgaccagccccaccggcccatcctggtcatgttactgcatttgtggccggcctcccctggatcatgtcattcaattccagtcacctcttctgcaatcatgacctcttgatgtctccatggngacctccttgggggtcactgaccctgcttggtggggtcccccttg

SEQ ID NO: 7923 - DNA, 405 bp, Homo sapiens
  misc_feature (1)...(405): n = A,T,C or G
tcaattcaaacactctgcaccttattagaagaccccacttggtttggggatccctgaggcttttcagggttttacagctgcagaggtgatacctgtccccctgcccccagatgcattgccttctctgtctcacatccatctccttctctccctccctgcccccatctctctcctgtttcccccactcccatcctcttctgggttcccacttctctcagtgttgccaaggccctgggcgtgaagactgtgggggctcaggccctgaagctgtttcaggaacaccccattttctctgaagttatctcggaccaggaggctgtggccgccattgagaagttcgtgggtatgtgccaggtcctcccatgacctgacctgctgactcaggcgctaagtggctgtccactn

SEQ ID NO: 7924 - DNA, 396 bp, Homo sapiens
aaatggattcgaaataccagtgtgtgaagctgaatgatggtcacttcatgcctgtcctgggatttggcacctatgcgcctgcagaggttcctaaaagtaaagctctagaggccgtcaaattggcaatagaagccgggttccaccatattgattctgcacatgtttacaataatgaggagcaggttggactggccatccgaagcaagattgcagatggcagtgtgaagagagaagacatattctacacttcaaagctttggagcaattcccatcgaccagagttggtccgaccagccttggaaaggtcactgaaaaatcttcaattggactatgttgacctctatcttattcattttccagggtctgtaaagccaggtgaggaagtgatcccaaaag

SEQ ID NO: 7925 - DNA, 406 bp, Homo sapiens
  misc_feature (1)...(406): n = A,T,C or G
cccacgcgtgcgaccacgcgtacggatcagctctggatttgcagncagtttgggattctcttcaaaaagatggcatctaagtgtctgtgttcttgtaagcctgaggtggaatccacccacttttgtctgctagccatatgggacatctaattggaaaagcatctgcataaaagtttggaaacaatgaccacttctctaccattgtcccccacccccaccccccagaataacgctgactgtcccctgaaacagccttctctcctgccctgtttatttcatcctcgatgggaattcttgctaggtaagcactaataactcggcatcttgacgatagtcccatttgggtggttccagctgcactatctgcatgaaaaggtggcaccaaaacccttttcttcagtatcag

SEQ ID NO: 7926 - DNA, 408 bp, Homo sapiens
cacaaataaatgatgctactggaagaggtgggagcttagagcatccaggaagagcttgctgttttcactacaaatctggtccacataggccgagtgcggtggctcacacctgtaatcccagcactttgggaggccgaggcaggcagatcacctgaggttgggagttcgagaccagcctgatggacatggtgaaaccccatctctagtaaaaatacaaaattagccaggtgtggtggctcatgcctgtaatcccagctactcaggaggctgaggcagggaatcgcttgaacccgggaggcagaggatgcggtgagccaagatcacaccattgcaccccagcctgggcaagaagagcgaaactttgtctcaaaaaaaaaaaaaaaaaaaaaaaggggcgcccttttaaag

SEQ ID NO: 7927 - DNA, 408 bp, Homo sapiens
  misc_feature (1)...(408): n = A,T,C or G
caagatggcggcggnggtcgcactctccttgaggcgccggttgccggccacaacccttggcggagcctgcctgcaggcctcccgaggagcccagacagctgcagccacagctccccgtatcaagaaatttgccatctatcgatgggacccagacaaggctggagacaaacctcatatgcagacttatgaagttgaccttaataaatgtggccccatggtattggatgctttaatcaagattaagaatgaagttgactctactttgaccttccgaagatcatgcagagaaggcatctgtggctcttgtgcaatgaacatcaatggaggcaacactctagcttgcacccgaaggattgacaccaacctcaataaggtctcaaaaatctaccctcttccacacatgtatgn

SEQ ID NO: 7928 - DNA, 500 bp, Homo sapiens
  misc_feature (1)...(500): n = A,T,C or G
cggaggtcnnnttttgataccatgaggattggaccgcaattcccgggncgacccacgcgtcggcagcgactccgtggagggggcccagcgggagatccatctgtggttccagagcagtgagctggtgagctgggcagatgggggccagcacagcagcatccacccagcctgaggctcaagctgcccttaccaccccatcccccacgcaggaccaactacctccgtcagcaagaacccaagcccacatccaaacctgcctgtcccaaaccacttacttccctgttcacctctgccccaccccagcccagaggagtttgagccaccaacttcagtgcctttctgtaccccaagccagcacaagattggaccaatcctttttgcaccaaagtgccggacaacctttgtggtggggggggggcttcacattatcataacctctcctctaaaggggaggcattaaaattcactgtgcccagcaaaaaaaaaaaaaaaaaaaaaaa

SEQ ID NO: 7929 - DNA, 398 bp, Homo sapiens
cccacgcgtccgcccacgcgtccgaaattctgatttaaggtcctaaattcttaacctggaactggagttggcaatacctagttctgcttctgaaactggagtatcattctttacatatttatatgtatgttttaagtagtcctcctgtatctattgtatatttttttcttaatgtttaaggaaatgtgcaggatactacatgctttttgtatcacacagtatatgatggggcatgtgccatagtgcaggcttggggagctttaagcctcagttatataacccacgaaaaacagagcctcctagatgtaacattcctgatcaaggtacaattctttaaaattcactaatgattgaggtccatatttagtggtactctgaaattggtcactttcctattg

SEQ ID NO: 7930 - DNA, 399 bp, Homo sapiens
cgagatgtgtgcacagaattactccctctaataaaaccccaagggagagtggtgaacgtatctagcatgatgagcgtcagagcccttaaaagctgcagaccatagctgcagcagaagttccgcagtgagaccatcactgaggaggagctggtggggctcatgaacaagtttgtggaggatacaaagaagggagtgcaccagaaggagggctggcccagcagcgcatacggggtgacgaagattggcgtcaccgttctgtccaggatccacgccaggaaactgagtgagcataggaaaggggacaagatcctcctgaatgcctgctgcccagggtgggtaagaactgacatggcgggacccaaggccaccaagagcccagaagaaggtgcagagacccct

SEQ ID NO: 7931 - DNA, 398 bp, Homo sapiens
  misc_feature (1)...(398): n = A,T,C or G
gaagcccaggggtggggcagatgtttgctgtgagcattactcaagagagagaagatgacttaatggcttgcatttcagccacatcaaaaagccctgcgccaacgttaaaatcacatcccattgccaccagccccataaagggcttccctggacgtgcccgatttccaaagcctaatctttgtagtcacatctccacctctatctgccagtgttggggcccctctggggcccagcagcgctaagacaggaggaaggcacggggctgggggagaaggaacccctagaccctgctcaccactgcccttcggcttttcagccacaccggtgagccccgccatgtcctacctgagtgagtacatgctggcagctgccactcctcccactgcttagagcctgcn

SEQ ID NO: 7932 - DNA, 397 bp, Homo sapiens
cccgccctcaccgctgttcggctgtgtcagcctcgcttggcagcctttactccggagaagaccttcaccctggcgcctgagaggacctcacccagggtggcccgtcagcagcacctgggcctggctcgagagtgacctgggagggggctgaaagggcagacaagggagagtcgggggagtcggttcacaggcagcacacttgacctgtgagggggccctcggtgggacggtgggtgaggtcgcctcccactggagcttagggctggcacccagcgaggggcagcaggaccacgtggctggcaaggagctgtttagggctgagagccaggcacctaatgttggtgccctgtcccatcccatcgaagacacgcggccttatggagtccccatgggacgg

SEQ ID NO: 7933 - DNA, 398 bp, Homo sapiens
gcaagagaaacattctttcctaaatataaatgaaaatctatcctttaaactcttccactagacgttgtaatgcacacttatttttttcccaaggagtaaccaatttctttctaaaacacatttaaaattttaaaactatttatgaatattaaaaaaagacataattcacacattaataaacaatctcccaggtaaaaaaaaaaaaaaaaaaaaaaaaaaaaaaaaaaaaagggggggggctttttaaaaaatccttgggggggcccaaatttaccgggggggggaaagaaaaaatttttttttttagggggggcatattaaaacccccctggggttttttggaaaagaacctttttttggggggggggaaaattgggcccccccccctccaaaaattt

SEQ ID NO: 7934 - DNA, 392 bp, Homo sapiens
  misc_feature (1)...(392): n = A,T,C or G
tggtagggcagctcaagagagtcccacgaactggctgggtatacagaaatgtccagaggccggagagcgtttcagatcacatgtaccggatggcagttatggctatggtgatcaaagatgaccgtcttaacaaagaccgatgtgtacgcctagccctggttcatgatatggcagaatgcatcgttggggacatagcaccagcagataacatccccaaagaagaaaaacataggcgagaagaggaagctatgaagcagataacccagctcctaccagaggacctcagaaaggagctctatgaactttgggaagtaagtatatatggagtacgagacccaatctagtgcagaagccaaatttgtgaagcagctagaccaatgtgaaatgattcn

SEQ ID NO: 7935 - DNA, 394 bp, Homo sapiens
gcgcgttgcttgaaattgaaaatcaagattttaatgttctttattaagctccttctttttattggtcctctaggtatttcctccagaattgatcaagacaattcatcatttgattctctatctccagagccaaaatcaagatttgctatgttagacgatgtaaaaattttagccaatggcctccttcagttgggacatggtcttaaagactttgtccataagacgaagggccaaattaatgacatatttcaaaaactcaacatatttgatcagtctttttatgatctatcgctgcaaaccagtgaaatcaaagaagaagaaaaggaactgagaagaactacatataaactacaagtcaaaaatgaagaggtaaagaatatgtcacttgaactca

SEQ ID NO: 7936 - DNA, 394 bp, Homo sapiens
caatgttttaaaaattccacgtgaaacatataatttgtgaccttttcactagtcactcaaaactgtgtgtgtgtgtgtgtgtgtgtgtgtataaaagaaaaacatataatgaaaataccccatatgtagtatatataccttatcttcctcaccagcctctaagcggtttgtccctggttctgtcatttccactgtggctttgatgtccccgcccccgcacgatcctgacacctatggccaggtgtttgaactgtgcactaggtatggtgaaagcaccctgccccagctagactttgtgctagtcttgttattccgcttcttagctgttgaagtctccagtcccaggaagccttcatgctgtccccctgtcttctcctttctttcacctgcccat

SEQ ID NO: 7937 - DNA, 414 bp, Homo sapiens
tgggacatggcaaagcatggcacagatgatggtgttttatggatgaattggaaggggtcatggtactcaatgaagaagatgagtatgaagatcaggcccttcttcccacagcaatagtccccaatacgtagatttttgctcttctgtatgtgacaacatttttgtacattatgttattggaattttctttcatacattatattcctctaaaactctcaagcagacgtgagtgtgactttttgaaaaaagtataggataaattacattaaaatagcacatgattttcttttgttttcttcatttctcttgctcaccaagaagtaacaaaagtatagttttgacagagttggtgttcataatttcagttctagttgattgcgagaattttcaaataaggaagaggggtcttttatt

SEQ ID NO: 7938 - DNA, 483 bp, Homo sapiens
  misc_feature (1)...(483): n = A,T,C or G
aatgatangccctgaggaaccgtagaggaactctcggancgacccacgcgtccggttgctggtaaattagaagctacaataataattattggcagaaattatacttataaagtgcagatccttgttctttgacaatttgtgatgtctgaaaaaacagaacccgaaaagctatggtgatatgtacaggcattatttcagactgtaaatggcttgtgatactcttgatacttgttttcaaatatgtttactaactgtagtgttgactgcctgaccaaattccagtgaaacttatacaccaaaatattcttcctaggtcctatttgctagtaacatgagcactgtgattggctggctataaccaccccagttaaaccattttcataattagtagtgccagcaatagtggcaaacactgcaacttttctgcataaaaagcattaattgcacagctaccatccacacaaatacatagtttttctgacn

SEQ ID NO: 7939 - DNA, 412 bp, Homo sapiens
  misc_feature (1)...(412): n = A,T,C or G
aggaatcagcaggtgacgatcagccaggagctacataatttctgaggggtttggtcattctttggtttctctttcacaggatacaagtgatgccttcaaatttgagctcagtttcttatggtcgtttaggagcatgagggtttctgcaataatctaccagtgaaatgatgatcaagatcttggaaagcactctactggtcaagcagaatagttcctgtcatctccattaagaatcagcttattggccgggcgcagtggctcatgcctgtaatcccagcactttgggaggctgaggcgggtggatcacgaggtcaggagatcgagaccatcctgtctaacaaggaatcctttctggcactcaagagttttcaattcaatcctgatgaatgaatcattatttgataccagcctn

SEQ ID NO: 7940 - DNA, 425 bp, Homo sapiens
tgccgtgtgtgagaacgcgttgaggagttgagtccacttctaagccttgccttctggaatgagagtagggtgcagggccactgaggaccactccccaataagcatactgtctctgggaagtcctggaggcagtagtaagctccaggtccactcggcccccacactctgtttagggagtgttctgtaaaagatatgtgtgtttcagatgttgacagaaaacacagtggtgctggcgatgagcatattgaattcttgtgattttgtgatacacagacgggtcttgggaaaaggctgtcttccctacttgtgaaaaatacgtaaatatcaagtaagtcatgtacttgctgggatgttgtttcccggtcagtaaggaggagctgggctgttctgcctcctccagctacccctccccgatcctggggtac

SEQ ID NO: 7941 - DNA, 414 bp, Homo sapiens
agaagatcctcaacaattgtcatgctttcaacgttttttttgatgactctcaggacaaagcagtgctcaagggaggacccctggatggcacttacagattgattcagtttcactttcactggggttcacttgatggacaagggtcagagcatactgtggataaaaagaaatatgctgcagaacttcacttggttcactggaacaccaaatatggggattttgggaaagctgtgcagcaacctgatggactggccgttctaggtatttttttgaaggttggcagcgctaaaccgggccttcagaaagttgttgatgtgctggattccattaaaacaaagggcaagagtgctgacttcactaacttcgatcctcgaggcctccttcctgaatccttggattactggacctacccag

SEQ ID NO: 7942 - DNA, 434 bp, Homo sapiens
  misc_feature (1)...(434): n = A,T,C or G
tgaatgttccgggtcgacccacgcgtccgcattcttcctctggagtcaaaagaactgccaaagatgttattggcaaagcaaagagtctccaaaaacttgagcctcatcaaaaagatgacataaataaaaaggcatttgataagttcaaaaaagaacatggagtggtacctcaagcagacaacgcaacgccttcagaacgatttgaaggtccatatacagacttcaccccttggacaacagaagaacagaagcttttggaacaagctttgaaaacatacccagtaaatacacctgaaagatgggaaaaaatagcagaagcggtgcctggcaggacaaagaaggactgcatgaaacgatacaaggaacttgtcgagatggtaaaagcaaagaaagctgctcaagaacaagtgctgaatgcaagtagagccaagaan

SEQ ID NO: 7943 - DNA, 395 bp, Homo sapiens
gcgctctaatctgataaatggctactatatgatattttctgacatggcatttggttttgggtatctgttacttgggcactattcttgcttgcctctttatttttgccagtgtactatacctcagtcctatttgaaagacctaattgaaagaaaaatcatagaaataagtaaaatgatttgttttataatttatccaccatgtccagtttggttagcttgttatgcaatataagtgaaatatcatgtttttacccgtgtcccttttatcatgaaaattaacacaaaatgggcattctcttttgtttcatacttatcgggatattgattgctttgaaactatgatcaatacttactttatttttttctgtccttgaagacactacaccttgatacaa

SEQ ID NO: 7944 - DNA, 401 bp, Homo sapiens
ttccctggagtcagggtgaactgcaaagctttggctgagacctgggatttgagataccacaaaccctgctgaacacagtggctgttcagcaaactaaccagcattccctacagcctagggcagacaatagtatagaagtctggaaaaaaacaaaaacagaatttgagaaccttggaccactcctgtccctgtagctcagtcatcaaagcagaagtctggctttgctctattaagattggaaatgtacactaccaaacactcagtccactgttgagccccagtgctggaagggaggaaggcctttcttctgtgttaattgcgtagaggctacaggggttagcctggactaaaggcatccttgtcttttgagctattcacctcagtagaaaaggatctaaggg

SEQ ID NO: 7945 - DNA, 416 bp, Homo sapiens
cggacgcgtggggaagaaatgaattacatggctgccgagggcgagggcgaggtgtgtgtgaaagggccaaatgtatttcagggctacttgaaggacccagcgaaaacagcagaagctttggacaaagacggctggttacacacaggggacattggaaaatggttaccaaatggcaccttgaaaattatcgaccggaaaaagcacatatttaagctggcacaaggagaatacatagcccctgaaaagattgaaaatatctacatgcgaagtgagcctgttgctcaggtgtttgtccacggagaaagcctgcaggcatttctcattgcaattgtggtaccagatgttgagacattatgttcctgggcccaaaagagaggatttgaagggtcgtttgaggaactgtgcagaaataagga

SEQ ID NO: 7946 - DNA, 453 bp, Homo sapiens
  misc_feature (1)...(453): n = A,T,C or G
nattgaacgctttcggtaccggatggagaaccctcgggtcgacccacgcgtccgggacgtgccgtgccgctgggttctgagccggagtggtcggtgggtgggatggaggcgaccttggagcagcacttggaagacacaatgaagaatccctccattgttggagtcctgtgcacagattcacaaggacttaatctgggttgccgcgggaccctgtcagatgagcatgctggagtgatatctgttctagcccagcaagcagctaagctaacctctgaccccactgatattcctgtggtgtgtctagaatcagataatgggaacattatgatccagaaacacgatggcatcacggtggcagtgcacaaaatggcctcttgatgctcatatctgttcttcagcagcctgtcataggaactggatcctacctatgttaattaccttatagaactacta

SEQ ID NO: 7947 - DNA, 432 bp, Homo sapiens
  misc_feature (1)...(432): n = A,T,C or G
cccacgcgtccgcggacgcgtgggattgaatcccagaaaggttcattgtcttcaagctcacaatactattttgggacaaacagttgtctagtgtttggactcatgaaccctgattcttgagggtggtattttactgcttttgtgatttggtttcaacatatatagtcttttctccggagttaccttaggtcagtggccagtgtttcagcccctggaaagggcatgggctgccactgaggttggtcacaggcctctcagctcatggtgggagtgggttcaggagttggtaagtagggttcagttctgttgttgccaccgatggcaacaggggtttgtaataatccctagttgtgtcaattatgtcacttaattttcacaacaggtctctgaagtgtttctcatctcatttttacagatgaggcctgcctgtgn

SEQ ID NO: 7948 - DNA, 418 bp, Homo sapiens
cccacgcgtccggggtcccacactgcactattaattccacccactgtaagggcaaggacaccattccttctacatataagaaaaaagtctctccccaagggcagcctttgttacttttaaatattttctgttattacaagtgctctaattgtgaacttttaaataaaatactattaagaggtgaaaaaaaaaaaaaaaaaaaaaaaaaaaaaaaggggggcccctttaaaaaaatccttgggggggccaaatttaaccggggctggcaaggtaaaatttttttccttaagggggggcgaataaaaacctccctggggattttggaaaagaaccctttttttgggggggggccttattgggccaacctccctccaaaatttaaagcctttagggaaaaaaaaaatttttaagggggaaa

SEQ ID NO: 7949 - DNA, 485 bp, Homo sapiens
cccccatgatcccatgcggaccgcatgaatccatgggcgacccacgcgtacggggactgttgagccaggacaacctcaccagcatgtccctatgacatgcccagggttctcatccacagcagctgggtcacctgatagggccgccctggacttggggtccctccacctgggggcccctggacactgtctacttggagaccactggcccccttcccccagggttgcccagatggggcctcctttgttctgcattcagcagctatttatcgagtacctactctgtcaggcactgtcataggcgtggggcaaagcaggaaccaagagacgaggttccctgatctcatgggacttacgttctggtgaagggagacaatcagtgcacatgcacacaccccacacgcatacacacatgaacacatgcacatgtgcacacacaagtaagatggcttcagagagggagaagcactgtgaggcctccagaggat

SEQ ID NO: 7950 - DNA, 416 bp, Homo sapiens
cataagaacattaaaagctgaaattcaggttggtctgcagcctgggcaaggggaacagctcctggcctgtgagcccagctggtggaccactggaaaatatggaatatttcagtacgatggtcccctttgacttgatttaggagctctcagttgcatacaaagatctggtgagcaccttttcatccccagaaaaggagcacgtgaattgagtcgcctggcggctctgtacgcgctcagggaagcttaacttcttggtgcccatctacgtgcactggatgatttttcttttgaacattttgccccactacactgttttggggatagctgggttaagcaagttaaagatatttacatttatattggaattttagcaactttttttcaggttaaatatataatttcaagtgcttttaatg

SEQ ID NO: 7951 - DNA, 474 bp, Homo sapiens
  misc_feature (1)...(474): n = A,T,C or G
attagattgatatccttctggaccgccntggaaancccgcnncgacccacgcgtccgaagcttaccaagagactaaagagtgaatccttgaaatttgactttacatttcatttaaaacatgagattggcctctacatgggggacaaaggcggaggacctggcctgaccccaatgcctgacttttgtaccaatgacgtggacttctactgtgctaccacattccattcttttctaccgctttgtagaaagccagggaagaagaaggatattcttgttgcagtaaaaacatgcactaaatttcatggtgacagaatacctattgttaagcagacttgggagagccaggcacgtctcattgaatactatagtgactatactgaaaattccattcctactgtggatttgggaattcctaatacagatagaggtcattgtggaaagacatttgccattttggaaagacttctgaatccg

SEQ ID NO: 7952 - DNA, 506 bp, Homo sapiens
  misc_feature (1)...(506): n = A,T,C or G
ggtggttttnttttgatcgcctgcaggttaatgattcccatgccggaccgcaccggaatttccggatctacccacgcgttcgcgaaccacgcgtccggggttttattctggtgtaattcccccaccacctggcagggggcaagtgaaaaagggatccgtaagccatgatacggttcagcctcgtacatctgcagatgcacaggaacctgcatccccagtagtttcaccacagcaatccccaccaacttctccacacacatggaggaagcacagccgtcatcccagcggtgggaatagtgagaggcctctcgcgggacctgggccattttggtctccctttggtgaagcacaatcaggttcttctgctggtgatgcagtgtggtcagggcattccccacctccacctcaagaaaactgggtcagttttgcagatactccaccaaccagtactcttttaaccatgcatcctgcttctgtccaggaccagacaacagtacgaactgtgn

SEQ ID NO: 7953 - DNA, 413 bp, Homo sapiens
tcctcggagcaggcggaggaaagggacttgagcgagccagttgccggattattctatttcccctccctctctcccgccccgtatctcttttgacccttctcccaccctcgctcgcgtagccatggcggagccgtcggcggccactcagtcccattccatctcctcgtcgtccttcggagccgagccgtccgcgcccggcggcggcgggagcccaggagcctgccccgccctggggacgaagagctgcagctcctcctgtgcggtgcacgatctgattttctggagagatgtgaagaagactgggtttgtctttggcaccacgctgatcatgctgctttccctggcagctttcagtgtcatcagcgtggtttcttacctcatcctggctcttctctctgtcaccatcagctata

SEQ ID NO: 7954 - DNA, 408 bp, Homo sapiens
  misc_feature (1)...(408): n = A,T,C or G
ttcctagcaggaccaactacagtcttcccaaggattgagttatggactttgggagtgagacatcttcttgctgctggatttccaagctgagaggacgtgaacctgggaccaccagtagccatcttgtttgccacatggagagagactgtgaggacagaagccaaactggaagtggaggagccaagggattgacaaacaacagagccttgaccacgtggagtctctgaatcagccttgtctggaaccagatctacacctggactgcccaggtctataagccaataaagcccctgtttacttgaaaaaaaaaaaaaaaaaaaaaaaaaaaaaaaaaaaaaaaaaaaaaaaaaaaaannggggggggggctttttaaaaaattctttggggggccccattttttcgggggt

SEQ ID NO: 7955 - DNA, 409 bp, Homo sapiens
agaacctctgctgataccagacagccccaattcattatccgggactggcacggtgcgccaaggcatgagggcgcagccatggctggccgcatctacatgtcaggcatggcaccccgcccctccttggccaagaaacaaaggtttaggcatcgcatccgcaaaggctaccgttcacaacgaggccacagtcgaggccgcaaccaaaactcccgccggccatcccgcgccatgagggtggacttgttctccagagaagagagcaacttgggagccaacaactatgatgactacaggatggactggcttgtgcctgccacctgtgaacccatacagagtgtcttcttcttctctggagacaagtactaccgagtcaatcttcgcacacggcgagtggacactgtggaccctg

SEQ ID NO: 7956 - DNA, 406 bp, Homo sapiens
  misc_feature (1)...(406): n = A,T,C or G
tcctttttaccttgaatcacagtggcttatctaaaaatataagcttttttctgtcatattctgaattccctgaaggtaaggactatgtctgattcctctctttgtcctctgcacccagcgtagggcctgaaacagagtagctagcagtaaagatacactgaatgaatgaatgagtcaaccatccttggcctctggagctaattgagaaggctagggggagttccgctgtagggagaaggatgttgcatccctttgtagattgtgtagcattcaaaacctgctgaacactcaccctcaatgtatattctctgttctggcctgcttcaaggtcagttacactacttcctgggatgggcctttctctggcttaagcttggttgtccctggctttcccaaggatcacagn

SEQ ID NO: 7957 - DNA, 191 bp, Homo sapiens
atacaaataaaatgagtatcatttcatgttaaacctcaaataaatgcttccttatgtgaaaaaaaaaaaaaaagggggggcctctttaaagaatccttagaggggccaaattttaccctgtaacgcaaggaaaaagctttctccttatagggggtgtaataaaaccctacttgggcttcttagaaaaaaac

SEQ ID NO: 7958 - DNA, 402 bp, Homo sapiens
  misc_feature (1)...(402): n = A,T,C or G
aaaatgctagtatgttttgctcacttcatatgtaacaggtgcccttatgttgtgctgtatcctgtgctttttctgtgggaccattccattcaggagcaaagagcaccatgattccaatcttgtgtgtgtttactaacccttccctgaggtttgtgtatgttggatattgtggtgttttagatcactgagtgtacagaagagagaaattcaaacaaaatattgctgttcttcagttttgtttgtggaatttgaaattactcanatttaaaataaattactggactgtggaaataacatagaattgaagttgtaattanataccactcanacgaaaaaaaaaaaaaaaaaaaaagggcccgccgtttaaaagaatccttagggggccaaattttacccgccatg

SEQ ID NO: 7959 - DNA, 402 bp, Homo sapiens
gcctttgttcgcctctatgcattgcatgcctgctttaccctcctcaacgcctgagaatggaggtaaagtgcctggactgggagctcgttaactatgctgggaaatggtccaaacgaatcacaatgtgaggtgttttgttttcatttttatttcaagttggacagatcttggagataatctcttacctcacatagatgagaaaactaacacccacaaaggagaaatgaggttataacaaactcatactgcaagagctgagaacgaagcgctgatcttctatttaattccccacccatgaccctcacatagcaggagggccttgcccacattcacagggctcttcagtctcataatcacgacactggccaggtgtctggtttgggtccacagtgctcatcatcg

SEQ ID NO: 7960 - DNA, 393 bp, Homo sapiens
agtcgatgctgaggatgggcacggcccaggggaacatcttaagcggaagatcgtcctggacccttcaggctgcatgaacatctacctggtgctagatggatcagacagcattggggccagcaacttcacaggagccaaaaagtgtctagtcaacttaattgagaaggtggcaagttatggtgtgaagccaagatatggtctagtgacatatgccacataccccaaaatttgggtcaaagtgtctgaagcagacagcagtaatgcagactgggtcacgaagcagctcaatgaaatcaattatgaagaccacaagttgaagtcagggactaacaccaagaaggccctccaggcagtgtacagcatgatgagctggccagatgacgtccctcctga

SEQ ID NO: 7961 - DNA, 392 bp, Homo sapiens
  misc_feature (1)...(392): n = A,T,C or G
cccacgcgtccgtcctgctttagactatggatttctttaaggaatactggtttgcagttttgttttctggactatatcagcagatggtagacagtgtttatgtagatgtgttgttgtttttatcattggattttaacttggcccgagtgaaataatcagatttttgtcattcacactctcccccagttttggaataacttggaagtaaggttcattcccttaagacgatggattctgttgaactatggggtcccacactgcactattaattccacccactgtaagggcaaggacaccattccttctacatataagaaaaaagtctctccccaagggcagcctttgttacttttaaatattttctgttattacaagtgctctaattgtgaacn

SEQ ID NO: 7962 - DNA, 395 bp, Homo sapiens
agcagtgcatcatgctggaaggactaactgatgtactttgtgatctaatatacttctctatgaagaacgaagagagcattatacccatgagtgccgctgggataatctaagagtcttacccctcagcgttcttcactcctttctatatggtgtatggcagcgaataacataatatccttacgaggaataatcctcacgctaaacctttatggaaagaaaagctaggtcagttttgattaggaggtgcttctgaatgcagctttacaaaattttttaaatactgctttgttacaaaatggaggtattggaaccagagagaatatcattgctagcgttgaatattgtataactataatggaggcttattataatgtgtcaatggtgtgctgagattc

SEQ ID NO: 7963 - DNA, 392 bp, Homo sapiens
cggacgcgtgggcgagtgaggcgacagagtaagttttggcgctcatgcggcgaccatggcgtatcacggactcactgtgcctctcattgtgatgagcgtgttctggggcttcgtcggcttcttggtgccttggttcatccctaagggtcctaaccggggagttatcattaccatgttggtgacctgttcagtttgctgctatctcttttggctgattgcaattctggcccaactcaaccctctctttggaccgcaattgaaaaatgaaaccatctggtatctgaagtatcattggccttgaggaagaagacatgctctacagtgctcagtctttgaggtcacgagaagagaatgccttctagatgcacaatcacctccaaaccagaccactg

SEQ ID NO: 7964 - DNA, 396 bp, Homo sapiens
cccacgcgtccgcccacgcgtccgtgagaaattccaccactagatggtggacaaccgtggcttcatggtgactcggtcctataccgtgggtgtcatgatgatgcaccggacaggcctctacaactactacgacgacgagaaggaaaagctgcaaatcgtggagatgcccctggcccacaagctctccagcctcatcatcctcatgccccatcacgtggagcctctcgagcgccttgaaaagctgctaaccaaagagcagctgaagatctggatggggaagatgcagaagaaggctgttgccatctccttgcccaagggtgtggtggaggtgacccatgacctgcagaaacacctggctgggctgggcctgactgaggccattgacaagaacaaggg

SEQ ID NO: 7965 - DNA, 306 bp, Homo sapiens
ttaaaatagcacatgattttcttttgttttcttcatttctcttgctcaccaagaagtaacaaaagtatagttttgacagagttggtgttcataatttcagttctagttgattgcgagaattttcaaataaggaagaggggtcttttatccttgtcgtaggaaaaccatgacggaaaggaaaaactgatgtttaaaagtccacttttaaaactatatttatttatgtaggatctgtcaaagaaaacttccaaaaagatttattaattaaaccagactctgttgcaataaaaaaaaaaaaaaaggggg

SEQ ID NO: 7966 - DNA, 418 bp, Homo sapiens
aaggagcacactccaggccaggggtgcatggcagaggaaggtggggagagcccagaaggacattgcagacagacagcctgcatggggactctggcatcagaaagccgaatgtttttgggaaacgggtgggtcacacaggcaggggtgaaacatgggctctgaggttggctacctgattcaaacccggccgcgctgcgcacctgctgggtgacttggccaggatcccccacttcgctgtgcccatatggaaaagagggcaaggccagtcctcactgccgagggccgagaaggcggtgccgagcccctgctgctgcatgaaccttagccgctgtcactgatcccaattactctgatccttttgcccttccttcccataacggcctgctggacgccacagcctgaatactggagagagctg

SEQ ID NO: 7967 - DNA, 421 bp, Homo sapiens
cctacctgcatcagggaagaattcttaactctaacttttttttcacatgaggtttttctgataacggcttgggacaagaagtctgtcatgttagttacgcacgcaaaaaatcctactaatccagttttgtttgaaagttgcctgtccgtatgatattttaaaagccaaggttaatttcaaaaaacctttttttctgagattacttttggggtaatatttaaaatgagagacattctgtatccctgtagtatacatagggaatataacattccagcgtatacaaagaaggcaaattctttaatcaaataaagcgcgttataaaatgaataaaaaaaaaaaaagaggcgccccctttgaagaacatttcgggggacctaggcttccgcaggcctccaaagaataacttctatccttttagggg

SEQ ID NO: 7968 - DNA, 400 bp, Homo sapiens
ttaagaatacacaccagctttctcctgattagaggaagagccccaaagcttctatggacactcacttttctcttcttcttcttgcattattatgaggaaatccttagtggttggggaacttgggcgactttggctaatgaggaggtctgtgccttgagctcccaggccacagaatagtaaatagtctgtgcctccagccctgcagtgtgaggttgcagtcctgtgggctccacagacatcacctgtatcaggaggctcatgtcttaccctgtcttcttgccagcctcaaggacggagtctgagcctccatggtgcaccacacagggaggacagtggacctgttctccgtggtcatggcccagcagaggggaagggcagttcagtgagtgtaggcaaaaga

SEQ ID NO: 7969 - DNA, 401 bp, Homo sapiens
  misc_feature (1)...(401): n = A,T,C or G
atgttttgcatgcacagcttcatttgatctttatagtagccctcgagatagatcgttattatgcccattttacagatgaggaaactgagactcgaagaggtttggcaccctagatatatagctaggaaatggtaggaaatccagatccagctgattcttaactgctatggagtactgccttctttgcacacgtagccctttataatatgttcctccaggtctgcccttgagataacaaacagcataacataaaactgtgttcgtgttcgtgagtgcatgactttgttagctgcagtatcctcttaaaagaggacacttttttgacctggaacatactgngttttctggcctgcatgggcattattttggatgctgagatgatagtccttttgaccaggatg

SEQ ID NO: 7970 - DNA, 395 bp, Homo sapiens
gcgccccattcaggtccatcagcctctgattaatatccgtgagagtgagtgacggagtgagagtgcgagcgagtggatgtggctgtcagtgcagaacagcatgtgtctctttccttctgatatatgaatgaatcaggttttttttttttttttttgcaaccccggggaatggggagactggtcccccttgggaaaacaggttccctttggaaaagggggctgggtttttccctttgggaggcatggatctgggaaaattttttttccccccttcccctgtgggccgaaatcaaccctttggggaagacaaaacccgaaggaggggagttttggttggcccccccccactttcggtttttagggggccatcctcaagagcccaccccctcccctct

SEQ ID NO: 7971 - DNA, 403 bp, Homo sapiens
  misc_feature (1)...(403): n = A,T,C or G
agcaagccagggaattaatgcaaaaaggctcaagcttctgtgcccctgggaaatggcagaggaagacagcgtcagcctcagagcacacagcactgagttgtaagaaacaggtctcatcatccccttggccagcagattttcaccctgggcccactaagaagcctgccagggggtcctctgttgtctggaccctgaggcttcatcctcaatgtgttggagcctaggagagaggattagagttatgcgagtttcccaacggtgcagtctctactcaccgcaacctctgcctcccgggttcaagcaattctcctgcctcattctcttgggtagctgggattacaagcatgcgccaccactcccagctaattntgtatttttagtagaggtggngtttctccatgtg

SEQ ID NO: 7972 - DNA, 421 bp, Homo sapiens
cggacgcgtgggcacatttctgatatacatcacggagttactgaaaaagctgcaatcaaccacagtcatgaacccctacatgaagcttgctccaggagaacttactatcatcctctaattttttaaaagaaatcttcatttattcttcttttccaattgaactttcacatagcacagaaaaaattcaaactgcctatattgataaaaccatacagtgagccagccttgcagtaggcagtagactataagcagaagcacatatgaactggacctgcaccaaagctggcaccagggctcggaaggtctctgaactcagaaggatggcattttttgcaagttaaagaaaatcaggatctgagttattttgctaaacttgggggaggaggaacaaataaatggagtctttattgtgtaaaaaaag

SEQ ID NO: 7973 - DNA, 500 bp, Homo sapiens
  misc_feature (1)...(500): n = A,T,C or G
gcatggttttnaaatgatcgcatgcagaacctgactcgccactccaaggtcgacccacgcgtccgagctaggattgccctaactgaagaggatactgantttttgattcatacctgtctaggctctgatgcctagaattgtttttgggtctcttttttggttctgtttttgttgctaaacatcataatgcagtctctcattaatttttaccatcatttaccctgataaactgcctcttctccatttctccttcccttactacctttctttgaattactgtaactgattggtcccaccaaaattttaaagtacatgaagtatcttcattggttcatcctcttgccccctccagatgtggaaaaactttatcctgccccctagctgaccacccaggttgctttatttcagtggcccatgtgagtctaccttcccctaaggagtgccctaatccatccctttgtttgggtcttatgacccatacctttaggcatttaccattg

SEQ ID NO: 7974 - DNA, 435 bp, Homo sapiens
  misc_feature (1)...(435): n = A,T,C or G
catgtaacctctctgagaactnngccaaacccgggngacccggcggacccccgcgtgcgtggcacagatgaattcagcttagagaactattaacacaggacaatgcaagcccatgagctggttcggtattttcgaatgccagagctggttgacttccgacagtacgtgcgtactcttccgaccaacacgcttatgggcttcggagcttttggagcactcaccaccttttggtacgccacgagacccaaacccctgaagccgccatgcgacctctccatgcagtcagtggaagtggcgggtagtggtggtgcacgaagatccgcactacttgacagcgacgagcccttggtgtatttctatgatgatggcacaacattatacgaaggtttccagaggggaatacaggtgtcaaataatggcccttgtttaggctcn

SEQ ID NO: 7975 - DNA, 433 bp, Homo sapiens
tgaacagtgcctagtgaagttaggtgacttttacttcttttacgatgactacttttggtggagttgaaatgctgttttcattctgcatttgtgtagtttggtgctttgttccaagttaagtgttttcagaaaagtatgttttgcatgtatttttttacagtctaaattttgactgctgagaagtttctattgtacaaaacttcatttaaaaggtttttctactgaatccagggtattctgaagatcgaagcctgtgtaaaatgctaccaaatggcaaaaagctacaataaacagtttgatttttacttttctttctaacatatcaatgcttagcagaactattcagattgtcagtagtaaatttaaagacaaatgcccgttttcctccagtccatgaaacataccatacttatatacctgcaactaagtgttt

SEQ ID NO: 7976 - DNA, 421 bp, Homo sapiens
caggacaccattcactgtgttcctgagtttggggaggatggaagagaagcacttagactatattctaaaaatcagcttgctattagcaaggcagaaggagatgctctcgattcccatctgagattgtcatccaaatgcatttcagctgggtgctgcagcatttgtgtggtcagattttcaatttctctattgataggctgcttctggcacagtagctaatattaccattgctactgtgacagccaagtcttagacagagagccaaaatatttttattgccgggctggcaggagcaggatggcggcggcggcggctgcaggcgaagcgcgccgggtgctggtgtacggcggcaggggcgctctgggttctcgatgcgtgcaggcttttcgggcccgcaactggtgggttgccagcgttgatg

SEQ ID NO: 7977 - DNA, 422 bp, Homo sapiens
caagtgcttctgccaaagcatgtgtggaagccatgagcaagtctcttgcagctgaatggggtaaatatggaatgcgattcaatgtgattcaaccagggcctataaaaaccaaaggtgcctttagccgtctggacccaactggaacatttgagaaagaaatgattggcagaattccctgtggtcgcctggggactgtagaagaactcgcaaatcttgctgctttcctttgtagtgattatgcttcttggattaatggagcagtcattaaatttgacggtggagaggaagtacttatttcaggggaattcaacgacctgagaaaggtcaccaaggagcagtgggacaccatagaagaactcatcaggaagacaaaaggttcctaagaccactttggccttcatcttggttacagaaaagggaat

SEQ ID NO: 7978 - DNA, 424 bp, Homo sapiens
aacgcatctttttggcttattttggacataagtgtaactataccgggtgccaatgttcctatagcactctttgtgtgatagaaggtgccacttttacaccaatgcttccagacttttactattataactaatgagggtccccctcatgtctggacttttccttttcatcgtacttaactgttttctgacatttgaaaaaaagcatttgaagatctacattcttttagcctagtaaatgagtcttgcttcattagaaagcatgcctctttatgggcttaggagctgacagatttgaagattattttatcaagataatggggttatttgtttttttttttttttttgggaaaaaaaccccccttctccccttgggggggaagggttgggaccaatttgggtttattgaaacttccaccccccggga

SEQ ID NO: 7979 - DNA, 434 bp, Homo sapiens
  misc_feature (1)...(434): n = A,T,C or G
cacctttcctgagaagccagacttccactgatggaagagctgaaaacacaagcccaggagtgcagacactgccctaattgcttcctgagaattcccatattaataaagaagaaaattatctgccaaaaaaaaaaaaaagggggggccgttttaaagaacccttgggggggccaaattttacgcgggctggcaaggtaatatttttttccttatggggggccgtattaaaacctacttgggaattttgggaaagaacctttttttggggggggggacatattgggccaacctccctacaaaaattaaaggctttagggaaaatataaaattttaaggggtaaagggggtaaaacaacctgcatatcctggctgttggaaaatttgnnnnnnnnnnnnnnnnnncnncnccnnccggcgggggcgggcggcccccc

SEQ ID NO: 7980 - DNA, 382 bp, Homo sapiens
tgaaccacagggtgtcctgtcagaggagcccatctcccatctccccagctccctatctggaggatagttggatagttacgtgttcctagcaggaccaactacagtcttcccaaggattgagttatggactttgggagtgagacatcttcttgctgctggatttccaagctgagaggacgtgaacctgggaccaccagtagccatcttgtttgccacatggagagagactgtgaggacagaagccaaactggaagtggaggagccaagggattgacaaacaacagagccttgaccacgtggagtctctgaatcagccttgtctggaaccagatctacacctggactgcccaggtctataagccaataaagcccctgttacttg

SEQ ID NO: 7981 - DNA, 422 bp, Homo sapiens
agcacccaagtggggccatatgaacgttgtgtgtttcagcaaggagcccgcagaggaacatggtgctgctctgggggctcctggagctcagctggtcctgcctgcaaggcccctgctccgtgttctcccctgtgagcgccatggagcccttgggccggcagctaactagcgggccgaaccaggagcaggtgtccccacttaccctcctcaagttgggcaaccaggagcctggtggccagactgccctgaagagtcccccaggagtctgcagcagagaccccaccccagagcagacccacaggctggcccgggccatgatggccttcactgccgacctgttctccctggtggctcaaacgtgcacctgccccaacctcatcctgtcacccctgagtgtggccctggcgctgtctcaccctgcg

SEQ ID NO: 7982 - DNA, 407 bp, Homo sapiens
ctgggaagcccaatttggtgacttccacaacacggtccagtgtatcatcgaccagttcatctgcccgggacaagccaagtgggtgcggcagaatggcatcgtgttgctgctgccccatggcatggagggcatgggtccagaacattcctccgcccgcccagagcggttcttgcagatgtgcaacgatgacccagatgtcctgccagaccttaaagaagccaacttcgacatcaatcagctatatgactgcaattgggttgttgtcaactgctccactcctggcaacttcttccacgtgctacgacgccagatcctgctgccattccggaagccgttaattatcttcacccccaaatccctgttgcgccaccccgaggccagatccagctttgatgagatgcttccag

SEQ ID NO: 7983 - DNA, 399 bp, Homo sapiens
  misc_feature (1)...(399): n = A,T,C or G
aacaagcttcattgttttcagctaacagtaaccccagatgagggttactaccagggtggaaaatttcagtttgaaactgaagttcccgatgcgtacaacatggtgcctcccaaagtgaaatgcctgaccaagatctggcaccccaacatcacagagacaggggaaatatgtctgagtttattgagagaacattcaattgatggcactggctgggctcccacaagaacattaaaggatgtcgtttggggattaaactctttgtttactgatcttttgaattttgatgatccactgaatattgaagctgcagaacatcatttgcgggacaaggaggacttccggaataaagtggatgactacatcaaacgttatgccagatgataaaaggggacgattgcn

SEQ ID NO: 7984 - DNA, 459 bp, Homo sapiens
  misc_feature (1)...(459): n = A,T,C or G
attgatcgctttcggnaccgcnccgaattcccggtcaccttgagtccgtcgcctgactttgccacttcaggccaatgggaagtggtcactgaatctgaagggaaaaaggagatgaatgtctttgatggagtcatggtttgcactggccatcacaccaatgctcatctacctctggaaagcttccctggtgagcagcttaccaggaaggaagacccttgacccatgcctgtgacctgacccctgaggaatgggaggattgtggtctgagtaattcctactttggaatgaagtaagacttatcctaattattcttgttccccagaaggatgttggggtaacttgtattactgccatttttgtaattttggagattagagcaaaatttgcagtctatttagttttacaatgactttagtcattgtatcaaatgactggagtatcanagggacgaatgtggag

SEQ ID NO: 7985 - DNA, 415 bp, Homo sapiens
aaagagacctccttgtttcagctgggcctgctgtccagcttcccaggtgcagtgggttgtgggaacaagagatgactttgaggataaaaggaccaaagaaaaagctttacttagatgattgattggggcctaggagatgaaatcactttttattttttagagatttttttttttaattttggaggttggggtgcaatctttagaatatgccttaaaaggccgggcgcgggggctcacgcctgtaatcccagcactttgggaggccaaggtgggcggatcgcctgaggtcaggagttcaagaccaacctgactaacatggtgaaaccccatctctactaaaaatacaaaattagccaggcatgatggcacatgcctgtaatcccagatacttgggaggctgaggcaggagaattgc

SEQ ID NO: 7986 - DNA, 422 bp, Homo sapiens
  misc_feature (1)...(422): n = A,T,C or G
atgacgngcgtctggaanccacacgnattccccgaagtgatttatttttcaaagtagacagttatgttctatagagtgggttgttttttctttaagaaaataatttacataaacagagattatggtaaacattttaaatcttaggctgttggttaaatttaatggtttaagcactgttgggttctctttaattaatatttgcagaaggagaacatatgtgtttcactgatatgtatggtccagaaaaattacttaattctcaaaaatatgttgcattctcatattgcgttagggaaaattccataagtagtctattttttttttcttttgctgactgttaacatccaaacacctgaatgaaaactgactcatttctgtattggcgtttaaaatattgatttgcagatgttcacagaacactg

SEQ ID NO: 7987 - DNA, 493 bp, Homo sapiens
  misc_feature (1)...(493): n = A,T,C or G
acgcggggattgacgcatgatgacgtcccgaaancccggncgacccacgcgtccgcacaggtgtngtgaaaactacccctataagccaaaatgtgaaaggtttatactcatatcaacattgtcgtcattggacacgtagattcgggcaagtccaccactactggccatatgatctataaatgcggtggcattgacaaaagaaccattgaaaaatttgagaaggaggctgctgagatgggaaagggctccttcaagtatgcctgggtcttggataaactgaaagctgagcgtgaacgtgggatcaccattgatatctccttgcggaaatttgagaccagcatgtactatgtgactatcattgatgccccaggacacagagactttatcaaaaacatgattacagggacatttcatgctgactgcgctgccctgattgttgctgctggagttggtgaatttgaagctggtatctaccagaatgggcagacccgag

SEQ ID NO: 7988 - DNA, 381 bp, Homo sapiens
gtgaaagcagggctctgccggagagtgcttgtcctggtttcctatgccattggtgtggccgagccgctgtccatttccatcttcacctacggaacctctcagaagacagagcgagagctgctggatgtggtgcataagaacttcgacctccggccgggcgtcattgtcagggatttggacttgaagaagcccatctaccagaagacagcatgctatggccatttcggaagaagcgagttcccatgggaggttcccaggaagcttgtattttagagccagggggagctgggcctggtctcaccctggaggcacctggtggccatgctcctcttccccagatgcctggctgctgatcgccttccccacccaccaaccctcagg

SEQ ID NO: 7989 - DNA, 396 bp, Homo sapiens
  misc_feature (1)...(396): n = A,T,C or G
caaaattgatgcagcctcgcctctagagaaagtctgtctcattggctgtggattttcaactggttatgggtctgcagtcaatgttgccaaggtcaccccaggctctacctgtgctgtgtttggcctgggaggggtcggcctatctgctattatgggctgtaaagcagctggggcagccagaatcattgcggtggacatcaacaaggacaaatttgcaaaggccaaagagttgggtgccactgaatgcatcaaccctcaagactacaagaaacccatccaggaggtgctaaaggaaatgactgatggaggtgtggatttttcatttgaagtcatcggtcggcttgacaccatgatggcttccctgttatgttgtcatgaggcatgtggcacaagtgn

SEQ ID NO: 7990 - DNA, 386 bp, Homo sapiens
ttgcccacgcgtccgcccacgcgtccggcaggcaggagttgggaggaggcggcagcggcggcggcagaaacagcagcggcggcggcggcggcagctgggaggaggtggtgacggtggcaacggcagcgtcggggacgatggcgcgactcgtggcagtgtgcagggacggggaggaggagttccccttcgagaggaggcagattcccctctacatagacgacaccctgacgatggtgatggaatttcctgataatgtgttaaatctcgatggacatcagaataatggtgcacagctaaagcagttcattcagcgacatggtatgcttaagcaacaggatctaagtattgccatggtggtgacatcacgcgaagtcctgagtgcactt

SEQ ID NO: 7991 - DNA, 398 bp, Homo sapiens
  misc_feature (1)...(398): n = A,T,C or G
aggaagacaagttgaccgtgtcccgtgcacggaaaatacagcgtttcttgtctcagccattccaggttgctgaggtcttcacaggtcatatggggaagctggtacccctgaaggagaccatcaaaggattccagcagattttggcaggtgaatatgaccatctcccagaacaggccttctatatggtgggacccattgaagaagctgtggcaaaagctgataagctggctgaagagcattcatcgtgaggggtctttgtcctctgtactgtctctctccttgcccctaacccaaaaagcttcatttttctgtgtaggctgcacaagagccttgattgaagatatattctttctgaacagtatttaaggtttccaataaaatgtacacccctcaaaaan

SEQ ID NO: 7992 - DNA, 397 bp, Homo sapiens
cccacgcgtccgcccacgcgtccgactagttctagatcgcgagcggcggccctttttttttttttttttggttttttgggttttttttttggtgtattgggggtttttttttttttttttttttatttttttttttattttttttttgggggggggggcgggttttaaaaaaaaaaaaagggggggggggggggggaaaaaaaaaaaaaaaaaaaaaaaaggggggggaaagggggggggcccccccccccgggggaaaaaaaaaaaaaaaaaaaggtttttcacaaaaaaaaaaaaaaaaaggggggggggggaaaaaaaaaaaaggggggggggcaaaaaaacgcggggggggaaaaaaaaaaaacccccacttgggggggggggagaaaaaaag

SEQ ID NO: 7993 - DNA, 393 bp, Homo sapiens
tctcaagtacccagggacacaaacactgcggaaggccacagggacctctgcctaggaaaaccagagacctttgttctcctgtttatctgctgaccttctctccactattatcctatgaccctgtcacatccccctctccgagaaacacccaagaatgatcaataaatactaaaaaaaaaaaaaaaaaaaaaaaaaaaacctaaccgttttaaaaacttaaatccccctgaaggttttagaaaatggttttaaaaaattttggcctattttgggaccataccccccttaaaaaaattttgaaagcccaggggcttcaccctttgacaccaaataaaaaaccccttcctgagggaacctttagggggggaaatcccccctcaggttgaaaaccag

SEQ ID NO: 7994 - DNA, 398 bp, Homo sapiens
cggacgcgtgggctgagatcccggtgctgaagactaacgccggaccccgagatcgtgagttgtgggtgcagcgactgaaggaggaatatcagtcccttatccggtatgtggagaacaacaagaatgctgacaacgattggttccgactggagtccaacaaggaaggaactcggtggtttggaaaatgctggtatatccatgacctcctgaaatatgagtttgacatcgagtttgacattcctatcacatatcctactactgccccagaaattgcagttcctgagctggatggaaagacagcaaagatgtacaggggtggcaaaatatgcctgacggatcatttcaaacctttgtgggccaggaatgtgcccaaatttggactagctcatctcatggct

SEQ ID NO: 7995 - DNA, 486 bp, Homo sapiens
  misc_feature (1)...(486): n = A,T,C or G
natggatcgccatgcggnaccgctgaagaactctccgggtcgacccacgcgtccgtccaaagtaactaaacaggagcccacaagacggtctgccagattgtcagcgaaacctgctccaccaaaacctgaacccaaaccaagaaaaacatctgctaagaaagaacctggagcaaagattagcagaggtgctaaagggaagaaggaggaaaagcaggaagctggaaaggaaggtactgcaccatctgaaaatggtgaaactaaagctgaagaggtactttccataaatacctcccactgattgaatcagtgtctttaaagaaatttctcaatccttcagccggtgatagcacgttcttaatgtctctttttattgcctgtaatgttattgcagatccacatctctcgctcaactgttaatgtctcaacctccagaggcaccccacccagcacactgtcagtaaaggggcagattgaaacagtgagagt

SEQ ID NO: 7996 - DNA, 88 bp, Homo sapiens
atcccaaactctctgccccggatatactttgccaaacgaaatttgaattctctgaataaattggtcatgtctaaaagaaaaaaaaaag

SEQ ID NO: 7997 - DNA, 427 bp, Homo sapiens
  misc_feature (1)...(427): n = A,T,C or G
ngaaaccatgactgtgaccaccttctgtccccagccctgtcctggttccttcctatgcccaggtaccacccttcagaccccaggtctaggggagaagagccctggacacccctgctctacccatgagcctgcccgctgcaatgcctagacttcccaacagccttagctgccagtgctggtcactaaccaacaaggttggcaccccagctaccccttctttgcagggctaaggcccccaaacatagcccctgccccggaggaagcttggggaacccatgagttgtcagctttgactttatctcctgctctttctacatgactgggcctcccttgggctggaagaattggggattctctattggaggtgagatcacagcctccagggccccccaaatcccagggaaggacttggagagaatcatgctgg

SEQ ID NO: 7998 - DNA, 367 bp, Homo sapiens
tttaccttgataaggcgtcatatcatacactgagcttgttcttcacggttctgcaagatgtcccagtaagagatctgaaaccagccatagtgaaagtctatgattactacgagacggatgagtttgcaattgctgagtacaatgctccttgcagcaaagatcttggaaatgcttgaagaccacaaggctgaaaagtgctttgctggagtcctgttctcacagctccacagaagacacgtgtttttgtatctttaaagacttgatgaataaacactttttctggtcaaaataaaacacaataaaaaaaaaagggggggcccctttaaaaaaaacccctggggggccactattttgcttgctttgaaaa

SEQ ID NO: 7999 - DNA, 477 bp, Homo sapiens
  misc_feature (1)...(477): n = A,T,C or G
tatgtcgtntgaggaatttgagggcattcccgggnccacccacgcgtccgggcaacagccacaggcagactgaggtggcaataggaaatctgccgagatgttcagtcaggtgcccaggaccccagcctcaggctgctactacctaaattccatgacacctgagggccaggagatgtacttgcgatttgatcagactacaagacgctctccttacaggatgagccggattctagcacgccatcagctagtgactaaaattcaacaagataggaaagtctactgacctccttccctgaaaatttggatcctcatattagcattccattccacttgctgtacttttagttggaaggtctaagacagacaaagctgcttaaatatttttatcactgacttcctagaagaaggaggaaaaaatcttggcaagaagaagggaaatcagtcttgcagaatatcttgaagaagcctgcgaaggaa

SEQ ID NO: 8000 - DNA, 295 bp, Homo sapiens
accaatttatgggagaattgcacacagatgtgaaatgaatgtaatctaatagaagcctaatcagcccaccatgttctccactgaaaaatcctctttctttgggggttttctttctttcttttttgattttgcactggacggtgacgtcagccatgtacaggatccacaggggtggggtcaaatgctattgaaattgtgttgaattgtatgctttttcacttttgataaataaacatgtaaaaatgtttcaaaaaaataataaaataaataaatacgaaaaaaaaaaaaaaaaagg

SEQ ID NO: 8001 - DNA, 450 bp, Homo sapiens
  misc_feature (1)...(450): n = A,T,C or G
taagagnccatcggaacccaatgagaacactcggaacgacccacgcgnccggccagcgaccgtcggnagcagcatggctctcctctttctcctaccccttgccattcagggtgtgagcagggctgagatgggcaccgcggatctggggccgtcctcagtgcctacaccaactaatgttacaattgaatcctataacatgaaccctatcgtatattgggagtaccagatcatgccacaggtccctgtttttaccgtagaggtaaagaactatggtgttaagaattcagaatggattgatgcctgcatcaatatttctcatcattattgtaatatttctgatcatgttggtgatccatcaaattctctttgggtcagagttaaagccagggttggacaaaaagaatctgcctatgcaaagtcagaagaatttgctgtatgccgagatggaaa

SEQ ID NO: 8002 - DNA, 428 bp, Homo sapiens
  misc_feature (1)...(428): n = A,T,C or G
tcaaaactagttaattggaagttaacggtactatttatactaaaagagtaagaccctcatcaatagatggagacatacagaaatagtcaaaccacatctacaaaatgccagtatcaggcggcggcttcgaagccaaagtgatgtttggatgtaaagtgaaatattagttggcggatgaagcagatagtgaggaaagttgagccaataatgacgtgaagtccgtggaagcctgtggctacaaaaaatgttgagccgtagatgccgtcggaaatggtgaagggagactcgatgtactctgtaggcttctgggaggtcccttttcaggggtgtccacaaagtcaaagctattttcataataatactaacatgttatttgccttttgaattctcattatcttaaaattgtattgtggagttttccagaggcn

SEQ ID NO: 8003 - DNA, 417 bp, Homo sapiens
tcgcccacgcgtgctctagcagattgttattcgggacgtgaacaccaccaccctgggatgtgccctctgtggccttgttgagaaccgtgacttcacctagcttgtcatgatcatcaaccttccttgatagagtgccccaaggtcccgggagcacttaccaactctgaagggttctgaccgggtacctttaaacagttcaagcccatgagaggatctgcgctattggattgtctggctgcttacctggcttgcagcctcttacttacttccccaagacaagcaacagactagctgagttgaataggatgatttaattcattgtactgccaggaaaggaaagaaaagcaggtgggaaggggattgggtatagacaggctggtattgagttgtttgggggaaggccttttaagcttcctg

SEQ ID NO: 8004 - DNA, 413 bp, Homo sapiens
gcggcattacgggtggcggtggtcggggcaaggctcatcgttctggcgagcgggctccgcgccgcggggcgcaggctttgcagccaggccacctctgttaacgaacgcatcgaaaacaagcgccggaccgcgctgctgggagggggccaacgccgtattgacgcgcagcacaagcgaggaaagctaacagccagggagaggatcagtctcttgctggaccctggcagctttgttgagagcgacatgtttgtggaacacagatgtgcagattttggaatggctgctgataagaataagtttcctggagacagcgtggtcactggacgaggccgaatcaatggaagattggtttatgtcttcagtcagatcatggaccaggccataacggtgggggctccagtgattgggctgaa

SEQ ID NO: 8005 - DNA, 405 bp, Homo sapiens
  misc_feature (1)...(405): n = A,T,C or G
accccagtggtggcagagcttgggggcctgggcaggggcccgcttggcgggccgggcaacacgtcaacattcttttctgttcttggcattaattattgctgtcttttttttaaaaaaaaaagtttaaataaaatgtctcagagccnaaaaaaaaaaaaaaaaaaaaaaaaaaaaaagggggggggccctttaaaaaaacccctgggggggccaaattttaccgggggggggaaaaaaaatttttttttttttaggggggggtaaaaaaaaccccccggggatttttgggaaaaaaccctttttttgggggggggaaatttggggccccccccccccaaaaaattaaaggccttgggggaaaaaaaaatttttaagggggaaagggggtaaaaccccccccttttt

SEQ ID NO: 8006 - DNA, 401 bp, Homo sapiens
ggggaggcgaaagtgcaacaaggggaaagagattttgaacagatatctaaaacgattcgaaaagaagtgggaagatttgaggcatgtataataattgtgcatttatcttaacaacatggtcacattttgctgcaattttgtggtaaagttgaatttagctttctactaacggactttttaaaatgtacttcaacagaaagaacgagtgaaggattttaaaaccgttatcatcaagtacttagaatcactagttcaaacacaacaacaggtaagccatttttgtttataacttacacttctagaatttgcttttggtatactttcttattttaaaaagatgattaatgaactgggcatttaaactcacgaataagaaatggaagacagaaagccagtgatgg

SEQ ID NO: 8007 - DNA, 404 bp, Homo sapiens
  misc_feature (1)...(404): n = A,T,C or G
gaaaatcacagatctgatcaaggaccttgactcgcagacaatgatggtcctggtgaattacatcttctttaaagccaaatgggagatgccctttgacccccaagatactcatcagtcaaggttctacttgagcaagaaaaagtgggtaatggtgcccatgatgagtttgcatcacctgactataccttacttccgggacgaggagctgtcctgcaccgtggtggagctgaagtacacaggcaatgccagcgcactcttcatcctccctgatcaagacaagatggaggaagtggaagccatgctgctcccanagaccctgaagcggnggagagactctctggagttcagagagataggtgagctctacctgccaaagntttccatctcgagggactataacctga

SEQ ID NO: 8008 - DNA, 416 bp, Homo sapiens
  misc_feature (1)...(416): n = A,T,C or G
cccacgcgtccggccatagatgagagaagccaggaggatgtgtagcattaaatatagaaccgtggtgtggtaggcaccctctaagacggtccccaatgatccctgctactagtgtgcccttgtttaatcatctcttgagggtgggctggacctaatgatagtaaaagtgatggaatcccacttctgagattaagttaccaaaagaccatggcttctgttctccccttcatcccccagagaagcacattgccatgtgagtataaagaaaactagcctgggatttcagagatcctggttattggaagtagatctgttctacttactgacttgataaataacctctctctgagtttcattttccttttctgtgaaattaagggaataataatgcctcttaatgagctgttgagagagtn

SEQ ID NO: 8009 - DNA, 414 bp, Homo sapiens
agcttctgagacgtcatgaggagattctgcctttgccaggtgactgtctggggagcgggtctgctcccaaggggcctgagcagtccttggcctgctaaggtcttggaacttgcctgcctttccatccatggccagcagcacctgccctacctgccccacttgtccttagcctggacctctgacagcagcatctctaccttctccccagctcccaggaccacaggctcaggcaggggcctccatgggccccaggggaacactggggacttggcctctctctagggtacatggtgctggttcaggctgggagaggcagcccaggaagtctcatctggggagcaggcagccagcatctgggccttggcctggagcacaaagaccctggctttcattttctctcaggtgaaaggaaat

SEQ ID NO: 8010 - DNA, 429 bp, Homo sapiens
gttatcatagcaacccctgggcgacttctggatataataaagcagagctctgtagaactctgtggtgcaaagattgtggtagtagatgaagataagaaactctttaagcctccagtgttagtatttgtggactgcaaactaggagcagatcttttgagtgaagccgttcagaaaatcacagggctgaaaagcatatctatacattcggagaagtcgcaaatagaaaggaaaaacatattgaagggattacttgaaggagactatgaagttgtagtgagcacaggagtcttgggacgaggcctagacttgatcagtgtcaggctggttgtcaattttgatatgccttcaagtatggatgagtatgtccatcagattggaagagtaggaagattaggtcaaaatggaacagcgattactttcatcaataat

SEQ ID NO: 8011 - DNA, 400 bp, Homo sapiens
gcggcgccagactggccgagtaccacgccaaggccaccgagcatctgagcacgctgagcgagaaggccaagcccgcgctcgaggacctccgccaaggcctgctgcccgtgctggagagcttcaaggtcagcttcctgagcgctctcgaggagtacactaagaagctcaacacccagtgaggcgcccgccgccgccccccttcccggtgctcagaataaacgtttccaaagtgaaaaaaaaaaaaaaaaaaggggggggccgttataaaggatccttgggggggccaaacttaaccgggggtggcaagagaatacctttttccctatggggagcgaattcaaacccaaccggggaatcttgggaagggaccctaatttgtgggggggaaaaaattagacaa

SEQ ID NO: 8012 - DNA, 364 bp, Homo sapiens
ccctccaggccagtttgggcaccctgggattgcggctgcagccatcaggaggggcagacggcgggtggcctggttgctgcagctcccaggatcagctctgccctcccgacaaacgccagcctcatcaccgctccagggcacctccagcagtaacaggtggttgcagcaggtggcaaccaacccctggatgagccaaggtctcttccccagccaggcatggccgactctgcacaggcccagaagctggtgtacctggtcacagggggctgtggcttcctgggagagcacgtggtgcgaatgctgctgcagcgggagccccggctcgtggagctgcagttctttgaccaacacctgggtccctggg

SEQ ID NO: 8013 - DNA, 427 bp, Homo sapiens
cccacgcgtccggcctgtgattaacttgcttagaatggttctcagatcttgacagtatatttgaaactgtaaatatgtttgtgccttaaaaggagagaagaaagtgtagatagttaaaagactgcagctgctgaagttctgagccgggcaagtcgagagggctgttggacagctgcttgtgggcccggagtaatcaagcagccttcataggcggtcatgtgtgcatgtgagcacatgcgtatatgtgcgtctctctttctccctcacccccaggtgttgccatttctctgcttacccttcacctttggtgcagaggtttcttgaatatctgccccagtagtcataagcaggttcttgatgtcatgtacttcctgtgtactctttatttctagcagagtgaggatgtgttttgcacgtcttgctattt

SEQ ID NO: 8014 - DNA, 417 bp, Homo sapiens
  misc_feature (1)...(417): n = A,T,C or G
cccacgcgtccgcccacgcgtncgnggacgcttgggcttacgcgtgggcaagaactcgttgtaagagatgtggagtcttctgtgttcggagtcaacaaccatgccagggattgaggaggactactatttgaagcaatgggcactggtatttggagcaagtgacatgccatccattctgccgtcgtggaattaaatcacggatggcagattggagggtcgcctggcttattcccatgtgtgactccagcctgccctcagcacagactctttcagatggaggtgccatatcacgtacaccatatgcaagtttcccgccaggaggtcctcctctctctacttgaatactctcacaagtagggagctcactcccactggaacagcccattttatctttgaatggtcttctgccaacccatt

SEQ ID NO: 8015 - DNA, 415 bp, Homo sapiens
ggttcctggacgctcagccaggggtagtctctgaagggccgcctggcaagggggagcagaagccagtgggccgccatctgctctccgtggaggcagtgctctcgcggctgctgcccgttggggtccagctgaggaaggagcgcggatcccaggctcgttctttgcctgggctgcccctgcggcccctggggcgggtgctgctgcggcgccagctccaagggcggatccaggcgggaggggcctcctcggagaagcggggcgcggtcccaactacgcagaggctggcacgccgaccctccacaccttaccacgcccccatctccgtccgtgtacacacactcacacaaggacgccaaccccacctagatgcaaagcaggattcaaaagaacatctttgcgttttctaccggctccc

SEQ ID NO: 8016 - DNA, 381 bp, Homo sapiens
taactttacttaccacctctcatttcaagatgagcaacccctgcacagagatattgaggaatatcttagcatccttaccgatccagatggaaaaggtaaagaaaagattgcacagctttctgccactggtcaggaaataagtaaaaggcaggccattgtgacgaagaaaaaaatttctgattaccacctccagtttagatataaactgcaagatttttcagaccaactctctgattactatgaaaaatttattgctgaatccaaaagattgattgacctgtccattcaaaactaccacacatttctgatatacatcacggagttactgaaaaagctgcaatcaaccacagtcatgaacccctacatgaagcttgctccaag

SEQ ID NO: 8017 - DNA, 445 bp, Homo sapiens
  misc_feature (1)...(445): n = A,T,C or G
cccacgcgtncgcccacgcgtncggccaagaagaacaaagctgtatgtgaaggcttctgtgcttgtctgtctactcctttctggattggctgtgtttttccttttccctcgctctatcgacgtgaaatacattggtgtaaaatcagcctatgtcagttatgatgttcagaagcgtacaatttatttaaatatcacaaacacactaaatataacaaaccataactattactctgtcgaagttgaaaacatcactgcccaagttcaattttcaaaaacagttattggaaaagcacgcttaaacaacataaccattattggtccacttgatatgaaacaaattgattacaccgtacctaccgttatatcagaggaaatgagntatatgtatgacttctcgactctgatattcatcaaagggcataacatattactcatgatgccaggt

SEQ ID NO: 8018 - DNA, 401 bp, Homo sapiens
gaaaaggtttgagaggaattatatctaagttgtgagactgagttctatattctggtgagttaatggggttgcctcccagcttcttataagactcacagtataactaaacatgatatatcagcttttgcctttcaatttatcaatctcttaaagagaatccaactttattacgattagtatatgatcaaacttccatatttgccttgggaataatggacaaagggaaatactcttaattcatgaataaaaactttgcagaaaattagacagtgtttaattttcgaaaacttccctctctagacagtagataccacctactgatggttacatatactagggaaattttaaaattaggaaatgctgatagctcatattataaatttctaaatcctaggaagaag

SEQ ID NO: 8019 - DNA, 432 bp, Homo sapiens
  misc_feature (1)...(432): n = A,T,C or G
gcccagggatgtaggagggggaaggaggaaacaggaagcccagagagggcaaagggcctacctcggggcgcgaaccatgccccagactattatctcagggctttctgggcactgcacttcagcgtggcccacctgcccatgccctgaggccagttggcgaggggtggctcctgagggtttttataccctttgtttgctaatgtttaattttgcatcataatttctacattgtccctgagtgtcagaactataatttattccatttctctctgtgtctgtgccaagaaacgcaggctctgggcctgccccttgcccaggaggccttgccagcctgtgtgcttgtgggaacaccttgtacctgagcttacaggtaccaataaagaggctttatttttaaaanaaaannnnnnnannnaaanaaaagagagaaag

SEQ ID NO: 8020 - DNA, 366 bp, Homo sapiens
  misc_feature (1)...(366): n = A,T,C or G
gtccctcccaccctcacggagacttgccagcaatggcagaatgctgctgcacacttccctccagttgtcaccctgcccagaaactgtgttggcccccttcacacctctgcaacacctgctgctccagcaagaggatgtgattctttagaatatggcggggaggtgaccccaggccctgccctactgggatagatgttttaatggcaccagctagtcacctcccagaagaaactctgtatatttcccccaggtttctgatgccatcagaagggctcaggagtggggtttgtcacacattcctcttaacaagtaactgtcactgggaccgagtcctgggtgcttacatattccttcgtgtcttcatcn

SEQ ID NO: 8021 - DNA, 360 bp, Homo sapiens
actcggggtctggtgtctgcacagccatggcgggcgcgttggtgcggaaagcggcggactatgtccgaagcaaggatttccgggactacctcatgagtacgcacttctggggcccagtagccaactggggtattcccattgctgccatcaatgatatgaaaaagtctccagagattatcagtgggcggatgacatttgccctctgttgctattctttgacattcatgagatttgcctacaaggtacagcctcggaactggcttctgtttgcatgccacgcaacaaatgaagtagcccagctcatccagggagggcggcttatcaaacacgagatgactaaaacggcatctgcataacaat

SEQ ID NO: 8022 - DNA, 367 bp, Homo sapiens
  misc_feature (1)...(367): n = A,T,C or G
atttaccttgataaggtgtcaaatcagacactgagcttgttcttcacggttctgcaagatgtcccagtaagagatctgaaaccagccatagtgaaagtctatgattactacgagacggatgagtttgcaattgctgagtacaatgctccttgcagcaaagatcttggaaatgcttgaagaccacaaggctgaaaagtgctttgctggagtcctgttctcagagctccacagaagacacgtgtttttgtatctttaaagacttgatgaataaacactttttctggtcaaaaaaaaaaaaaaaaaaaaaaaanggggggggccgttttaaaaaatccctgggggggcccaattttaccgggtattggaa

SEQ ID NO: 8023 - DNA, 365 bp, Homo sapiens
tcatcccattcagcatggtgccgctgggctcgcctctgtcaaagatcggcatggagctgacggattcaccctacgtggtggccagcatgcggatcatgacgcggatgggcacgcccgtcctggaagcactgggcgatggggagtttgtcaaatgcctccattctgtggggtgccctctgcctttacaaaagcctttggtcaacaactggccctgcaacccggagctgacgctcatcgcccacctgcctgaccgcagagagatcatctcctttggcagtgggtacggcgggaactcgctgctcgggaagaagtgctttgctctcaggatggccagccggctggccaaggaggaagggtggctggca

SEQ ID NO: 8024 - DNA, 415 bp, Homo sapiens
ctggtggcacagaaggtgatcgacacagtgcccctgggtgaggtggcagaggacatgtttggttacttcgagcccctgtaccaggtgatccctgacatgccgaggcccccagagaccttcctgagaagggtcacaggttggaaagagcaggttgtgaatggagatgttggggctgtttcagagcctccctgcctccccaaggaaccggcacccccaagcccagagtcccattcacccagggacctggactccgaggttttctgtgattccctggagcagctggagcctgagctggtttggacagagcagcgggcagcatctggaggaaagcgtgatcccaggaacagccccgtgccccccacaaagaaagaggggttgcggggcagcccgccggggccccaagagttggacgtgg

SEQ ID NO: 8025 - DNA, 371 bp, Homo sapiens
  misc_feature (1)...(371): n = A,T,C or G
gcggcgggagacgagctgtgagccccgccaggactatgctcccaggcgcgtctgttgcattcctcaggaccagggtggcgttgtccagctcctccgtcgaattggtcaggttcgcggtgtcctggaagccccagtctgccccggcgcttcctggagactcttctcgggttgtgtcagcctcgggtcggggtcctggggcctcggagcctggcacagcatcagcagccacgcgggaggcagcatcgttgcgcaaagttctggagaacactcgtacaggcgcaaagtccccagggctctcggttttgatggggccaaaagggctgatggaggggaggatgatgagggcaaaggacagcatcaggactgcgacn

SEQ ID NO: 8026 - DNA, 408 bp, Homo sapiens
cccacgcgtccgcccagtcaatacagagttccctctgctgtctggccgtctgccagggagccagaaggaagggccttgcagccacagagacactccactgccctggggcacacagtggacactgctcttcctacttcctcctctcctggatgctcatcagctccttctgcctcccccgcttttttttccatcttttgttcccctaaattaatgctgcttggattttcatcttatttataaagataaaatcacctggaagtgtcaaggagtggggcggggtggcgggggagaagcagccgtgctgccaggtcacccagacctccagacagccggctagccccactgcccgttccttttacgcccaagttttgctccttgagagcagattggctgatgcccctgcaaccc

SEQ ID NO: 8027 - DNA, 398 bp, Homo sapiens
  misc_feature (1)...(398): n = A,T,C or G
gaggctgccggagggcgggaggcaggagcgggccatgagctgctgggctggagcggcggcgccgccatgtccgacagcgagaagctcaacctggactcgatcatcgggcgcctgctggaagtgcagggctcgcggcctggcaagaatgtacagctgacagagaacgagatccgcggtctgtgcctgaaatcccgggagatttttctgagccagcccattcttctggagctggaggcacccctcaagatctgcggtgacatacacggccagtactacgaccttctgcgactatttgagtatggcggtttccctcccgagagcaactacctctttctgggggactatgtggacaggggcaagcagtccttggagaccatctgcctgctgctggcctatan

SEQ ID NO: 8028 - DNA, 426 bp, Homo sapiens
  misc_feature (1)...(426): n = A,T,C or G
ttctgaacgtcgcgaatatgaggccatggagancaccccgcgtccggccctgtgcccaggctggactggagctgttttgcttgaacatcttagtgagctttctatgggggactttgcactgggcgtgggttttcccaagctactgtatacccagagagctgcgtggcgcattctctcccttccttcagaccttggctcaacgtcaccttatcagaaaggccttgactgtccctttaatgtaaaacagtgctccgggctctccgtcttcccacactgctttatttttctttattgcacttttcctctggcattatttttctctttattttcagccccttcccattgaaacgtggattccacaggggtaggaagtgtggactgttatgatgatgctgaatccttggtgcctagtactctatcagagca

SEQ ID NO: 8029 - DNA, 372 bp, Homo sapiens
ctggatttcactgtcactgtccatttctttcacctcctgggctgctgggtctacagctcccgtttcccctcggcgctgacctggtggctggtccaagccgtgtgcattgcactcatggctgtcatcggggagtacctgtgcatgcggacggagctcaaggagatacccctcaactcagcccctaaatccaatgtctagaatcaggccctttggacatcctgctgacacttgggccccttaacaccttgggctgctcagaccctccagatgaggtccagcccagatctgagaggaaccctggaaatgtgaagtctctgttggtttgggagagatagtgagggcctgtcaaagaaagcaggtagcagtcagcag

SEQ ID NO: 8030 - DNA, 385 bp, Homo sapiens
tggcggcgtccgcagctgccgctgagctccaggcttctgggggtccgcggcacccagtgtgtctgttggtgttgggaatggcgggatccgggaaaaccacttttgtacagaggctcacaggacacctgcatgcccaaggcactccaccgtatgtgatcaacctggatccagcagtacatgaagttccctttcctgccaatattgatattcgtgatactgtaaagtataaagaagtaatgaaacaatatggacttggacccaatggcggcatagtgacctcactcaatctctttgctaccagatttgatcaggtgatgaaatttattgagaaggcccagaacatgtccaaatatgtgttgattgacacacctggacagattgaggt

SEQ ID NO: 8031 - DNA, 368 bp, Homo sapiens
ttgttatgggtctagcagcctctgtggcatctcctgtcacattgggaaaatgaagaattccaggacatgggcttggagggcgcgcgaggagctatttcttctctgtgctgccctgggctgtctcagattgcctggctccagaggtgaaaggccacattcctttgggtcaaatgcagtcaacaagagctttgctaagagcagacagatgcggagtgtggatgttaccctgatgcccattgattgtgagctgtctagttggtcctcttggaccacatgtgacccctgtcagaagaaaaggtacaggaatgcctacttgctccagccctctcagatccatggggaaccgtgcaacttctgtgacaaggaag

SEQ ID NO: 8032 - DNA, 442 bp, Homo sapiens
  misc_feature (1)...(442): n = A,T,C or G
nattgagacctctgcaggnaccggattgagaaccnctgggacgacccacgcgtccgggggtggtggtgaccatcaacaagaagaggaacctggtggtgtctgtggacgacggtggcacctttgaggttgttttgcaccgagtgtggaaggggagctcggtccaccaggacttcctgggcttctatgtgctggacagtcatcggatgtcagcccggacgcacgggctgctggggcaatttttccaccccatcggttttgaagtgtctgacatccacccaggctccgaccccacaaagccagatgccacgatggtggtgaggaaccgccggctcacggtcaccaggggtttgcaaaaagactacagcaaggacccgtggcatggggccgaggtgtcctgctggttcattcacaacaatggggctggactcatcgatggtgccta

SEQ ID NO: 8033 - DNA, 435 bp, Homo sapiens
  misc_feature (1)...(435): n = A,T,C or G
naagataccatgcgaaccctaggagacctcggaacgacccacgcgaacggctggggactgagggaaacttagagttcagagagggggtgtgatttgcctgatgtcacacagcaagttagagacccagctccgcgactcattgtcttggctttggccctcgtcatcctgcccacccagcggggcttcccaacccaccacacagccatggacgggaaggtggcagtgcaagagtgtgggcctcctgcagtctcctgggtccccgaggagggagagaagttggaccaggaagacgaggaccaggtgaaggatcggggccaatggaccaacaagatggagtttgtgctgtcagtggccggggagatcattgggctgggcaatgtctggagggttccctatctttgctaccaaaacggaggtggagccttcttcatcccc

SEQ ID NO: 8034 - DNA, 370 bp, Homo sapiens
  misc_feature (1)...(370): n = A,T,C or G
cccacgcgtncgagtgagggttccaacttttctgcttatctgggaggtgttgggcgcggacagtcgagatgttagagaaaaagcagccggtagacttaggtctgttagaggaagacgacgagtttgaagagttccctgccgaagactgggctggcttagatgaagatgaagatgcacatgtctgggaggataattgggatgatgacaatgtagaggatgacttctctaatcagctacgccatggacatgcatcagctggtctccttcaagagaaactcctgggggaggagccaagatggccgaataggaacagcttcagtctacagctcccagcgtgagcgacgcacaagatgggtgatttctgcatttg

SEQ ID NO: 8035 - DNA, 409 bp, Homo sapiens
cgtttggaaaatgaaacagctgtctgagagataatagtagaacattcactaacccattcatccatccattcacccacctacctgtcgatagaagcaaccattctaataattgctgaatgtttgctatataatgagtatgacacaggagcagagatgaagagacatgaggacatcctacaaggtgcagagacgtgggagacagtgaaaggctgtcaggttatattattgtatcatcctttaagagacactgtggggccttctgttcacccctagcttagccttatgacctgggctgtccttccccagaagctgtctggcccctttgagagacaatgtcttcccctagccacaggttcaaccaagtcatccattggcatctatactccaggtcttaaaattgtggattaag

SEQ ID NO: 8036 - DNA, 399 bp, Homo sapiens
gacaattacatagtaccgataacagccatgcactgtgcaaagcatgcccttctgcacaggagagcaaggcacttgcagtagtgatctatgccagcaaaacatcattttgagacaaacatttttgtggcagatgtttttcctaaaaagtactatatcatccaagaaatatttgagtaaaatcccttgttcttttgggtgacattaactgacatttgctttttttcaagacctaatagaaaataagaaagcccataatgtatttagaaacaggaatcctcagagcaattctctgtattctcatataatttcaatgtaaaacagaaaacatattgatgtgttggtgataggcttgaattattaaaaacttcaaaaacaaaaaaaaaaaaaaaaaaaaaaggg

SEQ ID NO: 8037 - DNA, 265 bp, Homo sapiens
aacagagagatataatatttttcctattggacaatggacttgcaaagcttcacttcattttaagagcagaagaccccatgttgaaaactccataacagttttatgctgatgataatttatcatacatgcatttcaataaaccttttgtttcctaagactaaaaaaaaaaaaaaggggcggccgttttaaaggatccctcggggggcccaagtttacgcgggcaggcgacggaataattttttccttatggggaggggaattataa

SEQ ID NO: 8038 - DNA, 411 bp, Homo sapiens
cagacgcatgggcggacccgtcggcaagaacatgatggctgcctgtgacccccgccatggccgatacctgacagtcgacaccgtgatcaggggccgcatgtacatgaaagaggtggacgagcaaatgctctatgtccaaatcaacaacagcagctattttgtagagtggatccccaacaatgtgaaaacggctgtctgtgacataccacctcgggggctaaaaaagtccgccaccttcattggcaacagcacggccatccaggagctgttcaagcgcatctccgagcagttcacggccatgttccggcgcaaggccttgctgcactggtacacgggcgagggcatggacgagatggagttcaccgaggccgatagcaacatgaatgacctggtgtcctagtaccagcagag

SEQ ID NO: 8039 - DNA, 493 bp, Homo sapiens
  misc_feature (1)...(493): n = A,T,C or G
ggcgggtttgaacctcgatcgccttcggnaccggcccggaattcccgggccggtgctctgtcagagcctgctccccatcctggtccagcatatcacgggcccggtgcggccccgtcatcaggcctgcctgctgctccagaagaccctgtccatgcgggaggtgaggtcgtgctttgaggaccccgagtggaagcagctgatgggccaggtcctagcaaaggtcaccgagaacttgcgcgtgctgggggaggcgcagaccaaggcgcagcatcagcaggcactgtcctccctggagctgctcaacgttctcttcaggacctgcaaacatgagaagctgaccttggacctgacggtgctcctgggtgtgctgcaggggcaacagcagagcctacagcagggggcacactccaccggctccagccgcctgcacgacctctactggcaggccatgaaaaccctgggagtccagcgccccaaagttgagaagaaggat

SEQ ID NO: 8040 - DNA, 469 bp, Homo sapiens
gggctgccaatgatcgccctgcggttgaccccgatttcccgggccgacccacgcgtccgctcgtcggtgttcccggctgctatagagccgggtgagagagcgagcgcccgtcggcgggtgtcgagggcgggttgcctcgcgctgacccttcccgccctccttctcgtcacacaccaggtccccgcggaagccgcggtgtcggcgccatggcggagctgacggctcttgagagtctcatcgagatgggcttccccaggggacgcgcggagaaggctctggccctcacagggaaccagggcatcgaggctgcgatggactggctgatggagcacgaagacgaccccgatgtggacgagcctttagagactccccttggacatatcctgggacgggagcccacttcctcagagcaaggcggccttgaaggatctggttctgctgccggagaaggcaaacccgctttgagtga

SEQ ID NO: 8041 - DNA, 398 bp, Homo sapiens
cccacgcgtccggactagttctagatcgcgagcggccgtccttttttttttgtttttgataaatatttaaaaggctgggctaaaatgcacctaaaatttattctgttaacaattttaagggtacaattcagttaagtacattcacattattgggcaaccaatctccaaaatttttctaccttgcaaaattgaaattttatacccattaaacaataactcctcatttttccctctccaagttcctgacaactaccattctacttggtttttatgaatttgaccaatctaaatgcttggtataattggaattacacagtatttttctttttgcgtctggattatttcacttggcatgaggttctcatagttcattcatgtgaaccatgtaaagcatggtt

SEQ ID NO: 8042 - DNA, 384 bp, Homo sapiens
  misc_feature (1)...(384): n = A,T,C or G
tgcctcggcctcccaagtagctgggactgcaggtgcctgccaccacgcccagctaattttttgtatttttagtggagacagggtttcaccatgttggctagtatggtctccatctcctgacttcgtgatccacccgccttggccccccaaagttctgggattacaggcgtgagccactgcacccgaccaattcttttctttttctttaggtaggaacttcaattattgatttgaaactttcctcatttctagtataagccttttgtgttaccagtttccctctcagcactgcttaagatacatatcacatattttgatatgttctattttcatttgaactcagtaatatgtgtatttaatagactttttctttgaactatagan

SEQ ID NO: 8043 - DNA, 410 bp, Homo sapiens
ggcacccttagaggggagaacgaagcaatcagacatccccttgggccctgcttccaggtctccctgtcccccttgcctgccttcttccctgctctgtcccctaagctccctccaggcagggaaaagaggccaggtgctaaaaatgagcctttctcaagcacgtgagcagcggaaggcagacaggcgccagagcccagcactcccttttccagcagctgtggtgggggagggttcccctccagtttgtcaagagttgaaggaggctctgtggccaggtgacctggctgccttccactccttgtacctcagtctaaacatggagtggccgctgacaaggcgctccagccccagagccagcgtcttcatggggaagatgaatggacctgagtagctgaaggaaggcccctccc

SEQ ID NO: 8044 - DNA, 371 bp, Homo sapiens
caacatcatctagagcctcaaataatctctagaatttttcatacgcattatctagttttctatttaaaaaaaccatgcatacaaaacaaaacgtgactgaaaagcaacagaaacaagtgacattagaaacagactcaagaaattcagatattagagtttttagagtttaaaatagccataattaatatgttcaaggaattaattgacaagattgagattgataatcttggcaaagaattggaagtccagtttaaatggacattctaaaactgtattaagaactcaattgatggggttttaccatcagaggagacatagctgaagatgaatttgtgagctggaagataaatcagaactgggagagagagtaa

SEQ ID NO: 8045 - DNA, 471 bp, Homo sapiens
  misc_feature (1)...(471): n = A,T,C or G
cccataaagaaggctttgcggaattgaccnccgtanncccgggccgacccacgcgtccgcaagaaaagaataaacttatccaaaatcgacaagttcttcaagcaactcctggtggttccactatttggggacatgcaaatagaactggcaagatatatcaagaccagcgcccactacgaggaaaataaatctcgatggacgtgcacatcctccggcagcagccctcagtacaacatctgcgagcagatgatccagatccgcgaggaccacatgcgcttcatttcggagctggcgcgctacagcaacagcgaggtggtcacgggctcgggccgccaggaggcccagaagacggacgcggagtaccgcaagctcttcgacctggcgctgcagggcctgcagctgttgtcgcagtggagcgcgcacgtgatggaagtgtattcctggaagcttgtgcaccccaccgacaagtcn

SEQ ID NO: 8046 - DNA, 399 bp, Homo sapiens
ccatggccgggcagcacctcccggtaccccggctggagggcgtttctcgggagcagttcatgcagcacctctacccacagagaaaacctcttgtgttggaagggattgatttggggccatgtacaagcaaatggacagtggattacctaagccaagttggagggaagaaagaagtaaagattcatgttgctgcagttgcacagatggacttcattaaactttaccttttgaccagttggtccagagggcagctgaagagaaacataaagaattctttgtttcagaggatgagaaatactacttacggtcacttggagaagaccctagaaaggatgttgcagatatcagaaagcagtttcctttgttgaaaggagatattaagtttccagaattcttcaa

SEQ ID NO: 8047 - DNA, 400 bp, Homo sapiens
cggactcggacgcgtggtagcctagagtcctggggagcttctgtccacctgtcctgcagaggagtcgtttccagcccggctgccccaggatgggtgagttcaacgagaagaagacaacatgtggcaccgtttgcctcaagtacctgctgtttacctacaattgctgcttctggctggctggcctggctgtcatggcagtgggcatctggacgctggccctcaagagtgactacatcagcctgctggcctcaggcacctacctggccacagcctacatcctggtggtggcgggcactgtcgtcatggtgactggggtcttgggctgctgcgccaccttcaaggagcgtcggaacctgctgcgcctgtacttcatcctgctcctcatcatctttctgctgga

SEQ ID NO: 8048 - DNA, 442 bp, Homo sapiens
  misc_feature (1)...(442): n = A,T,C or G
ggaaagtaagagacctcgcganaatgagagcaattgaagggncgacccacgcgtccgcccacgcgtgcgagacctcaagttaaaattccctcaaaaacgtttttatttatctgctttttctgagaggataaaggctttttgaaaattattttctaacaaataacatgaacacttctagaaaccctagaaaaacacaaagtattcaaaatagaaagaaaaattacccattactctttaagccagcattatccattgcggtgcttttggagttgggtgaggccgtagcctctgccaagtcaaggagcccggtggtggctgtggcattcctgcagggttgtttttttttctttgagatggagtctcactcttgtcaccccagctggaatgtgggggtggaaacagctcactgcagccttgaccctgaggctcaagcgatcctttn

SEQ ID NO: 8049 - DNA, 370 bp, Homo sapiens
actgaggttgtttatgagagccaccaggtgttggtgttcccacatgctggtatgggccaccctgagagaggaatctatttgtgggggagttggaatggtggatggtgaatctcgtgttctgcagtggatcttgtaaagcttgtcatgtttgctgcacaaatggagacatatcaagtaagcagctgggcacacaagcctgaagcccagaaaagggttgtcctgaaatcctttagtcaagcctgatgttttgaactaaaatgagaacttatgagttctatagcattgctctgacagtaagagaggctgcttcaccactccatcaaagccacagcatccttattctgttgaggtagactcccatttttgactt

SEQ ID NO: 8050 - DNA, 410 bp, Homo sapiens
  misc_feature (1)...(410): n = A,T,C or G
ccgagttgctgctcattgaattcctccactttcttatatagcctcagatgctgtgatgtctgaccttgtggatatttgcccttggaatttctactttactttctaccgtaattccttctccgtacccaggtcttctctgagagaagctataatttaatctgtgaggaactaaatgacaggagattggtgctaatacgggggaccaagctttgtccaagtgaagcaggcttcgactccttctgagaggtctggtgtgttcctagaatctcaccttttcttcccttgctaaagcatgaagtttggcatttggcacactggaagcctggttgaaatgaaatttgtagcatctgatacaaagccagagacattctagcaagtgcagcagccccttctttctctgtaacagagan

SEQ ID NO: 8051 - DNA, 399 bp, Homo sapiens
  misc_feature (1)...(399): n = A,T,C or G
cccacgcgtncgcggacgcgtgtacggacgcgtggtttaaattcacccgccatcatggacccaccattactgccaatctctacggacgggcgccgcagctgacggaaactctcctgcacgacattacaggggttgcccacggcgtgcgcatccctgaggactacatcttcaccatggctgaccgagaagaatgtgtccctggggagcacgaaccagagcccatcttaatcccgagagtccgcaaggctgtgctaactctataagaggaaagatcagggggtgggcaactggtgactgaattcatcaagaaagaatattcctgccagctgagctactcgaacggtccctgcgtgcaaatgaccaagaagcacttatatactgcgacatccatggcctgtg

SEQ ID NO: 8052 - DNA, 451 bp, Homo sapiens
  misc_feature (1)...(451): n = A,T,C or G
gggtgccggntagaaaaactgatccttgggannatgagccccatnggccgggncgacccacgcgtccgcagaccctgtggcttaggctctggcctgggagctggcgaaggcctaggtgagcgctgctacagtgaggcacagcgctgtgacggctcatgggactgtgctgacggcacagatgaggaggactgcccaggctgcccacctggacacttcccctgtggggctgctggcacctctggtgccacagcctgctacctgcctgctgaccgctgcaactaccagactttctgtgctgatggagcagatgagagacgctgtcggcattgccagcctggcaatttccgatgccgggacgagaagtgcgtgtatgagacgtgggtgtgcgatgggcaaccagactgtgcggacggcagtgatgagtgggactgctcctatgttctgccccgca

SEQ ID NO: 8053 - DNA, 370 bp, Homo sapiens
caaatacaaagaatcatggtcacagagaactgcgattaaatcaagttaagttatgccgctgcttcctggttgtgagaaggtgggcacgggacctttttccacctcaatcttctcatctggaaaatacagcaggctgggattacaggcttgagccactgcacccaggctctgtgtggtaacttttgatgaacagagtttttaattttgaggcagtccaatttatcagtttttttctcttcatgtgaaatcattgcctaaagtcataaagatatactcctgtgttttcttctagaaaccttattgttttaactttcacatttatatctatcatctatctcaaattaatttttgtgtatgcatgaacagaagt

SEQ ID NO: 8054 - DNA, 409 bp, Homo sapiens
  misc_feature (1)...(409): n = A,T,C or G
cttgggccccaccgaggtcacagcagttttccccgtgatcctcctagcccctccgcacacctggctactgcatctctgacaaatggggaaactggagctcacgggatcaggctggtccaaggtcacgcagtgggtcggtactggggtcacagtggggaagcagcccgctgcagggggctggtcaccaggcgacggcctcggggtggcacctgcccagcctggaccatgcccaggatggccgcagaagcctttcagggaggtgcagggagggcagcgtgcaggccccccagaggccacctgcttcctgccctggggagaggccccccggctccctaggaccccggcggggccagcccggngctctcatgtgggggtctctgactgtgctggggctggctgtggggttccg

SEQ ID NO: 8055 - DNA, 404 bp, Homo sapiens
  misc_feature (1)...(404): n = A,T,C or G
cccacgcgtccgcccacgcgtccgactttgagctggaaagcagccgtttctccttggtctaagtgtgctgcatggagtgagcagtanaagcctgcagcggcacaaatgcacctcccagtttgctgggtttattttagagaatgggggtggggaggcaagaaccagtgtttagcgcgggactactgttccaaaaagaattccaaccgaccagcttgtttgtgaaacaaaaaagtgttcccttttcaagttgagaacaaaaattgggttttaaaattaaagtatacatttttgcattgccaaaaaaaaaaaaaaaaaaaaaaaaaagggggggggcctttttaaaagattctttggggggcccaattttaccggggggtggaaaggaaaaactttttcccttaagg

SEQ ID NO: 8056 - DNA, 419 bp, Homo sapiens
  misc_feature (1)...(419): n = A,T,C or G
cggacgcgtgggtgggaaggcaggtgtctgccagctggcgggtgctgggagtctgtgggggcatgcgatgaggaattctgctggtggagggaaagccacaaagtggattccgctgctgctatgggaagggacggtcactaccgctgcccctgtggggagaagagccccgggggaagaagagcactgctgacagaagcccattctcttcgcaggcttcagtttcacattcttggtacctcctggtggtgcctgggagggagccactgctgtacagagatgccaattccagaggcatggtccggcacagagcgctggcttccagctgaaggacatgtgtaacagcaggagatacctttctctggggtcccaggctcccgtcctggaccttggcaccccgccccccgtgcattgtcgtcttn

SEQ ID NO: 8057 - DNA, 370 bp, Homo sapiens
  misc_feature (1)...(370): n = A,T,C or G
gccaaacaggaggaagtacctcattttgtagcaacttgctgtctctggaactagtcctgtgagaacttaatccagtctcttgagagtaagagttccctcactactgcgagaactggtgccaagccattcatgagggatccacccatgttccaaacacctcccactaggccccacttcccaacactgccatattggaaattaaatttccatgtgagttttagtggagacgacaaaccatatccagaccacagcagtacttttagtacttgctggtgagtaactaaatgaccatatccaaaaagagtatgcttttgtgtcaatctgtctctatcctagaatgtcgnttagttctttcatgttcaaaatttta

SEQ ID NO: 8058 - DNA, 413 bp, Homo sapiens
cggacgcgtgggcgcggacgcgtgggagaaactatggaaaatatcaggatcccactgggatcccgtaaattgaaggcaacaaggtcttggtcctccagtaaggggggcatggagccctggtgggaaggaaagaagagaaatttgtgttcctgattccttaatccccaagaaaggtccctctgctaacattcacatatctcttcctagccaaagtctgtccatttcaaccctctagcatctgagctatctgcatccagctttcaaaaatatttcgctgtttactaacatgtctgtcagcctctcttttctcccccgcatgtgttttgtttttaaatccactcaaaagcgttttcatttgaaatcaaatagacatgtttgcaaataaatgttgacacaacacaaaaaaaaaaaaa

SEQ ID NO: 8059 - DNA, 463 bp, Homo sapiens
  misc_feature (1)...(463): n = A,T,C or G
cactgaagcttttcgaacatcgacggacctcccgggncgccccacgcgtccgggaagtggccactacggaagctgttctgggccagatagacttccagtttggtgtcgtttgctgcggggagggaatgaatgggcgctgggaacacgcccgcgaggtggggacgcgccggccgtagcgaggtccttatcgtgtgagtggccggggtcgggtcgcttccccgcagcatggaggacgatgcaccagtgatctacgggctggagttccaggcacgtgccttaacacctcaaactgcagaaacagatgccattcggtttttggttgggacgcagtctcttaaatatgataatcagatccatatcatagattttgacgatgaaaacaacattataaataaaaatgtcctcctccatcaagcgggtgaaatctggcatattagcgctagccctgcagacagaggtgtgc

SEQ ID NO: 8060 - DNA, 483 bp, Homo sapiens
  misc_feature (1)...(483): n = A,T,C or G
nttgatcgccttcggnaccgtagaggaccttccgggtcgacccacgcgtccggactaatgtgcggacgccgggagcttctgcgcttgctacagtccgggcgtcgggtccacagcgtcgcagggccctcgcaatggcttgggaaaccgctgaccacacggctcctattcccagcagccccgtgctgctgtcgcccacactacctcttccttgcggcttccggcccccgcagcctcagtacctctgctatctcttttgcagaagtccaggttcaggcccctcctgttgttgctgcaactccctcacccacagcagtacctgaggtggcttctggagagactgcagatgtagtccaaactgctgcagagcagagcttcgctgaactggggctggggtcatacaccccagtgggactgatccagaatttactggaatttatgcatgttgatctgggcctaccttggtggggggccattgctgcatgt

SEQ ID NO: 8061 - DNA, 403 bp, Homo sapiens
atttgtgccttgggctgcacaggatttgggctcaaattttttcagtgcaccttccgctggaggctggcgcttctgggctctggatgtggtactcttcactgcagtctgctgatcctgggtgcctccagaagacccacagtgtgactgttgggcccagccctgttcccaacaatggcagggcctgggacaagaatacaatacacgtatttaaagcttataactttatagtttataacaagtgtttaaaagttataaatcaaactagcaaactattagattaaatgtgttctaatctcctcccttggcaaatacaacttcataaccacctggaaggccagcgtcaaattcagcccttggttgacccctatcaccctaagagggtttgcctgcacacgtgaatacc

SEQ ID NO: 8062 - DNA, 415 bp, Homo sapiens
  misc_feature (1)...(415): n = A,T,C or G
caatgaccactacatcctcaagggcagcaatcggagccagtgtctagaggaccacacctgggcacctccctttcccatctgcaaaagtagggactgtgaccctcctgggaatccagttcatggctattttgaaggaaataatttcaccttaggatccaccattagttattactgtgaagacaggtactacttagtgggcgtgcaggagcagcaatgcgttgatggggagtggagcagtgcacttccagtctgcaagttgatccaggaagctcccaaaccagagtgtgagaaggcacttcttgcctttcaggagagtaagaacctctgcgaagccatggagaactttatgcaacaattaaaggaaagtggcatgacaatggaggagctaaaatattctctggagctgaagaaagcn

SEQ ID NO: 8063 - DNA, 414 bp, Homo sapiens
cccacgcgtccgatacaagcaaatttagcgatcaacccagcggccttgctgcccacagcggcttcccagatctctgaagtaaagcctgttttgccagaattggcttttccttcatctgaacacagaaggagccacggtctggaaagtgtgcctgtccttcccgggagtggggaggccggtgtgagttttgatcttgcagctcaggcagacaccttacacagtgcaaacaagagccgtgtcaagatgagagggaagcgtagaccgcagacccgtgcagctaggcggctggctgctcatgagtccagcgaggctgaggacatgagcgtccccagaggacccattgcacagtgggctgatggcgccatttcctcaaatggccatcggccacagctcagagcagccagtggagaagac

SEQ ID NO: 8064 - DNA, 407 bp, Homo sapiens
taggacttctagcccctgaactttcagccgaatacatcttttccaaaggagtgaattcaggcccttgtatcactggcagcaggacgtgaccatggagaagctgttgtgtttcttggtcttgaccagcctctctcatgcttttggccagacagacatgtcgaggaaggcttttgtgtttcccaaagagtcggatacttcctatgtatccctcaaagcaccgttaacgaagcctctcaaagccttcactgtgtgcctccacttctacacggaactgtcctcgacccgtgggtacagtattttctcgtatgccaccaagagacaagacaatgagattctcatattttggtctaaggatataggatacagttttacagtgggtgggtctgaaatattattcgaggttcctg

SEQ ID NO: 8065 - DNA, 411 bp, Homo sapiens
tcgcggttcttgtttgtggatcgctgtgatcgtcacttgacaatgcagatcttcgtgaagactctgactggtaagaccatcaccctcgaggttgagcccagtgacaccatcgagaatgtcaaggcaaagatccaagataaggaaggcatccctcctgaccagcagaggctgatctttgctggaaaacagctggaagatgggcgcaccctgtctgactacaacatccagaaagagtccaccctgcacctggtgctccgtctgagaggtgggatgcaaatcttcgtgaagacagttactggcaagaccattacccttgacgtggagcccagtgaccccattcggaatgtcaaagcaaagatccgggacaaggaaggcattcctgctgaccagcagaggttgatcttttgcggg

SEQ ID NO: 8066 - DNA, 421 bp, Homo sapiens
cggacgcgtgggcaggaaacaaccaggcagtcatctttatcctgtagcccaattggagattccactcaggtgagcaacggaggattacaacagaagacctcccaggtctcagtggaacttgctcagtcttactcatctgcgattccatcatcagggtatcctccttctactacaaaaataaaaagctgttctacagaacaaccactgacatcaaccaagacccctaaacctcaaagtataattcctcctgtgcaaacactaagctattccaaacctttacataatcagagttctgtaatatcgggccaagcacaaatttattctacagcgcagctaccaagccttttatcagttagtcagtcccaaaattacggtttagtacagccacataatgtgccatctattgttcattcacaggttt

SEQ ID NO: 8067 - DNA, 414 bp, Homo sapiens
aaatcacctccggtagaatatgagagacaattctgagacttatcgcaggattgtaaggtttgtttaacatttgaaaatgaactcagtgtaatttgtcacaatgatagaatgaagaaagaagaatttctctcagaaaactaggaagagaaggagcttttacaatgtaaataaggggtatctactaagaacctacaacaaatttcatacttaatggagaaatattgaatgttttcttcttaaaaacagaaatgaagcaaggatgtctgttttctcaatttttccccttagctttctgcttacattaaggcaggtgaaataaaagacataaagattgtaaaggaagaaagaaaactgtcttattcaccattcaacatgctttttaaagtagaagacctgaaggactctacaacagat

SEQ ID NO: 8068 - DNA, 185 bp, Homo sapiens
  misc_feature (1)...(185): n = A,T,C or G
aaactgnaactctgggagctctggaactggaagtactggaaaccaaaaccctgggagccctagacctggtagtaccggaacctggaatcctggcagctctgaacgcggaagtgctgggcactggacctctgagagctctgtatcttgaggactggacaatggcactctgaatctggaggtttagg

SEQ ID NO: 8069 - DNA, 409 bp, Homo sapiens
tcatgatgattacctggtaatgcttaaggcaattcggattttggttcaggagcgcctgacacaggatgcagttgctaaggcaaatcaaacaaaagaggagatgcagttcttaatgaagctgctcaaattctgcgattgctgcacatagaggagctcagagagctacagacaaaaatcaacgaagccatagtagctgttcaggcaattattgctgatccaaagacagaccacagactgggaaaagttggaagatgaacacttgaggacttcagcttctcacctacttagtacagttgggaaccatacacttctggcatgtttggaaatcaaaatgtcacattctcgggggaggaagcccagaaaattgggtatgttctagagatttaccaccattgcttattgctttttt

SEQ ID NO: 8070 - DNA, 412 bp, Homo sapiens
  misc_feature (1)...(412): n = A,T,C or G
cggacgcgtggggtgatcagtgatccagggccgttcatgaaccactgggctggatttgactgttgagtgtggcagttaatgcccctcaagaaatcaaaggatgtcttataagtgtcttccaaaaaaaagcaaatgctgaaatcctattggcaaagtaaactgaaattggctgctatattttatataatcatttctgcaaatcccattttttgaatactaatatttgacatggttaattcttattaatttgttggaattgtttattgttaataatgcaaatagataatttttaattatccacaagtaacatttcactgttaatggtttgaaataggtgataagcaaaccaatttgaaataaaatataaacatgtgccattgtattataacactatacactttcttgacagttn

SEQ ID NO: 8071 - DNA, 403 bp, Homo sapiens
aaaaacaaaagtaaattaattttaaaagggagggcaaattacaattatttgggcatctttagagttacatgtatatttattggatttttcctccccgattaactcaatgctaaaataatgttgacttaaatgacttgtttggtgggacttaatatgtagtataagatgcatatttgacaggttagaagcagtcacacactttgataaataacaatactgaggccggacgcggtggctcatgcctgtaatcccagcactttgggaggccgaggcaggcagattgcctgagctcatgagttccagaccagcctgggcaacatggcaaaaacctgtctctataaaaaacaaaaaaattagccacatgcaatggtgtgcacctataatcccagctactcaggaagct

SEQ ID NO: 8072 - DNA, 419 bp, Homo sapiens
aacctgcagaattatgattgccatgttggatagagatcacacaggaaaaatgggatttaatgcattcaaagagctatgggcagctcttaatgcctggaaggaaaacttcatgactgttgatcaagatggaagtggcacagtagaacatcatgagttgcgtcaagccattggtcttatgggttataggttgagtcctcaaacattaactactattgttaaacgttatagcaagaatggcagaattttctttgatgattatgttgcttgctgtgtgaagcttcgagcattgacagatttctttaggaaaagagaccacttgcaacaagggtctgcgaatttcatatatgacgattttttgcagggcactatggcaatttgaatgcttagaaatttaaaccctgagagacactgtgaattct

SEQ ID NO: 8073 - DNA, 406 bp, Homo sapiens
tcgcgagcggccgcccttttgtttttttaatgtcatattcatctggtaaatatctactgtttgccaggcatttaagaatatggcaaagaacataaaagatggtgtcaccagattttggtcaccaatgagtacccgacccgttgccatgattaagagagaatgctttctattggagtttcaggaaatataatttgagaatactttaaagggaagtggaagtataagtgaatgatatttttcttttacatgtaaacaatgaagttatttcaaagttaagttttaaacaaaatacatgaagtagtgtctgccatacatgttaatattctacattcttgcttccttaaattaatatgtttgtgtgtatatatgtgcctcacacctgaattgaaaattaaagactggttta

SEQ ID NO: 8074 - DNA, 410 bp, Homo sapiens
gaagtttttagattttgaaatttcttggaaattaatatatttggataagctattttcgtagagtgacattcttatgatatgaacaagtttattaaatggcatacttttaccagaaaatgggaaaatatagtcttaatctaaaaataaaaagacttttaaagtcattagggtttcaacctcataaatggtgcttttaaacaagtatgttctgtttggagtgctattgtgctctctttttttttaaaaaaaaaagctatttgaattttttactttttctgattatcatagataacagatggtttgcacttagttcagtgaaccaaacaaaaaaagagcagacttggcagaaaattcctgttgatagtgcattttttctgtactgaaatggatcacatgaactttttgaatat

SEQ ID NO: 8075 - DNA, 408 bp, Homo sapiens
agaactgaaagaatcaaagccaaaaaatgtgaaagagtttgacattcttcttggtcaacataatgatgaaatgcaagaactgtcaggcaatataaaggaagaatccaaatctcaaaacagcaaagacagagtgatttgtgagttaagagcagagctagagagattgcaagctgaaaatacctcggagtgggacaagagggaaatacttgaaagagaaaagcagggactggagagagaaaatagaaggctgaagatccaggtgaaagaaatggaagagcttttggataagaaaaatagattaagtgcaaactctcaaagtcctgatttcaagatgtcacaaattgatctgcaagaaaaaaaccaggaattactgaaccttcaacatgcctactataaactaaacagaca

SEQ ID NO: 8076 - DNA, 415 bp, Homo sapiens
gccagctccactctgtccctcctcgccgggtctgtgcgtctgtgcgtctgtctgtctgactgatggtcctcacacgcggttccctgtgactgggcgcgaccccggcaagcgcggcttggagggcggacggggcgcggcgatacagctgcccgctcgcatctttggccctgcgctcagctcctcacccggcgtgggaagttaaagtaaaaccgaaagggaagaaggcgcggtggcaggagctgacagagtgatgggaaacgcgtgagccaggccgagagtttcaggtttcttgctgtatggatcactgattgaataatagatggctttacctcgtctcacaggagccttgcgttccttttcaaatgtcaccaagcaagataattataatgaagaagtggctgacttaaagataaag

SEQ ID NO: 8077 - DNA, 410 bp, Homo sapiens
gaggatttgctcgacttggacgaggagcttcactacagcttggctacctccagggccaagatgggtcgccgagctcaacaggagtcagcgcaagccgagaatcacctcaatggcaagaattcctctttgactctgactggagagacttgctctgctaaattacctcgctgccgacagggaggctgggcaggtgattccgtgaaggcttcgaagtttaagaggaaggcttctgaagaaatagaagatttccgcctcacaccacatagcctgaatggatcagattatggaggagatattcctatcattcccgatctggaggaagaacaggaagaagactttggtttgcatgtggcaggccctcccaacatccaaataaagcgggggatgacctaccgtgacctggacaatgg

SEQ ID NO: 8078 - DNA, 369 bp, Homo sapiens
cgcgtccgatgggaccatctccagatacgtgggaggccaagagcatttcgctcacttgctgatcctcagggacaccaagacctacatgcttgcttttgacgtgaacgatgagaagaactgggggctgtctgtctatgctgacaagccagagacgaccaaggagcaactgggagagttctacgaagctctcgactgcttgcgcattcccaagtcagatgtcgtgtacaccgattggaaaaaggataagtgtgagccactggagaagcagcacgagaaggagaggaaacaggaggagggggaatcctagcaggacacagccttggatcaggacagagacttgggggccatcctgcccctccaacccgacat

SEQ ID NO: 8079 - DNA, 366 bp, Homo sapiens
tttgctgccgagcggtttccatccgtgcggcgtgagcggcggcggctgcgcctcccggtctccgggtcgggcttctgctgttgctcttctccgccgcggctctgatccccacaggtgatgggcagaatctgtttaccaaagacgcgacagcgatcgagggagaggttgcgaccatctactgccatgtcaataggatggacgactctgtgattcagctactgaatcccaacaggcagaccatttatttgagggacttcaggcctttgaaggacagcaggtttcacctgctgaatttttctagctgcgagctcaaagtatcattgacaaacgtctcaatttctgatgaatgaagatacttctgccact

SEQ ID NO: 8080 - DNA, 411 bp, Homo sapiens
cggacgcgtgggcggacgcgtgggctggcctcgcttctgtcccaccactctgcccaagaactggctggctccaggattggggccttctcttatggctctggtttagcagcaagtttcttttcatttcgagtatcccaggatgctgctccaggctctcccctggacaagttggtgtccagcacatcagacctgccaaaacgcctagcctcccgaaagtgtgtgtctcctgaggagttcacagaaataatgaaccaaagagagcaattctaccataaggtgaatttctccccacctggtgacacaaacagccttttcccaggtacttggtacctggagcgagtggacgagcagcatcgccgaaagtatgcccggcgtcccgtctaaaggtgttctgcagatccatggaaagct

SEQ ID NO: 8081 - DNA, 412 bp, Homo sapiens
aagaacagcactctttgccccctccagatctatcatagcacacggcattgtacctcggaaactgtaagtgcctagcacacacttgctgaattgatgtatttttgcatttaggttcagaggggacaacagtgacgacaacaacagtagttgtcaaacaatttgtaaactgctaagtgtgaaaagattttctgggatgacttttcataatggtttagggataacaccactttcaccatcaatatttattttttcaaccattactaatcaagtgcctgctacacatgagtcctgagctagacttctgggttcaacggtagagagacgacgccaaaaaatgaaggtcccaagaaactgcagaaaagcaccatgaataattcacaccagctccctgagacccacagggacttacacg

SEQ ID NO: 8082 - DNA, 377 bp, Homo sapiens
cccacgcgtccggtggcttggctgtttccccctgcatattggggttgaaaacttaaatgtgtagttccagtccttctatgcagagtctctcctgccctccctccttcctgcaggcaaatatacaagctagaccctgttccctcaccctgtatcctgtctcccctaattgacattctatcagcccaaccctcattctgcagggccacctggtgtgtggaggtggcgggaggggtcagtgactctgggggtctcctcagtgacccccatacctcatcatgaacccttgggtagcttgattctgcctaccatccaggaaaacttgtgctggaattgctgatggaaacaattaaatatttactataaaaaaaaaaaaaagg

SEQ ID NO: 8083 - DNA, 403 bp, Homo sapiens
gcgcccacgcgtaccgcccacgcgtccttggacgcgtgggtgccgattggctgcaagctgggacctcagtggtcgggtgtggagacaagcccctgcccaaactcacctgtgttcaggacgggaagcgagcctgccctgagcccagcagtggttcggagggtctcctcatacgccagggctggggaggcgctgaggggatcagacagtcaactgtgccctaagcccccgcctaagccctgcaaggtgccgttcctcaaggttccctcgtctccctctgcctggctcaactcagaggccaactactgtgaactgaacccagcgtttgccacaggctgcggcaggggagcaaagctaccctcatgtgcccagggaagccacacagaactgctcacagccaagcaag

SEQ ID NO: 8084 - DNA, 410 bp, Homo sapiens
  misc_feature (1)...(410): n = A,T,C or G
ctgggcctggctcgcggcgaaccgagatggcagagcagtcggacgaggccgtgaagtactacaccctagaggagattcagaagcacaaccacagcaagagcacctggctgatcctgcaccacaaggtgtacgatttgaccaaatttctggaagagcatcctggtggggaagaagttttaagggaacaagctggaggtgacgctactgagaactttgaggatgtcgggcactctacagatgccagggaaatgtccaaaacattcatcattggggagctccatccagatgacagaccaaagttaaacaagcctccggaaactcttatcactactattgattctagttccagttggtggaccaactgggtgatccctgccatctctgcagtggccgtcgccttgatgtatcgn

SEQ ID NO: 8085 - DNA, 436 bp, Homo sapiens
  misc_feature (1)...(436): n = A,T,C or G
naatgataccctgcganatgagaccatntgccgggccgacccacgcgtccggtgacaacacgtactaaatattaccagccagaaagctcaccctagccttggggtctaggtttttattgcatgtcagtcacatagggcaatcacatgaccgactttagttacttaatcaccagctgctccagaggtcaaaatgatacagcatggcccaaggtccccaccataaatcacattattagcacaaactatctggcctggtatggcccaaggcctgaggtatacaaagacacccctacttgggaggatattccaaggacttagaggttatctcccaggagcccattaaggccagttttttctttgagatgtgctgggtttggacacttcaagcctgctgagttaacccttatagcacagtccccaaatgctgagggaccaa

SEQ ID NO: 8086 - DNA, 433 bp, Homo sapiens
atctttttaaatctaaatgttcatatttttcctgaagaaaccactgtgtaaaaatcaaattttaattttgaatggaataatttcaaagaactatgaagatgatttgaagctctaatttatatagtcacctataaaatgttctttatatgtgttcataagtaaattttatattgattaagctaaacttttgaattgatttgaggagcagtaaaatgaaagctatatctattctaaaccttatttagacattggtaccagctacccaggtgaaaatatggagtaactttgttttgtatggtaaggtttaggaatggtggatgaagggtatctctatataaataaagtgctcaacaatgtgcaatgattgtaaatttagtaagatattacagccatttcatgaatgctttaccattcaacatagtatctattacaa

SEQ ID NO: 8087 - DNA, 434 bp, Homo sapiens
  misc_feature (1)...(434): n = A,T,C or G
cggacgcgtggggcccggtggacggaagtgggtgttggaggctttaaggtagctttaaattcgtgttgtcctgggagctcgcccttttcggctggagtcgggctttacggcgccggatggctctggacgtgaagtctcgggcaaagcgttatgagaagctggacttccttggggagggacagtttgccaccgtttacaaggccagagataagaataccaaccaaattgtcgccattaagaaaatcaaacttggacatagatcagaagctaaagatggtataaatagaaccgccttaagagagataaaattattacaggagctaagtcatccaaatataattggtctccttgatgcttttggacataaatctaatattagccttgtctttgattntatggaaactgatctagaggtttctttntgccaggagatt

SEQ ID NO: 8088 - DNA, 409 bp, Homo sapiens
cccacgcgtccggaactaggactagggaagctgctaaatcgttaccttattatagcacttctcaatgccacacctgggccagatgtggttaaaaagtgcaaccaggtagcagcatgtctaccagaaaaatggtttgaaaattctgccatgaggacatctattccacagctagaaaacttcattcagtttttattgcagtctgcacataaattatctagaagtgaattcagggatgaagtcgaagaaataattcttattttggtgaaaataaaagctttgaatcaagcagaatccttcataggagagcatcacctagaccatcttaaatcactaattaaagaagattgaataaactttattggaaaatgctaaaattttaatatagttacactcagttcctttgtttgag

SEQ ID NO: 8089 - DNA, 370 bp, Homo sapiens
ataaatatatcatgtctctcctgcctcatatgtaccactggacaagggcccttttatgtgctcagattctgttagaggtaaatgtgttttgaaggggagaacaaagataattgcaaaattggcatggagaactaaagtaattatgaaagttccagatacaaagagagtgggctcaatatgccagcagttctctaccaatccatcctagaagctttcttttaggattgcctaaataatgcaggggatgggtgcaagacacacaagtgttctagaagcatgtaaacaaggtacagagaagaggataagataaaataagatgagataagaatattaggaaagccttgttcagaagattgcctacagaggcaaa

SEQ ID NO: 8090 - DNA, 437 bp, Homo sapiens
  misc_feature (1)...(437): n = A,T,C or G
aatgagaccatgcgaacccatcgaaatccctcgggtcgacccacgcgtccgaatttgtggtgtttttccacagaggaagccttttaacagcagaaaattatccggtagcaaattgtcttagggaaattactacactgttgtaacaaaagggctggcaagtgactaaatgttcattaccttttggttagcgttgctatcactgtagctgtgctgccttaacattgagagttgagttgtggacttagtcattgagtgaatgttgaactttcttccttgaatcagcgttagagtcaaatgtgggtttaatgtgaatgctaaatgaatatgcaacatagtttcaaatggaacatagaaatttcacttttgaaaataataaacccacaacctaattgcatggttttgggctgaaccgcctgtctcattcatgattntactcc

SEQ ID NO: 8091 - DNA, 404 bp, Homo sapiens
  misc_feature (1)...(404): n = A,T,C or G
tttttttatttgtttgtttgtttgtttttttgagacagagtcttgctctgtcggcgaggctggagtgcagtggcatgatctcggctcactgtaacctccgcctcccaggttcaagtgattcttctgcctcagcctcccaagtagctggaattacaggcatgtaccaccacatccggctaatttttgttttttagtagaggcagggttttaccatgttcgccaggctggtcttgaactcctgatctcacgtgattcacccgcctcggcctttcacagtgctgggattacaggcatgagccaccgtgctcagcctgtttatattttcaggtggtttatttgcctttttgttaagttgtaagaattcttcattttttctgaatacaaattccttatcagatacatgn

SEQ ID NO: 8092 - DNA, 409 bp, Homo sapiens
ttcctttttaatgttctaaagtgtttacggttctcaaatatcagttaaaaactaattttaggtggccataaacataaaatagaaaccctgtaagttacagaagaccctaaattgtatcaaaaccctagagacaacttttcaatttgatccaaatttgaactggccaaccagtctttaaaacactggactagaagagataatgattgaaacatttaaaaaaaaaaaaagggctccattcgcaggagcttttcctgtcctggggttttccagtgggggaccaccatgggaggtcgttggctgggctcactcccttctcccacccttgagaagggggagaactcccatggagaggcaaaatggcaggaggtttcatgtcccgcgttgcatctcctcctgaaagaaaagcagg

SEQ ID NO: 8093 - DNA, 418 bp, Homo sapiens
acagagtaaagcggggttgaacaaggccaagccgatagctctgctgctgctcagtttcccagcctagttttctgagctgggagaggacataatgtggtatttcgtcacgtagctgagacctataagggcatactcaggcggagattgcacaaagctgggctccaagttctgtgcttcctgatcccgagccctgacactcatttgctgtgtggtcccgggcatgtcatcaagaagctcgctgtctgcatgaggctcccgacgatctccatccccagggggttgggaggatgtctttagattttacgactctgagataaatattccacagcctggtgtgaggaagcttggaccaaatgcttcccctttggccggttagtctgaacaaggatctgctgatttaaaggagcagtttgaagat

SEQ ID NO: 8094 - DNA, 386 bp, Homo sapiens
ctgcctcaactggaaaaacattcccaggtttcttctcacctatgttacgacagcttgtcagtgagactgagtctaggggctcagaatctggcatcttcacaaatgcgaaggagtccagttctcatcaccctgggatagctgaattcccttcccgcggtaaatcttcaagttacagcaaacaatttactagtagcacgagttacaacagaggagactccacatttgaaagcaagagctataaaatggcagatgaggccggaagtgaagccgatcatgaaggaacacatagcaccaagagaggccatgctaaatctcgccctgtcagaggtatccacacttctcctttggggaagccttccctgtccccctagactaagttaaatatt

SEQ ID NO: 8095 - DNA, 383 bp, Homo sapiens
tggtgagaagacagcgaaatggcgcctccggcccccggcccggcctccggcggctccggggaggtagacgagctgttcgacgtaaagaacgccttctacatcggcagctaccagcagtgcataaacgaggcgcagcgggtgaagctgtcaagcccagagagagacgtggagagggacgtcttcctgtatagagcgtacctggcgcagaggaagttcggtgtggtcctggatgagatcaagccctcctcggcccctgagctccaggccgtgcgcatgtttgctgactacctcgcccacgagagtcggagggacagcatcgtggccgagctggaccgagagatgagcaggagcgtggacgtgaccaacaccaccttcctgctcag

SEQ ID NO: 8096 - DNA, 398 bp, Homo sapiens
  misc_feature (1)...(398): n = A,T,C or G
ccctcgcacacgagagtgcttggctcggcgctctgttcctggagctaccgagggactgaatgaagacagggactgctgtggcgctagtccctgcactgaagacctttcctgagtgggtgcgccaagtcatggagggcgcaaatctggccgagaaaatactttccacctggctgacgctgggtctcggattcatccatataccttccaacttttgagtggcaatgggcatctccgagatctacatgaagatcctagtgaaaacatgatagcgggcctcaatacgaattgcagaaggaacccccaaggaatcgattcttaaaaactctgcttgtgttggtgttatccaaagagatgagtcacccatggacaaagggctctctggtctacaatgaacggan

SEQ ID NO: 8097 - DNA, 366 bp, Homo sapiens
  misc_feature (1)...(366): n = A,T,C or G
taatagtatgcccctccttcccctgtcctttcatttctctatccaagtagcagncaggttcttggtgtgatgggactgaaagaattccagtcagccagagccttggcagctctgaagctaaccttagcatctaagtgtcgatcttgaattccctgaaaaaatttctataggaaatgaagcttccctggtcccctcctttctggccattgtcatccatttcccagttagggcaacaatgaaggaggacccagccaagctagaaggaattttgtggatgggagacagcaggattagcttcagcttgggctggagcagtcaatataggatctcaggccaggcccgcttttctagaatgtgtttaatttt

SEQ ID NO: 8098 - DNA, 481 bp, Homo sapiens
  misc_feature (1)...(481): n = A,T,C or G
ggtgcggnnnnaggnaacctgacgtcctcggaacatcgacggccntcccgggncgccccacgcgtccggctaaagacaggcagcgctacaaagttgactactattttcagagcacagatttccagaacttctcctccgagtccaagcgggagacagaggatggtccctgccgtagagaaatggaagacacactgaatcacctgaagttcctcaatgtgctgagtcccaggggtgtacacattcccaactgtgacaagaagggattttataagaaaaagcagtgtcgcccttccaaaggcaggaagcggggcttctgctggtgtgtggataagtatgggcagcctctcccaggctacaccaccaaggggaaggaggacgtgcactgctacagcatgcagagcaagtagacgcctgccgcaaggttaatgtggagctcaaatatgccttattttgcacaaaagactgccaaggacatgaccag

SEQ ID NO: 8099 - DNA, 398 bp, Homo sapiens
ggaagaacaactggaccctgctatcttaccctgttgcatgccacctgatagaacctccctattctcctctgtgctgtgcctcaacgacccacgatttgagggtacactggggaggagaggtgattccacacgcagctgcacaggaacatgcttggaaggagaaccaaagatttctcaggaagcacctcattccagatgtgaccaggcgactctaagaagactagatattcctagaaaataaagaagcaaatctctttaccaggaccttctctcaattttcatggcggaatgtctcccccagctgccacacacacattttgtattaattttaatgattaaaaagagcatagggtaaaaacctgatatttcacttatactgcataacaagctaaccaaac

SEQ ID NO: 8100 - DNA, 412 bp, Homo sapiens
ttaaaatagcacatgattttcttttgttttcttcatttctcttgctcaccatgaagtaacaaaagtatagttttgacagagttggtgttcataatttcagttctagttgattgcgagaattttcaaataaggaagaggggtcttttatccttgtcgtaggaaaaccatgacggaaaggaaaaactgatgtttaaaagtccacttttaaaactatatttatttatgtaggatctgtcaaagaaaacttccaaaaagatttattaattaaaccagactctgttgcaataaaaaaaaaaaaaaaagggcggccgttttaaaggatccctctaggggcccaagtttacccgggcttgcaacttaatatttctttccttttagggaggccctttataacctaccttggaatttttgg

SEQ ID NO: 8101 - DNA, 464 bp, Homo sapiens
  misc_feature (1)...(464): n = A,T,C or G
aactgatcccnctcggnacttcgacggacctcccgggncgacccacgcgtccggtccgaaggacctgggccggcccatgggagcctggggttctgtccagataggaccagggggtctcactttggccaccagttcttcggccagcacctctgccctccagaacctgcagcctggaggggtgaggggacaaccacccctctttcctccaggttggcaggggaccctcttctcccgtctgccctgcgggttgcccgcctcctccagagacttgcccaagggcccatcaccactggcctctgggcacttgtgctgagactctgggacccaggcagctgccaccttgtcaccatgagagaatttggggagtgcttgcatgctagccagcaggctcctgtctgggtgccacggggccagcattttggagggagcttccttccttccttcctggacaggtcgtcaggatg

SEQ ID NO: 8102 - DNA, 393 bp, Homo sapiens
agaggggaaccctcctccatcttttttgcaacatttcatttcttccttttgctgttgcttcccccctcacacacttggttttgttctatcctacatttgagatttctattttgtgttgaacttgctgctttttttcatattgaaaagatgacatcgccccaagagccaaaaataaatgggaattgaaaaaaaaaaaaaaaaaaaaggggggggccttttaaaagaacccttgggggggccaaattttcccggggatggacaggacttacttttttccttttgggggggcttttaaaaacctgcttggggattttgggaaggaaccttttttttgggggggggaaaaattggaacaacttccctccggaattttaactttttagggcaaataaa

SEQ ID NO: 8103 - DNA, 467 bp, Homo sapiens
  misc_feature (1)...(467): n = A,T,C or G
accccacattgatcgctntgcggaaccgttgacgactttccgggtcgacccacgcgtccggctgggagccagcgctcccttactgggaacaggattccaggacccctttcttgttgtggctgccatgaagccacagctccttggggaagtgacctgctctcctttgggtgtatgcaggtgtgtggggggccctgagtggcaagttgcttagctaacaggagatccataggcagcctgcaggctaggaagtggcctagtgcaagatgagctgggaacaagggaggagagagcaggagctggggcagaggctgagccgggaggcccttgaggtgaggacacagcaggcccaggaccatggctggggaggatatgtcagcacctggaagtggagtgcaggctgcagcgcccagccatgtgggccaggtgcattcactcagagtggggccacacacccatctacccagttt

SEQ ID NO: 8104 - DNA, 392 bp, Homo sapiens
  misc_feature (1)...(392): n = A,T,C or G
tgggagccagcgctcccttactgggaacaggattccaggacccctttcttgttgtggctgccatgaagccacagctccttggggaagtgacctgctctcctttgggtgtatgcaggtgtgtggggggccctgagtggcaagttgcttagctaacaggagatccataggcagcctgcaggctaggaagtggcctagtgcaagatgagctgggaacaagggaggagagagcaggagctggggcagaggctgagccgggaggcccttgaggtgaggacacagcaggcccaggaccatggctggggaggatatgtcagcacctggaagtggagtgcaggctgcagcgcccagccatgtgggccaggtgcattcactcagagtggggccacacaccn

SEQ ID NO: 8105 - DNA, 397 bp, Homo sapiens
gtgtcctgggaagaggtgaagaatgagatggtgggagagaagggccttgcacctgaggtggctgaccgcattggggactatgtccagcaacatggtggggtatccctggtggaacagctgctccaggatcctaaactatcccaaaacaagcaggccttggagggcctgggagacctgaagttgctctttgagtacctgaccctatttggcattgatgacaaaatctcctttgacctgagccttgctcgagggctggattactacactggggtgatctatgaggcagtgctgctacagaccccagcccaggcaggggaagagcccctgggtgtgggcagtgtggctgctggaggacgctatgatgggctagtgggcatgttcgaccccaaagggcgcg

SEQ ID NO: 8106 - DNA, 408 bp, Homo sapiens
gcaaaaccccatcaagccaaaggaaatagaatagagtgaggtgtgtaataaagacatcggcgccacagtaaatacgtgggtgggctgaggttcagagatggcctcttggaggaggtgtcatttaaactgataactgaatggcgagaaggattcaccccagggatgggaacaatattcccagtatacaaacccacacatagggtgcagcagaaacagtgggggaagccatgcgaggcaagaggagagagggcgggccccgaggttcgctggtgggtgagctggaccacgccagccttgcaggctgggtcagctttggattttgttctcagagcagtaaaaagccttggaaacagatgtttcccaagctacggactagcacaatttgatatataggtcgcattttttgga

SEQ ID NO: 8107 - DNA, 411 bp, Homo sapiens
acccacgcgtccggttgcttctcacttccatctgtaccacgaggctcctggtccaaggctctttgcgtgcagaagagctttccatccaggtgtcatgcagaattatggggatcacccttgtgagcaaaaaggcgaaccagcagctgaatttcacagaagctaaggaggcctgtaggctgctgggactaagtttggccggcaaggaccaagttgaaacagccttgaaagctagctttgaaacttgcagctatggctgggttggagatggattcgtggtcatctctaggattagcccaaaccccaagtgtgggaaaaatggggtgggtgtcctgatttggaaggttccagtgagccgacagtttgcagcctattgttacaactcatctgatacttggactaactcgtgcattc

SEQ ID NO: 8108 - DNA, 431 bp, Homo sapiens
cccacgcgtccgcccacgcgttcgcccacgcgtccgggctctgtgagggtgctgactggcttcagcaaggtagaactagcccgaccaggaccgtgtgcaatctttgacaattggtagctgccaagagtgaagggaagagacagtccaggatactggcacagaggtaggctcactgcttgaactaggctgagcaatctgaccctatgggtctaggacacaggtcctgggaacatcacattcctctgcccttcctgcaggcaggaacaaacagggctgacttctggccttgaaagacccttattgctgacctggaggggctggggacttgtgtctgcggggatcagagcgcacagggagtgcacatattcaggcaccaggactagggctggagtgaggggggagaatgtcaattaccttctattggactccct

SEQ ID NO: 8109 - DNA, 424 bp, Homo sapiens
tagccctgtgagggaatagggtaataaacccagctcacactattagattccccatccctggataaaaaaagaactataatcctcattaaatacaggaccacagaactgcaagtaaactccaagagggcatagtcacagggccaatacatttctgtacagtttcctctattggtttcagaacatttgaaatatgaagctatctggtaggaacagtgtattgaaaacaagcaaaaaaaattgtcctattggagaagaaaatgtgtttgaaattaaacattttaaaatataatttatactaagcctcttgaaaaataagaacttgaaaaatattgtccttttatttccatttctctgacccaatttatcccttaaaaactttagtttattccacctatgtacaaatacagtttagttgcataacaag

SEQ ID NO: 8110 - DNA, 463 bp, Homo sapiens
  misc_feature (1)...(463): n = A,T,C or G
gtgcggtnnnnccccttgatacccctgcctgtacncgcctctgaagaccgggtcgacccacgcgtgcgggagtttggatcttgacataagtaaaaccaatgtgaatggaggagccattgctttgggtcacccactgggaggatctggatcaagaattactgcacacctggttcacgaattaaggcgtcgaggtggaaaatatgccgttggatcagcttgcattggaggtggccaaggtattgctgtcatcattcagagcacagcctgaagagaccagtgagctcactgtgacccatccttactctacttggccaggccacagtaaaacaagtgaccttcagagcagctgccacaactggccatgccctgccattgaaacagtgattaagtttgatcaagccatggtgacacaaaaatgcattgatcatgaataggagcccatgctagaagtacattctctcag

SEQ ID NO: 8111 - DNA, 401 bp, Homo sapiens
  misc_feature (1)...(401): n = A,T,C or G
gcgagcgaatcatacatagcttagtttatcagacaagctgcttttcttgagcaaagaaagagctangagagaaacggggcttgggaaccctgatgcggcaatgctgaaagaggagaaatatcccaaggaagggaaaggtgtgttgcagaacgatgaaaaataggcggcttctcacagctgttctcaggggacgagacggggtgggatgcagctccgccggtgcctaacactaagggccctcatcctgccgattcagttgtgtcgggaccgccagtgctgtctcctcgtcagatgctgcttctggtctccccgcagaagatgccactggagttgccttttcaaggatggggacatttgaaggccctggacgctcagctctgaggctggctgggatctcactt

SEQ ID NO: 8112 - DNA, 361 bp, Homo sapiens
tgggcggacgcgtgggatactcttcagaataagaggaggccttgatttggcttttcagctagctactcctaatgaaatttttctcaagaaggcactgaaacatgtgttgagtgacctgtcaactaagctgtcttcaaacgcccttgtgttcagaatttgccacagttcagtgtatatatggcctagcagtgacataaacaccattcctggagaactgactgatgcttctgcttgtaagaacatactgcgctttattcaatttgagccagaagaagatataaaaagaaaattcatgagaaagaaggacaaaaagttatcagacatgcatcaaatagtaaatatagatcttatgctggaaatg

SEQ ID NO: 8113 - DNA, 256 bp, Homo sapiens
gcggcgccagactggccgagtaccacgccaaggccaccgagcatctgagcacgctcagcgagaaggccaagcccgcgctcgaggacctccgccaaggcctgctgcccgtgctggagagcttcaaggtcagcttcctgagcgctctcgaggagtacactaagaagctcaacacccagtgaggcgcccgccgccgccccccttcccggtgctcagaataaacgtttccaaagtgaaaaaaaaaaaaaaaaaaaggggg

SEQ ID NO: 8114 - DNA, 429 bp, Homo sapiens
  misc_feature (1)...(429): n = A,T,C or G
ccacgcgtccgcggagtggtgtccatgtgcatcgggactggaatgggagccgctgccgtctttgaataccctgggaactgagtgaggtcccaggctggaggcgctacgcagacagtcctgctgctctagcagcaaggcagtaacaccacaaaagcaaaaccacatgggaaaactcagcactggtggtggtggcagtggacagatcaaggcacttcaactcatttggaaaatgtgaacactgatgacatggtataggagtgggtggggtgttgagccacccatcagaccctctttagctgtgcaagataaaagcagcctgggtcacccaggccacaaggccatggttaattcttaaggcaaggcaaatccatggatgagaagtgcaatgggcatagtaaaagtgcatgaatntaaaaaaaaaaaaaaaag

SEQ ID NO: 8115 - DNA, 419 bp, Homo sapiens
  misc_feature (1)...(419): n = A,T,C or G
cccacgcgtncggtgctggtcacactggttctccaggggtctgtgatggggcccctgggggtcagcttctgtccctctgccttctcacctctttgttcctttcttttcatgtatccattcagttgatgtttattgagcaactacagatgtcagcactgtgttaggtgctgggggccctgcgtgggaagataaagttcctccctcaaggactccccatccagctgggagacagacaactaactacactgcaccctgcggtttgcagggggctcctgcctggctccctgctccacacctcctctgtggctcaaggcttcctggatacctcacccccatcccacccataattcttacccagagcatggggttggggcggaaacctggagagagggacatagcccctcgccacggctagagaa

SEQ ID NO: 8116 - DNA, 390 bp, Homo sapiens
gccgacctcgaaagcctgcaggtgtggtggcaggcaggggctgacctggggcagccgggctatgacgggcacagcgccctgcacgtcgtgagtgcccccaccccctgcaccctctccaaaggctgccacctccaggaaggacacctggacaattcaccagctcactgctctgcccctccccgctctgcccctcccccaaatgcctggccctccccatgcaggacccgcacagactgggtccccttcccggggctctgagtggtgggggtgacgagagtggaggagctgctggggccctgtgtgtgtgggctggggacaggggagggcatcctggagatggggatccttgttccaggctgctagtcagtggccccaaagcagcccctccct

SEQ ID NO: 8117 - DNA, 398 bp, Homo sapiens
actacatcgagcgtgcactgccgtttacctacatgttcagcgtgtacaacacacggcgcgtgtgctggggggtgtggggtggcccgctgctgaccaccttctcctcgctgctcttctacatctgcagccatgtgtccacccgcgcgcttgagagcgccaagatgcagaacgcagaagctgccgacgccacgctggtgttcatcgactacgtggtgcctgcactggccaccctctacgcgctggtgctactctcccgcgtccgcagggaggacacgcccctggaccgggacacgggccggctggagccctcggcacacaggctgttggtggccaccgtgtgcacccattttgagctctgaacgccacactatctgatcctgctggggcacaccgtcatg

SEQ ID NO: 8118 - DNA, 464 bp, Homo sapiens
  misc_feature (1)...(464): n = A,T,C or G
ggatagcccngtggagccctcagtgagcctgcgaacccnccggaatcccggtcgacccacgcgtccgggacgcgtgggcggacgcgtgggcggacgcgtggttcgacccacgcgtccgcggacgcgtgggtggaagactggaatggcagaaccagtactgcatactatgccatgttcaaggtgggacctgaagctgacaagtaccgcctaacatatgcctacttcgctggtggggatgctggagatgcctttgatggctttgattttggcgatgatcctagtgacaagtttttcacatcccataatggcatgcagttcaataccctgggacaatgacaatgataagtttgaaggcaactgtgctgaacaggatggatctggttggtggatgaacaagtgtcacgctggccatctcaatggagtttattaccaaggtggcacttactcaaaagcatctactcctg

SEQ ID NO: 8119 - DNA, 425 bp, Homo sapiens
  misc_feature (1)...(425): n = A,T,C or G
atgacgtccgttgaaagctcttatggatgatttcgcagcttttgtagagaagtgctgcaaggctgacgataaggagacctgctttgccgaggagggtaaaaaacttgttgctgcaagtcaagctgccttaggcttataacatcacatttaaaagcatctcagcctaccatgagaataagagaaagaaaatgaagatcaaaagcttattcatctgtttttctttttcgttggtgtaaagccaacaccctgtctaaaaaacataaatttctttaatcattttgcctcttttctctgtgcttcaattaataaaaaatggaaagaatctaanaaaaaaaaaaaaaaaaaaaaaaaaaaaaaaaatgaaaaaaaaaaaanaaannnannnattganaaatttntttanccantatanttcttgtgtctct

SEQ ID NO: 8120 - DNA, 407 bp, Homo sapiens
  misc_feature (1)...(407): n = A,T,C or G
gagcagagcctgccgcgaacccccggagcccacgatccctcgtgccatccctcgaatccaccagcacgagcgtcccacccgcgcctgggaccatggccactgactcatgggccctggcggtggacgagcaggaagctgcggctgagtcgttgagcaacttgcatcttaaggaagagaaaatcaaaccagataccaatggtgctgttgtcaagaccaatgccaatgcagagaagacagatgaagaagagaaagaggacagagctgcccagtccttactcaacaagctgatcagaagcaaccttgttgataacacaaaccaagtggaagtcctgcagcgggatccaaactcccctctgtactcggtgaagtcttttgaagagcttcggctgaaaccacagcttctccan

SEQ ID NO: 8121 - DNA, 396 bp, Homo sapiens
ccgcgcccgacggagcctgttttcgtcgactgcccagagtccgcgaatcctccggtgcgagcccgggcggactcccccgatcccagctttctctcctttgaaaacactaagaataatgtcactgcatcagtttttactagagccaatcacctgtcatgcctggaacagggatcgtactcagattgccctcagtcccaataatcacgaagtgcacatctataagaagaacgggagccagtgggtgaaagctcatgaactcaaggagcacaacggacacatcacaggtattgactgggctcccaagagcgaccgcattgtcacttgtggggcagaccgcaatgcctatgtctggagtcagaaagatggtgtttggaagccaaccctggtgatcctgaa

SEQ ID NO: 8122 - DNA, 441 bp, Homo sapiens
  misc_feature (1)...(441): n = A,T,C or G
aaattgagaccctcgcganaccgcatggaaacccctgggtcgacccacgcgtccgcggacgcgtgggtcgaaatgtaaagaagggcttgtttctggagtttccagtttgttccattcatcgagtcagggtgtcttctttggacaatgctgtctgcagccctgggcccactcgaaggggaggcgatggactgtaggtctgtggagctcagcacagggctgtgccacggacttgggtgtcagtgaagtcacgctcattttcagacggaattctcctccccgatgtgaacaatgaaccgacggtgtcattttcataggattgtcctggagcccacggagatgcgggcttgggattcaacgtgatgctgagcggatcttctctgcttcagaccaggcctcatgtggcttcactattcatccacacatagatgctgcagagacacn

SEQ ID NO: 8123 - DNA, 398 bp, Homo sapiens
  misc_feature (1)...(398): n = A,T,C or G
agcttctcacgggcctggttttctgctccttggtcctgggtgtcagcagccgaagcttcttttcgttccttggcgaggcttttgatggggctcgggacatgtggagagcctactctgacatgagagaagccaattacatcggctcagacaaatacttccatgctcgggggaactatgatgctgccaaaaggggacctgggggtgcctgggctgcagaagtgatcaancgatgccagagagaatatccagagattctttggccatggtgcggaggactcgctggctgatcaggctgccaatgaatggggcaggagtggcaaagaccccaatcacttccgacctgctggcctgcctgagaaatactgagcttcctcttcactctgctctcaggagatctg

SEQ ID NO: 8124 - DNA, 370 bp, Homo sapiens
tgccctcgccagcgtcgcgccctggagcggggtctgcaggacgaggatggctacaggatgaagtttgcctgctactacccccgtgtggagtacggtcagtcttcccaccgaggccctggcctgaccctccctcggggaccggccgttttggtctctctgggtgtagcctgctcctcttacaggtcatgcacgcagcctgtttgctctgacaccaacttcctaccctctcagcctcaaagtaactcacctttcccccttctcctcaccccctcttaggcttccaggttaaggttctccgagaagacagcagagctgctttccgcctctttgagaccaagatcacccaagtcctgcacttcagtatgaagcg

SEQ ID NO: 8125 - DNA, 370 bp, Homo sapiens
cggacgcgtgggttgacgcgtgggcagatatggtccagaaatcaggcagcaaaaccttgccctctacttgggctgaccccagggtaaacatcagcctagacaacttactacctgggatgcagccttccaaaccccagcagccatcactgaatacaatgattcagcaacagaatatgcagcagcctatgaatgtgatgactcaaagttttggagctgtgaacctcagttctccatcgaacatgcttcctgtccggccccaaactaatgctttgatagggggacccatgcctatgagcatgcccaatgtgatgactggcaccatgggaatggcccctcttggaaatactccgatgatgaaccagagcatgag

SEQ ID NO: 8126 - DNA, 396 bp, Homo sapiens
tgaattcccttcccgtggtaaatcttcaagttacagcaaacaatttactagtagcacgagttacaacagaggagactccacatttgaaagcaagagctataaaatggcagatgaggccggaagtgaagccgatcatgaaggaacacatagcaccaagagaggccatgctaaatctcgccctgtcagaggtatccacacttctcctttggggaagccttccctgtccccctagactaagttaaatatttctgcacagtgttcccatggccccttgcatttccttcttaactctctgttacacgtcattgaaactacacttttttggtctgtttttgcgcttagactggaagttccttgggggcagggcctttgtctgtctcatctctgtattcccaa

SEQ ID NO: 8127 - DNA, 371 bp, Homo sapiens
accagccaccaggcacttcagtttcttcttttctcctggggcctggtggctggtgaccaccacagagggaggatctgtggagggatagagtgtgacactgcaggtttgaggtcgacttctcccggcccaggtctcttctcacccctacccctggagaaaagaagaaactgaagtgcctggcctacgacttctacccagggaaaattgatgtgcactggactcgggccggcgaggtgcaggagcctgagttacggggagatgttcttcacggtggaaacggcacttacctgacctggttgttggtgcatgtgcccccgcaggacacagccccctactcctgccacgtgcagcacagcagcctggcccagccg

SEQ ID NO: 8128 - DNA, 439 bp, Homo sapiens
  misc_feature (1)...(439): n = A,T,C or G
natggtaccatgcaagaccgcatgaaatccctcggacgacccacgcgtccgggaaaacgctgtgaatttgtcatggaagtcacaaataaaacacgtgcagatgtaaagggcgggacactcactcaatatgaaggcaaactgagactggtggaaattgctcaagtgccaaaagcacatgtagacgagttcaagtctgtatcaaagttcaaaatatttaatacaaacaacctatggatttctcttgcagcagttaaaagactgcaggagcaaaatgccattgacatggaaatcattgtgaatgcaaagactttggatggaggcctgaatgtcattcaattagaaactgcagtaggggctgccatcaaaagttttgagaattctctaggtattaatgtgccaaggagccgttttctgcctgtcaaaaccacatcagatctct

SEQ ID NO: 8129 - DNA, 524 bp, Homo sapiens
  misc_feature (1)...(524): n = A,T,C or G
cacacaatcacgtaccatcacagatccacacatccaatcatcgagcgcnccnnaannaannanattgatagctatcggaaccgcccggaancccggncgaccttgataacgatcagagagcngagancatgccacngcactccaacttgggcgacagagccagaccatgnctcaaaacaaacatcagcaacagcaaaaattatacaaagtttaggtagaagctttctcagcaagcaaaaccttttctctgataataaaattcgaaagatggagggagaaggcaaaatagcagactttgtaaacttatgacatcacatttgtcttgaattactgagatatgtgttcttcattgcaccttgcacataccaccatttatatatgactttcaaagtaaaatagaataattaacatcaattgaggccaggtgtgatgcctcccatcaccaaggaatacaaaatgaatggagtctaagatacaggtgatttggtataaggaagataggactggggaggaggcattactgg

SEQ ID NO: 8130 - DNA, 370 bp, Homo sapiens
ctctcatacagctacagagtacgtacataatgctgggtacattatagataaatagctgtgcgttttcctgtactattcccaacatctcaattatgagtctgttattttacaaatcctacttttctggaagaattgtcaactgtttttggcttgggctagtgttccatatattataatcctttccatattttgctctgtggtaaatctatttctccttctgtttcattcttttttcccccctcaggttttccttgtcctcccttctcctaactcctgcaaaaaaaaacaaatctttgagtgcaaatctttcctcaagacttctggactattgctgtcttttcaaagatcacgtgataaagttaaagagatg

SEQ ID NO: 8131 - DNA, 437 bp, Homo sapiens
  misc_feature (1)...(437): n = A,T,C or G
natggatccatgcagaccgcatggaaaccactgggacgacccacgcgtccggcattgcacgttggatgagccagggaaattattacattaacaagcattttgtgtgtgcgtagtagttactttgtactgagagaacttgctttggggtgcaattaaacaataaactgattttatttgggagaaacaaggaagggtgcacttaactagcaacctaagcatgatttttcagcttttgcccttagggtttaaattacaattccaaaatgttagacatactgtattttttcgttcagtgtggctttaattttcccctcttgcagtttgttctgtaatgccttttacatttggacacatagtttatgctttttagattttggttgctttcttgccaaaataagtgttaactgtgtttcaaacttgattttctttcttttttt

SEQ ID NO: 8132 - DNA, 370 bp, Homo sapiens
cgcgggtgcggggagtgtccttgggtggagaagtcacgaatgtaggaatggaacaagttcgggtctcctgactgggtcgtgaagtagtattgtctttcccaagctttcctgttgatgagcggcgtggagagaatggggcttgctggattttgtattttccgcaagtactcccaggtgattctggtctggtaaacactgttggagtggaaggcctatctgccccggactcagaccttctctctgcccccatctttgtgccctgagatgttccagcattctcgagcctaagtttcttcatctataaggagataaaataaccagtcctcgcagggctgttgtgagggctacaagaaggataactgcctagcgg

SEQ ID NO: 8133 - DNA, 459 bp, Homo sapiens
  misc_feature (1)...(459): n = A,T,C or G
aatgccagnaannnngaaactgataccctgcggnaccgcttggagaacctcgggacgacccacgcgtccgagtatctctgcccctgcctccctaattagctagggctggggtcagccactgccaatcctgccttactcaggaaggcaggaggaaagagactgcctctccagagcaaggcccagctgggcagagggtgaaaaagagaaatgtgagcatccgctcccccaccaccccgcccagcccctagccccactccctgcctcctgaaatggttcccacccagaactaatttattttttattaaagatggtcatgacaaatgaaaaaaaaaaaaaagggggggcccgtttaaaagaacccttgggggggccaaatttaacccgggctggcaaggaaaaatttttttccttatgggggggggaataaaacccaacctgggaatttttggaagggaccct

SEQ ID NO: 8134 - DNA, 400 bp, Homo sapiens
gcagaaattggagatgttagtattttagtaaataatgctggtgtagtctatacatcagatttgtttgctacacaagatcctcagattgaaaagacttttgaagttaatgtacttgcacatttctggactacaaaggcatttcttcctgcaatgacgaagaataaccatggccatattgtcactgtggcttcggcagctggacatgtctcggtccccttcttactggcttactgttcaagcaagtttgctgctgttggatttcataaaactttgacagatgaactggctgccttacaaataactggagtcaaaacaacatgtctgtgtcctaatttcgtaaacactggcttcatcaaaaatccaagtacaagtttgggacccactctggaacctgaggaag

SEQ ID NO: 8135 - DNA, 477 bp, Homo sapiens
  misc_feature (1)...(477): n = A,T,C or G
ttatgaacccttcggaaccgatgaggaccntccgggtcgacccacgcgtccggagtaagactataacgccatagtgcgcccattagacttatctccgaggcagaaaactcacaaagatatgggggacctttatttgtgcattgtcacactgctatgaagaaatacctgaaactgggtgatttatatagaaaagagggttaattggctcacggttctgcaagctgtacaggaagcgtggctgtgttggccttaagaaacttgtggcaaaaggcaaaagggatgccggcctgtcttacacagcctgaacaagaggaagagttgagggcactgcgctacacttctaaacaactagatctcatggtaactgacacactaacatgagaacagtgccaaaggggaaacccacccccatgatcacccaatcatctcccaccaggcttcacctctaacattgggcattataatttgaaatgagan

SEQ ID NO: 8136 - DNA, 419 bp, Homo sapiens
gccgacctcgaaggcctgcaggtgtggtggcaggcatgggctgacctggggcagccgggctatgacgggcacagcgccctgcacgtcgtgagtgcccccaccccctgcaccctctccaaaggctgccacctccaggaaggacacctggacaattcaccagctcactgctctgcccctccccgctctgcccctcccccaaatgcctggccctccccatgcaggacccgcacagactgggtccccttcccggggctctgagtggtgggggtgacgagagtggaggagctgctggggccctgtgtgtgtgggctggggacaggggagggcatcctggggatggggatccttgggccaggctgctagtcagtggccccaaggcagcccctccccactgcttccccataggcagaggcagccgt

SEQ ID NO: 8137 - DNA, 411 bp, Homo sapiens
ctcccctgtgagctccacctgccccagatctcctggctttaacccctccttggccaaggccagggttgcctgcgggagccaggcgtccgctctccacacctttcacaggccaccaccccgaacccctccgaccctgcgttccatcccaccatcaacctccacgtgaatctgcacctctgccccagccccagccctcagagcaacctcagcccagcccagcccagctccagctccagctccagcccgggccccatcatggccaaggactttcaagatatccagcagctgagctcggaggaaaatgaccatcctttccatcaagggccacctcctgcccagcccctggcacagcgtctctgctccatggtctgcttcagtctgcttgccctgagcttcaacatcctgctgctg

SEQ ID NO: 8138 - DNA, 479 bp, Homo sapiens
  misc_feature (1)...(479): n = A,T,C or G
natagatangccctgcggnaccattgaggaccctccgggtcgacccacgcgtccgactcataagaggtggaaccagaaaatatgcatttgaactgaaagaaaagcttctccgaggaaccgtgattgatgtgactgactttgtcaactgggcctcttccataaatgatgctcctgttctcattagtcaaaaactgtctcctatatataatctggttccagtgaaaatgaaaaatgcacacctaaagaaacaaaacttggaaagagccattgaagactatatcaatgaatttagtgtaagaaaatgccacacatgccaaaatggaggtacagtgattctaatggatggaaagtgtttgtgtgcctgcccattcaaatttgagggaattgcctgtgaaatcagtaaacaaaaaatttctgaaggattgccagccctagagttccccaatgaaaaatagagctgttggcttctctgagctcca

SEQ ID NO: 8139 - DNA, 477 bp, Homo sapiens
  misc_feature (1)...(477): n = A,T,C or G
aatggaaaccttgcggnaccatttgaggaacctccgggtcgacccacgcgtccgcggacgcgtgggtccggacgcgtgggaaaaaaaaaagcatctctggttgagaaatcaaatgcatgagatggtgtgtctaattctgcatgaacctgaaggcatggtttttaaaggatgccatcctgtagtttaaaagccactaatttccgaggagtaatctaatgttggttagatctttggattgactgcagcaaagtattggtagagcagtctatctcactataattctttctaggaaaatttgggaagcgactttaacacaaaaacgaggcagatttacttatttgccattttctatgttaacatgcttaattatgtcggaaactgaatctttctttccagtaccacttccgctgtcacggtaaagtccgccatcagaagactgaaggagttgaaagaccagtagacgctcctctacttttt

SEQ ID NO: 8140 - DNA, 411 bp, Homo sapiens
caggcgagaagccgtacacctgtctgaaatgtggggagcgcttcaggcagaattcacacctaaatcgtcatcaaagtacccacagtagagacaaacattttaaatgtgaggaatgcggggaaacctgtcatatttccaacctttttagacatcagagactacataaaggggaaagaccctataagtgtgaagaatgcgagaagagcttcaaacagcgctctgacctctttaaacaccacagaatccacactggggagaagccctatggatgttccgtctgtgggaaacgcttcaatcagagtgcaaccctcattaaacaccagagaattcacactggggaaaagccttacaaatgtcttgaatgtggggaaagatttatacaaagtacacaccttatccgacaccaaagat

SEQ ID NO: 8141 - DNA, 478 bp, Homo sapiens
  misc_feature (1)...(478): n = A,T,C or G
nttttatagccctgcggcaccagtgaggaccntccgggctggcgacaaggccaggtcgtacccgcagtgcgtccctgtgggacctgccctccacctgctccatggggacaagtccaggtcgtacccgcagtgcgtccctgtgggaactgccctccacctgctccctggggacacgtccaggtcgtacccgcaccgcgttcctgtgggaactgccctccacctgctccctggggacaagcccaggttgtacccgaagtgggtccctgtgggaactgccctccacctgccccttaaggggtgcttgtgcagtggtttcatcctctcacttggatctgtccgttggaccctcactagggttgggagttcctcatgggatgaggtactctagatcccctcttgacagattttctttttattatttcagatacacctcttcttcacccttcctctctgggtgctttttcagccctaagtatgn

SEQ ID NO: 8142 - DNA, 418 bp, Homo sapiens
ggaaccatttaaaagcttacaaaaagcaggaacagtaattgaagatatcagtctatagagtaacataggtgctttatatacttcatatttgttagtccttaaatctgttgcagatattaatagtcctcttttttcagatgtgtaaaactgagtttcagtgtaaactgaatctctgagagattaagtcattttctcaaggttcagaacagtaagtggcagagtaagtgcaggattgaggctagggtctttctactccaaagcctaaccctgtccgtcccagagtgatacaatattataacctacgccctgatatttaacaaaattaaagcattcttgggaatacttctagttttcatagaaagatcctcaatcaagatcattctggaatgtgcagaagataaaaagaaatgggatggca

SEQ ID NO: 8143 - DNA, 418 bp, Homo sapiens
  misc_feature (1)...(418): n = A,T,C or G
acttaactgatggttcatatgatgatgttctaaatgctgaacaacttcagaaactcctttacctgctggagtcaacggaggatcctgtaattattgaaagagctttgattactttgggtaacaatgcagccttttcagttaaccaagctattattcgtgaattgggtggtattccaattgttgcaaacaaaatcaaccattccaaccagagtattaaagagaaagctttaaatgcactaaataacctgagtgtgaatgttgaaaatcaaatcaagataaagatatacatcagtcaagtatgtgaggatgtcttctctggtcctctgaactctgctgtgcagctggctggactgacattgttgacaaacatgactgttaccaatgaccaccaacacatgcttcacagttacattacagn

SEQ ID NO: 8144 - DNA, 426 bp, Homo sapiens
attttatgaattcctgaaaggaaaatagaatatgatcaattccttgccctgtggaagagtgcagaactgtggttttgttttcctttgacttctgtaaaatgtgaccgtttgacatctgtggtagattgaacggaatatcacagctgctgagtttactccatagctttcaaaccttttttattttaagaaattcttgaaaaaccctatgttccatgggaacataaagttattatagtgcctcctaaggggttaatataaatcaaggaggaagtttatatttaaggaagaattggagtgacgtatcttagaaaaggaaaggctgatgtttccatataacttgctctccaccaggcctatcatttttctttttagagacaaacgtgacaggctagtcttgtctctctcatatgctaggtagcaaatggg

SEQ ID NO: 8145 - DNA, 404 bp, Homo sapiens
gagacccaatcagttcacttatttctgggcctggggagacgcccagccagttggctccactgagaccacgctttgatgcagttggcccacttgcaggacctaaccccatcttgccagggcgaggcggccccaatgacagatttccctttagacccaacaggggtcggccaactgatggccggctgtcattcatgtgattgatttgcaatttcatttctggagctccatttgtttttgtttctaaactacagatgtcaactccttggggagctgatctcgagagttattttctgattgtggtggagagagttgcactcccacaaaccttttaagagatacatttatagccctaggggtggtatgacccaaagggtcctctgtgacaaggttggccttgggaaaag

SEQ ID NO: 8146 - DNA, 419 bp, Homo sapiens
  misc_feature (1)...(419): n = A,T,C or G
ggacacccccagtacctgctggactcgaatatttgatcatgggtctggatggggccacctatgacctcgagggacacccccagtacctgctggactcgaatagctggatcgaggagatgccctctgaacgcctgtgccggagcacccgccagcgggcagcctgtgcccagctcaacgacttcctccaggagtatggcactcaggggtgccaggtgtgagggctgccctcccacctccgctgggaggaacctgaacctgggaaccatgaagctggaagcactgctgtgtccgctttcatgaacacagcctgggaccagggcatattaaaggcttttggcagcanannnnnnnnnnngnnnngngnnnaggnngnnctnccacctaacaaaaaaaaaaaacaaggcgagagaggggggcgn

SEQ ID NO: 8147 - DNA, 428 bp, Homo sapiens
agcgggcaggacgcgctggagaagatccgggcaggggcctccctggtgcagctgtacacggccctcaccttgtgggggccacccgttgtgggcaaagtcaagcgggaactggaggcccttctgaaagagcagggctttggcggagtcacagatgccattggagcagatcatcggaggtgaggacagcgtctgacgggaagcctgatctggaaccttcccaaggactcaggcaagcctttgtggctggatcatgagaggagggactccatcttgagccatgtcccccagccatggcatggctgcactgtaaacgccaatcggggggtcaccaggatcaaccgcaggctttcttcagtcccttggtcagaccataaactgcatttttgattctttgtggattcaaaccctaggatccatcagtcttgcag

SEQ ID NO: 8148 - DNA, 405 bp, Homo sapiens
gcacccaaaaaaaatcaactgcgctcactgcaaaattacaaaggcctacattggatttgtagacgagaaaggagccctgtattgtgagctgtgctatgagaaattctttgcccctgaatgcggtcgatgccaaaagaagatccttggagaagtcatcaatgcgttgaaacaaacttggcatgtttcctgttttgtgtgtgtagcctgtggaaagcccattcggaacaatgtttttcacttggaggatggtgaaccctactgtgagactgagaattatgccctctttggtactatatgccatggatgtgaatttcccatagaagctggtgacatgtttctggaagctctgggctacacctggcatgacacttgctttgtatgctcagtgagatgtgaaagatagct

SEQ ID NO: 8149 - DNA, 420 bp, Homo sapiens
  misc_feature (1)...(420): n = A,T,C or G
cggacgcgtgggcggggcctgacctcaccctgcaaagacatcaacacatttattcatggcaacaagcgcagcatcaaggccatctgtgaaaacaagaatggaaaccctcacagagaaaacctaagaataagcaagtcttctttccaggtcaccacttgcaagctacatggaggttccccctggcctccatgccagtaccgagccacagcggggttcagaaacgttgttgttgcttgtgaaaatggcttacctgtccacttggatcagtcaattttccgtcgtccgtaaccagcgggcccctggtcaagtgctggctctgctgtccttgccttccatttcccctctgcacccagaacagtggtggcaacattcattgccaagggcccaaagaaagagctacctggaccttttgttttctgn

SEQ ID NO: 8150 - DNA, 428 bp, Homo sapiens
aaaataaaaaaagaattacctcagagtaataatattcagcaaatttaaacttgccacctacttaaaatggattcatgaggacatattggccaccatctgctgttgaacgctgacaccagattactgagtaaagaatttgaaaattttctcaaaattgattgttccagacattttggtagttgctcatcagcagagtttcccattcaacagattcttctatggaacacaaatttgcagtgcccattgaagaaacagaagttgctttcaaacagatgtgttggtctctgtttttagtttcaggctataaaccttttgagggcaggtactaaccaccaggttagtacagttatggtgctttagaatctaatctcaagagaaaacatcatttcaaggttcatgttttttcagcctccacattgggtgtacag

SEQ ID NO: 8151 - DNA, 478 bp, Homo sapiens
  misc_feature (1)...(478): n = A,T,C or G
taaagaaaactnntnangcccaatggagaggcantccccgggnccacccacgcgtccgggacgcagcaaagagaggagagaccccagagtcagaaggagtgagaaccctgacccctaatcccactgggttcagccaataagagcccagccaccatggcggagctgcaggaggtgcatatcacagaggagaagccactgttgccaggacagacgcctgaggcggccaaggaggctgagttagctgcccgaatcctcctggaccagggacagactcactctgtggagacaccatacggctctgtcactttcactgtctatggcacccccaaacccaaacgcccagcgatccttacctaccacgatgtgggactcaactataaatcttgcttccagccactgtttcagttcgaggacatgcaggaaatcattcagaactttgtgcgggttcatgtggatgcccctggaatggaagagggag

SEQ ID NO: 8152 - DNA, 480 bp, Homo sapiens
  misc_feature (1)...(480): n = A,T,C or G
ttatgaccgtnntcgccntanagtatgtctttcgaaaccccnnccgaagggccgggacgacccacgcgtgcggcctagagtcaaacctccgtgcttctcagacagtgttttttcaccatgagtgggggcccatttttaggagacaactttggatatacttttaaaaaactccccgtagaaggcagcgaagaagacaaatcacaaactggtgtgaatagagccagcaaaggaggtcttatttatgggaactacctgcatttggaaaaagttttgaatgcacaagaactgcaaagtgaaacaaaaggaaataaaatccatgatgaacatctttttatcataactcatcaagcttatgaactctggtttaagcaaatcctctgggagttggattctgttcgagagatctttcataatggccatgtcagagatgaaaggaacatgcttaagggtgtttctcggatgcaccgagtgtcagcgatg

SEQ ID NO: 8153 - DNA, 428 bp, Homo sapiens
cacattttgataaagcatctgtgctgtgtttggggatccctttctcgttcggatctttggactctgcaaaggctggctgagttgtccaaatgacagagcccccaggggcttcgtcccatctcagacaggcattacgctgctgccagtggctggctggaattccaagccagtgggttttattttgggaggtgctatggaagtgggtcctgcagactgatgctgcttggtcccctggattcagcccccttcctaggggtatgtaccaacatcctgccttgcctgagatgccatcacctttcttggggatcctaaggctggagtatgtaaagctcctgggtctctgtatgtgcctgagcaccggttcttcctagactccacacagctctgtgtgttggacccaaggccctggtggggtgggctcatgaggg

SEQ ID NO: 8154 - DNA, 408 bp, Homo sapiens
  misc_feature (1)...(408): n = A,T,C or G
cccacgcgtccggaatctcacttgtgctgttggaacaactggccagaaatctatctctagagtgattgaatatttggaacattgctagctgctttacctttgcttcaggtgctcggtaatgctggagctatccttagacaaagaaaagtcaagtcatgaaagaagtccttgaagatataccaagaacattcatcagtatcattcgtgtttggatttttaaggccacctgatttcttcgtcatgcattcggcatttgctaaatgacagttactacatcaatctgcaactatcaaaaatgaggggaaaaggttcaggctgttaacaattccatgcagtatttaaatacatttactttggcagaaggtataccctccccttgttttcttgctttattctgggcaagtttgn

SEQ ID NO: 8155 - DNA, 401 bp, Homo sapiens
cccacgcgtccgcacacattaggcagtattacattcagtggaaaaccaaaggtctggagataatgccagcaagtcctaacctatgcaagatgccttttctagacttggctatggactgataaggtgatcaccaagggaggggtgacaccaggactccacacatacctcatggatgtctaaggaataatggtttgaccatctttgcagtgttctccacttgccataggggtatttggagactaatctgccaacagtgagggctctctgctttttctgttgatgcaggtcctctgtgacattgtcacagcaacttgaaaatgagggatacgggtatgaactatctagatcctggctggtacaggcttccttatcctctgacagaatagcagtgctcctttgtg

SEQ ID NO: 8156 - DNA, 445 bp, Homo sapiens
cctctgcctcctgggttcaagcaatccttctgcctcagccacccgaatagtagctgagactacaggtgcatgccatcatgcctcgctaattttcgtatttttagtagagacggagtttcaccatgttggccgggctactctcaaacatctgacctcaagtgatccacccacctcggcctccaaaagtgatgggattacaggtgtgagccactgcacccggcctggaactctttcatgaaggggaagaaaaagataaaaccaaacacagcccagaaattctggcatacaaatcagaaaagaactacttcttagccacctgtgccagacagagtctcactctgtttgccaagctgaagtgcaatgggttgatctcggctgaacacaacccccatctcctggagtaagcaattcttctggctcaacctcccgagtagctgggagtagg

SEQ ID NO: 8157 - DNA, 418 bp, Homo sapiens
cctgagaacacaaggaaggaactgttctacaaggctgatggagagtcgtgttcagcatctatgatgtaccaggaaggcaagttccgttatcggcgcgtggctgaaggcacccaggtgcttgagttgcccttcaaaggtgatgacatcaccatggtcctcatcttgcccaagcctgagaagagcctggccaaggtagagaaggaactcaccccacaggtgctgcaagagtggctggatgaattggaggagatgatgctggtggtccacatgccccgcttccgcattgaggacggcttcagtttgaaagagcagctgcaagacatgggccttgtcgatctgttcagccctgaacagtcaaactcccatgtattgttgcaaaaagccgagatgacctctatgtctcagatgcattccataa

SEQ ID NO: 8158 - DNA, 399 bp, Homo sapiens
cggaactgtcgcccttccatgatgtggctccctgctcttgtcctggccactctcgctgcttccgcggcttgggggtcacccaagatcccaaggcggggcagttaatctcagagctatttacaaactgaaaagagaacattcctctcaagctttctgaagactgtctttacctcaatatttacactcctgctgacttgaccaagaaaaacaggctgccggtgatggtgtggatccacggaggggggctgatggtgggtgcggcatcaacctatgatgggctggcccttgctgcccatgaaaacgtggtggtggtgaccattcaatatcgcctgggcatctggggattcttcagcacaggggatgaacacagcccggggaactggggtcacctggaccagg

SEQ ID NO: 8159 - DNA, 419 bp, Homo sapiens
  misc_feature (1)...(419): n = A,T,C or G
cggacgcgtgggatgaataacctgccacatctgcaggtggtaggactaacatggggtcatatatcttgggatcttctggctctaccaccacaagatattatccttgcatctgatgtgttctttgaaccagaagattttgaagacattttggctacaatatattttttgatgcacaagaatcccaaggtccaattgtggtctacttatcaagttaggagtgctgactggtcacttgaagctttactctacaaatgggatatgaaatgtgtccacattcctcttgagtcttttgatgcagacaaagaagatatagcagaatctacccttccaggaagacatacagntgaaatgctggtcatttccttttgcaaggacagtctctgaattatacctacaacctgttctgggacagtatcaat

SEQ ID NO: 8160 - DNA, 410 bp, Homo sapiens
agaatggtgaggagacatggattgagaatgggaagcttattgtagcaacagactcttgaggaagagtacagtcctctgggaaaatatctgaacccatggaggctcataatgagggctctaacttggaaaggcatcaggcccagcccaaagagaagattgagtataaatgctcagaacgtgagcagagattcatccagcacttggacctgattgaacatgccagtacacacacagtaaagaaactctgcgagtctgatgtgcgtcatagttccaggcttacaggacataagaaagtcctctctagagagaaaggtcatcagtgtcatgaatgtgggaaagcccttcagatgagttcacacctcgtcagacattagaaaatacatcttggcgagaagccttatcagtgcaag

SEQ ID NO: 8161 - DNA, 411 bp, Homo sapiens
  misc_feature (1)...(411): n = A,T,C or G
tatcaaaaaagtttccaaagaggatcctgctgctgccttctctgctgcattcacctcaccaggatctcaccatgcaaatgggaacaaattgtcatccgtggttccaagtgtctataagaacctggttcctaagcctgtaccacctcctttcaagcctaatgcatggaaagctaacaggatggagcacaagtcaggatccctttcctctatccgtgagtctgcttttaccaaaccaatctctgttaccaaaccaatggtactggctagaggtgcaaatctgagatctaccgaagagagtccctccagcaccacccctccaattgagatcaactcctgtcgtctgaccaagttgacccgcccaaccaccgacaggaagagtgagttcctgactactctggaggatgaccggan

SEQ ID NO: 8162 - DNA, 420 bp, Homo sapiens
  misc_feature (1)...(420): n = A,T,C or G
cagagcggagacttcagggagaccatagcccagcttgccaggcactgagctagaagccctgccatggcacccctgagaccccttctcatactggccctgctggcatgggttgctctggctgaccaagagtcatgcaagggccgctgcactgagggcttcaacgtggacaagaagtgccagtgtgacgagctctgctcttactaccagagctgctgcacagactatacggctgagtgcaagccccaagtgactcgcggggatgtgttcactatgccggaggatgagtacacggtctatgacgatggcgaggagaaaaacaatgccactgtccatgaacaggtggggggcccctccctgacctctgacctccaggcccagtccaaaaggaatcctgagcagacacctggtctgaaacctgan

SEQ ID NO: 8163 - DNA, 466 bp, Homo sapiens
  misc_feature (1)...(466): n = A,T,C or G
cggcaactgaanccnttcggnaccactggaggacctccggancgacccacgcgtncgcccacgcgtccgtccagctccctgaggcagagttgttaatggagagaatgtttcctctcctggctctggggctcttggcggctgggttctgccctgctgtcctctgccaccctaacagcccacttgacgaggagaatctgacccaggagaaccaagaccgagggacacacgtggacctcggattagcctccgccaacgtggacttcgctttcagcctgtacaagcagttagtcctgaaggcccctgataagaatgtcatcttctccccactgagcatctccaccgccttggccttcctgtctctgggggcccataataccaccctgacagagattctcaaaggcctcaagttcaacctcacggagacttctgaggcagaaattcaccagagcttccagcacctcctgcg

SEQ ID NO: 8164 - DNA, 396 bp, Homo sapiens
cattcccaaggaggaggcattcggaaagtattgtcggccagagagccaggagcatcctgaagctgacccaggcgctgccccatacctgaagaccaagtttatctgtgtgacaccaacgacctgcagcaataccattgacctgccgatgtccccccgcactttagattcattgatgcagtttggaaataatggtgaaggtgctgaaccctcagcaggagggcagtttgagtccctcacctttgacatggagttgacctcggagtgcgctacctcccccatgtgaggagctgagaacggaagctgcagaaagatacgactgaggcgcctacctgcattctgccacccctcacacagccaaaccccagatcatctgaaactactaactttgtggttcca

SEQ ID NO: 8165 - DNA, 410 bp, Homo sapiens
caagcatgttgctcttattcagcgtaatcctaatctcatgggtatccactgctgggggagaaggaacactttgtgattttccaaaaatacaccatggatttctgtatgatgaacaagattataaccctttttcccaagttcctacaggggaagatttctattactcctgtgaatataattttgtgtctccttcaaaatccttttggactcacataacatgcacagaacaaggatggtcaccatcaccgaagtgtctcagaatgcgttcctttccttttgtgagaaatggacattctgaatcttcaggactaatacatctggaaggtgatactgtactaattatacgccacacaggatacagccttcaaaacaatgagaaaaacatttcgtgtgtataacggtgctggtcg

SEQ ID NO: 8166 - DNA, 410 bp, Homo sapiens
cccacgcgtccgacgaaagtcatgttacccaacaccgggaggctggcaggatgtacagtttttatcacaggtgcaagccgtggcattggcaaagctattgcattgaaagcagcaaaggatggagcaaatattgttattgctgcaaagaccgcccagccacatccaaaacttctaggcacaatctatactgctgctgaagaaattgaagcagttggaggaaaggccttgccatgtattgttgatgtgagagatgaacagcagatcagtgctgcagtggagaaagccatcaagaaatttggaggaattgatattctggtaaataatgccagtgccattagtttgaccaatacattggacacacctaccaagagattggatctgatgatgaacgtgaacaccagaggcaccta

SEQ ID NO: 8167 - DNA, 419 bp, Homo sapiens
  misc_feature (1)...(419): n = A,T,C or G
aaagactttgagcttgatgtcctggaggaagcatataccacagaacattggctggtcaggatatacaaggtaaaggacctggataatcgaggcttgtcaaggacataaatgtcacgtccagctctgatatgcttcgcactgagcacatcacatttaggacgttgaagattttttttttttttttttttaaaaaggcagttgggaaaaacaaaactggagggcatcaaaattgtctggaagttttgttttggccaaaatgggctggcccaaatgaaatgatttttataattctaaacaggttaccaaaggaaagggcagggttttactttggtcaattaaaggggggaattttttttaaaaaaaaangcnncaaaaaaaacccncaaacattattttaaaaaccaaaaacaagggccggg

SEQ ID NO: 8168 - DNA, 412 bp, Homo sapiens
catcactttgagccagcagagatcccatatgcccctaaggaaacgtcctgtgtctaaagccaagcttggattattaccactgctgttcttgcatagaaccaaaacttctgagcatctcccaaattagatcaggctttaggatttggtctggatatttcctcccagtgagtctgtaaaagcatagatcctggagacgaaagagacatcaagagataaattgttttcttgggctaaatagagtggggggcgatatacccattttacaatcaaggaaaccgaggcccccgtgatcccaattgagtttggttttgaaaacagtgtgttcacgttcgtttggtccggtaattaaggtgggaacgaggcaagccagtgttttctggggcatgtacctggctgatttggggaaaaggcg

SEQ ID NO: 8169 - DNA, 420 bp, Homo sapiens
aaccaaccggttgcttgctgtcccagcggcgccccctcatcaccgtcgccatgcccggaggtttgcttctcggggacgtggctcccaactttgaggccaataccaccgtcggccgcatccgtttccacgactttctgggagactcatggggcattctcttctcccaccctcgggactttaccccagtgtgcaccacagagcttggcagagctgcaaagctggcaccagaatttgccaagaggaatgttaagttgattgccctttcaatagacagtgttgaggaccatcttgcctggagcaaggatatcaatgcttacaattgtgaagagcccacagaaaagttaccttttcccatcatcgatgataggaatcgggagctcgccatcctggttggcatgctggatccagcagagaaggatg

SEQ ID NO: 8170 - DNA, 413 bp, Homo sapiens
gaaatgggatccatataaacagggatttggaaatgttgcaaccaacacagatgggaagaattactgtggcctaccaggtgaatattggcttggaaatgataaaattagccagcttaccaggatgggacccacagaacttttgatagaaatggaggactggaaaggagacaaagtaaaggctcactatggaggattcactgtacagaatgaagccaacaaataccagatctcagtgaacaaatatagaggaacagccggtaatgccctcatggatggagcatctcagctgatgggagaaaacaggaccatgaccattcacaacggcatgttcttcagcacgtatgacagagacaatgacggctggttaacatcagatcccagaaaacagtgttctaaagaagacggtggtggat

SEQ ID NO: 8171 - DNA, 416 bp, Homo sapiens
ccttgttcacagcagccatgtagaaggtactccagcatcttgttcacagcagccatgtacaagatgctggagtaccttgcgactggtggccaggagcatgagacaaatgaacagcaacaaaaggtggcagagacagttgggttctactcctccgtcttcggggccatgcagctggtgtgccttctcacctgccccctcatgggctacatcatggactggcggatcaaggactgcgtggacgccccaactcagggcactgtcctcggagatgccagggacggggttgctaccaaatccatcagaccacgctactgcaagatccaaaagctcaccaatgccatcagtgccttcaccctgaccaacctgctgcttgtgaggtttggcatcacctgtctcatcaacaacttacacctccg

SEQ ID NO: 8172 - DNA, 382 bp, Homo sapiens
  misc_feature (1)...(382): n = A,T,C or G
cagtacacctgggacatggcaaagcatggcacagatgatggtgtagtatggatgaattggaaggggtcatggtactcaatgaagaagatgagtatgaagatcaggcccttcttcccacagcaatagtccccaatacgtagatttttgctcttctgtatgtgacaacatttttgtacattatgttattggaattttctttcatacattatattcctctaaaactctcaagcagacgtgagtgtgactttttgaaaaaagtataggataaattacattaaaatagcacatgattttcttttgttttcttcatttctcttgctcaccaagaagtaacaaaagtatagttttgacagagttggtgttcataatttcagttctagtn

SEQ ID NO: 8173 - DNA, 481 bp, Homo sapiens
aaatgaacgcatgcggaccgcgatgaatccctggtcgacccacgcgtccgaccaaagtgcgaaaagttactttcaatggactgaaccagatgattgtcatagaactgggcaccaatccgctgaagagctcatgaattgaaaatggggctttccagggaatgaagaagctctcctacatccgcattgctgataccaatatcaccagcattcctcaaggacttcctccttcccttacggaattacatcttgatggcaacaaaatcagcagagttgatgcagctagcctgaaaggactgaataatttggctaagttgggattgagtttcaacagcatctctgctgttgacaatggctctctggccaacacgcctcatctgagggagcttcacttggacaacaacaagcttaccagagtacctggtgggctggcagagcataagtacatccaggttgtctaccttcataacaacaatatctctgg

SEQ ID NO: 8174 - DNA, 382 bp, Homo sapiens
gacatcaccatcaaacctgtcttgtgcttgggcccagctgcccctgcgcccccatgcatagctgcctcccgggagccgcttgatcacaggactagcagagagcaggcagatccctcagcaccctgccttgccccatccagcttgctgtcccctgaggcctcaccctgccggaatgacatgaacactaagactccccctgaaccctcagccaagcagaggtcaatgcgctggtaccgaaaagcctgcaggtcagccagcccctcaagccagggctggcagggccgccgaggccgcaacagccgttctgtcagctctgggtccaaccggactaacgaagcatattcctcatcctcatcatcgggtttctcattccgatctcggg

SEQ ID NO: 8175 - DNA, 421 bp, Homo sapiens
tggataaagtttaaaactagaagcatgttgatgatgacaaggaatgctgcaaaaatactctagttcaacaaagagttatgatcacaaaataatttttatccattctacagtgtttcagaaacatggttaaagtttaaaactagaagcagcagaaaactagcttgtaaaatttatccaagtagagtgcaggctaggctgtcttggggaaataaacattaaaacttaaagcaaaaaaaaaaaaaagggggggccgttttaaaggatccttggggggcccaaatttaacccggcctggcaaggttttatttttttctttatagggaggcgtattaaaacctacctgggaatttttggaagggacctttttttggggggggggacttattggcccaacctccctacagaatttaaaggttttagg

SEQ ID NO: 8176 - DNA, 495 bp, Homo sapiens
  misc_feature (1)...(495): n = A,T,C or G
cgaggcnatttgacagcctcgggaccgttgaggaccntccgggacgacccacgcgtccgggggggggccactagtctaacagacggtcacaaccagtgtcatggaaaaccaaggatattagcaaaagcagaagttgctagtgaccttgggaagccgaagctgcttacagtagctgggacaagctgaaagtcagactaagaaataaagagagggccttcaagaagcttcctgaatgatttctgctagccctgagcctatttttggaaccagcacttggggaaactgatcttgtgaggatggatgtgtttagggacacagggcttttgagagcagcaccaccccactggggcatccccagacttgggaaacgtgactctttcttaatgccactgggttttagtcaggccacagtgagaaggaacagccctaacaggcctccagccaggttgaatgagctcatttttgttgtagccaaccagtaagatttgctaatgt

SEQ ID NO: 8177 - DNA, 383 bp, Homo sapiens
cgggaatctgatgaggaaactcagatcaaagttaattgggaagaagaggcagcttctggcttgctaacctctctgaaagacaacgtgcccaaggccacaggggtcctttatgattatgtcaacaagtaccactgggaacacacagggctcaccctgagagaagtgtcttcaaagctgagaagaaatctgcagaacaatgctgagtgggtttatcaaggggccattaggcaaattgatgatatcgacgtgaggttccagaaagcagccagtggcaccactgggacctaccaagagtggaaggacaaggcccagaatctgtaccaggaactgttgactcaggaaggccaagccagtttccagggactcaaagataacgtgtttgg

SEQ ID NO: 8178 - DNA, 386 bp, Homo sapiens
ttttcccagtttggtgttaggtggccttaagttctcagtaatgacacttatcaaataggaacttagtgttactcacctttatccattcccccaacactcaacaaattgcctttgctatatccctatgagatgagcagatcaaatattccccgtgagttaatgaaaactgattcaaccaaatggcgaagtcagagactatcgggggccatggagacactctgggccatttttatgaggtagtctaggctcatcttcatgagggaactgaggtcttggggggtgggggttacccaaataggttcacagaagaaccagaaataaaacctgcctttctagactgtaagtcttgtgattgtcatctaaatggttgtctctatacagcaact

SEQ ID NO: 8179 - DNA, 425 bp, Homo sapiens
cgccctcgcccggcctgtcagcgctgctctccgccgcagcttcagcacctcggcccagaacaatgctaaagtagctgtgctaggggcctctggaggcatcgggcagccactttcacttctcctgaagaacagccccttggtgagccgcctgaccctctatgatatcgcgcacacacccggagtggccgcagatctgagccacatcgagaccaaagccgctgtgaaaggctacctcggacctgaacagctgcctgactgcctgaaaggttgtgatgtggtagttattccggctggagtccccagaaagccaggcatgacccgggacgacctgttcaacaccaatgccacgattgtggccaccctgaccgctgcctgtgcccagcactgcccggaagccatgatctgcgtcattgccaatccggttt

SEQ ID NO: 8180 - DNA, 421 bp, Homo sapiens
  misc_feature (1)...(421): n = A,T,C or G
tgtagatgacatttcacctgaaggaagttggtggtaacccttacccataaccaaacttaggatttttagatatgggaaaagcaagtatgatgacttacaaagctctgccttaaagggtaatacattggtttaatcaggtttactccacaacagggaattcaggtagcttagttttatatcttctttgagtctaatgacagtcttttgagttgaggagttagtagcattttttttccagccaaaattcccagttgatctttcttcttaattctccagtgttcactagatttgaaattctgccctgcttgcccatggtgctttgtcttatggtagtctcattctccaaaatcatttatcttgaacctcagtgtgacttgtctttccagatctctgcctttgtctgatctctganacaccaaag

SEQ ID NO: 8181 - DNA, 388 bp, Homo sapiens
tcgagaaaagcccctgatgctggaggctgtcttcacgctgacccagacctgggggtgttgtgtcctacaggatgtcagttgcaagaggctttgctacaacaggaaaggccaatcagaaatagtgttgatgagttaaataacaatgtggaagctgtttcccagacctcctcttcttcctttcagtacatgtatttgctgaaagacctgtggcaaaagaggcagaagcaagtaaaagataatgaaaatgtagtcaatgagtactcctcagaactggaaaagcaccaattatatatagatgagactgtgaatagtaatatcccaactaaccttcgtgtgcttcgttcaatcctggaaaacctgagaagcaaaatacaaaagttagaatctg

SEQ ID NO: 8182 - DNA, 316 bp, Homo sapiens
atttgctgtggttggattcttgggagctggatactcgtttatcatctcagccatttcaatcaacaagggtcctaaatgcctcatggccaatagtacatggggctaccccttccacgacggggattatctcaatgatgaggccttatggaacaagtgccgagagcctctcaatgtggttccctggaatctgaccctcttctcctatgaaaaaacttcctaccactcaccctagcattacttatatgatatgtctccatacccattacaatctccagcattccccctcaaacctaaaaaaaaaaaaaaaaaaaaaaag

SEQ ID NO: 8183 - DNA, 454 bp, Homo sapiens
  misc_feature (1)...(454): n = A,T,C or G
ggtgcgannangnaaaatgataccttgcgagacattgagggcctcgccgggaccacccacgcgtccggcaggatgctcgcccacaaaggtgctttccttcatacggtgcagggcctgggccaaccttactggtcagtatactagactcgactacttggggtcagtgattcttttgtaacgagtctttcatgatgtgactttgaggccccaacatgacagccactgggccaccgggacccaagaagacagccccctgccccatcttctggcacaggccatcccgagtgcatgtacctgttgcccactgcactgatcatgaagccaccggccactgccacgcatgttgcacctgtgccatcgtgctccctcctgatgggcaccgaggtggaggaagtcacccagctgtttctcagtcccagaggccggtggctggatttgaacttgtgttgactgt

SEQ ID NO: 8184 - DNA, 375 bp, Homo sapiens
agtgcccgcagacaatggccacacctctctccccagggcccggcagtgcccaaggatgggtccggggcctcggggccaatgagcgcctcttcctaggtgctgggattcagtccccaaacacagcgggaggggtccctggggcagatggggctttaccagcgtcgggtggtttagttcgagtcccttttgtggagaaagggagatgaaaactgaccacgtgccaggtgtggccgaagcccccagggagggccacattcggggagcggggggtcgggggagggccaccgactggctctgctgccagcacaggcccctccctggaagtcctcgggagcggagcgcggatcggcacgggctctgggctccccgtggaga

SEQ ID NO: 8185 - DNA, 391 bp, Homo sapiens
ttgtacaaataggatctacaggtaggagatcatcttaaaaactggatgcatgtctggaatgatcacagctgacatttgaattctagacttttgaaatgaagtatataataaagaaactcatgacttattggccaagtgagcagtggagactttcttgaaagggttggacaaatgtttatcctttatttctggtccaaaaataagtgtggaggaggaccactcaggaatctgaatcctcttgtgattaaagaaaaatataaagatgtgttcctcaggaaaatcttatttgtaaactgaggactagcagattttgaatctagaaataatactagatgtctgtttactaagaccagaggtaaatccttaacttttaggttatcagtgcttcctt

SEQ ID NO: 8186 - DNA, 414 bp, Homo sapiens
caaatcacttcataccctttttggagacaaattatgcacagttgcaactcttcgtgaaacctatggtgaaatggctgactgctgtgcaaaacaagaacctgagagaaatgaatgcttcttgcaacacaaagatgacaacccaaacctcccccgattggtgagaccagaggttgatgtgatgtgcactgcttttcatgacaatgaagagacatttttgaaaaaatacttatatgaaattgccagaagacatccttacttttatgccccggaactccttttctttgctaaaaggtataaagctgcttttacagaatgttgccaagctgctgataaagctgcctgcctgttgccaaagctcgatgaacttcgggatgaagggaaggcttcgtctgccaaacagagactcaagtgtgg

SEQ ID NO: 8187 - DNA, 429 bp, Homo sapiens
atagtatcccaagataggtacagggaaatttgtgaaggaatcacagtagcctcttctgcaacagagcgtaagacccatcttcacggagaatgtggtagattagctcatctgggaggctgagttgattcttgtcattatagagggacaacatcagaagtgtggacaacagcttgaataaccttgaaaggacaaaagaggacgagctgccctggaaatactaggaagtctcacatgattagactcaagatattaggggaaaggcataaagtgaattgagtcaatgcggtcaaatagaagctagctggaggaacaggcgatcataaaatgagtaaaagtatatattcaaagattctttttagaagggctacacacgatggataacgggagagagagagttgaggcacagagacatattggaaaggtgctacc

SEQ ID NO: 8188 - DNA, 401 bp, Homo sapiens
ccaagacctacatgcttgcttttgacgtgaacgatgagaagaactgggggctgtctgtctatgctgacaagccagagacgaccaaggagcaactgggagagttctacgaagctctcgactgcttgcgcattcccaagtcagatgtcgtgtacaccgattggaaaaaggataagtgtgagccactggagaagcagcacgagaaggagaggaaacaggaggagggggaatcctagcaggacacagccttggatcaggacagagacttgggggccatcctgcccctccaacccgacatgtgtacctcagctttttccctcacttgcatcaataaagcttctgtgtttggaacagctaaaaaaaaaaaaaaaaggggcggccgttctaaaggatccctcgggggg

SEQ ID NO: 8189 - DNA, 384 bp, Homo sapiens
aggtgcggagctggcctggtgtcaggaggagcactttaacatgggctactatgactacatcagcccacgcttcatgaccatcctgaggcgcgcacggcccatatggtatgttggccgggacccagcggctgcaccagccacaggaaacaggaacactcacctggtgtcactgaagaagtttctggatactgccttcaatctccaggcctttgagggcaagacattttagagctgggcaaaacctgtgtaggtcttgctgtgggtttgctggggaccaagggggtgatgaaaaggggaggggcggagctcctgcccaagagaggggctgtggggccccaggataaaacagacacagtgacagggccaagagccagcactgctggg

SEQ ID NO: 8190 - DNA, 380 bp, Homo sapiens
ttgacctcccgggcttatgtgatcttcccattttatcctcccaggtggctgggactacaggtatgctcattgttgctactgggatggcattgctcctaggaccttgtagtggatacagctaagagctaaggaatagacaaagccagaccaaactcagctgatgcccgaccactgagggagcatttaaaccagccctagccagaggggaatcgcgaatctctacagtctgaatgtgagttcccgcaagccccgccatctcgccatctcgagctaaagtaccctgtggtcttggataaacttgaaagatcgtctaggccacaagaactgcagctgctgggtaccagctcatccacagtggggaacaccaaccagactcttgg

SEQ ID NO: 8191 - DNA, 419 bp, Homo sapiens
cggacgcgtgggtcgcccacgcgtccgaaaattaaatatcacctatttaatgcttttaatcacattttgtatggagttaaataaagtacagtgcttttgtatataaaaaaaaaaaaaaaaaaaaaaaaaaaaaaaggggggggccgtttaaaaaaaatccttggggggccaaaattttaccgggtttggaaaaaaaaaatttttttttttaaggggggcgaaaaaaaaacacactggggaatttttgaaaaaaaccttttttttgggggggggatatttgggaaaaatctcccaaaaaaaattaaagctttaagggaaaaaaaaaatttttaaagggtaaagggggaaaaataagttcttttttttgttggttaaaaaaataagaaaaattaattatacatgccttatataaatctatt

SEQ ID NO: 8192 - DNA, 386 bp, Homo sapiens
ttcaaatcttatcttgttctaatgtataaacaggttatttaataaagaaggtaagaaaaaaaaaaaaccggggggaggttgaccaaaatgggggggggggtatttataaaacttggccctgaaggatgccgttagcgtctcccttccaccaccatgaatcccccagggggggggctccctccatggctctcaaaaatggcgtatgcaaaatcccactttttgccgatttaacagctaagggcactgattcccaggctcctaaaataaaaaaagctcccaaatgctgttgtcttgcagaagtggttaaatgtccttatcactgcccctttttggggggtgggacaggctccccctgccgctgttactgggtttttcaactccactgg

SEQ ID NO: 8193 - DNA, 418 bp, Homo sapiens
  misc_feature (1)...(418): n = A,T,C or G
cggacgcgtgggtcgcccacgcgtccgaaaataaaacatcacctatttaatgtttttaatcacattttgtatggagttaaataaagtacagtgcttttgtatataaaaaaaaaaaaaaaaaaaaaaaaaaaaaaaaggggggggccttttaaaaaaacccttggggggcccaaatttaaccggggagggaaaagaaaaatttttttccttaaaggggggcaaataaaaaccaacttgggaattttggaaaaaaaccctttttttggggggggaaaaaattgggcaaacctccccaaaaaaattaaagcctttagggaaaaaaaaaacttttaaagggaaaaaggggaaaaaaaaccggaaaatccttgtggttaaaaaaatggggnnnnnnnnnnannnnncccccncnnncnncccc

SEQ ID NO: 8194 - DNA, 385 bp, Homo sapiens
agagccccaaaacacctagcagccccttgacccccacgtttgcctcttccatgtgtctcctggccccctgctatctcacaggggactctgtccgggacaagtgtgtggagatgctgtcagcagccctgaaggcggacgatgattacaaggactatggagtcaactgtgacaagatggcatcagaaatcgaagatcatatctaccaagagctcaagagcacggacatgaagtaccggaaccgcgtgcgcagccgcataagcaacctcaaggaccccaggaaccccggcctgcggcggaacgtgctcagtggggccatctccgcagggcttatagccaagatgacggcagaggaaatggccagtgatgaactgagggagttgaggat

SEQ ID NO: 8195 - DNA, 381 bp, Homo sapiens
aaagatggcggcgactctgggaccccttgggtcgtgtcagcagtggcggcgatgtttgtcggctcgggatgggtccaggatgttactccttcttcttttgttggggtctgggcaggggccacagcaagtcggggcgggtcaaacgttcgagtacttgaaacgggagcactcgctgtcgaagccctaccagggtgtgggcacaggcagttcctcactgtggaatctgatgggcaatgccatggtgatgacccagtatatccgccttaccccagatatgcaaagtaaacagggtgccttgtggaaccgggtgccatgtttcctgagagactgggagttgcaggtgcacttcaaaatccatggacaaggaaagaagaatctgcg

SEQ ID NO: 8196 - DNA, 499 bp, Homo sapiens
  misc_feature (1)...(499): n = A,T,C or G
tgagcttcccggacgcccccccattgaacgcctgcgatcgagcgccgtgaggcacgggtcgacccacgcgtgcggggctgggaagacaacacttctgaactatattttgacagagcaacatagtaaaagagtagcggtcattttaaatgaatttggggaaggaagtgcgctggagaaatccttagctgtcagccaaggtggagagctctatgaagagtggctggaacttagaaacggttgcctctgctgttcagtgaaggacaatggccttagagctattgagaatttgatgcaaaagaaggggaaatttgattacatactgttagagaccactggattggcagacccaggtgcagtggcttctatgttttgggttgatgctgaattagggagtgatatttaccttgatggtatcataactatagtggattcaaaatatggattaaaacatttagcagaagagaaacctgatggccttatcaatgaagctactaggcan

SEQ ID NO: 8197 - DNA, 383 bp, Homo sapiens
aatttcaagaaaatatttacactcccatgttcattgtggcactcttcacaatcactgtttccaaagttatggaaacaacccaaatttccattgaaaaataaatggacaaagaaaatgtgcatatacgtacaatgggatattattcagcctaaaaaaagggggaatcctgttatttatgacaacatgaataaacccggaggccattatgctatgtaaaatgagcaagtaacagaaagacaaatactgcctgatttcatttatatgaggttctaaaatagtcaaactcatagaagcagagaatagaacagtggttcctatggaaaaggaggaagggagaaatgaggaaatagggagttgtctaattggtataaaattatagtatg

SEQ ID NO: 8198 - DNA, 413 bp, Homo sapiens
  misc_feature (1)...(413): n = A,T,C or G
tgatgctgcctgctgggcccggggggctgtcttccactacttcctgctctgtgccttcacctggatgggccttgaagccttccacctctacctgctcgctgtcagggtcttcaacacctacttcgggcactacttcctgaagctgagcctggtgggctggggcctgcccgccctgatggtcatcggcactgggagtgccaacagctacggcctctacaccatccgtgatagggagaaccgcacctctctggagctatgctggttccgtgaagggacaaccatgtacgccctctatatcaccgtccacggctacttcctcatcaccttcctctttggcatggnggtcctggccctggtggtctggaagatcttcaccctgtcccgtgctacagcggtcaaggagcgggggaaga

SEQ ID NO: 8199 - DNA, 373 bp, Homo sapiens
  misc_feature (1)...(373): n = A,T,C or G
aggaaaaccacatgcctttaaaactaaactgtaataattacctggctaatttcagctaagccttcatcataatttgttccctcagtaataggagaaatataaatacagtaagtttagattattgaattggtgcttgaaatttattggttttgttgtaattttatacagattatatgagggataagatactcatcaaattgcaaattcttttttttacagaagtgtgggtaacagtcacagcagttttttttaccaacagcatacttaacagacttgctgtgtagcagtttttttctggtggagttgttgtaagtcttgtaagtctaatgtggctatcctactcttttgggcaatgcatgtattatgcattggn

SEQ ID NO: 8200 - DNA, 502 bp, Homo sapiens
  misc_feature (1)...(502): n = A,T,C or G
tggtgatcccngnnaggggnnnntttggacgcctgcggtagagggccgtaaggcccgggtcgacccacgcgtgcgccaaagagctctttcacagactcagaagagctacagaagctgagaaaagctgaaagaaagattgaaaacttagagaaggcactacaactaaagagccaagaaaatgatgagctaagagatgcccatgaaaaacgcaaggaacggctacagatgttacagaccaactacagagcagtaaaagagcaattaaaacagtgggaagaaggcagtggcatgactgaaatcaggaaaataaagagagcagatccccaacaacttcgacaagaagattctgatgctgtgtggaatgaactggcatatttcaaaagggaaaaccaggagctaatgattcaaaagatgaatcttgaagaagaattagatgaacttaaagtacatatatctattgataaggcagcaatacaagaattgaatagatgtgtggcagaga

SEQ ID NO: 8201 - DNA, 441 bp, Homo sapiens
cacgcagacagcaagcccgcgccgctgacgcccgcctaccacacgctgccccacccctcccaccacggcaccccgcacaccaccatcaactggggacccctggagcctccgaaaacacccaagccctggagcctgagctgcctgcggcccgcgcctcccctccggccctcagctgctctctgctacaaggaggatcttagtaagagccctaagaccatgaaaaagctgctgcccaagcgcaaacctgaacggaagccttcagatgaggagttcgcgtcccggaaaagcacagctgctttggaagaagatgctcagattctgaaagtcattgaagcttactgcaccagcgccaaaacaaggcaaacactcaattcaagttcacgcaaagaatctgctccacaaattttgctttcagaagaagagaaaattatatgggaagaa

SEQ ID NO: 8202 - DNA, 480 bp, Homo sapiens
  misc_feature (1)...(480): n = A,T,C or G
gaggggccnnnnnaatggaggactgatggacatgccgcgganncccgggncgacccacgcgtccgccctgacctggcctgcaacttcagcctttctcaaaatcggggcacggtcatcgtggagcgctggtggaaggtaccgctggccggggagggccggaagccgcgcctgcaccggcgacatcgcgtctataagctggtggaggacacgaagcatcggcccaaagaaaacctggagctcatcctgacgcagtcggtggagaatgttggagtccggggtgacctggtctcagtgaagaaatctttaggccggaatcgactccttcctcagggactggctgtatatgcatcccctgaaaacaagaagctgtttgaagaggagaaattgctgagacaagaaggaaaattagagaagatccagaccaaggcaggtgaggcgacagtgaaatttctaaaaagctgtcgcctggaggtagggatg

SEQ ID NO: 8203 - DNA, 413 bp, Homo sapiens
  misc_feature (1)...(413): n = A,T,C or G
cttccagttccatttacaaaacagtccactattcttttaggattaataattttatctgcctgacctcatcttcatgttttctgattcttctggtgtataaaaaaaaaaaaaaaaaaaaaaggggcgcccgttaaaaaaaacccttgggggggccaaagttaaccgggcaggggaaagaaaaagttttttccttaaagaaggagcaaaaaaaaccaccctgggaattttgaaaaagaaccttttttcttgggggggaaaaaatggggccaaccccccaaaaaaaattaaagccttgagggaaaaaaaaaaattttaaagggaaaaaggggaaaaacaaccggaaaaggctggtggataaagagtttgggcnanccaagataaactctttcaggtggcaaagaagaaaagagagn

SEQ ID NO: 8204 - DNA, 484 bp, Homo sapiens
  misc_feature (1)...(484): n = A,T,C or G
gcagtgccccgcncggccttaatgacgctgcaagtcgtctngcacnncccgnnnnngggggacccaccggcgggcgtgctgcctcacttctgcgtttctgctcccgttttcgcagccccctgctccggagggtggtgcttgaaataagatatggggaacggagggatgtatcaaaacccactttgaaggaagtggtcatagtaagtgctacaagaacacccattggatcttttttaggcagcctttccttgctgccagccactaagcttggttccattgcaattcagggagccattgaaaaggcagggattccaaaagaagaagtgaaagaagcatacatgggtaatgttctacaaggaggtgaaggacaagctcctacaaggcaggcagtattgggtgcaggcttacctatttctactccatgtaccaccataaacaaagtttgtgcttcaagaatgaaaaccatcatgatggcctctcaaaa

SEQ ID NO: 8205 - DNA, 431 bp, Homo sapiens
gctgtgctgccggcacttctgcgcagcggcgcccgcagccgcagccccctgctccggaggctggtgcaggaaataagatatgtggaacggagttatgtatcaaaacccactttgaaggaagtggtcatagtaagtgctacaagaacacccattggatcttttttaggcagcctttccttgctgccagccactaagcttggttccattgcaattcagggagccattgaaaaggcagggattccaaaagaagaagtgaaagaagcatacatgggtaatgttctacaaggaggtgaaggacaagctcctacaaggcaggcagtattgggtgcaggcttacctatttctactccatgtaccaccataaacaaagtttgtgcttcaggaatgaaagccatcatgatggcctctcaaagtcttatgtgtggacatcc

SEQ ID NO: 8206 - DNA, 423 bp, Homo sapiens
cggacgcgtgggcgacccacgcgtccgggcagagggatcagccatcaaggacctaaagaaccctgactgagtactgattggaggggatgaaactccaaagggccaaagagctgtgcaggccctgtgtgctgcatatgagcactgggttcccagagaaaagatcctcaccactaatacttggacttcatagctttccaaactggcagcaaatgctgttcttgcccagagaataagcagcattaactccataagtgctctgtgtgaagcaacaggagctgaggtataagaggtagcaacatcgattgtaatggaccacagaattggaaactactttctataagccagtgttgggtttggtgggagctgcttccaaaaggatgttctgaatttggttatctctgtgaggctctgaatttgccagaa

SEQ ID NO: 8207 - DNA, 467 bp, Homo sapiens
  misc_feature (1)...(467): n = A,T,C or G
cgcacaactgaaanccntgcggaaccactgaggaccntccggancgacccacgcgttcgaggtgattctcatctaaatgttcaagttagcaacttttaatctggaaaaggatattctacacttcaggtttcttcaggattgaatgaaaacctcactgtcaatggaggaggctggaatgaaaagtctgtaaaactctcctcacagatcagtgcaggtgaggagaagtggaactccgtttcacctgcttctgcaggaaagaggaaaactgagccatctgcctggagtcaagacactggagatgctaatacaaatggaaaagactggggaaggagttggagtgaccgttcaatattttctggcattgggtctactgctgagccagtttctcagtctaccacttctgattatcagtgggatgttagccgtaatcaaccctatatcgatgatgaatggtctgggttaaatgg

SEQ ID NO: 8208 - DNA, 398 bp, Homo sapiens
ctcgggatattcctgtcgcatagcctttatagacgggccctttattataccaagacggcctgtgttttttctataagactagagagcaatgaatggcgctctctctaatatgtatgaagggctcaatactaatgaagagagcttaacctgtgcaatctaacaacacactggtgaagatgtctcccgaagaaatggaaatctgacagctttttaagaaaggtgaaatgaaaggctaagctgcgagtgaattaagtgaatttgaatatcatcagaatgtgtctgaaaaaacattgtcctcaaataatgttctttaaaggcaatctttttaaagatttcactaatttggaccaagaaattacttttcttgtatttaaacaaacaatggtagctcactaaaa

SEQ ID NO: 8209 - DNA, 465 bp, Homo sapiens
  misc_feature (1)...(465): n = A,T,C or G
ccacaactgatcccntgcggnaccgctgatgaccctccgggncgacccacgcgtccggagaggggaaccctcctccatcttttttgcaacatctcatttcttccttttgctgttgcttcccccctcacacacttggttttgttctatcctacatttgagatttctattttgtgttgaacttgctgctttttttcatattgaaaagatgacatcgccccaagagccaaaaataaatgggaattgaaaaaaaaaaaaaaaaaaaaagggggggccgttttaaagaacccttgggggggccaaattttacccgggcttgcaaggtaatatttttttccttataggggggcgttttaaaacctacctgggaattttgggaaagaacccttcttttgggggggggccttattgggccaacctccctccagaaatttaaggctttagggaaaatataaaatttttaggggt

SEQ ID NO: 8210 - DNA, 409 bp, Homo sapiens
tgaagacagatctctttgtattctcttcaagcccaaaccaattctgttccttcaatctaaatagtgggggtatgaatgtttaagaaatggaataagaaacatgtgcaggcactttggaaggtgctaagtgactgccctaaggaatgaaaagcaagggccaggtgggagtagcccagcgaaggcacttgggctgccaggaacaggaggcgtgggaaactctggcttaggaaaacatgaacacaggggcaacagaggcaaactgttgttcgagttaaatataaatctcaggctctttaaaggtaaaaggtttaaggataatccatttggaagaagaaaagagtgaggctgaaagtaaagccacatgacaagcatataaaaaaaaatgcagatgatacaaatatgaaagagg

SEQ ID NO: 8211 - DNA, 402 bp, Homo sapiens
  misc_feature (1)...(402): n = A,T,C or G
cgttgttgcttaacgaagcagagtcctacacactgtctgctgctctcctgatcatggcttctccgaggtctttcacctactattgccctccatcttcctcccccgtctggtcagagccgctgtacagtctgaggcccgagcacgcgcgagagcggttgcaggacgactcggtggaaacagtcacgtccatagaacaggcaaaagtagaagaaaagatccaagaggtcttcagttcttacaagttcaaccaccttgtaccaaggcttgttttgcagagggagaagcacttccattatctgaaaagaggccttcgacaactgacagatgcctatgagtgtctggatgccagccgcccatggctctgctattggatcctgcacagcttggaactgctagatgaan

SEQ ID NO: 8212 - DNA, 430 bp, Homo sapiens
  misc_feature (1)...(430): n = A,T,C or G
ggatgtgagagtggagtaccttcctttctcaagtctcgagatgccagtgaaaccagtattccctgacttgggtttcacactttatcgaccaccccatggggtcctgtgtagcctttggccacgcactgacactgcccaggccaagcaaaagcagagtgtggttaagagacaagggtctatgtcatcatcccttttgcttatggtagtgggctaacataacagcccctttctcaagcagagacctggcccctgggccagccagatggaagggcctatcttagccagctggagcttaagccaaacctgttctgtcccactggccagccatctttgctcacatggaaattcaaatgccattcaaaggccactggtgctttatttttctatctgctgagtaaactgaaatgagatgggtcccaaccaccactgn

SEQ ID NO: 8213 - DNA, 421 bp, Homo sapiens
  misc_feature (1)...(421): n = A,T,C or G
cgcagacacagagacaccggggcccagggccctcctatggaccctgcccgctcccctcccattgtccacggctgtccgcccacccccattctccaagcttcagccccctccttagttcggcatctgcacagcactgaagaacctgggaatcagaccctgagaccctgagcaatcccaggtccagcgccagccctatcatgaccaaggagtatcaagaccttcagcatctggacaatgaggagagtgaccaccatcagctcagaaaagggccacctcctccccagcccctcctgcagcgtctctgctccggacctcgcctcctcctgctcttcctgggcctcagcctcctgctgcttggggttggctgtgtgatcggatcccaaaactcccagctgcaagaggagctgcggggcctgagaan

SEQ ID NO: 8214 - DNA, 373 bp, Homo sapiens
  misc_feature (1)...(373): n = A,T,C or G
caccaggagccgtgggcaagggaagaggccacatcctgccctgctctgctgcanccagaatgggtgcgaaggcgtctcaaacaggctttgtggacctggcgctgctacagtgctgctctgcatacaaactggtctgctactacaccagctggtcccagtaccggtaaggcgatgggagctgcttcccagatgcccttgaccgcttcctctgtacccacatcatctacagctttgccaatataagcaacgatcacatcgacacctgggagtggaatgatgtgacgctctacggcatgctcaacacactcaagaacaggttgggccagggctggccaggagaggagggaccagctgggctggtcccagggcaggn

SEQ ID NO: 8215 - DNA, 370 bp, Homo sapiens
atgaacaggattcagtgcgcctccttgctgcggaagcttgtgtcagaattgcccaggtattgcctcaggatgaccttgatactttggcgatgcctacacttcgacaagcaccacaggacaaatcttggcgcggacgctatatggcggctgacatattttcagagctccagacagccatggcgcctaatatcaccctataagacctcattcccgcctttcataacctacttacagactgtgaagctgaaggccgggcagctgctgcccacaaaggatgagaacttggcgagaacttgtccattgaggatagagagaccctcattatgaatcaggatctgccttatatagaggaattagtatccgataccaa

SEQ ID NO: 8216 - DNA, 370 bp, Homo sapiens
atctttgcagcaaattgctatcactgctgggtgtaaaaccaccacctcagctgtgatggttcactgcctgcgacagaagacggaagaggagctcttggagacgacattgaaaatgaaattcttatctcttgacttacagggagacttcaaagagagtcaccactatttggccaccgtgattgatggggtggtgctgctgaaaacacctgaagagcttcaagctgaaaggaagttccacactgtcccctacatggtcggaattaacaagcaggagtttggctggatgcttccaatgttgatcagctatccactctccaaagggaaactggaccagaagacagccatgtcactcttattgaagtcctatccc

SEQ ID NO: 8217 - DNA, 408 bp, Homo sapiens
cccacgcgtccgaaaggaagagctgctccctgcacaggatatcaaagctctgtttgtgtctgaggaggagaaaaagctgactcggaaggaggtctacatcaagaatggggataagaaaggcagctgtgagagagatgctcaatatgccccaggctatgacaaagtcaaggacatcttagaggtggtcacccctcggttcctttgtactggaggagtgagtccctatgctgaccccaatacttgcagaggtgattctggcggccccttgatagttcacaagagaagtcgtttcattcaagttggtgtaatcagctggggagtagtggatgtctgcaaaaaccagaagcggcaaaagcaggtacctgctcacgcccgagactttcacatcaacctctttcaagtgctgcc

SEQ ID NO: 8218 - DNA, 371 bp, Homo sapiens
cggacgcgtgggtcgctgacgcgctcagcgtgcactcggccggctcctctagctccgacgtggaggagatcaacatcagcttcgtcccggagtctcctgatggccaggaaaagaagttctgggaatcagcctcacagtcatccccggagacctccggcatcagctcagcctccagcagcacctcgtcctcctcagcctccaccacgcccgtggctgccacacgcacccacaagcgctctgtctcagggctctgcaactccagctccgcgctgccgctctacaaccagcaggtgggcgactgctgtatcatccgcgtcagcctggacgtggacaatggcaacatgtacaagagcatcctggtgaccagccaa

SEQ ID NO: 8219 - DNA, 434 bp, Homo sapiens
  misc_feature (1)...(434): n = A,T,C or G
aatgagccctgcgatattagaccatngcacgggncgacccacgcgtccggtgtggcagcaaggagcccgcagaggaacatggtgctgctctgggggctcctggtgctcagctggtcctgcctgcaaggcccctgctccgtgttctcccctgtgagcgccatggagcccttgggccggcagctaactagcgggccgaaccaggagcaggtgtccccacttaccctcctcaagttgggcaaccaggagcctggtggccagactgccctgaagagtcccccaggagtctgcagcagagaccccaccccagagcagacccacaggctggcccgggccatgatggccttcactgccgacctgttctccctggtggctcaaacgtccacctgccccaacctcatcctgtcacccctgagtgtggccctggcgctgtctan

SEQ ID NO: 8220 - DNA, 401 bp, Homo sapiens
  misc_feature (1)...(401): n = A,T,C or G
cggacgcgtgggttaattgacagtttcaattgaaggtgctgtttgtagacttaacacccagtgaaagcccagccatcatgacaaatccttgaatgttctcttaagaaaatgatgctggtcatcgcagcttcagcatctcctgttttttgatgcttggctccctctgctgatctcagtttcctggcttttcctccctcagccccttctcacccctttgctgtcctgtgtagtgatttggtgagaaatcgttgctgcacccttcccccagcaccatttatgagtctcaagttttattattgcaataaaagtgctttatgccggcttttctcaaaaaaaaaaaaaaaaaaaaaaaaggggggcccttttaaaagatcccttggggggccccattttacccgggn

SEQ ID NO: 8221 - DNA, 409 bp, Homo sapiens
cccacgcgtccgcgacccacgcgtccgatttatttcaataaaactaattgggaccacccgtatttcaggaggacctgggtagggattggaagtacttggcagggcagcagcaatcttgctgtgtttgatataacatgcatccttgggcaggttgcccttaaatcttacactgtggggaagggatgtttttttttgtaatgctgcatgagagttggagtacttatttctgttgttggccaggatatctaataagagtttttcatattatttccacgtaagggaaataaggaagtacttttctttttatatttctatgctgaaaattctctttcctagccaaaaattgcccaaatctgagtttgctttctgcttgctacatttgtctcccttacttttcttgagctaaaga

SEQ ID NO: 8222 - DNA, 370 bp, Homo sapiens
tcgacccacgcgtccggcaagaccttcatgtccttgacagtgagggcatctctccctccacactttccccttctccgcagtatattgctgttgattgttacttgatgctggactggtcctgtgcatctgggcctcagggatgggtctttctcaacattactgtccttgcccaggatgatagctaaactcttctttgtgtctgaggagggttttgcatcagatttttcaccagatttttttgcccttcccctaacagaaacaagcctttgctatataagagtgtgggatactgggtccaagctgattttctgtcccttcaccaatagcttgcagcttttgctttgtatagtctgctttgaaagtctggaag

SEQ ID NO: 8223 - DNA, 433 bp, Homo sapiens
atctaagacttagacaaagacatcagaatatacaaaaatctgcaagaggggggaaatctagggaatgttttttaaaccatccacagcaaaaacagagatgacaggtgcaaaacagcttctagcatttggtagatgctcagagactttcttttttgcattcatgaggcctgtcccacccactcctgtctcttctaaacctaaatgggcccttgctttgcccagggtggggtttggactcaagtgcatctgcatgcaggtgagagccatgatcaccacccggcccagccacagcctgaccttggccttgagggccaagtgcagatcaccctgcatcctgggtcttcaccttcgaaaggccatgagcccttctgaaaagacaaagcaatagactccctcccagaaagaagtgcaccaaaagaataccttttccata

SEQ ID NO: 8224 - DNA, 411 bp, Homo sapiens
tgagagaatgctgaattttcacaggcatttgatgtgagagtaaaaaaaccatatgaataaatgactaggctcacctctaaaatgttgttatgatgtgacggtctaaggacatggataatactgtattttcaaagatttgtttcagaagatacattatggggctgtattaaggaagactgaattctgtctttaaaatgaaacaaatgtatattaggtttcaacaaatagttaaattactgaattgtacactttaacaggatgaattttatggtatttatatggaggaagagggaaagtgtataagtgtatgagttttagacttacagagtgaagtttttttttgtgtgagtgtgtatttaattcctcttactgtcacttccaaatgcttgtgcttttaagaagcaattgctg

SEQ ID NO: 8225 - DNA, 390 bp, Homo sapiens
cccacgcgtccgctggaagactggaatggcagaaccagtactgcagactatgccatgttcaaggtgggacctgaagctgacaagtaccgcctaacatatgcctacttcgctggtggggatgctggagatgcctttgatggctttgattttggcgatgatcctagtgacaagtttttcacatcccataatggcatgcagttcagtacctgggacaatgacaatgataagtttgaaggcaactgtgctgaacaggatggatctggttggtggatgaacaagtgtcacgctggccatctcaatggagtttattaccaaggtggcacttactcaaaagcatctactcctaatggttatgataatggcattatttgggccacttggaaaacccgg

SEQ ID NO: 8226 - DNA, 388 bp, Homo sapiens
  misc_feature (1)...(388): n = A,T,C or G
tcgcagagacaatgacggctggttaacatcagatcccagaaaacagtgttctaaagaagacggaggcggatggcggtataatagatgtcatgcagccaatccaaacggcagatactactggggtggacagtacacctgggacatggcaaagcatggcacagatgatggtgtagtatggatgaattggaaggggtcatggtactcactgaggaacatgagcatgaagatcaggcccttcttcccacagcaatagtccccaatacgtagatttttgctcttctgtatgtgacaacatttttgtacattatggtattggaattttctttcatacattatattcctctaaaactctcaaaaaaaaaaaaagggggggccctttttataatcn

SEQ ID NO: 8227 - DNA, 471 bp, Homo sapiens
  misc_feature (1)...(471): n = A,T,C or G
acaggccnatttgataccttcgttacaggctggaanaccccggncgacccacgcgtccgtgggagggctctggcgtcctggatggaggtgcgttcctttctgtggctggcgctggatccaccctgggggtccaaccagggctgcagagagggtagagccgtttcttatgccagagtggagtgggacaggaggtgccgagagaggactgaggtggcttgggacatggaagcgctgcagccttcgagcccggcatccagcattgcagccgccgcggtggcctaagagctcgaaccctttcacacgcgcgcaagaggaggagcggcggcggcagaacaagacgaccctcacttacgtggccgctgtcgccgtgggcatgctgggggcgttctacgctgccgtacccctttatcggctctattgccagactactggacttggaggatcagcagttgcaggtcatgcctcagacag

SEQ ID NO: 8228 - DNA, 404 bp, Homo sapiens
ctctatgtgcaagcctgactctgtcaccctccgctggtagagaggaggtgtacccactccctgcacgcctgccgtccctgccccgctgggcagcccttcagtgtggctggcgttggggccagtgagttgcctctttccctccttgtctggccccagtggtctggggagcccccaggcacacctaagcgtcgtggagcattgttctgccacagccctgcatactgaccccgggaggctgggcaggtggacagccccagccaccaccttcagcctagcctgtcccccaaggatggtgaagctcagcaggggtctgagggtagccggccagaagaggctggaacctcctgctcaagtctagacccctacttctctgctgcccccaccctgccagagctgatgtttcg

SEQ ID NO: 8229 - DNA, 438 bp, Homo sapiens
gagattgataattcagaacttcttcatatgctcgagtctccagagtcactccgttctaaggttgatgaagctgtagctgtactacaagcccaccaagctaaagaggctgcccagaaagcagttaacagtgccaccggtgttccaactgtttaaaattgatcagggaccatgaaaagaaacttgtgcttcaccgaataaaaaaaaaaaaaaaaaaaaaaaaaaaaaaaaaaaagggggggggccttttaaaagatcccttggggggcccaaattttccggggggggggaaggttttttttttttctttttgggggggcttttaaaaacctgctggggatttttggaaaagaacctttttttggggggggggaattttggggccaccccccctcaaaaatttaagggttttggggaaaaaaaaaatttttaaagggatgg

SEQ ID NO: 8230 - DNA, 413 bp, Homo sapiens
  misc_feature (1)...(413): n = A,T,C or G
tcaagctgggaggaccaaggccgggcagccgggagcacccaaggcaggaaaatgaggtggctgcttctctattatgctctgtgcttctccctgtcaaaggcttcagcccacaccgtggagctaaacaatatgtttggccagatccagtcgcctggttatccagactcctatcccagtgattcagaggtgacttggaatatcactgtcccagatgggtttcggatcaagctttacttcatgcacttcaacttggaatcctcctacctttgtgaatatgactatgtgaaggtagaaactgaggaccaggtgctggcaaccttctgtggcagggagaccacagacacagagcagactcccggccaggaggtggtcctctcccctggctccttcatgtccatcactttccggtcagn

SEQ ID NO: 8231 - DNA, 410 bp, Homo sapiens
aaagaatgaaagaactggaggagaacctcaatattgcaattgatgtcatagatgcttaccaaaaacatcctgaatcagaatggccgttcttgattattacagacctctttctgaaaagcccggaattggtacaagccatgtttcccaaactgaacaatcaagaaagagttacactgttagaccttatgatagccaagataacgagtgatgagccactcaccaaggatgacatccctgtgtttttgcggcatgctgagttgattgcaagcacctttgtggatcagtgcaagactgtgctcaagctggcctctgaggagcctcctgatgatgaggaggcactggctacaattaggcttctcgacgtcctgtgcgaaatgactgtgaatactgagctgctcggctatctgcag

SEQ ID NO: 8232 - DNA, 381 bp, Homo sapiens
agggctttctggggcagggggagcccctgtcggcagctttcctgttcacctttgttggagccctctgtaggcctcctccctcctccccacgccttgctcccacacccctctcctcgtccctcctggtcgtgccccgtctcttttggtcctggctccagaaaacccgcgccccacatacctgcatcttccgctgtgacctccggagccctgcctgcccctgctccccagctcctcctgcctgcacccgactcggccccctcctgacttgccttatttatttgttcgacgcgtctctgaatgtatccgcctcggttcccaccactgccttcgctgcgcacgcccctcgtgtttcagggctgaccgtgtccccacccgactccg

SEQ ID NO: 8233 - DNA, 447 bp, Homo sapiens
  misc_feature (1)...(447): n = A,T,C or G
ntgaattgacaccnactgatggccctgcccaggaaccccgggncgacccacgcgtccggtgcgaggcatttcccaagtgctggcaggattgtgtcacagacacagagtaaacttttgctgggctccaagtgaccgcccatagtttattataaaggtgactgcaccctgcagccaccagcactgcctggctccacgtgcctcctggtctcagtatggcgctgtcctgggttcttacagtcctgagcctcctacctctgctggaagcccagatcccattgtgtgccaacctagtaccggtgcccatcaccaacgccaccctggaccggatcactggcaagtggttttatatcgcatcggcctttcgaaacgaggagtacaataagtcggttcaggagatccaagcaaccttcttttacttcacccccaacaagacagaggacacgatcn

SEQ ID NO: 8234 - DNA, 421 bp, Homo sapiens
cccacgcgtccggaaatataattgattctgatcactcttggtcagcttctttttctttatctttctttctccttttttaagaaaacgagttaagtttaacagttttgcattacaggcttgtgattcatgcttactgtaaagtggaagttgagattattttaaaacttcaagctcagtaattttgaacactgaaacattcatctaggacataataacaaagttcagtattgaccataactgttaaaacaatttttagctttcctcaagttagttatgttgtaggagtgtacctaagcagtaagcgtatttaggttaatgcagtttcacttatgttaaatgttgctcttataccacaaatacattgaaaacttcggatgcatgttgagaaacatgcctttctgtaaaactcaaatataggagc

SEQ ID NO: 8235 - DNA, 381 bp, Homo sapiens
  misc_feature (1)...(381): n = A,T,C or G
gaaacactaggaccctgttgtatcctcaactgcaagtttctggactagtctcccaacgtttgcctcccaatgttgtccctttccttcgttcccatggtaaagctcctctcgctttcctcctgaggctatacccatgcgtctctaggaactggtcacaaaagtcatggtgcctgcatccctgccaagcccccctgaccctctctccccactaccaccttcttcctgagctgggggcaccagggagaatcagagatgctggggatgccagagcaagactcaaagaggcagaggttttgttctcaaatattttttaataaatagacgaaaccacgannaanaaaaaaaaaaaaaaaaaaaaaaaaaaaaaaaaaagaaaaagga

SEQ ID NO: 8236 - DNA, 390 bp, Homo sapiens
cggacgcgtgggtttgcgtgctattaccaaaggtactgtcattgaacttaacgggagcgaattgggccttgcgacacaaggaggcaaagttatttgtagaaaaaatgcccaggttaccaacaatcctgaaaatgatggatgtataaaagcactgttactggttcgacagcagttacatatattattattgaggactacacaccaattgaagaaactgccattactgtgatgattctgaatactaccaaacagacctacctgtctgccatgaagagatttattaaattgttttcgttccgccctgaacaaatgtgttgtccttcctgcaacaaaataatcaaaagggggggtggcctataaaagacggtgctctgagctggctgttctgcc

SEQ ID NO: 8237 - DNA, 424 bp, Homo sapiens
tgggagactttaacaccctactgacaatattagacagatctccgaggcagaaaactcacaaagatatttgggacctttatttgtccattctcacactgctatgaagaaatacctgagactgggtaatttatatagaaaagaggtttaattggctcacggttctgcaagctgtacaggaagcgtggctgggtaggcctcaggaaacttgtggcaaaaggcaaaagggatgcaggcatgtcttacacagccagagcaggaggaagagttgagtgcagtgcgctacacttctaaacaactagatctcatggtaactgacacactaacatgagaacagtaccaaaggggaaacccacccccatgatcacccaatcatctcccaccaggctccacctctaacattgggcattataatttgaaatgagat

SEQ ID NO: 8238 - DNA, 423 bp, Homo sapiens
gcgctaggaacaggtcccttcctaagctctagtgtccccatctgtaaaatgggctgattggcctgcatggtcagagcggccatctggctgtgccatcctgcatttttaggaatggaaagcaggcctctgaggcagtggacaggaagacttctcatccttgaattctagctcccattccaaactgttagtccccaaccttgtggtcacatcagaggtcaacagcagaacagaggcaggtcagggttgtccgctctgattagcagaacgacagccccttcctcctcctccctccttcccatccctactcattagctccctgctcctgggatgcttcccaagcagcccaggcctctagcctccatggctgatgacctcagctttcacactggtgaagtctgtgtacccatactgcagccccatccc

SEQ ID NO: 8239 - DNA, 419 bp, Homo sapiens
aagactgtccacccgtcctcagccccctctcttcgtgggctatctactcagttgatccctccctcgctggcttggctctgactcctgctcagacccatcacctttgccgggaatgatgtctggagaacccctgcacgtgaagacccccatccgtgacagcatggccctgtccaaaatggccggcaccagcgtctacctcaagatggacagtgcccagccctccggctccttcaagatccggggcattgggcacttctgcaagaggtgggccaagcaaggctgtgcacattttgtctgctcctcggcgggcaacgcaggcatggcggctgcatatgcggccaggcaactcggcgtccccgccaccatcgtggtgcccagcaccacacctgctctcaccattgagcgcctcaagaatgaag

SEQ ID NO: 8240 - DNA, 388 bp, Homo sapiens
cggacgcgtggggcttgtcacagtcccaccccgcccacttggagagcaagggtgctccaggcaaaccccataccccctcacagcaaacaccagccctgggcactgtgctgacccatgctcagaacagcttctgtcctcacctgtcctcccacctgagccccatcagagccccagtgtcctcgcagaggggcaaggaacatctctgccatgcctttcataaccacttggtcatcaagaccgaatgatgaccgcacctttccctcattccctgggaggtggacacctttctgtccagtccttggacatggcatcagctcactgtacctgtgcactgaatgaatatgttgtttcgtggggtcattttgctcccgcaggtaaagtcagtggc

SEQ ID NO: 8241 - DNA, 411 bp, Homo sapiens
tacaagctgggagtccgcctcagggatcgtggagttctgggtagatgggaagcccagggtgaggaagagtctgaagaagggatacactgtgggggcagaagcaagcatcatcttggggcaggagcaggattccttcggtgggaactttgaaggaagccagtccctggtgggagacattggaaatgtgaacatgtgggactttgtgctgtcaccagatgagattaacaccatctatcttggcgggcccttcagtcctaatgtcctgaactggcgggcactgaagtatgaagtgcaaggcgaagtgttcaccaaaccccagctgtggccctgaggcccagctgtgggtcctgaagggacctcccggttttttacaccgcatgggccccacgtctctgtctctggtacctcccg

SEQ ID NO: 8242 - DNA, 428 bp, Homo sapiens
gcatagacaacaaaagaaattttattgagaggaaaacacaagtccttaaactgcaaagatgtttgccaggatgtctgatctccatgttctgctgttaatggctctggtgggaaagacagcctgtgggttctccctgatgtctttattggaaagcctggacccagactggacccctgaccagtatgattacagctacgaggattataatcaggaagagaacaccagtagcacacttacccatgctgagaatcctgactggtactacactgaggaccaagctgatccatgccagcccaacccctgtgaacacggtggggactgcctcgtccatgggagcaccttcacatgcagctgcctggctcctttctctgggaataagtgtcagaaagtgcaaaatacgtgcaaggacaacccatgtggcccgggcc

SEQ ID NO: 8243 - DNA, 363 bp, Homo sapiens
tatatcgcgagcggtctgccgctgcagatcctcatgaatgctatgccaaagtgttcgatgaatttaaacgtcttgtggaagagcctcagaatttaatcaaacaaaattgtgagctttttgagcagcttggagagtacaaattccagaatgcgctattagttcgttacaccaagaaagtaccccaagtgtcaactccaactcttgtagaggtctcaagaaacctaggaaaagtgggcagcaaatgttgtaaacatcctgaagcaaaaagaatgccctgtgcagaagactatctatccgtggtcctgaaccagttatgtgtgttgcatgagaaaacgccagtaagtgacagagtcaccaaatgct

SEQ ID NO: 8244 - DNA, 431 bp, Homo sapiens
atccaaggtctgtgggaaaagcaagcgagcagctggctggcaaggtggcagaagtcaagaagaacggaagaatcagcctggtgctgggcggagaccacagtttggcaattggaagcatctctggccatgccagggtccaccctgatcttggagtcatctgggtggatgctcacactgatatcaacactccactgacaaccacaagtggaaacttgcatggacaacctgtatctttcctcctgaaggaactaaaaggaaagattcccgatgtgccaggattctcctgggtgactccctgtatatctgccaaggatattgtgtatattggcttgagagacgtggaccctggcgaacaaaagaaaaggccaattcatctaagttttgatgttgacggactggacccatctttcacaccagctactggcacacca

SEQ ID NO: 8245 - DNA, 432 bp, Homo sapiens
  misc_feature (1)...(432): n = A,T,C or G
agtaacccaactattataagctctacttttaaatgttatgaacagtgcttgaatgtgagcggagggccgcaagaattgaatcagcatccctgccttaaacatctgcctcaaatattttttcgttgccatgcgtggaatcagctgtctggcggatgcattcttatgtatttctagaccccgatcagacagtgctcccccaacacccgtgaatagattaagtatgcctcaaagtgctgctgtcagtaccacccccccacataaccggaggcaccgggctgttactgtgaataaggccaccatgaagacaagcacagttagtactgctcatgcctctatagttcagcaccagacgtcctccacctctcctctgtcaagtcccaatcagactagttcagaaccccggccactgtctgcccctcggagaccaaaagn

SEQ ID NO: 8246 - DNA, 392 bp, Homo sapiens
cccacgcgtccggtggcccgccatgttcttctccgcggcgctccgggcccgggcggctggcctcaccgcccactggggaagacatgtaaggaatttgcataagacagctatgcaaaatggagctggaggagctttatttgtgcacagagatactcctgagaataaccctgatactccatttgatttcacaccagaaaactataagaggatagaggcaattgtaaaaaactatccagaaggccataaagcagcagctgttcttccagtcctggatttagcccaaaggcagaatgggtggttgcccatctctgctatgaacaaggttgcagaagttttacaagtacctccaatgagagtatatgaagtagcaactttttatacaatgtataatc

SEQ ID NO: 8247 - DNA, 430 bp, Homo sapiens
ctggatttcactgtcactgtccatttctttcacctcctgggctgctggttctacagctcccgtttcccctcggcgctgacctggtggctggtccaagccgtgtgcattgcactcatggctgtcatcggggagtacctgtgcatgcggacggagctcaaggagatacccctcaactcagcccctaaatccaatgtctagaatcaggccctttggacatcctgctgacacttgggccccttaacaccttgggctgctcagaccctccagatgaggtccagcccagatctgagaggaaccctggaaatgtgaagtctctgttggtttgggagagatagtgagggcctgtcaaagaaggcaggtagcagtcagcatgacagctgcaagaatgacctctgtctgttgaagccttggtatctgagagggcaggaag

SEQ ID NO: 8248 - DNA, 385 bp, Homo sapiens
cagagacaatgacggctggttaacatcagatcccagaaaacagtgttctaaagaagacggtggtggatggtggtataatagatgtcatgcagccaatccaaacggcagatactactggggtggacagtacacctgggacatggcaaagcatggcacagatgatggtgtagtatggatgaattggaaggggtcatggtactcaatgaggaagatgagtatgaagatcaggcccttcttcccacagcaatagtccccaatacgtagatttttgctcttctgtatgtgacaacatttttgtacattatgttattggaattttctttcatacattatattcctctaaaactctcaaaaaaaaaaaaaagggggggccgttttaaagatc

SEQ ID NO: 8249 - DNA, 410 bp, Homo sapiens
gggtcttacagtcctgagcctcctacctgtgctggaagcccagatcccattgtgtgccaacctagtaccggtgcccatcaccaacgccaccctggaccggagaactggcaagaggatctatattgcatcggcctttcgaaacgaggagtacaatatgtcgggtcaggagatccaagcgaccttcttttacttcacccccaacaagacagaggacacgatctttctcagagagtaccagacccgacaggaccagtgcatctataacaccacctacctgaatgtccagcgggaaaatgggaccatctccagatacgtgggaggccaagagcatttcgctcacttgctgatcctcagggacaccaagacctacatgcttgcttttgacgtgaacgatgagaagaactgggggc

SEQ ID NO: 8250 - DNA, 423 bp, Homo sapiens
ataggcaagagatgccctactatggatgctgtggtgcatgagattcagcggttcatcaccctcgtgccctccaacctgccccatgaagcaacccgagacaccattttcagaggatacctcatccccaagggcacagtcgtagtgccaactctggactctgttttgtatgacaaccaagaatttcctgatccagaaaagtttaagccagaacacttcctgaatgaaaatggaaagtttaagtacagtgactatttcaagccattttccacaggaaaacgagtgtgtgctggagaaggcctggctcgcatggagttgtttcttttgttgtgtgccattttgcagcattttaatttgaagcctctcgttgacccaaaggatatcgacctcagccctatacatattgggtttggctgtatcccacca

SEQ ID NO: 8251 - DNA, 410 bp, Homo sapiens
gcagcagggccccagcggcaccatgtctgccctcggagtcaccgtggccctgctggtgtgggcggccttcctcctgctggtgtccatgtggaggcaggtgcacagcagctggaatctgcccccaggccctttcccgcttcccatcatcgggaacctcttccagttggaattgaagaatattcccaagtccttcacccggttggcccagcgcttcgggccggtgttcacgctgtacgtgggctcgcagcgcatggtggtgatgcacggctacaaggcggtgaaggaagcgctgctggactacaaggacgagttctcgggcagaggcgacctccccgcgttccatgcgcacagggacaggggaatcatttttaataatggacctacctggaaggacatccggcggttttccc

SEQ ID NO: 8252 - DNA, 383 bp, Homo sapiens
aacctccacagatgctgatagtctgtagagtcaggaataccatgtaacatgttgaagtagactaaagattagttctttggcaatagcccagtctggacttactatgtacttttgaaaataaaactgcttatttgtaaactctgtaattaggaccttttgctatttgagttatattcctttctaacttcaaacgtctgcattcatgtataatagccattttatgcacagatgaggtgattcccacacttcttttcgcagatgtttcattatctggatgagtgtattacataataaatttgaataatggtagtcttccaaacgacaaaaagcaagctagttgatttgtcaattttgagtttaaatgttttgactgcttatcagca

SEQ ID NO: 8253 - DNA, 382 bp, Homo sapiens
cccacgcgtccgacaggttcctgacaggaccagtaccagtctgtggcccaggggttggggacctctgctctaagggaaggagcaggccttgacagagaccctgggtcaggagtcagagggtgaggttctactctgtgtcctttggcccaaggccctttgggtccaacctatggactggggtctgacactcctgtcatcccagaagggaggtggaggggtccgtgggtctcaagccacagggctgtgggtctcagagctgaggctggggcagcataccctggagggaggtcaagggtgcaggtgaggggcctcacattccagtgcagttggtggggaccaggcttggtgattcacgccctccctaggtcattttgaagacctc

SEQ ID NO: 8254 - DNA, 389 bp, Homo sapiens
  misc_feature (1)...(389): n = A,T,C or G
cccacgcgtccggggtggccaagtctctggtgaaagcagggctctgccggagagtgcttgtccaggtttcctatgccattggtgtggccgagccgctgtccatttccatcttcacctacggaacctctcanaagacagagcgagagctgctggatgtggtgcataagaacttcgacctccggccgggcgtcattgtcagggatttggacttgaagaagcccatctaccagaagacagcatgctatggccatttcggaagaagcgagttcccatgggaggttcccaggaagcttgtattttagagccagggggagctgggcctggtctcaccctggaggcacctggtggccatgctcctcttccccagatgcctggctgctgatcgcctn

SEQ ID NO: 8255 - DNA, 381 bp, Homo sapiens
cccacgcgtccggacccacgcgtccgatttagacgacggccgcccttttttttttttttttttttttttttttttttttttttttttttttggggggtttttttttttaaaaaaaaaacaggggggggtttttggggagcccccccttttaaaaaaaggggggccccgttttttttaaaaaaaagagaacaggggggggcttttttaaaaaaaaaccgggggggggggggaaaaaaaaaaacccccccccgggggggggggcccccccaaaaaaaaaaggggccccccccccccccccaaaaaaaaaaaaaaggggggggccctttaaaaaaaccctgggggggggcccattttccgggggggggggggggtaaatttctt

SEQ ID NO: 8256 - DNA, 389 bp, Homo sapiens
  misc_feature (1)...(389): n = A,T,C or G
cggacgcgtgggccagcagtgagcgcctcgaggtggtgagccgtgtgcgccaggccatgcccaagaacaggctcctgctagctggctccggatgcgagtccactcaagccacagtggagatgaccgtcagcatggcccaggtcggggctgacgcggccatggtggtgaccccttgctactatcgtggccgcatgagcagtgcggccctcattcaccactacaccaaggttgctgatctctctccaatccctgtggtgctgtacagtgtcccagccaacacagggctggacctgcctgtggatgcagtggtcacgctttcccagcacccgaatattgtgggcatgaaggacagcggtggtgatgtgaccaggattgggctgattgttcan

SEQ ID NO: 8257 - DNA, 383 bp, Homo sapiens
cggacgcgtgggctgctccccacttggcacggtcttaccatcatttgtttcctttggatgcttttcaagaaattcccctagaagaatataatggagaaaggtatttcagtttggactaatttatatctgttataagtggtaagctaatgtttgaatagattgttactaccttaaaaaataatctgattaacttggacaagagtacttctaatatggaagatgagataaagaatgccatagttatgattgaaatgactcgttgctaaatagatctgaatctccagaaaccaaataatttcactaaacccacctatgtataaataggggtgatgattgtactactaaatcagttttccagaaggaaaagaaaaaaagccctgatt

SEQ ID NO: 8258 - DNA, 389 bp, Homo sapiens
ggctcttcagtctcagaatcaggacactggccaggtgtctggtttgggtccagagtgctcatcatcatgtcatagaactgctgggcccaggtctcctgaaatgggaagcccagcaataccacgcagtccctccactttctcaaagcacactggaaaggccattagaattgccccagcagagcagatctgctttttttccagagcaaaatgaagcactaggtataaatatgttgttactgccaagaacttaaatgactggtttttgtttgcttgcagtgctttcttaattttatggctcttctgggaaactcctccccttttccacacgaaccttgtggggctgtgaattctttcttcatccccgcattcccaatatacccaggccacag

SEQ ID NO: 8259 - DNA, 382 bp, Homo sapiens
gctttgatgctattatgagggttcgtaccagcacaggtttcagagccactgatttctttggtggaatcttgatgaacaacaccaccgatgtagaaatggctgccatcgattgtgacaaggcagtgaccgtggagttcaagcacgatgacaaactcagtgaagacagtggagccttaatccagtgtgctgtgctttacacgacaatcagtggtcaaagaagacttcggattcacaatcttggcttaaactgcagctctcagctagctgatctttataagagctgtgagacagatgctcttatcaacttctttgccaagtcagcttttaaagcagttctccaccagcctttgaaggtcatccgggaaattctagttaatcagac

SEQ ID NO: 8260 - DNA, 440 bp, Homo sapiens
  misc_feature (1)...(440): n = A,T,C or G
tgggattccagggacttggctgggggtgggaaactttatccacttccctactctcatcatgagtacggacagggtgggcgggagactgatcatcgggactcatcatgaagagcccagccccaccccacatactcagatcccacccacagactggtggccacacctcagcctggtcacaaagagttacactcagatacatgagcacggcagtgtgctcataactgtttaacaaccagctgtcctgggagggggacagccttgtaatgcttgccaatttccatggtggtaatgctaccaccatggctgatttcatcactggcaagcatagacattcctaataggacaccatggatctgtgcccggggttcggcccaagggctgggacaaagcatgctctatggaaatgcttgctgattgaaggaaagaagaatgactctccn

SEQ ID NO: 8261 - DNA, 420 bp, Homo sapiens
  misc_feature (1)...(420): n = A,T,C or G
cccacgcgtncggttgataacagtactgaagatgcataagaaatgcccaagtcactcagaggacaactacccatattccagactctgagctgtttcctttttaaaaatcatatagacaattagctgtttgaagtgagtattaaatatttcagaagtgtgaatttcatgtatttgagctcctctagttgctgtcggtttttcttctgctgccaacctgtgactcacaaatgactaggatctcttgttctttaattttagggtcttgttccaggactcaaatcagtaacttggtgattacaaggtgctgaatgtgttggtaaccatatcgcaatacacctcaaggaaaaggttcagatttttatttttaaaatattttcatttttttcttgaattttatatccgcttgttcactcgtacatg

SEQ ID NO: 8262 - DNA, 387 bp, Homo sapiens
  misc_feature (1)...(387): n = A,T,C or G
aaacctcagtgtttttcctctgctggtttggggcacaaggaagccttagggtatggggaaaggctgttattacctagagtttactcccaggccagggggctgccatcttcttcacagacatccctgaaaggaagcccctttggggcagggaggtgaggacttcatctcaacatcggctggtggttggtaggggagctttttcttttctttcctttttttttgtttttgtttttgtttttgtttttggtaacatgttaggagttaatgttgcaaagagtagtttacatcttcactttctgaagacacttgaatttaggaccgatgtatctgtgacaagcatgccagaagtggcaggggccatcagggctaaccacttcacacctaccn

SEQ ID NO: 8263 - DNA, 404 bp, Homo sapiens
cttgtcgatctgttcagccctgaaaagtccaaactcccaggtattgttgcagaaggccgagatgacctctatgtctcagatgcattccataaggcatttcttgaggtaaatgaagaaggcagtgaagcagctgcaagtaccgctgttgtgattgctggccgttcgctaaaccccaacagggtgactttcaaggccaacaggcctttcctggtttttataagagaagttcctctgaacactattatcttcatgggcagagtagccaacccttgtgttaagtaaaatgttcttattctttgcacctcttcctatttttggtttgtgaacagaagtaaaaataaatacaaactacttccaaaaaaaaaaaaaaggggcggccgttttagaggatccttcgggggccc

SEQ ID NO: 8264 - DNA, 407 bp, Homo sapiens
  misc_feature (1)...(407): n = A,T,C or G
acaaatctaatatctctgatctgactgaaaactattctacaaagacacttatgtctgtatttggctactccattccagaagctgccattactctacctttagaagttatataccatgacataatagtgattggcagcatgagtcacttgagatcatttcctacaggaaattttgatagaaggtatgttaatatgctaatgacttaagagtttctccctatctttttgaaaatcgacaagaactgctttagtcctcatatgatactggttgttgagactttttgaggaatggtttgagtagttctcttggttgagtggattgttaggaattatgtggtagcttagaagcatggtaaagatgcttttaatttgcgtatttttatatagtaatgtctaacatggaattan

SEQ ID NO: 8265 - DNA, 462 bp, Homo sapiens
  misc_feature (1)...(462): n = A,T,C or G
gtgcgntnnnnnccactgagacccctgcactgatcgccnctgaaanccccggncgacccacgcgtccgcccacgcgtccgcccacgcgtccgcccgcatgccctgcattccctgcattgggttgatgactgtcagcatcactgccgcaggccatgcttgactaaggtacctggttttagccacagccacctccttgtatgttacctttcagctctggccaagagtgggacagggttttaaccacaaataggagcagcatgcaattcctagtgacttgctgcacagtattgtatcataattacaggaagtttttatttttaaaactggatctggggtatattcatttgccccatcacctctgtctaaaggcccaagtcctagggctgccatggtcacaagcacactgatgctccttaagattgtttatctggagcccacatagtgtggaacaaaaagtcacct

SEQ ID NO: 8266 - DNA, 415 bp, Homo sapiens
  misc_feature (1)...(415): n = A,T,C or G
ccgaggtgaaggtcagcaaagagattttcaacaaggccacactcgaagtgatcctgaggccgaagattgggctgcctggtgttgcagagaagagccgggagcggctgatcaggaacacgtgcgaggcggtggtgctgggcacgttgcacccccgcacctccatcaccgtggtgctgcaggttgtcagcgatgccggctctctcctggcctgttgtctgaatgccgcctgcatggcattggtggatgcaggtgtgcccatgcgggctctcttctgtggggtcgcctgcgccctggactctgatgggaccctcgtgctggatcctacatccaagcaagaaaaggaggcccgggcagtcctgacctttgccctggacagcgtggaacggaagctgctgatgtccagcaccaaggggcn

SEQ ID NO: 8267 - DNA, 413 bp, Homo sapiens
  misc_feature (1)...(413): n = A,T,C or G
ctgggcggccttcgcttactctcacctgcttctgagttgcccaggagaccactggcagatgtcccggcgaagagaagagacacattgttggaagaagcagcccatgacagctccccttcctgggactcgccctcatcctcttcctgctccccttcctggggtgcagcctaaaaggacctatgtcctcacaccattgaaaccactagttctgtccccccaggagacctggttgtgtgtgtgtgagtggttgaccttcctccatcccctggtccttcccttcccttcccgaggcacagagagacagggcaggatccacgtgcccattgtggaggcagagaaaagagaaagtgttttatatacggtacttatttaatatccctttttaattagaaattaaaacagttaatttaaan

SEQ ID NO: 8268 - DNA, 345 bp, Homo sapiens
tggaattgctggtcaaattggtcttcatgctctggaagacgtaagacaagacaaaggcagtgtaacaatccacctcctcaaaatgggggtagcccctgttcaggccctgcttcagaaacacttgactgctcctagcagatgatacagcagtgggctacatacaatgagagccctgagccctcaagaactcacgccagctcagccctacaccagtttccacctggagttcatgcaagggcaaaaggcagtgccatgcaagctgtttaaaataaagatgttaccttgtaaaatgcaagttgatttaaataaatactgagttaaaggcttaaaaaaaaaaaaaaaaag

SEQ ID NO: 8269 - DNA, 415 bp, Homo sapiens
tttttttcatacccttttgaactttgcaacttccgttattaggaacctgtttcttacagcttttctatgctaaactttgttctgttcagttctagagtgtatacagaacgaattgatgtgtaactgtatgcagactggttgtagtggaacaaatctgataactatgcaggtttaaattttcttatctgattttggtaagtattccttagataggtttttctttgaaaacctgggattgagaggttgatgaatggaaattctttcacttcattatatgcaagttttcaataattaggtctaagtggagttttaaggttactgatgacttacaaataatgggctctgattgggcaatactcatttgagttccttccatttgacctaatttaactggtgaaatttaaagtgaattcat

SEQ ID NO: 8270 - DNA, 421 bp, Homo sapiens
cggacgcgtgggagacctcaacccctgacccccatgcctcaggatactcctcaatagccatcgctgtagtatatccaaagacaaccatcattccccctaaataaattaaaaaaactattaaaccctataaacctgacctcctttatggttaatactattaagcaagaatgcagtacagaattggatacagtacggatttgtccaaataaattcaataaaaaccttaaagctgaaaaaaaaaaaaaaaaaaaaaaaaaaaaaaaaaaaaaaaaaaaaaaggggggggggcctttaaaaaaatcccggggggggcccaaatttacggggggggggaaaaaaaattttttttttttttggggggggcaaaaaaaacccccggggggtttttggggaaaaaaccttttttgggggggggaaaaaa

SEQ ID NO: 8271 - DNA, 385 bp, Homo sapiens
  misc_feature (1)...(385): n = A,T,C or G
tggttccggctgccctttctaggtgattggaatcatcccatctaaagcagtctttatatgcattccgaggccagagtaacattttgaactttggggggatatttgttcatcacttgggtagaagaggagcaaaaatacctctgttttctcttgccaaagtaagatgaagctattccaggttgagggatttttctttgcacggggttgattaatttctgcacagggagtgagattattaaagtaacacacacacaaagtaaattgcaaaatgaaaaaaattagaagcaaatgagttttggaccaatattgttgataaatctaaattgttaagagagatcttataatgcaacatcaaattctttattcaattttactgaagtactgn

SEQ ID NO: 8272 - DNA, 384 bp, Homo sapiens
  misc_feature (1)...(384): n = A,T,C or G
caacggacggacgccatgagggctctgctgctcctgttgttcctgctggtgagcttggagtcaacactttcgattccaccttgggaagcccgcaaggagcataagtacaaagctgaagagcacacagtcgttctcactgtcaccggggagccctgccacttccccttccagtaccaccggcagctgtaccacaaatgtacccacaagggccggccaggccctcagccctggtgtgctaccacccccaactttgatcaggaccagcgatggggatactgtttggagcccaagaaagtgaaagaccactgcagcaaacacagcccctgccagaaaggagggacctgtgtgaacatgccaagcggcccccactgtctctgtccacan

SEQ ID NO: 8273 - DNA, 421 bp, Homo sapiens
atcaggagactagttgaagtcttgagaactgatgtttttcgtggcctgggagttcagcttttagagcaggtgtatgatcttttggaggaggaggatgaatttgatagagaggtacgtttgcgggagcacatgggtgaaaagtatacaacttacagtgtgaaagctcgccagttgaaattttttgaagaaaacatgaatttttgagcatttgtcctaatctgctgccagaattaaagacctatttttagaggattttggcttaaaaagcaagggcaaacagtcatttggaagccactcaccactgctttatatctcttttttatatctctttggcgcttccctacagaaaagaaattggacagaacagaataatatgaagcaggatcacaaaagaaaaaaaactttggctttcatattctct

SEQ ID NO: 8274 - DNA, 386 bp, Homo sapiens
ttgttttcagcctgctgctgctgctgctgttgcggttattggaaccgtcgtggggaaggatggtgtgcgaaaaatgtgaaaagaaacttggtactgttatcactccagatacatggaaagatggtgctaggaataccacagaaagtggtggaagaaagctgaatgaaaataaagctttgacttcaaaaaaagcaagatttgatccatatggaaagaataagttctccacttgtagaatttgtaaaagttctgtgcaccaaccaggttctcattactgccagggctgtgcctacaaaaaaggcatctgtgcgatgtgtggaaaaaaggttttggataccaaaaactacaagcaaacatctgtctagatgtattgatggaatttctgg

SEQ ID NO: 8275 - DNA, 382 bp, Homo sapiens
atcgtcgggaccagactcgtctcaggccagtttctttcttctcagccaaacgccgaccaaggaaaactgactaccatgagaattgcagggatttgcttttgcctactacgcatcacctgtgccataccagttaaacaggctgattctggaagttctgaggaaaagcagcttttcaactaatacccagatgctgtggccacatggctaaaccctgacccatttcacaagcagaatctgctagccccacataatgctgcgtcctctgaagaaaccactgactttaaactacagacccttcctagtaaggacaacgaaagccatgaccacatggatgatatggatgatgaagatgatgatgaccatgtggacagccaggactcca

SEQ ID NO: 8276 - DNA, 387 bp, Homo sapiens
tgagcattcagtttcttggtacagtggtagcagaaggtctagaaatttgtgtgattgaagccatgaaaatgcagaatagtatgacagctgggaaaactggcacggtgaaatctgtgcactgtcaagctggagacacagttggagaaggggatctgctcgtggagctggaatgaaggatttataacctttcagtcatcacccaatttaattagccatttgcatgatgctttcacacacaattgattcaagcattatacaggaacacccctgtgcagctacgtttacgtcgtcatttattccacagagtcaagaccaatattctgccaaaaaatcaccaatggaaattttcattgatataaatacttgtacatatgatttgtacttctg

SEQ ID NO: 8277 - DNA, 384 bp, Homo sapiens
agaacaacttgtttatttaaagtcatctagtctaatgcaatcaaggagtaaattataaataaccagttagcataaatggaaagaaaatagttccttttctttgaattcatttcatgtttaatttttcttgcgcacatatagaaatgaatagaaatattcccatttcaatatgcaaattcagccactatatagtttgtttctttttggtagctaataataataaatttttaagtaagatctgattttgaaatatgaaaagaagtttatcctttcctgttttaataccacctgatacccgcttaacttactgtgtttgattcttggggacatttatgttcaaggttctgtcaaagcaatctattattcttgtttttacctgatgga

SEQ ID NO: 8278 - DNA, 412 bp, Homo sapiens
cgaagacccaggacccagccaaagcccccaacacccctgacattctcgagatcgagttcaaaaaaggggtccctgtgaaggtgaccaacgtcaaggatggcaccacccaccagacctccttggagctcttcatgtacctgaacgaagtcgcgggcaagcatggcgtgggccgtattgacatcgtggagaaccgcttcattggaatgaagtcccgaggtatctacgagaccccagcaggcaccatcctttaccacgctcatttagacatcgaggccttcaccatggaccgggaagtgcgcaaaatcaaacaaggcctgggcttgaaatttgctgagctggtgtataccggtttctggcacagccctgagtgtgaatttgtccgccactgcatcgccaagtcccaggagcgagg

SEQ ID NO: 8279 - DNA, 389 bp, Homo sapiens
ttcctctggggaagacagtgagcccaacgccctggctctcgaggggtggacggagtccagctggcatcgaccgggtgcccctcttcaccggtgtccacagtccttgagagcaaaggtggtcccagcagtggagcagagggcaagggtggggcatgtagagtctccagggagccactgttggttagagagggagcccgaagtgggctccggaccccagcagggacagcgtccccttccagcgggggcagccgattgatctgggcacacgagcaggaggagcggcgccacccagggctgacctcacggccctgctcacgtctcggggcattttggcagacccacctagacctgggggacagcctgatttcctgcagccatgacctacaagg

SEQ ID NO: 8280 - DNA, 361 bp, Homo sapiens
gccgggcgattggcatcctcagccgcttttctgccttcaggatcctccgctcccgaggttatatatgccgcaattttacagggtcttctgctttgctgaccagaacccatattaactatggagtcaaaggggatgtggcagttgttcgaattaactctcccaattcaaaggtaaatacactgagtaaagagctacattcagagttctcagaagttatgaatgaaatctgggctagtgatcaaatcagaagtgccgtccttatctcatcaaagccaggctgctttattgcaggtgctgatatcaacatgttagccgcttgcaagacccttcaagaagtaacacagctatcacaagaagcact

SEQ ID NO: 8281 - DNA, 365 bp, Homo sapiens
acgcctgggcgtgattaaggcgaacagcaagcatctctatgcttcaaacgcggcgccagaggccctgatccgagaggtggccaacaaaggcaaggtccccctgcaggatcccatggtacggaatgacaccccctgcggaaccaccattggacctatcttggcttctcggctggggctgcgtgtgctggaactaggcagcccccaactggccatgcactctatccgggcgatggcctgcaccacaggagtcctccagaccctcaccctcttaaagggcttctttgagctgttcccttttctaagacataatctcttaatggattgagccctcttggaaagacttatctgccatacctttgctcctg

SEQ ID NO: 8282 - DNA, 428 bp, Homo sapiens
  misc_feature (1)...(428): n = A,T,C or G
ctaccaacgtgccctatgccactttcacagaacacccgatggctggcgcagatgagaagacagcatctctgtgtcagttggaaagcttcaaggctctgttaatccaagctgtcaaaaaaagcccaaaaagaaagccctttgccaggacaggcgaatggcgtgctgatcctggagcgccccctgctcatcgagacctacgtgggactcatgtccttcattaacaacgaggcgaaactgggctactccatgaccaggggcaaaataggcttttagccgctgcgttctgggagctcctccccctccccagaaggccaagggatgtgggggctgggggactgggaggcctggcagtcttcatgctgccctgctgctgctggaaggatggggatctttcacctttagggatctcagcacaattagaatcgtan

SEQ ID NO: 8283 - DNA, 361 bp, Homo sapiens
aaaccttcactgctagatcttgccttccttgctccctaggcctgtggaggctcaatccagaccagtgtgaatgctctgtcagcagatgtgctgggtcgatgccaggtgtttgaagagacccagattggaggcgagaggtgagccgtgggcccaggccgagctcacaaacctgcctgggtctggtcttctgccatcttttggctgtggtatacagcttttacaaagtctcacctttgtgtacaaagtggtatacagcttttacagagtctcacctttgagccataaagagctcagataatatacaggattacaggaagatctaaaagccttgactccacaatcttttatgccctagtggtac

SEQ ID NO: 8284 - DNA, 436 bp, Homo sapiens
cccacgcgtccggagcaagagctgatctagcactacaatggccagcggtaattctttcagttaaaatgacaattaatacagtttcattgaaagaattaccgctggccattgtagtgctgagagcaagagctgatctagctagggctttgtcttttcatctttgtgcataacttacctgttaccagtataggtgggatatacatttatcttgcaggaaattccccaaagctcagagtccagttccttccataaaacaggctggacaaatgaccactatgttagacccccaggctcgacttcaggggtcagtgttcctgtcccaaaccccacacagaatactctgcctctgcttcatgtagcaaatgagcaaaaactcagtatctatcaaaagtgtaaattatatttcctatgcctagtaattcacttcatgtctaaa

SEQ ID NO: 8285 - DNA, 476 bp, Homo sapiens
  misc_feature (1)...(476): n = A,T,C or G
natggaanccttgcggnaccatagaggaccntccgggtcgacccacgcgtccggagaaagggaaaaaattataggtagatgatcttattataatttgaataattttgagctatcaaaatgtctttgtaattttcacaaccgctgtccattgtttgaggatgttacctactaaactgaaaacattcattccatatctacttacacatacaccagcaacagtataaatgtaagcctaactttgcaaaattcgtaataatttagtgatggaattttttaataacatgcagtatataaatgtgcagattttatgcgtgttgacaaaatcatttttcagcttgcaaaatgggactgcaatattacatttttcacttaagcagttttttacatctacgttgttgctttctaaaatgaatgtgaatgccatcttttatgactgcaacttgccttttccattacagaaatttttgtttgatgta

SEQ ID NO: 8286 - DNA, 435 bp, Homo sapiens
cctgtgtcaaagcctgccctcgggctctgctcacctctggtgaccctccaagatgcccctgccctcagtttcccctcatgatctggcctctgcccccttctctagccacagcctctagtacactttagcaataccaccagactagttagagttccccactcaccaagcaagacatgcagtttcatgcctctgtgccttcgctcatgctgtttcttccgactggaatgccttcccctgctcctcctgccttgtctgcctggcaagttcatctctcacgatcccctcaaaggccccctcctccaggaaggcaacccctgtgcccctcccctccaggctacctctgcactttgtcaatgcttctcttgtggcacttatcacactgtattttacttgtttacatgtttggctccccttctagactgtgaatccttaagg

SEQ ID NO: 8287 - DNA, 482 bp, Homo sapiens
  misc_feature (1)...(482): n = A,T,C or G
natggacgccctcggaccgctttgatttccctggtcgacccacgcgtncgctgaaaccatgatgtactttttcatacatgagtctgtccagagtgcttgctaccgtgttcggagtctcgctgcctccctcccgcgggaggtttctcctctttttgaaaattccgtctgtgggatttttagacatttttcgacatcagggtatttgttccaccttggccaggcctcctcggagaagcttgtcccccgtgtgggagggacggagccggactggacatggtcactcagtaccgcctgcagtgtcgccatgactgatcatggctcttgcatttttgggtaaatggagacttccggatcctgtcagggtgtcccccatgcctggaagaggagctggtggctgccagccctgggtcccggcacaggcctgggccttccccttccctcaagccagggctcctcctcctgtcgtgggctcattgtgacca

SEQ ID NO: 8288 - DNA, 418 bp, Homo sapiens
  misc_feature (1)...(418): n = A,T,C or G
caaccttctgccaccctggcagctccttaccgcactcagtcatcagcctcattggctgcttcctatgctgcccagcagcatccccaggctgctgcctcctaccgcggccagccaggcaatgcctacgatggggcaggtcagccgtctgcagcctacctgtccatgtcccagggggccgttgccaacgccaacagcaccccgccgccctatgagcgtacccgcctctccccaccccgggccagctacgacgatccctacaaaaaggctgtcgccatgtcgaaaaggtactgtatgcccccccgcctctgcccccagctggggcttatggcaaggggctgaggttggcatgggagggaaactggaggcatcggcccctccctcggtcttctcttctctatttttgtgggatgtccagagn

SEQ ID NO: 8289 - DNA, 389 bp, Homo sapiens
catctgccttcatgaaaggcgctggctgccgggcactggtcatagcacctctctttgggattgctcaaggggtctattttattgggattggagagcgcatcttaaagtgttttgactagacagagctggaggtcaagtccctgcgcttgccggcctctctctagctgtttcacttattctattttgtgttaggacttcttttttctttttatacttttttttctttttctggggtggttttttttttttcccgcttttctttttttgttcctttccttctgtacttcctcttcctctcctttttttcttttattcgtttttattgtttcgttttctcatttattttcttcttttgtttctttctttcctttcttttttttctttctttg

SEQ ID NO: 8290 - DNA, 434 bp, Homo sapiens
  misc_feature (1)...(434): n = A,T,C or G
tgacctatggtgcccaggctcacctgaagtcgcccttcgaccccaacaacaagagggtgaagggaatctactgagggctcagaccacatgccccatcccatgctgtccatccattctcacaggtcccaaatggccctgggtcccaggaccctggacccagccagaacttgtgccctccctgtccttagcctaggcctagtcctgcgaaaacccccaaaccagatacggacagagaccaagatggcccatcctgtggtcactgactggaaggcagtctctaatccaccccaatcctcccagaaagcaaacctgtaagtgtcttgggctcagggaccatggcttgtagccctttccaagcttctagaaggtgcttagtaaatacttgataagccccacgtgaaaaaaannnnnnnnnaannnannnnntaaaaaaa

SEQ ID NO: 8291 - DNA, 408 bp, Homo sapiens
gcagatcatgaggtcaggagatccagactatcctggctaacacggtgaaaccccgtctctgctgaaaatgcaaaaagttaactgggcatggtggcaggcgcctgtagtcccagctactctggaggctgaggcgggagaatggcgtgaacccaggaggcggagcatgcagtgagccaggatcgcgccactgcactcccgcccgggtgacagagcgagactccgcctcagaaaaaaaaaaaaaaaaaaaggggggccgttttaaagaatccttaggggggcccaagtttacgcgggcatggaaagaaatacttttctccttatagggagccgaattataagctcacttggaatctttggaaagaaaccttacttttggggggtgacataatgggacaacttacctacaag

SEQ ID NO: 8292 - DNA, 412 bp, Homo sapiens
agaatttattcttcatctccaaggtgggatccttgggaagacacagggcctggaggtcgtggaactaatgcagccttgtgtacaacgcctttccagtgtctttggtatcttggcatctttatatgcttccattagcatattttgcagtatgataacatcttcacagatgttagccaggaggtctgtttggagagaaactttatgttcccctattcccacatatccacagaatcagaaactttggccaactctttcttcttctcaagggcatgcttcttcctctcttttatctcttgcttgctccttctcatgggaagaggagcaacttgtctcattggttagagtctggcaatcatttggtccctctttgttgtacagagttaatgtgttaacaactcctgctccaaaaaga

SEQ ID NO: 8293 - DNA, 406 bp, Homo sapiens
agcctgagcagtctggtatcaggcttcctaatacctgagtattgtgtgagttaggtgtgttgagtgcttggtcctctggataccatgcagcaggataacacagtggtaaggaactgggaaagaccgtatgtgtatatggaattttgggggctaggttttagtacttaaggataaattgtatatttttaataatcttcagttaataggtgattttggacagtttccaaatacagttgtttttttaatactcacaaaagcaccttgggaagttgagtgttcagtgactgactatgcatttgcataaggactcttatgtaagagtccttatataattcagaaagactggaaacaaagtgatttttaagctacaattctatgttcaatatgtgaattcctaatttccagt

SEQ ID NO: 8294 - DNA, 431 bp, Homo sapiens
  misc_feature (1)...(431): n = A,T,C or G
tgattttgttccccagggacatttgacaattctggagacattttcttattatcacaactggggttggagatcctcctagcatccagtgagtagaggccagtgatgttgctaaccatcgtaaaagaacagaagagcctcttacaacaaagaattatctggccaacagttctgaagctgagaagctctgctctgaaacaaatctcaccatgccctccctgtatttcctctatggcctaaatctgatcattttcctgtgtcctcttgcctgttagtgacaccttcaacctctaaatcacccagaccataaatttcagtaggtcttgttcaactatttgtcaaggatgatttataaagtatgcttacagtgggaaaaaaataaagaaaatattacttctaaaatactttctatatctaggagtgtttgattgtan

SEQ ID NO: 8295 - DNA, 399 bp, Homo sapiens
cggacgcgtgggttcatactcaatgaagaagatgagtatgaagatcaggcccttcttcccacagcaatagtccccaatacgtagatttttgctcttctgtatgtgacaacatttttgtacattatgttattggaattttctttcatacattatattcctctaaaactctcaagcagacgtgagtgtgactttttgaaaaaagtataggataaattacattaaaatagcacatgattttcttttgttttcttcatttctcttgctcaccaagaagtaacaaaagtatagttttgacagagttggtgttcataatttcagttctagttgattgcgagaattttcaaataaggaagaggggtcttttatccttgtcgtaggaaaaccatgacggaaaggaag

SEQ ID NO: 8296 - DNA, 381 bp, Homo sapiens
tctgtcccactctgtcaagtggaatccttccctttccaactctacctccctcactcgagctcctttcccctgatcagagaaagggatcaagggggttgggaggggggaaagagaccagccttggtccctaagcctccagaaacgtcttcttaatccccaccttttcttactcccaaaaaagaatgaacacccctgactctggaatggtgtatactgccacatcagtgtttgagtcagtccccagaagagaggggaaccctcctccatcttttttgcaacatctcatttcttccttttgctgttgcttcccccctcacacacttggttttgttctatcctacatttgagatttctattttgtgttgaacttgctgctttttt

SEQ ID NO: 8297 - DNA, 386 bp, Homo sapiens
tcgctcaagcagtggctccagctcttcctcagcatccagccgctcaggaagctccagcacctcccgcagctccagctctagcagctcttctggctctccaagtccttctcggcgcagacacgacaacaggaggcgctcccgctccaaatccaaaccacctaaaagagatgaaaaggagaggaaaaggcggagcccatctcctaagcccaccaaagtgcacattgggagactcacccggaatgtgacaaaggatcacatcatggagatattttccacctatgggaaaattaaaatgattgacatgcccgtggaaaggatgcatccccatctgtccaaaggctatgcgtacgtagagtttgagaatccagatgaagccgagaaggcgc

SEQ ID NO: 8298 - DNA, 466 bp, Homo sapiens
  misc_feature (1)...(466): n = A,T,C or G
nattgatngcactcggaaccgccccggaattcccgggncgaccaatgagaccatgctaacggcctcggggccgctggctgngccccccatgtgtcctgtgcccccagcctgcccagagcccaagtaccgcgggccactgcactgcctggccacggtagcccgtgaggaggggctgtgcggcctctacaagggcagctcggccctggtcttacgggacggccactcctttgccacctacttcctttcctacgcgggcctctgcgagtggctcagccccgctggccacagccggccaggtgagcaggggctggaacctggcagggcggggagcccagaaggatgaggaggtcaaggtgaggtcgtgctgcccgccagtacccgagtgggggcttgaacttggcctcctgcctcccagagtgggctcctcagttctcccaacaccaagagtcaggacagacttgctgtg

SEQ ID NO: 8299 - DNA, 421 bp, Homo sapiens
  misc_feature (1)...(421): n = A,T,C or G
tttcgtccgcgaagtaaacattacgagattggcttggattctgtcttatggacttggggctagctgcggcggggctggatggtgctgtattgaatttttggacggtactgcattggaggattttaagcttgggcagtaggacattgtattagtctgttttcacattgccaatgaagacatagcccagacctgccaatttactaaagaaaggaggccagataaccatgtcagccacagttgtagatgcagttaatgctgcacccctatcggggtccaaagaaatgagtttggaagaaccaaagaagatgaccagagaggactggagaaagaagaaggagctagaagaacagcgaaaattgggcaatgctcctgcagaagttgatgaagaagganaagacatcaacccccatattcctcagtg

SEQ ID NO: 8300 - DNA, 442 bp, Homo sapiens
  misc_feature (1)...(442): n = A,T,C or G
ccttgaaacccactgatggacctggcgcggaaccccgggncgacccacgcgtccgcggacgcgtgggcccaggcaggccccccgaagtggacgccgccctgagggcgcagctctggggttacacccagttcctggcgctggggattctcaccctggctgccggccagacctgcggtttcttctgtgtctccgcgagagcagtcaccggcatggccggcgtgggctgcctgtttttcatctcttggtactcctccttcgggtttgtgcgacgctggaactgtatcctgatgagaaaccatgacgtcacggagcaacccatggttctggagaaaacagcgagtcttatgctaaaggaagctgtttcctatattgaaagacacaagcatgggccatttctcctcttcctttctttgctgcatgtgcacattccccttgtgaccac

SEQ ID NO: 8301 - DNA, 381 bp, Homo sapiens
atcaaagttcagcgactccacttgcgtctcctctcatttctttcggaaaggggaaaccagacgacccagcggccacgggacgagtcgccccaactcaaccccagcaggacgctggaggggcctcccttgcccacctctcttcgctggcactggcctcctgcacccgggtctgcagtccctccgccatctcacaagtgtgcagccgctaggcctgggggatccgaatgactggggctggataggaatgccttcgtgtttcccaagacccccgggcctgctccacaaagtttgaagggtgggtacaccccgacccaggctcaggccaagcagcagagatgaatgaggtgatgaccacagccttgatccggcaggagctcagag

SEQ ID NO: 8302 - DNA, 380 bp, Homo sapiens
tatgcccggacagaggatcgcctcgctggcctactctctcctcccgtacggcgccggaatcccagctccacttaccaggccgcggctaccccgccgtcccccccgactcccgccaccccgctctctcaggctcttcaggatccaagtccgtaggccctttaaggggtctagttgccgtttgcgaggccctgggactttggtcccagacagcggggatccggatggcttccgtgcggatccgagaggccaaggagggagactgtggagatatcctgaggctgattcgggtgaaaactgcaggccggtaacccgggggtcagagtggcgcggccagagcggggtcctaagaggcgggggcagggggaggggctcgccttggg

SEQ ID NO: 8303 - DNA, 483 bp, Homo sapiens
  misc_feature (1)...(483): n = A,T,C or G
natggacgctctcggaccgcgatgaatatnctggtcgacccacgcgtccgctgacgcgtgggatgaaagtgaatgatggtaaatatgtgtgtgaggctgatggattctggacgagctccggaggagaaaaatcactcccagtctgtgagcctgtttgtggactatcatcccgcacaacaggagggcgtatatatggagggcacaaggcaaaacctggtgattttccttggcaagtcctgatattaggtggaaccacagcagcacgtgcacttttatatgacaactgggtcctaacagctgctcatgccgtctatgagcaaaaacatgatgcatccgccctggacattcgaatgggcaccctgaaaagactatcacctcattatacacaagcctggtctgaagctgtttttatacatgaaggttatactcatgatgctggctttgacaatgacatagcactgattaaattgaataacgnagttg

SEQ ID NO: 8304 - DNA, 421 bp, Homo sapiens
  misc_feature (1)...(421): n = A,T,C or G
cacgaactgggccctggtgcctccagctcccgggtcctctacaaggaccgtgcacggctgcccttgctcaatgccaccatcgccgaggtgctgcgcctgcggcccgttgtgcccttagccttgccccaccgcaccacacggcccagcagcatctccggctacgacatccctgagggcacagtcatcattccgaacctccaaggcgcccacctggatgagacggtctgggagaggccacatgagttctggcctgatcgcttcctggagccaggcaagaactccagagctctggccttcggctgcggtgcccgcgtgtgcctgggcgagccgctggcgcgcctggagctcttcgtggtgctgacccgactgctgcaggccttcacgctgctgccctccggggacgccctgccctccctgcagn

SEQ ID NO: 8305 - DNA, 419 bp, Homo sapiens
tggacccctttcgggaacgctgcccccttagagggacgatcccgtgaccccctaagtgtgagggcctttccccaagggctctggaatcggtccagatctcaatctcaactctgcctccctcagctctgtgacctgcagccacgcaggccctctgccggttaccccgatgtcagagggggagcacaccgtccctgttaggaagctttggtgagaagcacgtgcgacgcatccctcaaccagtgccggcccgagagaagggagggtggaccaggttgtggaaacagccggggccatctgggaggcaggagatctgggaagcagctgcaggaagatgaagttgccggcagcgtaaatcctgcgcctccccagcctatagtctatacacacacctggccgccgcgaagaggcatgcaccaggg

SEQ ID NO: 8306 - DNA, 388 bp, Homo sapiens
cccacgcgtccggtctggcctcaccgtgaacctgacgctctattacatgctctcctgctcgccagccccactgctcagcccctccctgagccacagggagcgagaccagatggagtcgacgctcaactatgaagatcactgcttcagcgggcacgccaccatgcacgccgagaacctgtggccggggcggctgtcctccgtccagcagatcctgcagctctctgacctgtggaggctgaccctccagaagcgtggctgcaaggggctggtgaagctcatctacaacgagtactgtgggcctggagccaagcccctcttcaggagtaaggaagatcccagtgtctgagtgaactaacagtcctgctttcagccaccatttgcacaagac

SEQ ID NO: 8307 - DNA, 381 bp, Homo sapiens
tgagcagatgaactgcaaggagtatcaggaggacctggccctgcgggctcagaacgatgtggctgcccggcagacgacagagatgctgaaggtgatgctgcagcagggcgaggccatgcgctgcccccagtgccagatcgtggtacagaagaaggacggctgcgactggatccgctgcaccgtctgccacaccgagatctgctgggtcaccaagggcccacgctggggccctgggggcccaggagacaccagcgggggctgccgctgcagggtaaatgggattccttgccacccaagctgtcagaactgccactgagctaaagatggtggggccacatgctgacccagccccacatccacattctgttagaatgtagctca

SEQ ID NO: 8308 - DNA, 388 bp, Homo sapiens
cacccacgcgtccgcccacgcgtccgctctgattgagggttccgtagaggaaggggcagagtacacctctcacaacaacatgcagttcagcacctttgacagggatgcagaccagtgggaagagaactgtgcagaagtctatgggggaggctggtggtataataactgccaagcagccaatctcaatggaatctactaccctgggggctcctatgacccaaggaataacagtccttatgagattgagaatggagtggtctgggtttcctttagaggggcagattattccctcagggctgttcgcatgaaaattaggccccttgtgacccaataggctgaagaagtgggaatgggagcactctgtcttcgaagtgggaatgggagcact

SEQ ID NO: 8309 - DNA, 495 bp, Homo sapiens
  misc_feature (1)...(495): n = A,T,C or G
gcggaaaattgaggacttgaggaccgtcgcagaanccncgggncgacccacgcgtccgcactgtgacaacacaggaaaagttggttttcaggtgatattgaatttgaagcaaagataggatgaatctgaacatctctccatctagagcccaatgaaggaagcttcaaatgagaacatgatggaatcagtaaccattcaatcttttgtcctaggattgaaaaaaaatgttaaaggtttaggacacacctaatagtatgtcctttgaatgggaagtgttcttaataggataaaaactggtatttgcctctccccagagtactttttttgttttttcatagagacggggtcttgctatgttgtccaggctggccttgagctcctgggctcaagcaatcctcccacctcagcctccccagtactgggactgtaggtactcaccactgcatctggcctttctttgttttattaacatatttaagtttgttattattggga

SEQ ID NO: 8310 - DNA, 457 bp, Homo sapiens
  misc_feature (1)...(457): n = A,T,C or G
tactgacgcctgcagtacagcgcngcattccnggtcgacacacgcgtccgcgattacatcgttccctggaacttacaaccttacctgtttttgccctcctgctctggggacagctttttggagtggactcaggcgatgatgtggcggatatcgcagatgacggctgcccgaagccccccgagattgcacatggctatgtggagcactcggttctctaccagtgtaagaactactacaaactgctcacagaaggagatggagtgtacaccttaaacaatgagaagcaggggataaataaggctgctggagataaacttcctgaatgagaagcattatgtgggaagcccaagaatccggcaaacccagtgcagcggatcctgggtggacacctggatgccaaaggcagctttccctggcaggctaagatggtttcccaccataatctcaccacaggtgg

SEQ ID NO: 8311 - DNA, 425 bp, Homo sapiens
  misc_feature (1)...(425): n = A,T,C or G
agcagcagccatggccctacgctaccctatggccgtgggcctcaacaagggccacaaagtgaccaagaacgtgagcaagcccaggcacagccgacgccgcgggcgtctgaccaaacacaccaagttcgtgcgggacatgattcgggaggtgtgtggctttgccccgtacgagcggcgcgccatggagttactgaaggtctccaaggacaaacgggccctcaaatttatcaagaaaagggtggggacgcacatccgcgccaagaggaagcgggaggagctgagcaacgtactggccgccatgaggaaagctgctgccaagaaagactgagcccctcccctgccctctccctgaaataaagaacagcttgacagaananaaaaaaannaaaaaaaaaaaaaaaaaaaaaaaaaaagaaaagaggggg

SEQ ID NO: 8312 - DNA, 423 bp, Homo sapiens
caccttttctgagaagccatacttccactgatggattagctgaaaacacaagcccaggagtgcagacactgccctaattgcttcctgagaattcccatattaataaagaagaaaattatctgccagaaaaaaaaaaagggggggcccttttaaaagaaccctagagggggcccctccttgcctggatcagcaagggaaattcttttcccttttggggggcgggataaaacttacccggggccttttggaagggaccctttttttgggggggggaccaaactggcgaacaccccctccagaatttggaaggtctggggtaaaacaaaatttttaaggggaatttggggtaaaaaaactggaaacagctgggggctagaaactgggaaagccccttcataaacattatgcaaaggaggagagaag

SEQ ID NO: 8313 - DNA, 494 bp, Homo sapiens
  misc_feature (1)...(494): n = A,T,C or G
gccggtcnnnaatgatctcatcgannatgatagcctgcggaccgcgccgattcccggtcgaccccgcgtccggaactgtggaggtcacaaatacgtttttgcctcttcttagaaaatccaaagggaggctggtgaatgtcagcagcatgggaggaggggccccaatggaaaggctggcatcttatggctcatcaaaggcggctgtgaccatgttctcatcagttatgagactggagctttccaagtggggaattaaagttgcttccatccaacctggaggcttcctaacaaatatcgcaggcaccagtgacaagtgggaaaagctggagaaggacattctggaccacctccccgctgaggtacaggaagactacggccaggactacatcttagcacagcggaatttcctcctattgatcaactcgttagccagcaaggacttctctccggtgctgcgggacatccagcatgctatctttgcgaagagccttttg

SEQ ID NO: 8314 - DNA, 492 bp, Homo sapiens
  misc_feature (1)...(492): n = A,T,C or G
gcaggtnngnttttgatngcatggaaatgatgccatcgaggncgcccccgcgtccgtttttagctgctcactggccccgcttgtctggccttttcatccgcccgcgatccctaatcccctctgcctgccccaagatgctgaagccagccctggagccccgagggggcttctccttcgagaactgcccaagaaatgcatcattggaacgcgtcctcccggggctcaaggtccctcacgcacgcaagaccgggaccaccatcgcgggcctggtgttccaagacggggtcattctgggcgccgatacgcgagccactaacgattcggtcgtggcggacaagagctgcgagaagatccacttcatcgcccccaaaatctactgctgtggggctggagtaaccgcggacgccgagatgaccacacggatggtggcgtccaagatggagctacacgcgttatctacgggccgcgagccccgcgtggccacgggcactt

SEQ ID NO: 8315 - DNA, 501 bp, Homo sapiens
  misc_feature (1)...(501): n = A,T,C or G
aggaggtgngnnaatgatccccatcnggaaatgagagccattcccgggnccacccacgcgtccgcggacgcgtggggagagctacaccttctaccatgatgcttccaaggttgtatttaaatttgactgaatatctggatggctaagaacagacatttatcttacacatggaaaactgacgaaacctataagcctatgtgtttgacagtgaagtatgttttatggacttaaatgccacaaacagttaagtccattggcttggagatgacaagcacgagtttctggtatgtctagtgttctcattcactgattcagtcagtacacagataatcactatagagaacttaagaggctggcttatgttatacctaaatttttactttcttgtatacaacaatgctaaaattgagcagattgataactgccagcaaaccatagatttaagataaatgaatgatttacccaaccctaaaattccatgggtaaaaattttgattcctn

SEQ ID NO: 8316 - DNA, 422 bp, Homo sapiens
ctgagcgcctgttttgcttattgccagcttatattatactttcgtctcttttctgtcccagtcctactattttctttttataccatgttgctttttttattttccaagccacctacctgtcatttaccctggaatatcattttaatgctggacttgggaaacaggactaacaacctccttaaaatcgatccatactattccaagcgtttattacacgtgtggttcaaaggatgtggtgtatctgaatttatgccacaacaagctgtattacaactggtttataggcttttttaccgcatcctcactccatggtttaatacatggaggtagcatagtacaatggaaaaaagtatgggttttgaaggcaaacaaatcagatccagccttgttgctgctcacaaactgaaggaccctacgcaggc

SEQ ID NO: 8317 - DNA, 487 bp, Homo sapiens
  misc_feature (1)...(487): n = A,T,C or G
gcaggtcnnnaaatgaagcatcgaaatgatagcactccgggnccccccgcgtcgaataaaacgccgtcatttctccttatgggcacttttgccccagtgccttctcttgaatcatgacagtcctaaaaagagtctggattgcttattgccactgaatcatgccatggaacgattctgcatttcactttcaaacttgtctgtgacacgaaaagcactgcttcatggcttcttgcccatggattttatatggacacagtgggtaatacttggaggaatttttggttgggttgaagaatctctctgagaagttgacacgtgggggcaatggtttgtttctcttgtatttctgaagttgcaaataatcatgtaagcagctcaaccaggagtttacaccaaacttttaataggcgatatatcattattttttttcccattggtttggataacatccactctaactggcagttagtcatacttagctattttg

SEQ ID NO: 8318 - DNA, 416 bp, Homo sapiens
ctctcataacagtctgattcttatgagttgggcatcttgtgtttccctttaggggcctgcttccttcaaatagaggagatgggtgctatgaaacctattcactctggacttgggatggctcttctccatcttcccaagtctgagctggagcctccatgcccaactctgctctgctcttctatttcctgacagcagctaaggcatgttcctgttctgcccccaaattgaccttactaacagtgagaacttggaggagtcttcgggtcttgggaaatccaagttttcccggaaacgttttgttgtaaacagtgtccacactctttgctccaataaagctcggttccttaagccaaaaaaaaaaaaaaaaagggggcccgttttaaagaatccttggggggccccatctttacccctct

SEQ ID NO: 8319 - DNA, 486 bp, Homo sapiens
  misc_feature (1)...(486): n = A,T,C or G
aatgatangccctgcggnaccgcttgaggatctctcgggncgacccacgcgtccgagcccatactgaatgaacacaccttctgtgctggcatgtctaagtaccaagaatacacctgctatggcgatgcgggcagtgcctttgccgttcacgacctggaggaggacacctggtatgcgactgggatcttaagctttgataagagctgtgctgtggctgagtatggtgtgtatgtgaaggtgacttccatccagcactgggttcagaagaccatagctgagaactaatgcaaggctggccggaagcccttgcctgaaagcaagatttcagcctggaagagggcaaagtggacgggagtggacaggagtggatgcgataagatgtggtttgaagctgatgggtgccagccctgcattgctgagtcaatcaataaagagctttcttttgaaaaaaaaaaaaaaaggggcggccgttctaaaggatccctn

SEQ ID NO: 8320 - DNA, 415 bp, Homo sapiens
cccacgcgtccggaccctcgcgtccgaaccatgatttacttggctccgacactggctgcttcccgctacctggacaagacagagcagtggagcacactgcctcccgagaccaaggaccacgccgtggatctgatccagaaaggctacatgcggatccagcagtttcggaaggcggatggttcctatgcggcttggttgtcacgggacagcagcacctggctcacagcctttgtgttgaaggtcctgagtttggcccaggagcaggtaggaggctcgcctgagaaactgcaggagacatctaactggcttctgtcccagcagcaggctgacggctcgttccaggacccctgtccagtgttagacaggagcatgcaggggggtttggtgggcaatgatgagactgtggcactcacag

SEQ ID NO: 8321 - DNA, 482 bp, Homo sapiens
  misc_feature (1)...(482): n = A,T,C or G
attgatcgccttcggnaccgctgaagatctctcgggncgacccacgcgtccgagccgctgccgccgattccggatctcattgccacgctcccccgacgaccgcccgacgtgcattcccgattccttttggttccaagtccaatatggcaactctaaaggatcagctgatttataatcttctaaaggaagaacagaccccccagaataagattacagttgttggggttggtgctgttggcatggcctgtgccatcagtatcttaatgaaggacttggcagatgaacttgctcttgttgatgtcatcgaagacaaattgaagggagagatgatggatctccaacatggcagccttttccttagaacaccaaagattgtctctggcaaagactataatgtaactgcaaactccaagctggtcattatcacggctggggcacgtcagcaagagggagaaagccgtcttaatttggtccagcgtaac

SEQ ID NO: 8322 - DNA, 414 bp, Homo sapiens
  misc_feature (1)...(414): n = A,T,C or G
aatcccgacctggaaaagttccccaagtttgccaaggccccattcctgtcctgcatcctgtctcctggagagatcctgttcatcccggggaaatactggcattacgtgcgggctctggatttgagcttctcggtcagcttctggtggtcgtagccaggataggagctgaaagggcctgacatgcagacagcattcatctgttcactaatttcctgggtcctggaatctatagagacaagcaggactgaacctgtgtcctgaagagccttcactgcccagtggcagccctggggggctgagctccagcactggacaggcacagagcatgggctgcccaggaaggagcacactccatgccaggggtgcatggcagaggaaggtggggagagcccataaagacattgcagacagacn

SEQ ID NO: 8323 - DNA, 430 bp, Homo sapiens
  misc_feature (1)...(430): n = A,T,C or G
acccacgcgtccgcggacgcgtgggtttaattttgatgtatgtttttggatttaccaacagtactttctttcatgactactttgatttagttaagaatgctcactgtacactgaatgttaattactcagctaattcacactgatttcctgtttaaaaatatgatcccctccaggccattcatgtgaagtcagggtacagctgatgccagctacagaatcactatgtttcaatatggaatatgaaaagtcctaacacataattgcaaatcattttctactatggtatacaaattttatcattacaaaatagtatcagcttttttcacttaaggaaaataatacatcttcattcaaatattcagtgcataaataattgccttaaattgagtctttgctgtggaatttgagagttttggaaatcaaaggcccn

SEQ ID NO: 8324 - DNA, 416 bp, Homo sapiens
cagaaagggtacattcgccagcagttttgccacgatagtacaccgaacaaagagacagggtcatttgtaacctgatgcgtccaccctactgctgtgtccggtttccattggctggaacgggacctcatattctgtatttgtcctgattgggaagcaacttaaaactttttaaaagaggcgaaggcagaagagaacaaaggaaggagaaagtaacttgtggaatggtgagaaaggcatgaggcgaattctcagccatgacaaggctgaaggccagcaggaacaggctctagcgaaatgggtgctgtgtccccttcctgcatgtggcagaaagttgcaaagtttcatggatttgaatgtgaacatctgttccctggacgcactgccaacaacgtggtccaactggtactcatcgttgg

SEQ ID NO: 8325 - DNA, 393 bp, Homo sapiens
agatttgatgaatttttcagtgaagggtgagcctctgggtctaataaagactccagtctctgtaagctgagtatgggctcaggcctaaacctgtgtgaacccaacaacaaagagggatactacggctacacaggcgctttcaggtgtctggttgagaagggagatgtggcctttgtgaaacaccagactgtcccacagaacactgggggaaaaaaccctgatccatgggctaagaatctgaatgaaaaagactatgagttgctgtgccttgatggtaccaggaaatctgtggaggagtatgcgaactgccacctggccagagccccgaatcacgctgtggtcacacggaaagataaggaagcttgcgtccacaagatattacgtcaacagcag

SEQ ID NO: 8326 - DNA, 299 bp, Homo sapiens
aagaaggcttctctgtttgggtagcgtaagagctgagtatagtaagtcctcttccaaagagatggcaatatgctgggcatctactttaaaacaaagttgtctgatttttgcaagagaggttaggattttattgttcttatttccctttacagttctgcagttccatcacagtatttttttaaataactcaggtgtatgagaagaaattagaaaagaaaattaacttatgtggactgtaaatgttttatttgtaagattctataaataaagctatattctgtaaaaaaaaaaaaaaaaag

SEQ ID NO: 8327 - DNA, 423 bp, Homo sapiens
cgcctcctattcctaactctactggaggtgttgcgttttcagtttagagcttctcctttcctggcagttatcccttatttttaaattaggggttcctgactctgaatggatttccggagggttggacatgtcttatttttcctcaaaatcttgtgactatgtacatttttttaggagaatcctttgctttcttcagattctcaaaggagactggtacctccccccacccccgttaaaagaaagcaaaacaaagcaacaaagaccaacaaaccttccacagcagcccagtattcatttatattgtaaaagccttgattttctcaagcatggaaaatattttggctcccatctgacctgctttggttattgcctgagtggaattggtcacattccaagtttcagtactctttgataaattgcatg

SEQ ID NO: 8328 - DNA, 420 bp, Homo sapiens
  misc_feature (1)...(420): n = A,T,C or G
cccacgcgtccgcacgggtacttccaaggtacccctgcaaggctttgctgccctcgaaggcatgaatggcattcagaagtttcagatccatcgagatgacaggtccacagatcgcctgccttcagctcacacatgttttaatcagctggatctgcctgcctatgagagctttgagaagctccgccacatgctactgttggctatccaggagtgctctgaaggctttgggctggcctaataaggccctgcccaactccgtggggttttttttaccattgttggacctggggaggggggagttaaaaaaagaaccagaaagaaattgtcaaaaaccaataaatgaaatccaccaactcaccgtgtgtgtcccagctgccccatcttccccagcgcatacctgttcctcttctcattctctcn

SEQ ID NO: 8329 - DNA, 422 bp, Homo sapiens
agctggaagatggcggcgtccgtggtctgtcgggccgctaccgccggggcacaagtgctattgcgcgcccgccgctcgccggccctgctgcggacgccagccttgcggagtacggcaaccttcgctcaggcgctccagttcgtgccggagacgcaggttagcctgctggacaacggcctgcgtgtggcctccgagcagtcctctcagcccacttgcacggtgggagtgtggattgatgttggcagccgctttgagactgagaagaataatggggcaggctactttttggagcatctggctttcaagggaacaaagaatcggcctggcagtgccctggagaaggaggtggagagcatgggggcccatcttaatgcctacagcacccgggagcacacagcttactacatcaaggcgctgtccaa

SEQ ID NO: 8330 - DNA, 405 bp, Homo sapiens
  misc_feature (1)...(405): n = A,T,C or G
tgatgaccggcactttgtacccatgggcctctacatcgtcaggacagtgaatgagccctggactatgggattcagcaaaagcttcaagaagaagttcttctacaacaagaaaaccaaggactctacttttgacctccctgcagactccattgccccatttcacatttgctactatggccggctcttctgggagtggggggatggcattcgtgtgcatgactcccagaagccccaggaccaggacaagctgtccaaggaggacgtcctctccttcatccagatgcacagggcctaagagcctcagaatgtgccacccctgcagaatgccctgtcattcctgagatggggccacctggggcccacagtggtggcttcttccccctcttgaaagggactggngagcat

SEQ ID NO: 8331 - DNA, 423 bp, Homo sapiens
cggacgcgtgggtccaggaccgggggcctgatgtgctcacagtcacagtcagtgggaagctgcctacacagaacatgactttccaaacggagtccagtgtggcagagcaggaggcggagttccagagccccaagtatatcttccacaacttcatggagaggctctgggcatacctgactatccagcagctgctggagcaaactgtctccgcatccgatgctgatcagcaggccctccggaaccaagcgctgaatttatcacttgcctacagctttgtcacgcctctcacatctatgaaagtagaaacaggaatgtccactcaggttccactttcttcaaatattatctccagggagcaaaaataccaaaaccaggtgacaaagtaagaggtggggggaggggagaatgacagattgggctcag

SEQ ID NO: 8332 - DNA, 423 bp, Homo sapiens
  misc_feature (1)...(423): n = A,T,C or G
cggacgcgtgggagcagcctggctcatggctgtgtgcggcctggggagccgtcttggcctggggagccgtcttggcctgcgcgggtgcttcggcgccgccaggctcctgtatccccgtttccagagccgcggccctcagggcgtggaagacggggacaggccacagccttcctcgaagacacccaggatccccaagatttacaccaaaacgggagacaaagggttttctagtaccttcacaggagaaaggagacccaaagatgaccaagtgtttgaagccgtgggaactacagatgaattaagttcagctattgcgtttgctctggaattagtcacagaaaagggccatacatttgccgaagagcttcaaaaaatccagtgcacattgcaggacgtcggcttcgccctggcgacaccatgctn

SEQ ID NO: 8333 - DNA, 477 bp, Homo sapiens
  misc_feature (1)...(477): n = A,T,C or G
natttgacngcccattgananccnttcggaancnnncgcggaantcccggcgcgacccacgcgtccggtctttgatgagtcagatgagctgattgggcagaaagtggcccatgctctgtcagagggactcggagtaatcgcctgcattggggagaagctagatgaaagggaagctggcatcactgagaaggttgttttcgagcagacaaaggtcatcgcagataacgtgaaggactggagcaaggtcgtcctggcctatgagcctgtgtgggccattggtactggcaagactgcaacaccccaacaggcccaggaagtacacgagaagctccgaggatggctgaagtccaacgtctctgatgcggtggctcagagcacccgtatcatttatggaggctctgtgactggggcaacctgcaaggagctggccagccagcctgatgtggatggcttncttgtgggtggtgcttccctcaa

SEQ ID NO: 8334 - DNA, 438 bp, Homo sapiens
tcgcacgccctcgcgcgggtgtcgctgggctgtcggcctggaccttgcagccgcaatggattcaagttcgaaatatggcaactttgaaagatatcaccaggagactaaagtccatcaaaaacatccagaaaattaccaagtctatgaaaatggtagcggcagcaaaatatgcccgagctgagagagagctgaaaccagctcgaatatatggattgggatctttagctctgtatgaaaaagctgatatcaaggggcctgaagacaagaagaaacacctccttattggtgtgtcctcagatcgaggactgtgtggtgctattcattcctccattgctaaacagatgaaaagcgaggttgctacactaacagcagctgggaaagaagttatgcttgttggaattggtgacaaaatcagaggcatactttataggactcatg

SEQ ID NO: 8335 - DNA, 474 bp, Homo sapiens
  misc_feature (1)...(474): n = A,T,C or G
ctttgaangcttaggancatgatgtcatcccggnccaccccgcgtccgaaatgaatgaaccacctggtgctcgtgcccgggtagctctgactgggctgactgtggctgaatacttcagagaccaagaaggtcaagatgtactgctatttattgataacatctttcgcttcacccaggctggttcagaggtgtctgcattattgggccgaatcccttctgctgtgggctatcagcctaccctggccactgacatgggtactatgcaggaaagaattaccactaccaagaagggatctatcacctctgtacaggctatctatgtgcctgctgatgacttgactgaccctgcccctgctactacgtttgcccatttggatgctaccactgtactgtcgcgtgccattgctgagctgggcatctatccagctgtggatcctctagactccacctctcgtatcatggatcccaacattg

SEQ ID NO: 8336 - DNA, 431 bp, Homo sapiens
tgtgagccactatgcccagccgctagttcattttatagtcatttattttagttcagattataattattttaattgctgtatagtattcacctgtgaatgtgcaatttatttattgtatccattctctttttgatggacattatgctgtttccaatttcttaccattggaaacaatgtggtgaactttttttgtacatgtcactgtatacatatatttgaaaacctatgaaagattcactttttaagctttacggcaaccctattatttcgatttaaatccccaatcaggggagtgtctgggtggtagtgtcaggaggaggtgctgagtgagtagttccaggtcatgcgtgaagctacggaatgtcagaactggcactccacccttaatctcctcatgtctcatccccagtgatatttatactagaccaaag

SEQ ID NO: 8337 - DNA, 407 bp, Homo sapiens
agctccttcccagtcctgaggactgtgccctgagaggcagccgctatgatgggcaaattgcagtgttgggggctggttttcaggagaaactgagacgccagcactacctcctggtgggcgctggtgccattggttgtgagctgctcaaagtctttgccctagtgggactgggggccgggaacagcgggggcttgactgttgttgacatggaccacatagagcgctccaatctcagccgtcagttcctcttcaggtcccaggacgttggtagacccaaggcagaggtggctgcagcagctgcccggggcctgaacccagacttacaggtgatcccgctcacctacccactggatcccaccacagagcacatctatggggataactttttctcccgtgtggatggtgtg

SEQ ID NO: 8338 - DNA, 407 bp, Homo sapiens
gtgtgagccttgggcctggttctgctggagtattaaggggtgaggcctgatctgctggagaaaggatggagttaagggaatgagccacctggggccctagtgtctcctgtctccttccttttacaggtgctgggcctggtgcgagtgcccctgtataccctgcgggatggtgtaggaggcctgcctaccttcctggagaattcctttattggctctgcgcgggagcagttacttgaagctctccaggacttgggactgctgcagtctggctctatttcaggccttaagattccagctcatcactagaggcagccctccatggacccatgaaaactgagatgaggaccttggtactagggagggagggaaggacgtgggaatgttttcttattggatctgagagatga

SEQ ID NO: 8339 - DNA, 443 bp, Homo sapiens
  misc_feature (1)...(443): n = A,T,C or G
ggacggaactgagaccctcgcggnattgagaccatntgccgggccgacccacgcgtccgctctgtgttaccctccaacttcctcctggggggcaatatctttgatcccctgaacctgaatagcctcctggatgaggaagtgagccgcactctcaacgcggagacccctaagtcatccccccttccggccaaagggcgagatccggtggagatcctcatccccaaagatattactgacccgctcagtctcaatacttgcactgatgagggccatgtagttcttgcttcgccactcaagactggtcggaagcggcatagacaccggggacagcaccaccagcagcagcaggcagccggagggagtgagagtcaccccgtgccgcccacagcccctctcacccccttactccacggggagggcgcctcacagcagccgcggcacag

SEQ ID NO: 8340 - DNA, 409 bp, Homo sapiens
tctgaagaagggatacactgtgggggcagaaacaagcatcatcttggggcaggagcaggattccttcggtgggaactttgaaggaagccagtccctggtgggagacattggaaatgtgaacatgtgggactttgtgctgtcaccagatgagattaacaccatctatcttggcgggcccttcagtcctaatgtcctgaactggcgggcactgaagtatgaagtgcaaggcgaagtgttcaccaaaccccagctgtggccctgaggcccagctgtgggtcctgaaggtacctcccggttttttacaccgcatgggccccacgtgtctgtctctggtacctcccgcttttttacactgcatggatcccacgtctctgtctctgggcctttgttaccctatatgcattgcagg

SEQ ID NO: 8341 - DNA, 400 bp, Homo sapiens
atgactgtcacctatcaaatgcctcctgtgtacctggcactaagttgattagccagaaacccccagctggttggggccagtaaggagattttattttattattattaaaagtgtttggaagtggaaaaaaaaaaaaaaaaaaaaaaaaaaaaaaaaaaaaaaaaaaaaaaagggggggggccttttaaaaaaacccttgggggggacaaattttactggggagtgaaaaaaaaaatttttttttttttgggggggagtaaaaaacacccttggggattttttgaaaaaaaacttttttttgggggggggaaatgtggggcccccccccccaaagatatttcatgtttatggggaaaaaaaaattttttaggggccattggggaaaaaacttgctgctgtg

SEQ ID NO: 8342 - DNA, 437 bp, Homo sapiens
  misc_feature (1)...(437): n = A,T,C or G
agctgggactacaggcgtttaccaccacatccaactaatttttttattttttgttttttttttttacaaagggggtctcgctgggttgcccaggatagtctcaaactcctggcattaagcaatcctcccgccagggcctcccaaagggctggcattaaaggggaaagccaccaggcccggcctatttttggggcctgtttttttttgcctcccggcaggcaggtctgaccgctggatgcatgtttgctgttcgtgtctttcccacaccaccgtgcacgtggaaggggctccaaaggcttttattattcgggcgttggggcgcgctgtaatcccagctacatgggaggctgaggcgggagaatcacttgaacccaggaggcggaggttgcagtgagctgaaatcaccccactgcactccagcctgggtgatccaaaan

SEQ ID NO: 8343 - DNA, 189 bp, Homo sapiens
tttttaaatagtcaaacttcaagaaacaatctaaacaagtttctgttgcatatgtgtttgtgaacttgtatttgtatttagtaggcttctatattgcatttaacttgtttttgtaactcctgattcttccttttcggatactattgatgaataaagaaattaaagtgataaaaaaaaaaaaaaaaaagg

SEQ ID NO: 8344 - DNA, 394 bp, Homo sapiens
  misc_feature (1)...(394): n = A,T,C or G
caagcagaacctcttcgccattatccagggtgggctggacgcagatctccggaccacctgccttgaagagatgaccaagcgagacgtgcctggcttcgccatcgggggcctgagcgggggtgagagcaagtcgcagttctggcggatggtggcgctgagcacctctcggctgccgaaggacaagccccgatatctgatgggggttgggtatgttgtggatagggaagccagagccctacctgtgggaagtggattcctggggaccccctaccctgcttggggaggtggcatttgggggaaacggacacaggtctgatctgaggagactaggaagacatggctgtcccttgggggccattctgagggaatatggaccattctggggcagtgtgan

SEQ ID NO: 8345 - DNA, 265 bp, Homo sapiens
aacagagagatataatatttttcctattggacaatggacttgcaaagcttcacttcattttaagagcaaaagaccccatgttgaaaactccataacagttttatgctgatgataatttatctacatgcatttcaataaaccttttgtttcctaagactaaaaaaaaaaaaaaggggcggccgttttaaaggatccctcggggggcccaagtttacccgggcatgcaacgtaatagctttttccctatagggaggcgaattataac

SEQ ID NO: 8346 - DNA, 419 bp, Homo sapiens
cccaccgtgcccatccccaggggctggtgctggtcaccgatgccatccctgccttgggcctgggcaacggccggcacacgctgggacagcaggaagtggaagtggacggtctgacggcctacgtggcaggtgagcgccctgacccactgggtcccaggtcccagcccgcatgccaggtggcccacgacccccccagagcctgccctctctgctctcaaggcaccaagacgctgagtggcagcatagccccaatggacgtctgtgtccggcacttcctgcaggccacaggtcagtgagcagcacgggtgcgggtttaggtggtctgtgagtggtgggtccccaaggggctggaccgggtgcccggactgtagcccaagctctgcccacaggagctcctgggcattgggtacttggtgact

SEQ ID NO: 8347 - DNA, 437 bp, Homo sapiens
agattgaccccgcgcgcgctgtgcagcgccgcccaggccgcctgttgggagaacttccccctgtgcggtcgcgacgtggcgcgctggttcccgggccacatggccaaggggctgaagaagatgcagagcagcctgaagctggtggactgtatcatcgaggtccacgatgcccggatcccactttcaggccgcaaccctctgtttcaggaaacccttgggcttaagcctcacttgctggtcctcaacaagatggacttggcggatcttacagagcagcagaaaattatgcaacacttagaaggagaaggcctaaaaaatgtcatttttaccaactgtgtaaaggatgaaaatgtcaagcagatcatcccgatggtcactgaactgattgggagaagccaccgctaccaccgaaaagagaacctggagtactgtatcat

SEQ ID NO: 8348 - DNA, 481 bp, Homo sapiens
  misc_feature (1)...(481): n = A,T,C or G
ggcggaatgacngatgagactttccgaancccggncgaccacgcgtccgtgctgttaggtgcgctgaagaggctgaggactgggatattgtttaattggagcaatccagcctacacagttgtcatggatataaaagttcctatgagaggacctgaattttggagaataattaatggagatactatgaaaaaggagaaaaatgtcactttactttggaagcccctgatgaaaaatgactcattgtgcagtgttcagagatatgtgataaaccatcatacttcctgcaatggaacatggtcagaagatgtgggaaatcacacgaaattcactttcctgtggacagagcaagcacatactgttacggttctggccatcaattcaattggtgcttctgttgcaaattttaatttaaccttttcatggcctatgagcaaagtaaatatcgtgcagtcactcagtgcttatcctttaaacagcagtt

SEQ ID NO: 8349 - DNA, 420 bp, Homo sapiens
  misc_feature (1)...(420): n = A,T,C or G
tggttctgagtgtttaggaaggatttgcttgcttgcagcagaagttctaggaaaagcaggcacctcccaaatatcttgaggacactggcagccttatggtgactaaatccacactttctttaaagagatgcagatgaattacttttctgttaatatatagaaaaatacacaggagaacatgcagatacatgtaaatatctacatacagggatatttgtatgtgtggttgtgaaacccatacacaagtggatttggccatctttgggcagtgaggtcaaatgtgaatatgtgtaaaagtgcttttcagaactgcattactatgagaaaacatcaaaactgctgtagttttccatttctactgtatttcagttgcaacctatttttaataaactttgtatgtatttaaaaaaaaaaaaaaan

SEQ ID NO: 8350 - DNA, 417 bp, Homo sapiens
  misc_feature (1)...(417): n = A,T,C or G
ttttgacagagttggtgttcataatttcagttctagttgattgcgagaattttcaaataaggaagaggggtcttttatccttgtcgtaggaaaaccatgacggaaaggaaaaactgatgtttaaaagtccacttttaaaactatatttatttatgtaggatctgtcaaagaaaacttccaaaaagatttattaattaaaccagactctgttgcnntanaaaaaaaaaaaaaaaaaaaaaaaaaaaaaagggggggggccttttaaaaaaacccttggggggcccaaatttaaccggggggggaaaaaaaaaatttttttctttttgggggggcaatttaaaacccccttgggatttttgggaaaaaaccttttttttgggggggggacatatgggcccaccccccctccaaaatttt

SEQ ID NO: 8351 - DNA, 422 bp, Homo sapiens
tggttaaagtttaaaactagaagcatgtttctgatgacaaggaatgctgcaaaaatactctagttcaacaaagagttatgatcacaaaataatttttatccattctacagtgtttcagaaacatggttaaagtttaaaactagaagcagcagaaaactagcttgtaaaatttatccaagtagagtgcaggctaggctgtcttggggaaataaacattaaaacttaaagcaaaaaaaaaaaaaaggggggcccgttttaaagaatccttgggggggccaaattttacgcgggctggcaaggtaatatttttttccttatagggggccgttttaaaccctccttgggaatttttggaaagaaccttttttttgggggggggacatattggcccaacctccctacagagattaaaggctttaggg

SEQ ID NO: 8352 - DNA, 415 bp, Homo sapiens
  misc_feature (1)...(415): n = A,T,C or G
aaggctgacctgtcagggatcacaggggccaggaacctagcagtctcccaggtggtccataaggctgtgcttgatgtatttgaggagggcacagaagcatctgctgccacagcagtcaaaatcaccctcctttctgcattagtggagacaaggaccattgtgcgtttcaacaggcccttcctgatgatcattgtccctacagacacccagaacatcttcttcatgagcaaagtcaccaatcccaagcaagcctagagcttgccatcaagcagtggggctctcagtaaggaacttggaatgcaagctggatgcctgggtctctgggcacagcctggcccctgtgcaccgagtggccatggcatgtgtggccctgtctgcttatccttggaaggtgacagcgattccctgtgtagcn

SEQ ID NO: 8353 - DNA, 404 bp, Homo sapiens
cggacgcgtggggtcttctagtatattaaagtgctatctgacgttgttatcctgtttttgcaaaaaaaaaaaaaaaaaaaggttacctccggcccttggttttaaaaacccaaaaaaatttttttaattataaaccggagggttaattggggaccttaaaatttgggaacccccaaaggtgggggggggttttttttttttaaaaccccccccaaaaaaagggcggggaattgccccctggaaccggggggggccttttcaattttggaaaaaaaatggtttaacccgccctttttgggggtaaacccggaggaaaaaaagccctttttaaaaccttttggaaaaaaaaagggaaacccccgaatttttcccttgtttttatgggggggacctttttggggaaa

SEQ ID NO: 8354 - DNA, 466 bp, Homo sapiens
  misc_feature (1)...(466): n = A,T,C or G
gggaaactgatcgcctgcggaaccactgaggaatntccggancgacccacgcgtccgcggacgcgtgggtgaggctccagagttcatggaaatgagtgttgagcaggaaattctggtgactggtatcaaggttgtcgatctgctagctccctatgccaagggtggcaaaattgggctttttggtggtgctggagttggcaagactgtactgatcatggagttaatcaacaatgtcgccaaagcccatggtggttactctgtgtttgctggtgttggtgagaggacccgtgaaggcaatgatttataccatgaaatgattgaatctggtgttatcaacttaaaagatgccacctctaaggtagcgctggtatatggtcaaatgaatgaaccacctggtgctcgtgcccgggtagctctgactgggctgactgtggctgaatacttcacagaccaagaaggtcaagaa

SEQ ID NO: 8355 - DNA, 409 bp, Homo sapiens
agcaaaggcccctataaggctcattgaacctgtgacttgacagagtaggataagtacctgcgatggcaggagaggaatgttctaggctgtgcctacgacagctggagtgtggagagacacatgacttgcgcagacaaacctggggtcaaatcctggctcctcccctgcttcctagctgtgtgacgcagggcacacagtcaacctctctgtgctgccgtgtcttcacctcagttaacagccactgtctcgtcatgatgttgtgtaagatgaggtatctggaaacactcctcactggaccccgttttctgtgagggctcagaaagtgtgtgctgattggctgatacgagcgatacctggatcttatttctgagcaggtgaacatggccttctgtttaatatacgtgcaggc

SEQ ID NO: 8356 - DNA, 431 bp, Homo sapiens
  misc_feature (1)...(431): n = A,T,C or G
cccacgcgtccganaatgggctatacggagacatctcttcaagaacatgttacttctgaacatgcagaaacatcaacagaagtgatttgtccaatatgtgcagcgttacctggaggcgatcctaatcatgtcacggatgactttgcagctcatcttacacttgaacacagagcccctagagatttagatgaatcgagtggcgttcgacatgtacgtagaatgtttcaccctggccggggattatgaggtcctcgtgctcgtaaatcaaacatgcactttactagcaattctactggtggactttcttcttctcagagttcatattctccaagcaataaggaagccatggatcctataactgagcttttatctcaattatcaagagggaaacgttctgcaggaggacagcttaattcctcttgcccttcccn

SEQ ID NO: 8357 - DNA, 422 bp, Homo sapiens
gagcccactcagcagttttcttacctttgcctgccctgcctttcatggaataagaaaggcaacgttttgcagcttccaaatttctgaagaaactaatctcagattggcagttaaagtcaaaatgttgccaaatatttattccttttgcctaagtttggctacccggttcaattgctttttatttttaatgtcttgactcttcagagttcgtacctcaaaagaacaatgagaacatttgctttgctttctgctgaatccctaatctcaacaatctatacctggactgtccagttctcctcctgtgctatcttctcttctatccaagtagaatgtatgccaggagctccttccctctagcaatttctactaaaatgtccaagtagaatgtttccttttacaatcaaattactgtatttattaat

SEQ ID NO: 8358 - DNA, 502 bp, Homo sapiens
  misc_feature (1)...(502): n = A,T,C or G
tgtggggnnagggnnaattgacncccctagatagatcgccgtgagcacgggccgagacacgcgtgcgcggcccgngtagcacggntggaggagtggctctggccgtcgtggtcctgtctttggccctgggtatgtcggggcgctgggtgctggcgtggtaccgtgcgcggcgggcggtcacgctgcactccgcgcctgctgtgttgactgccgactgctccagacccgccgtggccccggacctcttctggggaacctaccgccctcacgtctacttcggcatgaagacccgcagcccgaagcccctcctcaccggactgatgtgggcgcagcagggcaccaccccggggactcctaagctcaggtacacgtgtgagcagggggacggagtgggtccctatggctgggagttccacgacggcctctccttcgggcgccaacacatgcaagatggggccttaaggctcaccactgagttcgtcaagaggcctgggggtcagca

SEQ ID NO: 8359 - DNA, 423 bp, Homo sapiens
  misc_feature (1)...(423): n = A,T,C or G
caggtggtcaaggtgctgcacgatgcccagcagcagtgccgagacggccacccggttgtggtcaacatcctcattgggaggacggacttccgcgatggctccattgctgtatagggccttgtgggtcaggacgcttggctgccttcctgcccctggactgtgtccagctggtttggagtctcatcattgcttgccctgggcctatcccatgaggcccagtgactccacaacctccctgaggaggggatggaggggtcaaatctcagagaggctctcttgtgagctcttggaccctcctcttcacggacccaactgtgccgtttgtcccctctcttatggagactgaataaaccacctctggcccatgtaggcccaagtnnnnnnaangannnnntnnnnnnnnnaannanaaaaaaaattant

SEQ ID NO: 8360 - DNA, 425 bp, Homo sapiens
tatgaagtatataatggtttcaaagattcaaaattgacattgctttactgtcaaaataattttatggctcactatgaatctattatactgtattaagagtgaaaattgtcttcttctgtgctggagatgttttagagttaacaatgatatatggataatgccggtgagaataagagagtcataaaccttaagtaagcaacagcataacaaggtccaagatacctaaaagagatttcaagagatttaattaatcatgaatgtgtaacacagtgccttcaataaatggtatagcaaatgttttgacatgaaaaaaggacaatttcaaaaaaaaaaaaaaaaggggcgccctttttaaagaatccctggggggcccaaagttaacccgggattgcaaggtaatacttttttccttatagggggccgtt

SEQ ID NO: 8361 - DNA, 409 bp, Homo sapiens
  misc_feature (1)...(409): n = A,T,C or G
atgagaaccaccaagtgcagggaggaatcatggacaaagccagttatagtgcagattcttagttcacactctgaatatttatagttaagggagtgtgggacaaggaaatgactttattgcttaatttctgcctttcccccctcacacatgcacttttgggcctttttttatagctggaaaaaacaaaataccaccctacaaacctgtatttaaaaagaaacagaaatgaccacgtgaaatttgcctctgtccaaacatttcatccgtgtgtatgtgtatgtgtgtgagtgtgtgaagccgccagttcatctttttatatggggttgttgtctcattttggtctgttttggacccctccctcgtgggcttgtgctcgggatcaaacctttctggcctgttatgattctan

SEQ ID NO: 8362 - DNA, 495 bp, Homo sapiens
  misc_feature (1)...(495): n = A,T,C or G
aggatgtgcccngcngttcncccaactgataccctgcgtttagagcccgtatgcccgggncgacccacgcgggcgcaacaccagcagcttgccttagaaaaggagaaaggaatttcttttcccgcccgaacatgaagaaaaacgaccggaccctgtagagagaacacagggtgaatgtttcggctcgtgtgagcccagcctgtggtcttctccgtacccgcaacgtggtcatctgtgcccgtgacgtcacctgtgcccgtgcgtggcgtccccgtctccgttggggccattagaatgaggcagacaccaggccactctagaagccgagccgtcacacctcangcgtgtgcggggcggggacggggggtctcctggttacattttggattaaacctgtttcccggttatgtgtagggaacagcagagtgatgcacgaactttgaacattcgttatggggaaaacatcctttaacttcggggtcgtctgccagagcn

SEQ ID NO: 8363 - DNA, 424 bp, Homo sapiens
  misc_feature (1)...(424): n = A,T,C or G
gccgggccgcgagacgggaaggccctgggcaagaacgctgagaaacgggtgacaatgaagaacaagaaaaattactgaagaaaagctgtacgttatatgttggaaatctttctttttacacaactgaagaacaaatctatgaactcttcagcaaaagtggtgacataaagaaaatcattatgggtctggataaaatgaagaaaacagcatgtggattctgttttgtggaatattactcacgcgcagatgcggaaaacgccatgcggtacataaatgggacgcgtctggatgaccgaatcattcgcacagactgggacgcaggctttaaggagggcaggcaatacggccgtgggcgatctgggggccaggttcgggatgagtatcggcaggactacgatgctgggagaggaggctatggaaaacn

SEQ ID NO: 8364 - DNA, 424 bp, Homo sapiens
cggacgcgtgggcggacgcgtgggctcgcgctggtaccaggcccgcgacctcatgctcatgagccacttgcaggacaacattcagcatgcagacccgccagtgcagatcctttacaaccgcaccatggtgcagctgggcatctgtgccttctgccaaggcctgaccaaggacgcacacaacgccctgctggacatccagtcgagtggccgagccaaggagcttctgggccagggcctgctgctgcgcagcctgcaggagcgcaaccaggagcaggagaaggtggagcggcgccgtcaggtccccttccacctgcacatcaacctggagctgctggagtgtgtctacctggtgtctgccatgctcctggagatcccctacatggccgcccatgagagcgatgcccgccgacgcatgatcagcaag

SEQ ID NO: 8365 - DNA, 423 bp, Homo sapiens
  misc_feature (1)...(423): n = A,T,C or G
cggacgcgtggggcaggaccataatggggtactaggcagagacctagcctcctggccatgcacctctgagctgtgtggactgattcttttttgcttaagcatgcttttgttttcatttcatttatttatttattttcagacacagtcttgctctgttgtccaggctggactgcagtggtgtgatttcaatctcagctcactgcaacctctgcctccccggttcaagtgagtcttctgcctcagcctcctgagtagctgaaactacaggcatgtgccaccacgccaggctaatttttgtatttttagtagagatagggtttcaccatattggccaggctggtcttgaactcctgaccttgtgatccacccgcctcagcctcccaaagtgctgggattacaggtgtgagccaccgcgcccggtgn

SEQ ID NO: 8366 - DNA, 504 bp, Homo sapiens
  misc_feature (1)...(504): n = A,T,C or G
cgccccccccccgcccccaattgatcgccntcggtagacgcccgtaaggaccggcncgacccacgcgtccgggggcccaataatgtggaatgcacaacttctggaagatggtcacctactccaccaacctgcaaaggcatagcatcacttcctactccaggggtgcaatgtccagccctcaccactcctgggcagggaaccatgtactgtaggcatcatccgggaacctttggttttaataccacttgttactttggctgcaacgctggattcacactcataggagacagcactctcagctgcagaccttcaggacaatggacagcagtaactccagcatgcagagctgtgaaatgctcagaactacatgttaataagccaatagcgatgaactgctccaacctctggggaaacttcagttatggatcaatctgctctttccattgtctagagggccagttacttaatggctctgcacaaacagcatgccaagagaatggccac

SEQ ID NO: 8367 - DNA, 400 bp, Homo sapiens
  misc_feature (1)...(400): n = A,T,C or G
taggagtcctcggacgtgggatattgtgggtatctatggcttggatggcttgtggaatgtcctcagcatcctctcgtcccaacccaaccttccttcttcctcattgtggacttggatttattctcaggctaggagtctccaaaactccgtgaaaccttattgctgctgggtgtggagtggagagtgacaggaatgtgggggacggtgattgttggctccagttactaatgtttaagcagaaaaaccactttcttgttgaaaatatccctgaaaaggtcgctgctgctttgaggaggcgtgactttttcctggtggagtgtgacggaggcatggggcctgtgctcccaggctcgggggagccccctctgcacacggngagggaggaacttggggacatcat

SEQ ID NO: 8368 - DNA, 412 bp, Homo sapiens
acccacgcgtccgcataggtccagtttttctggaggttgaagtaaccaactctgacacctgactgtaattagtccatttcctctcaacatccattattttcaggctctgagactcaagagggatgtgaaatactgggagatacttagaagggagtcaccacactaataaaatagttgttagacttatgagaaaggtgagagaactcaggttggagtagaatgagaattagaacactcttcaggttcctgatggtttttatgtgaaagacagtgagcagctggttattaccactgaggcaataaagagatactgtgggctttagcagaaacaccagtatatgtatttagtttttaaaataaggctttaaaaggaatgttttatttaattgcctacacagaatgaataaagtga

SEQ ID NO: 8369 - DNA, 413 bp, Homo sapiens
  misc_feature (1)...(413): n = A,T,C or G
cgcagcgggtgcgggcgccgacgggcgagagccagcgagcgagcgagcgagccgagccgagcctcccgccgtcgccatgggccagaacgacctgatgggcacggccgaggacttcgccgaccagttcctccgtgtcacaaagcagtacctgccccacgtggcgcgcctctgtctgatcagcaccttcctggaggacggcatccgtatgtggttccagtggagcgagcagcgcgactacatcgacaccacctggaactgcggctacctgctggcctcgtccttcgtcttcctcaacttgctgggacagctgactggctgcgtcctggtgttgagcaggaacttcgtgcagtacgcctgcttcgggctctttggaatcatagctctgcagacgattgcctacagcattntatggg

SEQ ID NO: 8370 - DNA, 433 bp, Homo sapiens
aaagaaatttatgcctagcggttggaggcctatagaatgggaaagcagtatgttcctatacggctatttttatttttttggctggagaaagctacaggaagcagccttgtaatcaattgctttggcatacctgagcccttgcaggatgcacattggctatttcgtactcacacaaagaatattacttagtacaatactgacaccaggaaagctgaatctatataagatagtaaaagatgctaagcaacaaaactggctatattccttcatttatttattcatttatttctaaataaatgagcattgattaagcagccacactgtgctaggtaatgggaattacagtgtcattgatttcactagggtggcaccaggataaatatcttgtgagctcagagatctagatcaccgaaaatgaaggccacagtgcaga

SEQ ID NO: 8371 - DNA, 423 bp, Homo sapiens
  misc_feature (1)...(423): n = A,T,C or G
gcatggccacaccccaccccacttctcccccaaaaccagtttccctgccccctgacgctgctgattcgggctgtggcctccacgtatttatgcagtacagtctgcctgacgccagccctgcctctgggccctgggggctgggctgtagaagagttgttggggaaggagggagctgaggagggggcatctcccaacttctcccttttggaccctgccgaagctccctgcctttaataaactggccaagggtggannataaaaatnaactttaataaaaaaaaaaaaaaaaaaaaaaaggggggcccttttaaaatattccttggggggcccaaatttaacgggggcgggaaattatattctttttcctttatggggggggataaaaaccccccgggggaattttggggaagcaccctcttttgg

SEQ ID NO: 8372 - DNA, 397 bp, Homo sapiens
agtgatcctcccacctcagcctcctgagtagctgggaccataggctcacaacaccacacctggcaaatttgattttttttttttttccaaaaacggggtctcgcaacattgcccaaacttcttttgggtaagtaaaaaaagctttctcaccggcaaaaaaaaaaaaaaaagggggggcccttttaaaaaaaccctgggggggcccaaatttaccgggggaaggaaagaaaaaattttttcccttaaggggggccttataaaaaccaccttgggatttttggaaaaaaacccttctttgggggggggaacaattgggcccaccccccccccaaaaattaaagccctaagggaaaaaaaaaatttttaaggggaaaaggggcaaaaccacccgcctacg

SEQ ID NO: 8373 - DNA, 410 bp, Homo sapiens
  misc_feature (1)...(410): n = A,T,C or G
ttcgtggggacaccagaagtcaaccagaccaccttataccagcgttatgagatcaagatgaccaagatgtataaagggttccaagccttaggggatgccgctgacatccggttcgtctacacccccgccatggagagtgtctgcggatacttccacaggtcccacaaccgcagcgaggagtttctcattgctggtgaggcaccgtccccgcgccctgtgccacaccaaccagtccctggggcgcggcctagcaaccacgagggggcgaggctctgatgggaatggtcccactggaaatggggaccaccccaatttcagtctatcagaaggccgggcctttggcagcttggcagctcagccaatcacaagctgcttgtcggtccccgccccgcctttctccttaggaaaan

SEQ ID NO: 8374 - DNA, 415 bp, Homo sapiens
atcactggcagcaggacgtgaccatggagaagctgttgtgtttcttggtcttgaccagcctctctcatgcttttggccagacagacatgtcgaggaaggcttttgtgtttcccaaagagtcggatacttcctatgtatccctcaaagcaccgttaacgaagcctctcaaagccttcactgtgtgcctccacttctacacggaactgtcctcgacccatgagattaacaccatctatcttggcgggcccttcagtcctaatgtcctgaactggcgggcactgaagtatgaagtgcaaggcgaagtgttcaccaaaccccagctgtggccctgaggcccagctgtgggtcctgaagtgctttcttaattttatggctcttctgggaaactcctccccttttccacacgaaccttgtg

SEQ ID NO: 8375 - DNA, 401 bp, Homo sapiens
  misc_feature (1)...(401): n = A,T,C or G
tcgcggacgcgtcctccccttttccgcgagaggaacgttttgctgcttcttcccgttggctgacgatgtgacgccgacgaaacacgctatcgtgcacaccctggngcatctcaagatccccacaaacgtgggcaaggcctgctttgggcccaccaaactgagccccatctccgtcctctacaaggatgacatgggggtgcccaccctcaagtaccattacaagggcatgagcgtgccagagtgtgggtgcaggtagtatctgcctgcggggctggggaggcaagccaaaggggctccacatgagaggtcctgcatgcccctgggcacaacaaggactgattcaatctgcatgccagcctggaggaggaaagggagcctgctctccctccccacaccccacg

SEQ ID NO: 8376 - DNA, 389 bp, Homo sapiens
atcctttattcagaataccacaaagaaaggacattctgctcaaggctccctgccgtgttgaagagttctgactgcacaaaccagcttctggtttcttctggaatgaataccctcatatctgtcctgatgtgatatgtctgagactgaatgcgggaggttcaatgtgaagctgtgtgtggtgtcaaagtttcaggaaggattttacccttttgttcttccccctgtccccaacccactctcaccccgcaacccatcagtattttagttatttggcctctactccagtaaacctgattgggtttgttcactctctgaatgattattagccagacttcaaaattattttatagcccaaattataacatctattgtattatttagacttttaa

SEQ ID NO: 8377 - DNA, 504 bp, Homo sapiens
  misc_feature (1)...(504): n = A,T,C or G
ccccccccccgnnnnnnattgaacgcctgcgatagatcgcgttaggcacgggccgacccacgcgtccgccactgggcatctctttcaaggtttctgctgggtttctgaactgctgggtttctgcttgctcctctggagatgcagcgtctgttgactccagtgaagcgcattctgcaactgacaagagcggtgcaggaaacctccctcacacctgctcgcctgctcccagtagcccaccaaaggttttctacagcctctgctgtccccctggccaaaacagatacttggccaaaggacgtgggcatcctggccctggaggtctacttcccagcccaatatgtggaccaaactgacctggagaagtataacaatgtggaagcaggaaagtatacagtgggcttgggccagacccgtatgggcttctgctcagtccaagaggacatcaactccctgtgcctgacggtggtgcaacggctgatggagcgcatacagctcccatgggan

SEQ ID NO: 8378 - DNA, 495 bp, Homo sapiens
  misc_feature (1)...(495): n = A,T,C or G
agagtgtcnnncggccggccaatgaaaccttcgactgatacgcgttcggaaccggcccggaanncccggggcgacccacgcggccggatcaatcatgacgacttacagggacaaaggggcaaagcctgagagaggccgattcctccacttccactctgtgaccttctgggttggcaacgcggagcaagccgcgtcattctactgcagcaagatgggctttgaacctctagcctacaggggcctggagaccggttcccgggaggtggtcagccatgtaatcaaacaagggaagattgtgtttgtcctctcctcagcgctcaacccctggaacaaagagatgggcgatcacctggtgaaacacggtgactgagtgaaggacattgcgttcgaggtggaagattgtgactacatcgtgcagaaagcacgggaacggggcgccaaaatcatgcgggagccctgggtagagcaagacaagtttgggaaggtgaagtttgc

SEQ ID NO: 8379 - DNA, 414 bp, Homo sapiens
cttgctagaggagaggaacacaagctgatttggagattctagccagtaaaggcctttctgagccatgtcatgacctgcatgaagttagggagggagcaggcaggcatcccaggaaagagcattccaggcagagaaaacagcaagtacaagagcctgaaagctcaaccctggctcaacatcttaatgaccctggaaactctcagaaatgcttcagggccagacctcaccctagataggtttaattaacatctctactctctgaaggtgtgtgtgtgtgtgtgtgtgtgtgtgtgtgtgtaacctatgtaaatcaccaggtgattctatagtgcgagtaactaggattgtaaactactgggtaagaagaacagcaaagagtcagtgtggctgaagcccagtaagctagcgatgcag

SEQ ID NO: 8380 - DNA, 407 bp, Homo sapiens
cggacgcgtggggaagaaatgaattacatggctgccgagggcgagggcgaggtgtgtgtgaaagggccaaatgtatttcagggctacttgaaggacccagcgaaaacagcagaagctttggacaaagacggctggttacacacaggggacattggaaaatggttaccaaatggcaccttgaaaattatcgaccggaaaaagcacatatttaagctggcacaaggagaatacatagcccctgaaaagattgaaaatatctacatgcgaagtgagcctgttgctcaggtgtttgtccacggagaaagcctgcaggcatttctcattgcaattgtggtaccagatgttgagacattatgttcctgggcccaaaagagaggatttgaagggtcgtttgaggaactgtgcag

SEQ ID NO: 8381 - DNA, 467 bp, Homo sapiens
  misc_feature (1)...(467): n = A,T,C or G
tgcaaagcncctcggaagctttgtgacagcctcgaaaccccgncgacccacgcgtccgcccacgcgtccgattttctatccaagatgtggtacatcctcttaccctgcaagttcagagacccctgggctctgtgacggggtcagatgcctcctgggtctcacaactgctgtggtcacttttcgtccctttcacggtgtatcaagtaaggtggcttcgtcctgttcatcgccaactatgggaagcgaatgaggagtttgcactccgtgtacaacagctggtggccaaggaattgggccagacagggacacggctcactccagctgacaaagcagagcacatgaagcgacaaagacaccccagattgcgcccccagtcagcccagtcttctttccctccctcccctggtccttctcctgatgtgcaactggcaactctggctcagagagtcaaggaagttttgccccag

SEQ ID NO: 8382 - DNA, 370 bp, Homo sapiens
cacctacggaacctctcagaagacagagcgagagctgctggatgtggtgcataagaacttcgacctccggccgggcgtcattgtcagggatttggacttgaagaagcccatctaccagaagacagcatgctatggccatttcggaagaagcgagttcccatgggaggttcccaggaagcttgtattttagagccagggggagctgggcctggtctcaccctggaggcacctggtggccatgctcctcttccccagacgcctggctgctgatcgccttccccacccaccaaccctcagggcaaagccaggtccctctcatttagcctgtcctgtcatcatcatggccagctggaggcaggggctttctggg

SEQ ID NO: 8383 - DNA, 391 bp, Homo sapiens
atggattgtagggagtagggtacaatacagtctgttctcctccagctccttctttctgcaacatggggaagaacaaactccttcatccaagtctggttcttctcctcttggtcctcctgcccacagacgcctcagtctctggaaaaccgcagtatatggttctggtcccctccctgctccacactgagaccactgagaagggctgtgtccttctgagctacctgaatgagacagtgactgtaagtgcttccttggagtctgtcaggggaaacaggagcctcttcactgacctggaggcggagaatgacgtactccactgtgtcgccttcgctgtcccaaagtcttcatccaatgaggaggtaatgttcctcactgtccaagtgaaaggacc

SEQ ID NO: 8384 - DNA, 444 bp, Homo sapiens
  misc_feature (1)...(444): n = A,T,C or G
cgctacgcccaactgagaccctgcattgaccgctctgaaaacccgggncgacccacgcgtccgctttgaggctctgtggctgtggggctgagtggcatcatggcggctcagaaagatctctgggacgccattgtgattggggcggggatccagggctgcttcactgcataccacctggccaaacacaggaagaggatcctcctgctggagcagttctttctaccacactcccgaggaagctcccatggacaaagccggataatccgaaaggcgtacctggaagacttttacacccggatgatgcatgagtgctatcagatatgggcccagctggagcacgaggctggaacccaattgcacaggcagactggattactgctgctgggaatgaaagagaatcaagaattaaagacaatccaggccaatctgtcgaggcagagggta

SEQ ID NO: 8385 - DNA, 369 bp, Homo sapiens
gacgtcatttccgccgagtccctgacctgctgctaggatcgcgacgggaactggagcccgaggtccccgcgcggcccgggcctggcgccctgaggggaagagcggcccggcccgagggtgctggggtggagagttttactccaatacctttcctagccatgacggacgggatcctagggaaggcagccacaatggagatccctatccacgggaacggcgaagccaggcagcttcctgaagatgatgggctggagcaggacctccagcaggtgatggtgtcaggacccaacctcaatgaaaccagcattgtgtctggtggctatgggggctctggtgatggactcatccccacagcaccactccttctgg

SEQ ID NO: 8386 - DNA, 456 bp, Homo sapiens
  misc_feature (1)...(456): n = A,T,C or G
gaaaccgacccgganancaacaactgagaccatgcatngaccgccctgaaancccgggncgacccacgcgtccgcagaccaagctgctggtgtcagacagcagtcggccaggctggttgaacttcagggaactcctccgggaggcttctacagagcacaactgcatgaggacaaagagtcgagacccgctggccatctactttaccagcggaaccaccggggcccccaagatggtcgagcactcccagagcagctacggactgggttttgtggccagcggaagacggtgggtggccttgaccgaatctgacatcttctggaacacgactgacactggctgggtgaaggcagcctggactctcttctctgcctggcctaatggatcttgcatttttgtgcatgagctgccccgagttgatgccaaagttatcctgaatactctctccaaattcccgg

SEQ ID NO: 8387 - DNA, 408 bp, Homo sapiens
actagttctagtttctggtggtctgttggcaggctggccagtccaggctgccgtggggccgccgcctgtttcaagcagtcgtgcctgtgtccatgcgctcagggccatgctgaggcctgggccgctgccacgttggagaagcccgtgtgagaagtgaatgctgggactcagccttcagacagagaggactgtagggagggcggcaggggcctggagatcctcctgcagaccacgcccgtcctgcctgtggcgccgtctccaggggctgcttcctcctggaaattgacgaggggtgtcttgggcagagctggctctgagcgcctccatccaaggccaggttctccgttagctcctgtggccccaccctgggccctgggctggaatcaggaatattttccaaagagtgag

SEQ ID NO: 8388 - DNA, 465 bp, Homo sapiens
  misc_feature (1)...(465): n = A,T,C or G
cgccaactgagagccctgcggaaccgtgatgaccntccggancgacccacgcgttcgggccatgttcgaggaggcctacagcaactactgcattaggcaggcccagcagtttggctgcgggccacgcccaggccggctccgggggagctctctccctcagacgggccaaaaaccagtagcgaggtcgtggtgatgctctttttaactcctttgcccaataaggggggtggctgcctggagccccgtagccagcgctttccacggtttctgttgctaaatggttgtagggtgagaagtgcaagaatgaagatgaagccccactgctcggtcagtctgcctccgtgtgtcctctgaaataagcagatgaagatgaaagggcaactttgttttcttctttttcctgatgtgaatgttaagcagaagggagagagtccttactcccttccaatctctgttcagtgcaan

SEQ ID NO: 8389 - DNA, 413 bp, Homo sapiens
  misc_feature (1)...(413): n = A,T,C or G
aacctgttacgagatgtctcttgacgtcgatgctaaaagtgttagaatctttacatcactagagtcattgaatatgctgtagtattgaatagtgccctgactagggggaggatttggatgtgctgcatttcaagccgtgtataatcatcaaaatggggggcttgagttctttagctacttgaatccgatttacttctgttaagtgatgcttttctaaccgttttctggatggattttgtattcactatattgtagcttgtaatttgtataaatgtaccatctgatgtcattaaaaaaagtgtttgtagtgctaaaaaaaaaaaaaaaaaaaaaaaaaaacaaaaaaaaaaaaaaaaaaaaaaaaaaaaaaaaaaanannnnnnnngggggggctgttctcttacacccccctc

SEQ ID NO: 8390 - DNA, 415 bp, Homo sapiens
cgttcgtgcgtcctagttccagtacagcgtggagggtttaggcagcgtgttctgattctttgcgggacggcgagcgcatttgtgctttgcccgccgcggcctatgaggccttttgaggccgcgtagtcggtgtttttgaactgactctacagcttctgccaggccgtgcggcgccctgacccggcctcaccatgttggtgctgtttgaaacgtctgtgggttacgccatctttaaggttctaaatgagaagaaacttcaagaggttgatagtttatggaaagaatttgaaactccagagaaagcaaacaaaatagtaaagctaaaacattttgagaaatttcaggatacagcagaagcattagcagcattcacagctctgatggagggcaaaatcaataagcagctgaaaaaagt

SEQ ID NO: 8391 - DNA, 416 bp, Homo sapiens
gcatagtgctgacatatattcagagtgttgtagttttaaggttagcgtgacttcagttttgactaaggatgacactaattgttagctgttttgaaattatatatatataaatatatataaatatataaatatatgccagtcttggctgaaatgttttatttaccatagttttatatctgtgtggtgttttgtaccggcacgggatatggaacgaaaactgctttgtaatgcagtttgtgacattaatagtattgtaaagttacattttaaaataaacaaaaaactgttctggactgcaaatctgcacacacaacgaacagttgcatttcagagagttctctcaatttgtaagttatttttttttaataaagatttttgtttcctaaaaatgcaaaaaaaaaaaaaaaaaaaaaaaa

SEQ ID NO: 8392 - DNA, 420 bp, Homo sapiens
  misc_feature (1)...(420): n = A,T,C or G
aagcacttccctagtgcccttcttttataatcagcctgggatcagtctccagttctaaatgggcacatggagatttcagagccagtacctggtccccacgtaggcctggtcacatcataccacaacccagcatcttccttattctctggttatgtcccagatgttttaaaaaaaatatggtgaagagagggtgcccagctagtgttaaccacagccaccactcttggagacatgactcaaaattaagacctgctaatttggtttttagggtcatctgccaaggactattttgactggaaggagtcatggctcaagtgctatgcccttctttgtcacccccagccaggacatttcctcctccacttccctgggtcaacataacactagtgtcaggcacggnggtctttgcaatcaatcttn

SEQ ID NO: 8393 - DNA, 420 bp, Homo sapiens
tcagcataatataacagtaacttccaaacctcaaattctattatggcctgagcacagctgatatctagccgagagtaactcttctgcctccatgtctgtcacttataattcaggttctgctgttggcttcagaacatgagcagaagaatcgctttatgctagttattgcattcatggttgaaactcaacttagggaaagggttccaatgtattaagcaatgggctgcttctccccaatcctccctaacaattcgttgtgtggacttctcatctaaaaggttagtggcttttgcttgggatcagagctctctattgatgttcttggctggctccagacacattcctgttgcgttaagacttgaaagacttgcatatgtgtgatgttcaggcacagcgatgctgactgctatgctactattt

SEQ ID NO: 8394 - DNA, 474 bp, Homo sapiens
  misc_feature (1)...(474): n = A,T,C or G
ttttaattgatcgccatagatcgcgttcggaaccgccggcgcgaccacgcgtgcggaaaaaaccttttactatatgaaactttacaacacttgtgaaagcaactcaatttggtttatgcacagtgtaatatttctccaagtatcatccaaaattccccacagacaaggctttcgtcctcattaggtgttggcctcagcctaaccctctaggactgttctattaaattgctgccagaattttacatccagttacctccactttctagaacatattctttactaatgttattgaaaccaatttctacttcatactgatgtttttggaaacagcaattaaagtttttcttccatgagttgagtccttannanaaaaaaaaaaaaaaaaaaaaaaaaaaaaaaaaaaaaaaaaaaaaaaaaaaannnnnnaanannnnnnnnnnnnnnnnnnnnnnnnnnnnnnnaaaaaccccctcc

SEQ ID NO: 8395 - DNA, 412 bp, Homo sapiens
  misc_feature (1)...(412): n = A,T,C or G
gcgctatgagcttcgaaataaggaacgcatctctgtagcagctgcctccaaactgcttgccaacatggtgtatcagtacaaaggcatggggctgtccatgggcaccatgatctgtggctgggataagagaggccctggcctctactacgtggacagtgaagggaaccggatttcaggggccaccttctctgtaggttctggctctgtgtatgcatatggggtcatggatcggggctattcctatgacctggaagtggagcaggcctatgatctggcccgtcgagccatctaccaagccacctacagagatgcctactcaggaggtgcagtcaacctctaccacgtgcgggaggatggctggatccgagtctccagtgacaatgtggctgatctacatgagaagtatagtggn

SEQ ID NO: 8396 - DNA, 417 bp, Homo sapiens
ggcaagactgcttcaagaaaaagaaagaaagaaatgccatattcctctttgctagcgagctgtttttcaaggacaaatacaaaaaatggaagtaatcttcacacagaacccttattagccttttctctgcctcaagaatcttgacaatgtgctgaagttgctatggctttgtttgcgtccttgccaggtcctgcattaaatgaaaataaagagccacaaaaaaaaaaaaaaggggcgcccgtttaaaagaacccttggggggcccaaactttacccgggctggcaaggtaatatttttttccttatggggagccgtattataacctacttgggaattttggaaaagaacccttattttggggggggaacatattgggccaacctccttacaaaaattaaaggctttagggaaaataa

SEQ ID NO: 8397 - DNA, 414 bp, Homo sapiens
tcctttctacgatatatatgtattgcatttcccttttttcaatctgtagcttgccttttcgctcttttaatggtgcttattcatgaatggagattctctaacttttttttttctttttgagacaagatctcactctgttgcccaggctggagtgcagtggcacaatcacagctgaccgcaaccttgacctcccaaggctcaggtgatcctcctgcctcagcccccaggtagctgagacctacaggtgagcaccaccacactcagctcttttctatatttttagtaaagatggggttttgccacattgcataggctggtctggaattcctaggctcaggtgagacatctgcctcggcctcccaaagtgttgggattacaggcatgagccactgcacccagcctgagattcttaat

SEQ ID NO: 8398 - DNA, 410 bp, Homo sapiens
  misc_feature (1)...(410): n = A,T,C or G
tttggttcctctctggtggctctttgggctggtattggtggctttccttgtggcagaggatgtctcaaacttcagatgggaggaaagagagcaggactcacaggttggaagagaatcacctgggaaaataccagaaaatgagggccgctttgagtcccccagagatgtcatcagagctcctctgtcctgcttctgaatgtgctgatcatttgaggaataaaattatttttccccacnaaaaaaaaaaaaaaaaaacaaaaaaaangggggggggcctttttaagggactcctgggggggcccaaattaacggggggggggaaagtttttttttttttctttagggggggggttattaaaacccgcgggggtttttgggggaagcccctttttttgggggggggacaatag

SEQ ID NO: 8399 - DNA, 417 bp, Homo sapiens
  misc_feature (1)...(417): n = A,T,C or G
taacaattgtgtagcctttttgtataaaatagacaaatagaaaatggtccaattagtttcctttttaatatgcttaaaataagcaggtggatctatttcatgtttttgatcaaaaactatttgggatatgtatgggtagggtaaatcagtaagaggtgttatttggaaccttgttttggacagtttaccagttgccttttatcccaaagttgttgtaacctgctgtgatacgatgcttcaagagaaaatgcggttataaaaaatggttcagaattaaacttttaattccttannaaaaaaaaaaaaaaaaaaaaaaaaaaaaaaaaaaaaaaaaaaaaaaaaaaaaaannnnggggggnnnnnnnnaaaaaannnnnnnnnngnggnnncncnncnnnnaaaaaaaaaaaaananaa

SEQ ID NO: 8400 - DNA, 420 bp, Homo sapiens
  misc_feature (1)...(420): n = A,T,C or G
aaagtcagcaactgatgtgtttgaaaagcatccttgtctttatatcctaatgtttggatgtgtctttgctaaagtctcacaaaaattagtggtagctcacatgaccaaaagtgaactatatcttcaagacactgtctttttggggccaggtcttttgtttttagaccagtactttaataactttatagacgaatatgttgttctatggatggcaatggtgatttcttcatttgatatggngatatactttagtgctttgtgcctgcaaatttcaagacaccttcatctaaatatattcaagactgcatgtcatcaagcacctgaacaggttcaagttctttcttcaaagagtcatcagaataacatggattgaagagacttccgaacacttgctatctcttgctgctgctgtttcatggn

SEQ ID NO: 8401 - DNA, 530 bp, Homo sapiens
  misc_feature (1)...(530): n = A,T,C or G
cacaccccaacaatgattccggaattaacttgaatcaaatttactagcggcaagacaggaagcccggacaccccattgaantcttcgtttgacacnctaanaaccgcgncgacccacgcgngcggnggacacaagaggggnggaacattcctgcaaaggttttcaatatatgttgatgtctcgatataggaatgaaattacgtctttggaacaacttaaataagtcaaatatacttggagctttaaaaattaaaaggagagagattcgagcaccttttctgctgccatgacaaccatgcaaggaatggaacaggccatgccaggggctggccctggtgtgccccagctgggaaacatggctgtcatacattcacatctgtggaaaggattgcaagagaagttcttgaagggagaacccaaagtccttggggttgtgcagattctgactgccctgatgagccttagcatgggaataacaatgatgtgtatggcatctaatacttatggaagtaaccctatttccgtgtatt

SEQ ID NO: 8402 - DNA, 431 bp, Homo sapiens
  misc_feature (1)...(431): n = A,T,C or G
gcctggtgggtcagggggagtctttgcaccaaagatgtcctgactttgcccccttgcccatcagccatttgccatcaccccaaacaactcancttcggggccggtgaggggaggggcctcccccagcacagatgaggagcagctggggtaggctgtctgtgccatggccccccactcccccttcccttggagggagaggtggcaggaatacttcacctttcctctccctcaagggcaggtggtggaggggcgcccagggtcgtctttgtgtatggggagaagcgctgggtgcctgcaacgcctcccttgtctcagatggcgtgtccaccactctattgttgtaaactgttgtttatgatgaacgaaattgtctttactaaacagatttaatagttaaaaaaaaaaaaaaggggctgcccatctaaagaacg

SEQ ID NO: 8403 - DNA, 491 bp, Homo sapiens
  misc_feature (1)...(491): n = A,T,C or G
gagttannttttgaaccctcctgacagcctgcgaaccgcgccggaanccccgcgtcgacccacgcgtgcgatttctagcaattctcatgaaaatattagagatgagcttgatcttatagaaacatataaaagcagtattaacggataaaatatgacatttaatttcctattctatattcttcctatgatgtcatctcagaaggatggtttgtgcaaactgaagattgataagaactggaattaaacatgcttcatatgtgtttaagcattaaaaaaagttatttggagtctttttagttacttgaatcctggattaaacttattttcttcatgagaaattcactacctacttctggttctaatttgaggggttcaagtttaatttttccttctttcaaacctttagaaggaggaggtaccatgtgctgactttcacacgctggttttgctntagctgtggcattgtgaatttataaatattctacccggct

SEQ ID NO: 8404 - DNA, 372 bp, Homo sapiens
  misc_feature (1)...(372): n = A,T,C or G
tggggcaacctgaaggagacgtggacagccaacgttggtaaggggcagcccagtgtcctgcaggtggtgaacctgcccattgtggagcggccggtctgcaaggactccacccggatccgcatcactgacaacatgttctgtgctggttacaagcctgatgaagggaaacgaggggatgcctgtgaaggtgacagtgggggaccctttgtcatgaagagcccctttaacaaccgctggtatcaaatgggcatcgtctcatggggtgaaggctgtgaccgggatgggaaatatggcttctacacacatgtgttccgcctgaagaagtggatacagaaggtcattgatcagtttggagagtagggggccactcan

SEQ ID NO: 8405 - DNA, 387 bp, Homo sapiens
cggacgcgtgggaagagtctgaagtttttttaaaggagatagcttattatggaaagtcactggtcctcccctccgcacaggaaaggtacccagtagataatgaaccaaattaagttccctccctccagccagaagttaaacatctgggatatgacgtcttcatgccaggggcactcatttcttagcagcctctctacatacatctctcaggtggtgccaagaggcacaccaggtagagcaaacttagcagctctgactaacaggctgcaaagtgcaagttcagattctgtggcagagatttggaaggcacccacctccagactgcttcccgtccaagttaccaggacagctcaaaaacatgctgacagaaaactcccatggctctag

SEQ ID NO: 8406 - DNA, 257 bp, Homo sapiens
atcggctcctcatccaaagaacaactgctgattgaaacacctcattagctgagtgtagagaagtgcatcttatgaaacagtcttagcagtggtaggttgggaaggagatagctgcaaccaaaaaagaaataaatattctataaaccttcaaaaaaaaaaaaaacgggggggccgttttaaaggatccttgggggggcccaagtttacccgggctggcaaggaaaaacttttttccttatggggggccgaattataac

SEQ ID NO: 8407 - DNA, 374 bp, Homo sapiens
  misc_feature (1)...(374): n = A,T,C or G
cccacgcgtccgcttgctgcttgagagttttgtgccttgnccttaaccggggctatctctcagaagcaggggccagcctggtggaccaataactggaactcaacattgtttcccgtacaaaggtactatacctggccagcgagaccttcaactatagcgccattgaccgagtgaagtccaggggcaagcggcttgcactacagaaagtgtcaaaagttggacagcggtttaaccgcatagggctaccaccaaaggttggttcattccagctctttgttgaaggctacaaagatgcagactattggctgcggcgttttgaagcagaacctcttcctgagaacactaaccggcaactactgctccagtttgagcgg

SEQ ID NO: 8408 - DNA, 388 bp, Homo sapiens
ccagagggtcatatccttcatcagacagatggtggagcacggaggcttttaccgtacctcagatcaaacatgggtgaagctggagagaatccagtttgttggggcttgtaatccccccacagaccctggaagaaagcccctctcacacaggtaaaacagctcggtagactgctctgcttcacacacgcacagctccaggattgctgtaaacacagcgccacaaaaacctggttttgataataaagacaacaatactgcttattgtgaaaaaaaaaaaaaaaaggggcggccgttttaaaggatccttgggggggcccaagtttacgcgggcttgcaacgtattagttttttccttatagggagccgaattataacctagctggggatt

SEQ ID NO: 8409 - DNA, 406 bp, Homo sapiens
  misc_feature (1)...(406): n = A,T,C or G
cctcaggagccagccccacccttagaaaagatgttttccatgaggatcgtctgcctggtcctaagtgtggggggcacagcatggactgcagatagtggtgaaggtgactttctagctgaaggaggaggcgtgcgtggcccaagggttgtggaaagacatcaatctgcctgcaaagattcagactggcccttctgctctgatgaagactggaactacaaatgcccttctggctgcaggatgaaagggttgattgatgaagtcaatcaagattttacaaacagaataaataagctcaaaaattcactatttgaatatcagaagaacaataaggattctcattcgttgaccactaatataatggaaattttgagaggcgatttttcctcagccaataaccgtgataatn

SEQ ID NO: 8410 - DNA, 399 bp, Homo sapiens
ctcggagcatgcggagtaaagggacttgagcgagccatttgccgcactattctatttcccctccctctgtgccgccccgtatctattttgacccttctcccaccctcgctcgcgtagccatggcggagccgtcggcggccactcagtcccattccatctcctcgtcgtccttcggagccgagccgtccgcgcccggcggcggcgggagcccaggagcctgccccgccctgaggacgaagagctgcagctcctcctgtgcggtgcacgatctgattttctggagagatgtgaagaagactgggtttgtctttggcaccacgctgatcatgctgctttccctggcagctttcagagtcatcagtgtggcttcttacctcatcctggctcttctctctgtcg

SEQ ID NO: 8411 - DNA, 414 bp, Homo sapiens
gcgaggacgcgtgggctttcaaatattgtttctgtggctttccgactctctgaccacgtgggagatccatggcgtgagcctgtccaaaaccaaaggcctatgtgtggccaccccagtccagctccgggtgttccgcgagttccacctgcacctccgcctgcccatgtctgtccgccgctttgagcagctggagctgcggcctgtcctctataactacctggataaaaacctgactgtgagcgtccacgtgtccccagtggaggggctgtgcctggctgggggcggagggctggcccagcaggtgctggtgcctgcgggctctgcccggcctgttgccttctctgtggtgcccacggcagccgccgctgtgtctctgaaggtggtggctcgagggtccttcgacattcctgtggg

SEQ ID NO: 8412 - DNA, 499 bp, Homo sapiens
  misc_feature (1)...(499): n = A,T,C or G
ggggcgatnacgggggnnnnnnnaaattgatatcctgctggaccgccctgcaanacccgcnncgacccacgcgtccggtagtttttaagtaatttgggaggaagaagaaaataaattgctgagggttgaagaaaggttttgtttttgctaatgacaatgacattgtttagaagagcaaatcttaagatttaaaggcagaaggaaaggaaccggtagagaaggatgattgataatgaaggcagagcagaagaaaattcataacagaataaaactctggatccagttattataaacacgtggtacctcattctcaccttcatagctctttcttcctgttttggaggtagccgaacataaatatgttcggtgtaaatttggggtttttttacttaatcaaaaatatacctagaaacgttgataacttgcagttttgtaaagtgtttccaaatctatggccttctaacacctggagtctttgtaagatccctcctggtaccct

SEQ ID NO: 8413 - DNA, 461 bp, Homo sapiens
  misc_feature (1)...(461): n = A,T,C or G
cccaactgatcgcctgcgtttgagcnccgtaanacccggcncgacccacgcgtccgcggacgcgtgggcggacgcgtgggcagagctggaattgttggagttgtttttggtatacttggagagctggctttctaaagtgctgctttgaggactgttgtgtaaagcacttgattcgtcttccctttgctggagttatgggcctgggcttttacactggggttctgaagtaacaaacaaagtcagtccagaaatagttgctcagcaatctcattgttacagtgtcgcaaaatgagctcatattagctttattttctgctaccaatagagtgttcctaagtatttaaagtgtgtgactcctttcttatagagccagcaagctgtattggaatcacttttccagtgttgtaaatgttatttttgtgggtcagtcagtatactcgtgaatgacagaaaaacagatc

SEQ ID NO: 8414 - DNA, 395 bp, Homo sapiens
gttgacgcaggcctacgcgatgtcatgaagaaacttgttgatgatatgctgcggcgggcggatgctgagaacaggctgcacaccatgaaggaggaactggacttccagaagaacatttactgtgaggagctgcgtgcgaccacccgccgtcatgaaaccccactggtggagattgacaatgggaagcagcgcgtgcttgagagccggctggcggatgcactgaaggaactgcgggcccagcatgaggaccaggaggagcaaaataagaaggagctggagaagacttattctgccacgctggacaatgccatgcagtctgctgagaggaacagcaacctggagggggctgcccactaggagctgcagcagtcgcgcatccgcatcgactgcctctc

SEQ ID NO: 8415 - DNA, 424 bp, Homo sapiens
cccacgcgtccgaaaatgggctatacggagacatctcttcaagaacatgttacttctgaacatgcagaaacatcaacagaagtgatttgtccaatatgtgcagcgttacctggaggcgatcctaatcatgtcacggatgactttgcagctcatcttacacttgaacacagagcccctagagatttagatgaatcgagtggtgttcgacatgtacgtagaatgtttcaccctggccggggattaggaggtcctcgtgctcgtagatcaaacatgcactttactagcagttctactggtggactttcttcttctcagagttcatattctccaagcaatagggaagccatggatcctatagctgagcttttatctcagttatcaggagtgagacgttctgcaggaggacagcttaattcctctggcg

SEQ ID NO: 8416 - DNA, 405 bp, Homo sapiens
tgggagccagcgctcccttactgtgaacaggatttcaggacccctttcttgttgtggctgccatgaagccacagctccttggggaagtgacctgctctcctttgggtgtatgcaggagtgaggggggccctgagtggcaagttgcttaactaacaggagatccataggcagcctgcaggctacgaagtggcctaatgcaagatgagctgggaacaagggaggagagagcacgagctggggcaaaggctgagccgggaggcccttgaggtgaggacacagcaggcccaggaccatggctggggaggatatgtcagcacctggaaatggagtgcaggctgcagcgcccagccatgtgggccaggtgcattcactcagagaggggccacacacccatctacccagttg

SEQ ID NO: 8417 - DNA, 426 bp, Homo sapiens
  misc_feature (1)...(426): n = A,T,C or G
caacaccagcagcttgccttataaaaggagaaaggaattccttttcccgcccgaacatgaagaaaaacgacctgaccctgtagagagaacacagtgtgaatgtttcccctcgtgtgagcccagcctgtggtcttctccgtacccgcaacgtggtcatctgtgcccgtgacgtcacctgtgcccgtgcgtggcgtccccgtctccgttggggccattagaatgaggcagacaccaggccactctagaagccgagccgtcacacctcaggcgtgtgcggggcggggacggggggtctcctggttacattttggattaaacctgtttcccggttatgtgtatggaacagcagagtgatgcacgaactttgaacattcgttatggggaaaacatccttttacttcggggtcgtctggcacagcaaggtcn

SEQ ID NO: 8418 - DNA, 504 bp, Homo sapiens
  misc_feature (1)...(504): n = A,T,C or G
cgccccccccccgccccccattgatcgcttcggtagaggnccgtattcaccggccgacccacgcgtccgctttatgtccgcccacctagtgcttccacttctatgcaaatgcctccaagccattcacttccccaatcttgtcgttgatgggtatgtgtttaaaacatgcacggtgaggccgggcgcagtggctcacgcctgtaatcccagcactttgggaggccgaggcgggtggatcatgaggtcaggagatcgagaccatcctggctaacacgtgaaaccccgtctctactaaaaatacaaaaaattagccgggcgtggtggcgggcacctgtagtcccagctactcgggaggctgaggcaggagaatggtgtgaacccgggaagcggagcttgcagtgagccgagattgcgccactgcagtccgcagtctggcctgggcgacagagcgagactccgtctcanaaaaaaaaaaccaaaaaaaacccttgcttggtgcataan

SEQ ID NO: 8419 - DNA, 423 bp, Homo sapiens
  misc_feature (1)...(423): n = A,T,C or G
cggacgcgtgggcggacgcgtgggtcttctgtgtcgctttgttgccaaggcagaatgaaaagtccttaaccgtggactcttcctttatcccctcctttaccccacatatgcaacgacttttaattttcacttttgtagcttaatcctttgtattacaacatgaaatatagctgcatatatggacaccgacttgggaggacaggtcctgaatgtcctttctccagcgtgacatgatttactcacaaataagattctttcagcaaaaaaaaaaaaaagggggcccctttaaaaaaaacgaggagggggccaaaatttacggcggggggggaagaaaaatttttttccttaggggggcnctataatgacgaaacgggggattttttggaaggaaccttcttttgggggggggaaaaccttgtgaaa

SEQ ID NO: 8420 - DNA, 432 bp, Homo sapiens
  misc_feature (1)...(432): n = A,T,C or G
tggatgtttcctgcccttgaaacttgacttcaacttcttcagttttgggactgggactggctctctttgctcctcagcttgtagtcagcctaggaccttatgatcatgtaagttaacacttaaactcccaaatgtatgtgtgtatgggtgtgtgtttgtgtgagagacagagaaagagagagaattctttcaagtgaatctaaaagcttttgcttttcctttgtttttatgaagaaaaaatacattttatattagaagtgttaacttatcttgaaggatctgtttttaaaaatcataaactgggtgcagactcaataaaatcatgtacatttcttgannaaaaaaanaaaaaaaaaaaaaaaaaaaaaannnnnnnnaaaaaaaaannnnnnnnnnnannnnnnnttttngggggggggcgcgttgtttttt

SEQ ID NO: 8421 - DNA, 425 bp, Homo sapiens
cccacgcgtccgcccacgcgtccgtttacgcgtgggctgacgcgtgggggaatacagtttgtgcatggaggcagggcccggggagaaagttggagcggtatcctaagctggcagtggcgtgatcctgtcaccaaatcggcccgcggggcgctgcggatactgcataagggcctggggagtcttgacttttttcttcttaggtgactcagtctttcaccccggaacccctctccagagaccctaatttcggtcttcatttataagtaccgcccctgagacccatcttcccggaagtgccacctcccaacttcagggagctccctcgaaccccagattgattcttattttttgtcttcgaacccacccttgttcccaatttttctggaagtcctcccctccccctcatttttctacaacatattcta

SEQ ID NO: 8422 - DNA, 499 bp, Homo sapiens
  misc_feature (1)...(499): n = A,T,C or G
agaggacggcccgcccccatttgtcggtgtggtagagcgcgtaatgcacgggccgacccacccgtncgcaccattccaactggcgagaaattgtatttcattgtggttttaatttgcacttctctaatgatcagtgatgttaatctttttttcatgtttcttggccacatgaatgtcttcttttgagaagtgtctgttcatgtcctttgcccactttttaatggttttttttttcttgtgaatttgtttaaattccttgtaaattctggatattaaacctttgtcaaaaaaatagattgcaaaaactttgtactttttaaaggttatcatcatgtgcctaggcatgcatttttttcactggttttcctgtgaaccactaagctgtgaaccattgaaactgcttacacatgactttcttcatctcatagaatttttttaatcttttatcttggatggcggctactttctttaattccattcttttcttcaaaaacatcat

SEQ ID NO: 8423 - DNA, 426 bp, Homo sapiens
caacaaaccagccctatggaaagacttgcttcaccactgttatcaaccaacggcctgatgcttttcctcagttttgtgattttgacaaaacaagcaagcagcattccctcctgataagagaccaccgacctaggaatgattctggccagactagagaggatgcacagtgagggttttcatgtcctctgcttcagcttttgatgtcagagggccacaaactccactctcagatgattgctaatgccaccattttatgaacatgggccccatggagaggcacgaagctcaattgcacttctgcacatttttcctcctataaatattgctattggaatattatttggtacggctcccgggaaagatacatttgcggaatgtactcaaattagaagcatcatgtaaaccctataatgtatcaatagtgcg

SEQ ID NO: 8424 - DNA, 416 bp, Homo sapiens
  misc_feature (1)...(416): n = A,T,C or G
atttgtgccttgggctgcacaggaaatgggctcaaagagtttcagtgcagcttccgctggaggctggcgcttctgggctctggatgtggtactcttcactgcagtctgctgatcctgggtgcctccagaagacccacagtgtgactgttgggcccagccctgttcccaacaatggcagggcctgggacaagaatacaatacaagtatttaaagtttataactttatagtttataacaagtgtttaaaagttataaatcaaactagcaaactattagattaaatgtgttctaatctcctcccttggcaaatacaacttcataaccacctggaaggccaggttcaaattcagcccttggttgacccctagcaccctaagagggtttgcctgcacacgtgaataccccaccccacccan

SEQ ID NO: 8425 - DNA, 416 bp, Homo sapiens
  misc_feature (1)...(416): n = A,T,C or G
aggacttctagcccctgaactttcagccgaatacatctttttcaaaggagtgaattcaggcccttgtatcactggcagcaggacgtgaccatggagaagctgttgtgtttcttggtcttgaccaacctctctcatgcttttggccagacagacatgtcgaggaaggcttttgtgtttcccaaagagtcggatacttcctatgtatccctcaaagcaccgttaacgaagcctctcaaagccttcactgtgtgcctccacttgtacacggaactgtcctcgacccgtgggtacagaattttctcgtatgccaccacgagacaagacaatgagattctcatattttggtctaaggatataggatacagttctacagtgggcgggtctgaaatattattcgaggttcctgaaggcacagn

SEQ ID NO: 8426 - DNA, 408 bp, Homo sapiens
cccacgcgtccggtccgcgccatggagcgctacgcggtcgccttggaggaggtggcggacggtgcccggcagcaggagcgacactaccagttgctgtcggcgctacagagcctggtgaaggagttgcccagctctttccagcagcgcctgtcctacaccacgctcagcgacctggccctggcgcttctcgacggcaccgtgttcgaaatcgtgcaggggctactggagatccagcacctcaccgaaaagagcctgtacaaccagcgcctgcgcctacagaacgagcaccgagtgctcaggcaggcgctgcggcagaagcaccaggaagcccagcaggcctgccggccccacaacctgcctgtggttcaggcggctcagcagcgagaactagaggccgtggaacaccgg

SEQ ID NO: 8427 - DNA, 418 bp, Homo sapiens
taagtttggcttcagtactttggccctggttgaaaagtactcatctcctggtctgacatccaaagagtcactctttgttcgaataaatgctgctcatggattctcccttattcaggtggacaacacaaaggttaccatgaaggaaatcttactgaaggcagtgaagcgaagaaaaggatcccagaaagtttcaggttcaagggcagacggggtttttgaggaggattcgcaaattgacatagccacagtacaggatatgcttagcagccatcattacaagtcattcaaagtcagcatgatccacagactgcgattcacaaccgacgtacagctaggtatctctggagacaaagtagagatagaccctgttacgaatcagaaagccagcactaagttttggattaagcagaaacccatc

SEQ ID NO: 8428 - DNA, 414 bp, Homo sapiens
gcagcttatgtaatagggtctgtccaagcctcagtcacatacacaaagagatttagcttaaaactattagctgtaaaaacttttctcaggtaggctgagcgtggtggttcacacctgtaatcccagcactttgggaggctgaggtgggcagatcacctgaggccaggactttgaaaccagcctggccaacatggtgaaacactctttctactagaaatacaaaaattagctgggcgtggtggcgcacaactgtaatcccagctactctggaggctgaggcaggagaatctctggaacccaggaggcagaggttgcagtgagccgagatagtgtcattgcactccagcctgcacagagcaagactgtgtctcaaaaaaaaaaaaaaaaaaggggcggccgttttaaaggatccct

SEQ ID NO: 8429 - DNA, 483 bp, Homo sapiens
  misc_feature (1)...(483): n = A,T,C or G
cggggggattttgtctgatatcccgattgaccgccntcgaaaancncggncgacccacgcgtncgcaacaggcaggggcagcactgcagagatttcatcatgttctcccaggctttcaggctcctctgccttctgcttgggcttcagggctgcctggctgcagtcttcgtaacccaagaggaagcccacggcgtcctgcaccggcgccggcgcgccaacgcgttcctggaggagctgcggccgggctccctggagagggagtgcaaggaggagcagtgctccttcgaggaggcccgggagatcttcaaggacgcggagaggacgaagctgttctggacttcttacagtgatggggaccagtgtgcctcaagtccatgccagaatgggggctcctgcaaggaccagctccagtcctatatctgcttctgcctccctgccttcgagggccggaactgtgagacgcacaaggatgaccagctgatt

SEQ ID NO: 8430 - DNA, 390 bp, Homo sapiens
  misc_feature (1)...(390): n = A,T,C or G
tataaacatagaatacagttgtttccaaaagaactcaccctcactgtgtgttaaagaattcttcccaaagtcattactgataataacattttttccttttctagttttaaaaccagaattggaccttggatttttattttggcaattgtaactccatctaatcaagaaagaataaaagtttattgcacttaaaaaaaaaaaaaaaaaaaaaaaaaaaaaaaaaacccnggggggggcccttttaaaagaacccttggggggcccaaatttaacggggggtggaaagaaaaaatttttttctttttggggggcggattaaaaccctccttgggatttttgggaaaaaaccttttttttgggggggggaaaaattggcccaaccccccccaa

SEQ ID NO: 8431 - DNA, 409 bp, Homo sapiens
gaaaaagtaaagttcctcgtgactgtagagaacaagtacttcgacatattgaagccaaaaagttagaaaagatgcctttgagtaatggacagatgggccagcctctcaggcctcaggcaaattatagtcaaatacatcacccccctcaggcatctgtggcaaggcatccctctagagaacaactaattgattacttgatgctgaaagtggcccaccagcctccatatacacagccccattgttctcctagacaaggccatgaactggcaaaacaagagattcgagtgagggttgaaaaggatccagaacttggatttagcatatcaggtggtgtcgggggtagaggaaacccattcagacctgatgatgatggtatatttgtaacaagggtacaacctgaaggaccagt

SEQ ID NO: 8432 - DNA, 417 bp, Homo sapiens
ccaaagaattcaaggtttgggccaggtctctgccatcaagggtttgcttcctggtgagggaggcagagcttccacagtggacctgatttccatcggttgcacctggtgaggcacaggccctgctgggctggcctgggggtggagatgttgaggggcagcctgccagccctgtgtgccttggtcaccccatctggcagttgacagtaacagggcctttctcacaatgctgttgggagatgaggcacagttcctggcatatcgtgagtgctccttgtgggaattattgctaacatcaaggaaaggtgggtggagaattccatttggagacaatgcaaagccaagtgctggtctctgagttacagcattctacaatgctgagagcagataggactgctcaaaccatctgtttacagatgg

SEQ ID NO: 8433 - DNA, 401 bp, Homo sapiens
  misc_feature (1)...(401): n = A,T,C or G
aatccaccagctacattttgctccctgagagttgttaatggagagaatgttacctctcctgactctggggctcttggcggctgggttctgccctgctgtcctctgccaccctaacagcccacttgacgaggagaatctgacccaggagaaccaagaccgagggacacacgtggacctcggattagcctccgccaacgtggacttcgctttcagcctgtacaagcagttagtcctgaaggcccctgataagaatgtcatcttctccccactgagcatctccaccgccttggccttcctgtctctgggggcccataataccaccctgacagagattctcaaaggcctcaagttcaacctcacggagacttctgaggcagaaattcaccagagcttccagcacn

SEQ ID NO: 8434 - DNA, 414 bp, Homo sapiens
ttctagatcgcgatctagaactagtcggacgcgtttgtcgcccacgcgtattagatgatctcttggcgctcttggccgatcaggatcagaaaatactgacattggagaataaactcaaggatcttggacatccactaagattaaaatgactccaaaaatgatttggattatgtgttagtataatgcattcaaaagatttttaatgcaacatggaaaagctgtgcctgtattatacgaatggatatgtgggttcatgactatggcaccatctatactgtattcactgtcttcattgaatttacttaatacacagattaggctcaggtttcagtacttatagactattttcttttggaccgcaagcctagaaagagacttgatctgattggaagcactactgtaaacaccctctcg

SEQ ID NO: 8435 - DNA, 389 bp, Homo sapiens
  misc_feature (1)...(389): n = A,T,C or G
gaattcaatccaagtttgaaggcctgagaaccttgtgttctgatgtccatggacagaagatgaatgggtgagctaatacagcaagtgcggcagctgcctgtttaaattctgtttaggcaacagattgtacaatgcccatccacattggtgaggatgatctttacttagtctacctattcaaatactaatctcttccaggaataccctcaaagacacacccagaaataatgctttaccagctatctgagcatcccttatctcagtcaaattgacaaataaaattaaccatcacagccgggcataatagcttgcgcctgtaatcccaacactttaaaggtgaggtgggaggattgctanatgccaaaggctcgagaccagccttgtcaaat

SEQ ID NO: 8436 - DNA, 463 bp, Homo sapiens
  misc_feature (1)...(463): n = A,T,C or G
nggaaaatgatcgccctgcgaaccactgaggaccntccggaacgacccacgcgttcgccatgatggtggctgagcctggggggcctactcctttctctggccaagcagatcccctgcatggctggagcggggggactctcactcttgccttctgggctgtggacatgtgtgtattttgcctgatgctccctgtcacctccctccctgggtgctgtactcgcctgtcttctgctgggtgtgttgctccagagccctcagacgctctccctcacacaggcaggtctgggcttctcctgccactcagggaaggacactgccacatcctgtgggtttatatcatgttacctcttcatccagcctcaagaccctctgtgtagggggctgggaataacgggaactgtgtttaacatgacccaattttcaggctggtgacgagttcacgggtgtctcagcaaagttggag

SEQ ID NO: 8437 - DNA, 390 bp, Homo sapiens
attgaggagggccgcatcgaccccagggtcaatccgctgaagatgtctccacactccctgacctgcgttacatcttcccactgggaccggccttattccagagaggtggcagcattcccactccccttcgtgaaaccagagaacaaattctggccaacgattgcccggattgatgacatatatggagatcagcacctggtttgtacctgcccacccatggaagtttatgagtctccattttctgaacaaaagagggcgtcttcttagtcctctgtccctaagtttaaaggactgatttgatgcctctccccagagcatttgataagcaagaaagatttcatctcccaccccagcctcaagtaggagttttatatactgtgtatatctctg

SEQ ID NO: 8438 - DNA, 402 bp, Homo sapiens
cggacgcgtgggtcgacccacgcgtccgcccacgcgtccggtgggctatcagcctaccctggccactgacatgggtactatgcaggaaagaattaccactaccaagaagggatctatcacctctgtacaggctatctatgtgcctgctgatgacttgactgaccctgcccctgctactacgtttgcccatttggatgctaccactgtactgtcgcgtgccattgctgagctgggcatctatccagctgtggatcctctagactccacctctcgtatcatggatcccaacattgttggcagtgagcattacgatgttgcccgtggggtgcaaaagatcctgcaggactacaaatccctccaggatatcattgccatcctgggtatggatgaactttctgagga

SEQ ID NO: 8439 - DNA, 410 bp, Homo sapiens
  misc_feature (1)...(410): n = A,T,C or G
tacaacagtaaagacaggaagtctcagcccatgggactctggagacaggtggaaggaatggaggattggaagcaggacaacccacttcataaggccagggaggacatctttatggagaccctgaaagacattgtggagtattacaacgacagtgacgggtctcacgtattgcagggaaggtttggttgtgagatcgagaataacagacgcagcggagcattctggaaatattactatgatggaaaggactacgttgaattcaacaaacaaatcccagcctgggtcccctttgacccagcagcccagataaccaagcggaagtgggaggcagaaccagtctacgtgcagcgggccaaggcttacctggaggaggagtgccctgcgactctgcggaaatacctgaaatacan

SEQ ID NO: 8440 - DNA, 403 bp, Homo sapiens
aggacacacatactacgatacctactaagtaatgatcttgcccactgtggggaagttattcattctgtggcgagaaaggaaagggaagggtgcctacctacgagtggggagagccaggctctaacggattactgagagacattcgcacttaagagagggcgttctatgtagagggagatgatctgcacacgtatgaacgtactacacaccaggaagagtgcactgtaatttggatcggtaaattttcaacccattctcttatgatttcctgtgtcttcagtgctatataaggttggcctttgtaattagatatcttctatcaaataaagatggaaatatgttcaaaatacttttcttagacaaaaaactattgttataaaagtaatttctagcaaagattaag

SEQ ID NO: 8441 - DNA, 404 bp, Homo sapiens
gtctgtctcttgcttcaacagtgtttggacggaacagatccggggactctcttccagcctccgaccgccctccgatttcctctccgcttgcaacctccgggaccatcttctcggccatctcctgcttctgggacctgccagcaccgtttttgtggttagctccttcttgccaaccaaccatgagctcccagattcgtcagaattattccaccgacgtggaggcagccgtcaacagcctggtcaatttgtacctgcaggcctcctacacctacctctctctgggcttctatttcgaccgcgatgatgtggctctggaaggcgtgagccacttcttccgcgaattggccgaggagaagcgcgagggctacgagcgtctcctgaagatgcaaaaccagcgtggcggg

SEQ ID NO: 8442 - DNA, 390 bp, Homo sapiens
  misc_feature (1)...(390): n = A,T,C or G
cgcgggactagagtgcagagctccgggacgtggatcggagccggcgcgatgggcggagagcaggaggaggagcggttcgacggcatgttgctggccatggctcancagcacgagggcggcgtgcatgagcttgtgaacaccttcttcagcttccttcgacgcaaaacagactttttcattggaggagaaaaagggatggcagagaagattggcaggagagagaatgagtgccaccagaagaaatgccagacgctaataaaaccatcagatcttgtgagaactcactcgtatcatgagaacagcatgggggaaaccatcctggtgattcagttacctccacctggtactgcctttgacatgtgggaattacaattcaagcttatcacacag

SEQ ID NO: 8443 - DNA, 382 bp, Homo sapiens
  misc_feature (1)...(382): n = A,T,C or G
gatgttttctgttggacatgtactgaaaattaacacatgtagtagccttaaaattttagacttctcgaacatgaggctgttacagtaatttttttaacactgtgcattgtacttttctaccttaaaaaaatcagtgaggatatttatttaatgaacatcaattccttttaaattttcttagagaaatttctctgtggctcagttttaccacccataaagcggagacagtaatttatggttatcctttctgacccacaaagtatgaaaagttctgtaatctgtaaactcagttctgtaatctgtattattgagatgattaatataaagttgtattttcactggggnnnannnnnnnnaaaaaaaaaaaaaagggggggccgtn

SEQ ID NO: 8444 - DNA, 477 bp, Homo sapiens
  misc_feature (1)...(477): n = A,T,C or G
cgcnaacgtgcncacaccgatagccctacagatccgccntggaaanccccggncgacccacgcgtccgcccacgtggaagcggcactcaagatgctgcgccgcgaggcccgcctgcgccgcgagtacctgtaccggagggcccgggaggaggcgcagcgctcagcccaggagaggaaggagcggctgcggcgcgcgctggaagaaaaccgcctgattcccactgagttacgccgagaggctctggccttacaggggtccctggagtttgatgatgctggaggtgaaggtaactatacaaggtagccctccccaacactgagctggcaggtctccagtccttcctcagacacaccgggcaccatcccatcagaggaaactgctcctggaactgtcccccatgcccttgtcactgcacagatggcattgcagggctctccctgagtgtgccctgtcccacttacatggcacacatggga

SEQ ID NO: 8445 - DNA, 403 bp, Homo sapiens
aaaacatattggtgtctgcatctcagttgccaacaatagtgctttttgtgggctctattcctaagagtaaaaccaaggaacagattcttgaagaatttagcaaagtaacagagggtcttacagacgtcattttataccaccaaccggatgacaagaaaaaaaacagaggcttttgctttcttgaatatgaagatcacaaaacagctgcccaggcaaggcgtaggttaatgagtggtaaagtcaaggtctgggggaatgttggaactgttgaatgggctgatcctatagaagatcctgatcctgaggttatggcaaaggtaaaagtgctgtttgtacgcaaccttgccaatactgtaacagaagagattttagaaaaggcatttagtcagtttgggaaactgga

SEQ ID NO: 8446 - DNA, 400 bp, Homo sapiens
ctgaagaagaccactggccttgttagattggctgtgtgcaatactcctcacgagaggctatgaatattggacacaaagattcttgatgttcttgaggaaatccctaataatgcagtatatagaatgtatacacaacagattacaaacgataagctggctatggttaaagcgtaaccatatgttaaataattaaaagaccaacttcaaggcggtcaattacaagaggtgattcttcatgctgaacatgaactaaatctggcaaaacaaatgagggaatggaaactattggagccattagcggaagagcctcctgccgatcagaggaaatggccaatataattattaaatgactttggcgtgttcatgggaaactgatgtaattaaatattctgctatattg

SEQ ID NO: 8447 - DNA, 429 bp, Homo sapiens
cagctgatacctgatcaactgcgacatttgggcaatgttatcttacaggctactatgataaaggattatcagcagcaaaagatggagaaggtgttgagtcttccaaaacccaccattattctcagtgcctaccagcgaaagtgcattcagtccatcctgaaagaggagggtgaacatataagggaaatggtgaagcaaatcaatgatatccgcaatcatgtaaacttctgacaccaccaggagctgactcacacctgaactgaacaccattgaaggcttaaacccatattgtaaaacaggtagaattatctaatttataaaaaggtgttttgatgaaaaaaaaaaaaaaaaagggcggccgtttaagaggatccctgggggggccaaagtttacgcgggctggcaacgaaatagctctttccttaaagg

SEQ ID NO: 8448 - DNA, 400 bp, Homo sapiens
  misc_feature (1)...(400): n = A,T,C or G
cccacgcgtncgccaagttcaagatgaagtactggggcgtagcctcctttctccagaaaggaaatgatgaccactggatcgtcgacacagactacgacacgtatgccgtgcagtactcctgccgcctcctgaacctcgatggcacctgtgctgacagctactccttcgtgttttcccgggaccccaacggcctgcccccagaagcgcagaagattgtaaggcagcggcaggaggagctgtgcctggccaggcagtacaggctgatcgtccacaacggttactgcgatggcagatcagaaagaaaccttttgtagcaatatcaagaatctagtttcatctgagaacttctgattagctctcagtcttcagctctatttatcttaggagtttaatttgccct

SEQ ID NO: 8449 - DNA, 493 bp, Homo sapiens
  misc_feature (1)...(493): n = A,T,C or G
agtgtccgcgcgggtngnaattgtattcatcgcatccgcccggattcccggtcgacccacgcgtccggaaaaaaatgatccaaaatatggatatgattggatgtatgtaacacatacatggagtatggaggaaattttctgaaaaatacatttagattagtttagtttgaaggagaggtgggctgatggctgagttgtatgttactaacttggccctgactggttgtgcaaccattgcttcatttctttgcaaaatgtagttaagatatactttattctaatgaaggccttttaaatttgtccactgcattcttggtatttcactacttcaagtcagtcagaacttcgtagaccgacctgaagtttctttttgaatacttgtttctttagcactttgaagatagaaaaaccactttttaagtactaagtcatcatttgccttgaaagtttcctctgcattgggtttgaagtagtttagttatgtctttttctt

SEQ ID NO: 8450 - DNA, 409 bp, Homo sapiens
cagccatcttgtctggagacaagtctgagaatgttcaagatttgctgctcttggatgtcactcctctttcccttggtattgaaactgctggtggagtcatgactgtcctcatcaagcgtaataccaccattcctaccaagcagacacagaccttcactacctattctgacaaccagcctggtgtgcttattcaggtttatgaaggcgagcgtgccatgacaaaggataacaacctgcttggcaagtttgaactcacaggcatacctcctgcaccccgaggtgttcctcagattgaagtcacttttgacattgatgccaatggtatactcaatgtctctgctgtggacaagagtacgggaaaagagaacaagattactatcactaatgacaagggccgtttgagcaaggg

SEQ ID NO: 8451 - DNA, 406 bp, Homo sapiens
gcagatcatgaagtcaggagatccagactatcctggctaacacggtgaaaccccgtctctgctgaaaatgcaaaaagttaactgggcatggtggcaggcgcctgtattcccagctactctggaggctgaggcgggagaatggcgtgaacccaggaggcggagcatgcagtgagccaggatcgcgccactgcactcccgcccgggtgacagagcgagactccgcctcataaaaaaaaaaaaaaaaaaggggggcccgttttaaagatttcttaagggggcccaactttacccggcctaggaaggtaatatctttttccttatagggaggcaaataaaaacctatctggggttttttggaaagaaacctaacttttggggggggacttattgggccaaataaccaacg

SEQ ID NO: 8452 - DNA, 422 bp, Homo sapiens
  misc_feature (1)...(422): n = A,T,C or G
cccacgcgtacgatcacattcttgctgtgacccatgatctcctgaaatcatatacataggctggggggggccctgtcattcgtggttgatttcaatacactcaagtgccattcatcctttaagaaaaacatctggatatcaaggtggaaatggcccatttaatgattgattatatcattttgtggatatagttataatctgatgggcctggctgggagtggaagaagggaagccttttgcaaatagtagagtatcagttgcaggtgccaatgactaactttttgaattctatgttggcattaacaataaagcattttgcgnacccaaaatataaaaagaaaaaaacttggggggggggcgctttaaaaaaatccctgaggggccccaatataaacgggggtgacaataaaattgtttttttt

SEQ ID NO: 8453 - DNA, 416 bp, Homo sapiens
aagtacagtaaaaagagaaggtggtttcggcagcactgatagcaaaggaaaagcaacttattggtcatgagtgtgccacagaaaatgaaaacggacaacggacaaggatattgcagtaaaacttttgaaagttttgttcagcaatggaaatttgtacacactacaggaataccctataatttgcaaggtcaggccacagtagaaagggccattcggactcttaagacacaattggaaaaacaaaagaaagggggaagcagtaaggagtataccacgccccacaggcagttacaattagcccttttgactctaaattttttgaacatttccagagatcaggtctccacagcagcggaacaacacttttctggacagaaagttaatttacatgaaggaaaaacggtctggtggaagga

SEQ ID NO: 8454 - DNA, 400 bp, Homo sapiens
cagacgcgtgggacaatgcaggcacttaccaaaatgacatcgctttgattgaaatgaaaaaagacggaaacaaaaaagattgtgagctgcctcgttccatccctgcctgtgtcccctggtctccttacctattccaacctaatgatacatgcatcgtttctggctggggacgagaaaaagataacgaaagagtcttttcacttcagtggggtgaagttaaactaataagcaactgctctaagttttacggaaatcgtttctatgaaaaagaaatggaatgtgcaggtacatatgatggttccatcgatgcctgtaaaggggactctggaggccccttagtctgtatggatgccaacaatgtgacttatgtctggggtgttgtgagttggggggaaaactg

SEQ ID NO: 8455 - DNA, 480 bp, Homo sapiens
  misc_feature (1)...(480): n = A,T,C or G
agcggttnnnnnataaataggactgaggactctncgcaaancncggaangacccacgcacccacgcgtacggataaatactttagaataagcaaaccagctctgaggtttgacatatatctcagtgctcaactctatcagggcctgtgcagctttattctagcgacttattcctcttctcaagtttgtatattacagtaaaggtgaatggatacacacacacacacacacacacacacgtgtatatgtatatgtgtgcagaggatgttttcttaagaagaacctagatcatagagtgctttaaaatcagttaatcacttagtatgcttatgaatctgaagatagtgggatgtttgcattgaatattctcaagttgatcaggtattctaaattaattttaacttctgagtctccaggaaagctttcagaatttatacttactacccaggtgagaagttgcagtaaaataaaagtgaatctn

SEQ ID NO: 8456 - DNA, 461 bp, Homo sapiens
  misc_feature (1)...(461): n = A,T,C or G
ggcccnattgaagcccctagatagcntcgaaaccccgncgacccacgcgtccgcccacgcgtccgagaaaatgaaaatggagaatttcatgccaaatattgtggtgaccggctgtgatgcttttgaggaggatacctgggatgaactcctaattggtagtgtagaagtgaaaaaggtaatggcatgccccaggtgtattttgacaacggtggacccagacactggagtcatagacaggaaacagccactggacaccctgaagagctaccgcctgtgtgatccttctgagagggaattgtacaagttgtctccactttttgggatctattattcagtggaaaaaattggaagcctgagagttggtgaccctgtgtatcggatggtgtagtgatgagtgatggatccactagggtgatatggcttcagcaaccaggagggattgactgagatcttaacaacag

SEQ ID NO: 8457 - DNA, 399 bp, Homo sapiens
gcgtgcttggacacacagacacgcagacacagagacaccggggcccagggccctcctatggaccctgcccgctcccctcccattgtccacggctgtccgcccacccccattctccaagcttcagccccctccttagttcggcatctgcacagcactgaagaacctgggaatcagaccctgagaccctgagcaatcccaggtccagcgccagccctatcatgaccaaggagtatcaagaccttcagcatctggacaatgaggagagtgaccaccatcagctcagaaaagactcccagctgcaggaggagctgcggggcctgagagagacgttcagcaacttcacagcgagcacggaggcccaggtcaagggcttgagcacccagggaggcaatgtgggaa

SEQ ID NO: 8458 - DNA, 429 bp, Homo sapiens
cccacgcgctctcagacagacatatactgcaggaagcatatgatgcggatagctttatagacacacatatatactgggccatgtacaacaactaccagagcctacatcttaaaccgtggggagatacattgagcctcttagcaatgcataccacgagctggcacaacagaaatccaccaacaacccctcagaactccacttcctggtgaataagcacagtgaagccttcactcgcgataacaacatggggctggcgaagcaatgcttgtcatctctttataagaagaatattcataggctaacaaagacctttttaactctatcattactagatatggcacgtcgcgtgcaggggtctggacctcaggaggcagagaaatacgttctgcacatgatagaagatggtgagattcttgcaagtattaaccc

SEQ ID NO: 8459 - DNA, 420 bp, Homo sapiens
  misc_feature (1)...(420): n = A,T,C or G
gaagcccagctgctgccctggtcactatggctgtgagtgccaagcctgccgctgcactgtgcatggccgctgtgatgagggccttgggggctctggctcctgcttctgtgatgaaggctggactgggccacgctgtgaggtgcaactggagctgcagcctgtgtgtaccccaccctgtgcacccgaggctgtgtgccgtgcaggcaacagctgtgagtgcagcctgggctatgaaggggatggccgcgtgtgtacagtggcagacctgtgccaggacgggcatggtggctgcagtgagcacgccaactgtagccaggtaggaacaatggtcacttgtacctgcctgcccgactacgagggtgatggctggagctgccgggcccgcaacccctgcacagatggccaccgcgggggctgcan

SEQ ID NO: 8460 - DNA, 471 bp, Homo sapiens
  misc_feature (1)...(471): n = A,T,C or G
gcccaagcncctttggagaccttagatacagcctcgaaaaccccggncgacccacgcgtccggctccattcaggcgatttgagaaaaagtacgaaaggctgtccacaggctgaggttatgtctctcacaagagaaaacaaagcgtattatcaggatgtgaattcccgctccatcaacagaactcagagatgtgcaaagtggtgtttgcccctcagccggatagtacttccagcggatggttttgaaactgacctgtgatattttacttgaatttgtctccccgaaagggacacaatgtggcatgactaagtacttgctctctgagagcacagcgattacatatttacctgtatttaagatttttgtaaaaagctacaaaaaactgcagcttgatcaaatttgggtatatgcagtatgctacccacagcgtcattttgaatcatcatgtgacgctttcaacaacgttcttat

SEQ ID NO: 8461 - DNA, 429 bp, Homo sapiens
  misc_feature (1)...(429): n = A,T,C or G
actagttctagatcgcgagcggccgcccctgtttacttgaaaaaaaaaaaaaaaaaaaaaaaaaaaaaaaaaaaaaaaaaaaaaaaaaaaaaagaaaaaaaaaaaaaaaaaaaaaaaaaaaaaaaaaaaaaaaaaaaaaaaaaaaaaaaaaaaaaaaaaaaaaaaaaaaaaaaaaaaaaaaaaanaatggggggggttgtaaataataatgaaagggggtggggcttattataatgggggataaaaaattattttatttttttttaatagttgaattaaaaaaaaaggtattttatttttgaaaaaaaaaaaattttttttttatgggggaggaaaaaaataaagngnnnaangggnngtgnagnnnnttaaaaaaaaaaannttttttggggggtggggagaaaatttgnggtttgggtttttatgaa

SEQ ID NO: 8462 - DNA, 424 bp, Homo sapiens
  misc_feature (1)...(424): n = A,T,C or G
acccccatgcctcaggatactcctcaatagcgcatcgttgtagtatatccaaagacaaccatcattccccctaaataaattaaaaaaactattagacccatataacctcccccaaaattcagaataataacacacccgaccacaccgctaacaatcaatactaaacccccataaataggagaaggcttagaagaaaaccccacaaacccttgtgtcctagttctagatcgcgagcggccggcctttntttttttttttttttttttttttttttttttttttttnnnnnggggggggggggggccccccccctttaaacccggggaaccttttttttggggtttgggggggggtttttaaaaaaacccccggggggggaacaaaaggggggggggtttttttggggggggggggtaaacccccc

SEQ ID NO: 8463 - DNA, 471 bp, Homo sapiens
  misc_feature (1)...(471): n = A,T,C or G
gggcatgttttcaatgatcgcccgtagatcgctctcgaaatccccggncgacccacgcgtccgctaaaatctaatatacataattccattaagtggttgaaggaagcaaataatggaattgtcaattggtcatctggctgtaaggtttgcccttgaactaaaaatgttgtttggggcaagggccagaaatgtggagacatggtttttgttacgcattcttgtattatatgtgactaaatttacaaacaagatacatgtgtaattaaagacccttatggaactggaagacgtcttgtagtgctacattgggtgaaaccgttggtccatttttgtctgtttctatgaagataaaataattgggggccatctagaaatagaaaggcagtgggaagacagattctacggcactgctttcatttaattgggctttaggcactccattcgaatgcagaacctcacctctagttgaga

SEQ ID NO: 8464 - DNA, 467 bp, Homo sapiens
  misc_feature (1)...(467): n = A,T,C or G
gcccacctgagaccttcggaaagccagttacccccgaaacgacccacgcgttcgngatgatcctgggggagcctttcgccacccagggcccttatgactttgggtcgggggaaacggcccgccgcatacaggacctcatcccggtgctgctgcggcaccggctgtgtcccccacccgaggagacctatgccctgcaccgcaagctggcaggggctttcctggcctgtgcccacctccgagcccacatcgcctgcagggacctcttccaggacacctaccaccgctactgggccagtcgccagccagacgcagccactgccggcagcctccccaccaaaggggactcctgggtggatccctcatgacagcctccatgggggattcagtccccagagcaggccgtaccctgctgtagtgcctcttatcccttccccgtctgccctgggtcagaggagcccccttgggct

SEQ ID NO: 8465 - DNA, 406 bp, Homo sapiens
cggacgcgtggggtgaaaatgaaatgagcccagcccattgaacctattacaattcctccctttttgtggatgaaggaactgaggcccacaatggttaagcaacttgcctagggccccacaactgatccttggaagatctgaagtcccagagcttctgctatttggaccacacttcagcactgtctattattttatgctctccagataccagggacatttaaaattgttttcagcccaagcaagggaagcaaaaatcttttaactgctttaaagtaacttgaggccaggcgcagtgaatcaggcctgtaatcccagcactttgggaggccgaggcaggcaaatcatttgaggtcaagagttcgagaccatcctgaccaacatggtaaaaccccgtctctactaaaaa

SEQ ID NO: 8466 - DNA, 373 bp, Homo sapiens
  misc_feature (1)...(373): n = A,T,C or G
ctgatatctactttgataattttattatctgttcggaaaaggaagtagcagatcactgggctgcagatggttggagatggaaaataatgatagcaaatgctaataagcctggtgtattaaaacagttaatggcagctgctgaagggcacccatggctttggttgatttatcttgtgacagcaggagtgccaatagcattaattacttcattttgttggccnnaaaaaaaaaaaaaaaaaaaaaaaaaaaaaaaaaaaaaggggggggggctttttaaaaatttcttggggggggccaaaattaccggggggggggaaaaattttttttttttttttggggggggcaaaaaaaacccccttgggggtttttgga

SEQ ID NO: 8467 - DNA, 436 bp, Homo sapiens
  misc_feature (1)...(436): n = A,T,C or G
tacgacaccattggattgaccgctctgagaacccgcgncgacccacgcgtccgcggacgcgtgggcggacgcgtgggtacaaggctcggagctccggtcactcagacatcatgagttggtccttgcacccccggaatttaattctctacttctatgctcttttatttctctcttcaacatgtgtagcatatgttgctaccagagacaactgctgcatcttagatgaaagattcggtagttattgtccaactacctgtggcattgcagatttcctgtctacttatcaaaccaaagtagacaaggatctacagtctttggaagacatcttacatcaagttgaaaacaaaacatcagaagtcaaacagctgataaaagcaatccaactcacttataatcctgatgaatcatcaaaaccaaatatgatagacgctgctat

SEQ ID NO: 8468 - DNA, 370 bp, Homo sapiens
ggtgtggtagttagcacatgtagtcccagctacttgggaggctgaagcaagaggattgcttgagcctgggaaatcgaggctggagtgagccatgattgccattgcactccagcctgggagatagagcggaaccctgtttcaaaaataataataataatttcatcttttaaacatgattgtgagaaaccaaataaggtaccgttttctctgttgttgtgaaatgtctttcccatttcctcctgtgtcctctgtcttctttctttactttgtcatatgaacttattgcttctgcaggatgagtgaggggaaatgggaacactctggaataaagatggcggtactttgtacttgcctgaaaatccctgagcat

SEQ ID NO: 8469 - DNA, 370 bp, Homo sapiens
actcggccccgtgagtcaccactgtgggaagaagggttgtaaaaggaaataatcctggcctcttggggctgggttagggtgaagctgggtacctgacctgcccacactcttaggaaatggaaccctgaacaaacactctggcattgacttcaaacagcttaacttcctgacgaagctcaacgagaatcactctggagaggtgacccctgcccttcttgcccttccctcactaaacccccataaattacttgctttgtacctgttttaagtttttcctccagttagtgggcaaggaagtggcagcaacatttcaagcctcctaacccctacctgtcctgcagctatggaagggccgctggcagggcaatga

SEQ ID NO: 8470 - DNA, 383 bp, Homo sapiens
  misc_feature (1)...(383): n = A,T,C or G
cggacgcgtggggactagttctagatcgcgagcggcgccctttttttttttggccgggggaattttttttgcccggaaaaagtagggaaaaaaccattccggtggttaaaaaaggaaagggggaaaattttataaaggagtgggtcttgggaccaaaagtttaaggggaaagtgggaccggaaacccgggttaagggtttagggtttaaattggttaaccaaaaaaacctcagccggggttgtttaggagggttttgaaccctaaatgggcttttaaagccgggaacccttgcggaaaaatcctgggggaaagggccctgaaccttgtggtttccggggaaactaaaatgggaataaatccaaagttggttccccagaaaatn

SEQ ID NO: 8471 - DNA, 374 bp, Homo sapiens
acttatcaaaccaaagtagacaaggatctacagtctttggaagacatcttacatcaagttgaaaacaaaacatcagaagtcaaacagctgataaaagcaatccaactcacttataatcctgatgaatcatcaaaaccaaatatgatagacgctgctactttgaagtccaggaaaatgttagaagaaattatgaaatatgaagcatcgattttaacacatgactcaagtattcgatatttgcaggaaatatataattcaaataatcaaaagattgttaacctgaaagagaaggtagcccagcttgaagcacagtgccaggaaccttgcaaagacacggtgcaaatccatgatatcactgggaaagattgtcaaga

SEQ ID NO: 8472 - DNA, 416 bp, Homo sapiens
cgcccacccacagaagattaactttgtggcgccccttcctccagccctccccgtgacatcttccagtttttttgctgccccaaacccatactggaattcaccaactgggggtatataccccaacactaggctccccaccagccatatgccttctcatctgggcacttactactaaagacctggcggaggcttttcccatcagcgtgcattcaccagcccatcgccacaaactctatcggagaacatgaatcaaaagtgcctcaagaggaatgaaaaaagctttactggggctggggaaggaagccggggaagagatccaaagactcttgggagggagttactgaagtcttactacagaaatgaggaggatgctaaaaatgtcacgaatatggacatatcatctgtggactgacctt

SEQ ID NO: 8473 - DNA, 432 bp, Homo sapiens
  misc_feature (1)...(432): n = A,T,C or G
cccacgcgtccgcccacgcgtncgcagcacgggcagtccagtgcagtagcccatacacacacacgcatgtacacacaagcatgcacacacacacggtaaccagcaagccaggaggccccagcagaggcccgtgtgtgatgctgtgaactcccagaggagaggagcttgcgggggcctggaagggtgggccaggctcggactgtggagcagggcaggctaaagggcttgaaggccctggacgtgaggcctggtctgagcacaggcctggaggtcggcctggggactcatgcaggctggtacaggagagaggttcctgaggcagataatgccgtcagcactacttaatataacactcagaaagcccggcctcctgccatgggcacaactctgcagatttgagggtaaatgccactgcagggctattctctcgtn

SEQ ID NO: 8474 - DNA, 462 bp, Homo sapiens
  misc_feature (1)...(462): n = A,T,C or G
gcccacatgatagcctgcggaccttgacggactttccgggncgacccacgcgtgcgaactcctaattgttattgattcatgagttatctataaggtggggttttactttcgagcgtgaggactttgtaaatgctccatccttttgtgatgtaacactgttggccgcccaacctatagtgagtgtgacttttgtccttggaaatttatgaaaatgattttatgctgtaactcgaaacttatctggatgagagttgcatatatagctggaaagaatgtatatactatagtggtccaaatgtcatttaggtcagggtggttgatagggcttacatcttcttaattctttatgattttttaaaatctccttattttgtcagttatgataagtgttaaaattttcagctctgattttagagtcatctgtgtgtgcctttagtcctgtcagtttttgcttcgtgtgcg

SEQ ID NO: 8475 - DNA, 480 bp, Homo sapiens
  misc_feature (1)...(480): n = A,T,C or G
natgatcgccttaggaccgttgatatcctcgggtcgacccacgcgttcggcgagacatctacgcagcgaaatcgagcctggccttgagggtccacaccgcgagggaagatgcgtgcgcccattccagagcctaagcctggagacctgattgagatttttcgccctttctacagacactgggccatctatgttggcgatggatatgtggttcatctggcccctccaagtgaggtcgcaggagctggtgcagccagtgtcatgtccgccctgactgacaaggccatcgtgaagaaggaattgctgtatgatgtggccgggagtgacaagtaccaggtcaacaacaaacatgatgacaagtactcgccgctgccctgcagcaaaatcatccagcgggcggaggagctggtggggcaggaggtgctctacaagctgaccagtgagaactgcgagcactctgtgaatgagctgcgctatggagcc

SEQ ID NO: 8476 - DNA, 381 bp, Homo sapiens
  misc_feature (1)...(381): n = A,T,C or G
gcaccatcactgacctgggacagtgaatcgacaatgccgtcttctgtctcgtggggcatcctcctgctggcaggcctgtgctgcctggtccctgtctccctggctgaggatccccagggagatgctgcccagaagacagatacatcccaccatgatcaggatcacccaaccttcaacaagatcacccccaacctggctgagttcgccttcagcctataccgccagctggcacaccagtccaacagcaccaatatcttcttctccccagtgagcatcgctacagcctttgcaatgctctccctggggaccaaggctgacactcacgatgaaatcctggagggcctgaatttcaacctcacggagattccggaggctcagatn

SEQ ID NO: 8477 - DNA, 417 bp, Homo sapiens
  misc_feature (1)...(417): n = A,T,C or G
aagggggtcaaaggaagacttgaagcacagagggctagggaggtggggtacatttctctgagcagtcagggtgggaagaaagaatgcaagagtggactgaatgtgcctaatggagaagacccacgtgctaggggatgaggggcttcctgggtcctgttccctaccccatttgtggtcacagccatgaagtcaccgggatgaacctatccttccagtggctcgctccctgtagctctgcctccctctccatatctccttcccctacacctccctccccacacctccctactcccctgggcatcttctggcttgactggatggaaggagacttaggaacctaccagttggccatgatgtcttttcttctttttcttttttttaacaaaacagaacaaaaccaaaaaatgtcaaaaaaan

SEQ ID NO: 8478 - DNA, 486 bp, Homo sapiens
  misc_feature (1)...(486): n = A,T,C or G
atagatanccnttcggnaccactgatgaaccctccgggtcgacccacgcgtncgctctagagattatttgttgtactgtcttgttgccttaatacgaattaatcattaaaaaataaattgaaaaccagaaattcaaactgcccatagacaatcatataaaagttgggaaaatgagaaatggagccttaaccattgaaagtctcccctcctccattcctagctcacacaattccaggaacagaatcctcaacataaacctaagcttcccctctgctgcattaagaaagtgtcacttctttgcgtcgaatgggttgaaagctttgggagatgaacgggaaatttcaagtccaccactttcatcaatttcccttgttcttcccgttctcagtccgcactcccaaggcacgggcagcttcgccgggaagcggcttgagggagttggcctgcctcgtggccgcgggggagggcaagcaaagcgcggtggcg

SEQ ID NO: 8479 - DNA, 458 bp, Homo sapiens
  misc_feature (1)...(458): n = A,T,C or G
naatggagcgcactcggnaccgcnccggaattccattgatgaccctcgcgaccgcttcctcaacaaatggatttatgtgtaccacggcttttccaacatgagcctgaccctggtgcacttcgtggtcacctggctgggcttgtatatctgccagaagctggacatctttgcccccaaaagtctgccgccctccaggctcctcctcctggccctcagcttctgtggctttgtggtcttcactaacctttctctgcagaacaacaccataggcacctatcagctggccaaggccatgaccacgccggtgatcatagccatccagaccttctgctaccagaaaaccttctccaccagaatccagctcacgctgattcctataactttaggtgtaatcctaaattcttattacgatgtgaagtttaatttccttggaatggcgtttgctgctcttggcgtat

SEQ ID NO: 8480 - DNA, 379 bp, Homo sapiens
tgttctaaggtgatccagacgcaagatggctgtcctctctaaggaatatggttttgtgcttctaactggtgctgccagctttataatggtggcccacctagccatcaatgtttccaaggcccgcaagaagtacaaagtggagtatcctatcatgtacagcacggaccctgaaaatgggcacatcttcaactgcattcagcgagcccaccagaacacgttggaagtgtatcctcccttcttattttttctagctgttggaggtgtttaccacccgcgtatagcttctggcctgggcttggcctggattgttggacgagttctttatgcttatggctattacacgggagaacccagcaagcgtagtcgaggagccctgggg

SEQ ID NO: 8481 - DNA, 417 bp, Homo sapiens
actcataagaggtggaaccagaaaatatgcatttgaactgaaagaaaagcttgtccgacgaaccgcgatggatgtgactgactttgtcaactgggcctctttcataaatgatgctcctgttctcattagtcaaaaactgtctcctatatataatctggttccagtgaaaatgaaaaatgcacacctaaagaaacaaaacttggaaagagccattgaagactatatcaatgaatttagtgtaagaaaatgccacacatgccaaaatggaggtacagtgattctaatggatggaaagtgtttgtgtgcctgcccattcaaaattgagggaactgcctgcgaaatcaagcaacaaaaaatttctgaaggattgccagccctacagttccccaatgaaaaatagagctgttggcttctctg

SEQ ID NO: 8482 - DNA, 380 bp, Homo sapiens
agttctttttgagaaggtttttcaatatctgacttatttcacagttctcttcaggttttccagataattggggtcagatttggcaatatctatctctgcacgaatctggcctttttatccaagtgggctaacttattggcttcaggtttttcagagtattcacttataatgttatttaacttcctaagggccattagtgatcatctctcttttgttcacaatattgagagtgtatcttatttctcataatctcttttttcactgttgggcaagaaaacagacagaggcagcacatggagaagtgacagattctctagtgggaaggctttgaacataatacctggcaagccagaatgatgcccacaacccccaaggagctt

SEQ ID NO: 8483 - DNA, 449 bp, Homo sapiens
  misc_feature (1)...(449): n = A,T,C or G
aatggagnccctcggaccgcccggaatcttgtgatcttgcgtccgcggacgcgtggggcaactcaggatggcatcaggctttttacgctgcacccgaaaactccggaactgggtggtggagcaagtggagagtgggcagtttcccggagtgtgctgggatgatacagctaagaccatgttccggattccctggaaacatgcaggcaagcaggactttcgggaggaccaggatgctgccttcttcaaggcctgggcaatatttaagggaaagtataaggagggggacacaggaggtccagctgtctggaagactcgcctgcgctgtgcactcaacaagagttctgaatttaaggaggttcctgagaggggccgcatggatgttgctgagccctacaaggtgtatcagttgctgccaccaggaatcgtctctggccagccagggactcaag

SEQ ID NO: 8484 - DNA, 419 bp, Homo sapiens
gagaaaatgctgagaagcttctgcagttcaagcgttggttctggtcaatagtagagaagatgagcatgacagaacgacaagatcttgtttacttttggacatcaagcccatcactgccagccagtgaagaaggattccagcctatgccctcaatcacaataagaccaccagatgaccaacatcttcctactgcaaatacttgcatttctcgactttacgtcccactctattcctctaaacagattctcaaacagaaattgttactcgccattaagaccaagaattttggttttgtgtagagtataaaaagtgtgtattgctgtgtaatattactagcaaattttgtagatttttttccatttgtctataaaagtttatggaagttaatgctgtcatacccccctggtggaccttataga

SEQ ID NO: 8485 - DNA, 551 bp, Homo sapiens
  misc_feature (1)...(551): n = A,T,C or G
tgcgaacatcgagcacttcaattgaaacttattcgcactgattttaatacagatgggtggtatagaattcccacacaaannnanattttgatncccttcggaanncccnnnnnnnnnnattgagagtatgcggaaccgcnnccggaancccgggncgacccacgcgnccgagcaagatggccgccgctgaggaaggctgnagggtttgggccgaagcggacagggaattggaggagcttctggaaagtgctcttgatgatttcgataaagccaaaccctccccagcacccccttctaccaccacggcccctgatgcttcggggccccagaagagatcgccaggagacactgccaaagatgccctcttcgcttcccaagagaagtttttccaggaactattcgacagtgaactggcttcccaagccactgcggagttcgagaaggcaatgaaggagttggctgaggaagaaccccacctggtggagcagttccaaaagctctcagaggctgcagggagagtgggcagtgatatgacctcccaacaagaattc

SEQ ID NO: 8486 - DNA, 459 bp, Homo sapiens
  misc_feature (1)...(459): n = A,T,C or G
naatagatcagcaatcggaaccgccccggaantccaatgagcgacactcgtcgancgcgaangcataaaattataccaatggaaaaatataattttttgccactgttttgtgaacggaggttttgtacgctaaatttcatccttatttggcgtgaaagttgatgcaaagtttatgtaccatgagacttctagtgattgcctactttcacatttatttaaatttttgtgaaagaaaatacagttttaaaggctataggaatgtgttatatgtaccttaaacagataatttaattttagcaatttatcataactgatacttagctaacaattgtccataacttgtttaagtgtaagaaataccatttcaggaatgaaaaagaaggaatactactttctaagaaagaagatcttataatagacatatttagtaggttaaactacttctttgacagaatagtt

SEQ ID NO: 8487 - DNA, 373 bp, Homo sapiens
tgggcgcatcttcttttgcgtcgccagccgagccacatcgctgatacaccatggggaaggtgaaggtccgaatcaacggatttggtcgtattgggcgcctggtcaccagggctgcttttaactctggtaaagtggatattgttgccatcaatgaccccttcattgacctcaactacatggtttacatgttccaatatgattccacccatggcaaattccatggcaccgtcaaggctgagaacgggaagcttgtcatcaatggaaatcccatcaccatcttccaggagcgagatccctccaaaatcaagtggggcgatgctggcgctgagtacgtcgtggagtccactggcgtcttcaccaccatggagaaggg

SEQ ID NO: 8488 - DNA, 451 bp, Homo sapiens
  misc_feature (1)...(451): n = A,T,C or G
nattgagcccttcggaccgcccggaatccatgacgaccttcgcgtccgagcaatatcaaggctccggcggcgtcgccatggatgtggaacggagtcgcttcccctactgcgtggtgtggacgcccatcccggtgctcacgtggtttttccccatcatcggccacatgggcatctgcacatccacaggagtcattcgggacttcgcgggcccctactttgtctcagaggacaacatggcctttggaaagcctgccaagtactggaagttggaccctgctcaggtctatgctagcgggcccaacgcatgggacacggctgtgcacgacgcctctgaggagtacaagcaccgcatgcacaatctctgctgtgacaactgccactcgcacgtggcattggccctgaatctgatgcgctacaacaacagcaccaactggaatatggtgacgctctg

SEQ ID NO: 8489 - DNA, 480 bp, Homo sapiens
  misc_feature (1)...(480): n = A,T,C or G
aatgacgcctcggaccgcgatgagtccttgggcgacccacgcgnccggagaaagggaaaaaattataggtagatgatcttattataatttgaataattttgagctatcaaaatgtctttgtaattttcacaaccgctgtccattgtttgaggatgttacctactaaactgaaaacattcattccatatctacttacacatacaccagcaacagtataaatgtaagcctaactttgcaaaattcgtaataatttagtgatggaattttttaataacatgcagtatataaatgtgcagattttatgcgtgttgacaaaatcatttttcagcttgcaaaatgggactgcaatattacatttttcacttaagcagttttttacatctacgttgttgctttctaaaatgaatgtgaatgccatcttttatgactgcaacttgccttttccattacagaaatttttgtttgatgtaatcaataaan

SEQ ID NO: 8490 - DNA, 483 bp, Homo sapiens
  misc_feature (1)...(483): n = A,T,C or G
natggagagcatttcgaaccgctaatgatatcttgtgaacccacgcgtacgnccacgcgtccgcccacgcgggcgataacacgatctgataatcattcagttattaaattgtaaataattagtgggatgggttcttgggtttaagtccactgaataaaagctatgaaattgcactctgagtcaaccatccactaggatagaataccgaaatctgtgcatgcaaaaataggagatgggcccatttgcacacaattcgtaggtatgcagtctgctatataaatatgttcacatgcactgtgtgtatgaaaatagatggtctgtgttcagacaaaagtaaaacatttttttcaaatagttatatttaaaggttgtctgggagaaatttatgaaacgcaggctgagtctatttgacatcagaaatttccactttaaaccaaaataataagaaactttaatctgtatatttacaacctttgttgagta

SEQ ID NO: 8491 - DNA, 397 bp, Homo sapiens
  misc_feature (1)...(397): n = A,T,C or G
actagttctccccagggtctggtccctgacgacactcattgagggccccgccgctaccccagcagtggcctcccaagttcgcggaacgcanctgaccggctccctctggactgggtgacatgactgctcccaagcagtcgtttgtaaactgagtttctgtaaaacaattttatttttcatatgtgactgtagcggggtatgatttgaactttgttttccgtcccccagcccggattctctgtcttctcctgtacagccgttccgttttcttacctcgtctccgtcaccgaggccctcagccctgaacacaaggactgggcagtttccctattgattcctgaacctggaacttaagacatcttccgaggggcccccccttgccacaccctctagctgg

SEQ ID NO: 8492 - DNA, 431 bp, Homo sapiens
cggacgcgtgggcggacgcgtgggcagtgtgggacctatgggctctacacacgggtaaagaactatgttgactggataatgaagactatgcaggaaaatagcaccccccgtgaggactaatccagatacatcccaccagcctctccaagggtggtgaccaatgcattaccttctgttccttatgatattctcattatttcatcatgactgaaagaagacacgagcgaatgatttaaatagaacttgattgttgagacgccttgctagaggtagagtttgatcatagaattgtgctggtcatacatttgtggtctgactccttggggtcctttccccggagtacctattgtagataacactatgggtggggcactcctttcttgcactattccacagggataccttaattctttggttcctctttacctagt

SEQ ID NO: 8493 - DNA, 413 bp, Homo sapiens
aggaggaagagatctataccctaagcagatagcaaagaagataatggaggagcaattggtcatggccttggtttccctcaaaacaacgctgcagatttatctgcacaaacatctccacttttgggggaaaggtgggtagattccagttccctggactaccttcaggaggcacgagagctgggagaagaggcaaagctacaggtttacttgggagccagctgagaagagagcagactcacaggtgctggtgcttggatttagccaggctcctccgagcacctcatgcatgtcccagcccctgggccctagccctttcctgccctgcagtctgcagtgccagcacgcaaatcccttcaccacagggtttcgttttgctggcttgaagacaaatggtcttagaattcattgagacg

SEQ ID NO: 8494 - DNA, 404 bp, Homo sapiens
acttcatcatccaaattccggagaaagacgatgccctctgcttcaacatcgatgaagccccaggcacagtgctgcgccttattcaggatgcagtcacaggcctcacagttaatgggcagatcactggcgacaagagaggcagccctgactccaagaccagaaagacttactttggaaaactgggcatcgccaatgctcagatggacttccaggtggaggtgacaacggagaagatcaccctgtggaacagggccgtgccgagcactttcagctggctggacacagtcacagtcacgcaggatgggctgtccatgatgatcaacaggaagaacatggtggtctcctttggagatggggttaccttcgtggtcgtcctacaccaggtgtggaagaaacatcctgtg

SEQ ID NO: 8495 - DNA, 423 bp, Homo sapiens
  misc_feature (1)...(423): n = A,T,C or G
ataggcaagagatgccctacatggatgctgtggagcatgagattcagcggttcatcaccctcgtgccctccaacctgccccatgaagcaacccgagacaccattttcagaggatacctcatccccaagggcacagtcgtagtgccaactctggactctgttttgtatgacaaccaagaatttcctgatccagaaaagtttaagccagaacacttcctgaatgaaaatggaaagtttaagtacagtgactatttcaagccattttccacaggaaaacgagtgtgtgctggagaaggcctggctcgcatggagttgtttcttttgttgtgtgccattttgcagcattttaatttgaagcctctcgttgacccaaaggatatcgacctcagccctatacatattgggtttggctgtatcccaccan

SEQ ID NO: 8496 - DNA, 483 bp, Homo sapiens
  misc_feature (1)...(483): n = A,T,C or G
tttatgtacnctgcgcaaccgctattattatctttcggaaccccccgnncggaaaggacccctcggggccatcttatgcagtaagaattgacctgctcttacatatattgatggtcctcaggcgaaactctcaattttgaggtagtcatgtctcagctgagggatatcacacaggaatgaaacacacttgaaaatgagattgacctggagattttttttccctaatctctcataccttaattggaaaaataatcaattaattctatgttaattaggatatacaaagctcaccctccttgaaagtgactaaggcaagccctgaagatcttcctcacctccttttatttttctataaccttgtctcctccaccaccacagggaagacaatcacagtgggtcaagagcttcacgtgggctctgccatgacctctgagacctgcttatgatcagtgcaatgaactgtataagaacttgccgagagag

SEQ ID NO: 8497 - DNA, 402 bp, Homo sapiens
gtcactggctctccaagtgccagaggtgggcaggtggtggcactgagcccccccaacactgtgccctggtggagaaagcactgacctgtcatgcccccctcaaacctcctcttctgacgtgccttttgcacccctcccattaggacaatcagtcccctcccatctgggagtccccttttcttttctaccctagccattcctggtacccagccatctgcccaggggtgccccctcctctcccatccccctgccctcgtggccagcccggctggttttgtaagatgctgggttggtgcacagtgatttttttcttgtaatttaaacaggcccagcattgctggttctatttaatggacatgagataatgttagaggttttaaagtgattaaacgtgcagactat

SEQ ID NO: 8498 - DNA, 413 bp, Homo sapiens
  misc_feature (1)...(413): n = A,T,C or G
aagctatttgcctggctccagcagatgatgagataatgaggtagtgggttttttattactgttccattttgcaacatcctgcaacaccatcctgggagacaagagcattacccagcttggctttcacgggggagggttgtattcagtaaaaaagaatagtaaatataaggtcactgagattctaagtaagatagtaaatctaaggtcactgagccaaatccttttcaataggcatatattaacaggctgcttattttggcggaggttacatatggatgaaaatgaatcttagtcactgaatattcatatacatttcccccaaaaccttagacattcatagtagattttaattagttagctttctaactagtcagatttctgcccaaagtgcttagtcaatagtaattaagatn

SEQ ID NO: 8499 - DNA, 468 bp, Homo sapiens
  misc_feature (1)...(468): n = A,T,C or G
ggagatgtgnncaagatgcccgtggacagcntcgaatcccggcgaacacgcgtccggaacacgcacgacccagccaaagcctccaacacgtttgacattgtttatatcgagttcaaaaaagggggccctgtgaaggtgaccaacgtcaaggatggcaccacccaccaaacctccttggaactcttcatgtacctgaacgaagtcgcggtcaagcatgtcgtgggccgtattgacatcggggagaaccgcttcattggaatgaagtcccgaggtatctacgagaccccagcaggcaccatcctttaccacgctcatttagacatcgaggccttcaccatggaccgggaagtgcgcaaaatcaaacaaggcctgggcttgaaatttgctgagctggtgtataccgatttctggcacagccctgagtgtgaattttgccgccactgcatcgccaaacaccacgagcgagtg

SEQ ID NO: 8500 - DNA, 394 bp, Homo sapiens
cgcatccccagcccgccgtcatggccgcctacaaactggtgctgatccggcacggcgagagcgcatggaacctggagaaccgcttcagcggctggtacgacgccgacctgagcccggcgggccacgaggaggcgaagcgcggcgggcaggcgctacgagatgctggctatgagtttgacatctgcttcacctcagtgcagaagagagcgatccggaccctctggacagtgctagatgccattgatcagatgtggctgccagtggtgaggacttggcgcctcaatgagcggcactatgggggtctaaccggtctcaataaagcagaaactgctgcaaagcatggtgaggcccaggtgaagatctggaggcgctcctatgatgtcccaccacctcc

SEQ ID NO: 8501 - DNA, 440 bp, Homo sapiens
  misc_feature (1)...(440): n = A,T,C or G
cccacgcgtccgggatggtcaggacctggtccattgcaaccaaaatggggacttcctgggtagggaggtcactccctctactcactgagctaggattagggagggttattgccccaaccattgcaatgggaggtggagggacaggctcagcctcctcattgtctaaatgaggcctaaatgtgtgaagtgcgacttctgcttttgtgtaccccaccaccccattaccacagctgcctttgtgtgtttgtgtcaataaaaagcccaaccctgttnttnnnnacaaanaaaaaaaaaaaaaattnntaattctcgtgtccttaaaaaaggttctaggtggggcccaagtttccggggggaggaggcgacccaccttgccccaaaacgggaattttttttttaaactctgtggccttccaaaactaaccctttctttgggagga

SEQ ID NO: 8502 - DNA, 458 bp, Homo sapiens
  misc_feature (1)...(458): n = A,T,C or G
ggcactgaagcctcggaccactgagatctccggaacgacccacgcgttcgctcatacctggcccacttggtgggtgatcaggatctttttgacagttttctcttggcctatgtgcatgaattcaaattccgaagcatcttagccgatgactttctggacttctacttggaatatttccctgagcttaagaaaaagagagtggatatcattccaggttttgagtttgatcgatggctgaatacccccggctggcccccgtacctccctgatctctcccctggggactcactcatgaagcctgctgaagagctagcccaactgtgggcagccgaggagctggtcatgtcggccattgaagccgtggccatctctccctggaagacctaccagctggtctacttcctggataagatcctccagaaatcccctctccctcctgggaatgtgaaaaaacttgn

SEQ ID NO: 8503 - DNA, 394 bp, Homo sapiens
tgcgctgagccaccacgagaggctcaagtgtgatgagtggagtgttaacagtgtagggaaaatagagggtgtatcagcagagaccaccgaagactgcatcgccaagatcatgaatggagaagctgatgccatgagcttggatggagggtttgtctacatagcgggcaagtgtggtctggtgcctgtcttggcacaaaactacaataagagcgataattgtgaggatacaccagaggcagggtattttgctgtagcagtggtgaagaaatcagcttctgacctcacctgggacaatctgaaaggcaagaagtcctgccatacggcagttggcagaaccgctggctggaacatccccatgggcctgctctacaataagatcaaccactgcagattt

SEQ ID NO: 8504 - DNA, 492 bp, Homo sapiens
  misc_feature (1)...(492): n = A,T,C or G
aggcgggtnnnnnnnnagaactgttgcctccgcgaccggctagngaccctccggaacagccacgcattctatagtatacccacacaggtacagtaaaatctgtgaaggaatcagagtagtctcttctccaacagagcgtatgacccagcttcacggagaaggtggtagattagctcatctgggaggctgagtagaagcttgtcattatagagggagaacatctgaagggtggacaacagcttgaataaccttgaaaggacaaaagaggacggtctgccctggaaatattaagaagtctcacatgattagacacacgatattaggggaaaggcataaggtgaattgagtcaatgaggtcaaagagaagctagctggaggaacaggcgatcataaaatgagtaaaagtatatattcaaagattctttttagaagggctacacaggatggataangggagagagagagttgaggcacaaagacaaattggaaagg

SEQ ID NO: 8505 - DNA, 404 bp, Homo sapiens
gaaggatagcccacgaccttctgatcacagcacagtttttgcagaggcaaggggagcatgtcgcccaacgggaaacttcagagtcacttcattctcatcttcctgacggctctaagaggggaaagccggtacctagagctgagggaagcggcggactacgatcctttcctgctcttcagcgccaacctgaagcgggagctggctggggagcagccgtaccgccgcgctctgcggtgcctggacatgctgagcctccagggccagatcaccttcaccgccgaccggccgcagctgcactgcgcagccttcttcatcagcgagcccgaggagttcattaccatccactacgaccaggtctccatcgactgtcagggcggcgacttcctgaaggtatttgatgggtg

SEQ ID NO: 8506 - DNA, 181 bp, Homo sapiens
  misc_feature (1)...(181): n = A,T,C or G
cttagggncaagaagnctgaaagagtcttgagggaaaaccagtgtgcctacatcaatgattccattggcttacatcgagtagagaacatcagccatacggaacctgctgtgagccttcacttgtacagtccaccttttgatacatgccatgccctcgatcaaagaacaggacataaaaacc

SEQ ID NO: 8507 - DNA, 387 bp, Homo sapiens
ggcagcaaatgttgtaaacatcctgaagtttaaagattgccctgtgcagaagactatctatccgtggtgctgaaccagttatgtgtgttgcatgagaaaacgccagtaagtgacagagtcaccaaatgctgcacagaatccttggtgaacaggcgaccatgcttttcagctctggaagtcgatgaaacatacgttcccaaagagtttaatgctgaaacattcaccttccatgcagatatatgcacactttctgagaaggagagacaaatcaagaaacaaactgcacttgctgagctcgtgaaacacaagcccaaggcaacaaaagagcaactgaaagctgttatggatgatttcgcagcttttgcagagaagtgctgcaaggctgag

SEQ ID NO: 8508 - DNA, 392 bp, Homo sapiens
tcagtgagactgagtctaggggctcaaaatctggcatcttcacaaatacaaaggaatccagttctcatcaccctgggatagctgaattcccttcccgtggtaaatcttcaagttacagcaaacaatttactagtagcacgagttacaacagaggagactccacatttgaaagcaagagctataaaatggcagatgaggccggaagtgaagccgatcatgaaggaacacatagcaccaagagaggccatgctaaatctcgccctgtcagaggtatccacacttctcctttggggaagccttccctgtccccctagactaagttaaatatttctgcacagggttgccatggccccttgcatttccttcttaactctctagtacacgtcattgaa

SEQ ID NO: 8509 - DNA, 389 bp, Homo sapiens
aatcggagccagtgtctagaggaccacacctgggttcctccctttcccatctgcaaaagtagggactgtgaccctcctgggaatccagttcatggctattttgaaggaaataatttcaccttaggatccaccattagttattactgtgaagacaggtactacttagtgggcgtgcaggagcagcaatgcgttgatggggagtggagcagtgcacttccagtctgcaagttgatccaggaagctcccaaaccagagtgtgagaaggcacttcttgcctttcaggagagtaagaacctctgcgaagccatggagaactttatgcaacaattaaaggaaagtggcatgacaatggaggagctaaaatattctctggagctgaaaaaagctga

SEQ ID NO: 8510 - DNA, 451 bp, Homo sapiens
  misc_feature (1)...(451): n = A,T,C or G
atgtgaacctgatagctgaaggccnttcgcacggaaccccgggncgacccacgcgtccgcggacgcgtgggcggacgcgtgggcggacgcgtggttttccattttgagccagttcagttaggtgtcaattgatactattttaattttttatgcaatctgatgagatgagctcagatttaaaaatctcaaaagcacgtttattgtaacaagaattgttatgtattaatactgcagttttcaataaagattgacttgtgttgcaaaaaaaaaaaaaaggggggcccgtttaaaagatcccttggggggcccaagttttaccggggagggaaaggaaatatttttttctttttggggagcctttttaaaacctgcctggggtttttggaaaagaaacttttttttggggggggaccaaatgggaccaccccccccacagaaattaaaggctgag

SEQ ID NO: 8511 - DNA, 388 bp, Homo sapiens
cggacgcgtgggcaggcagtacagtgctggaaaagcttcatagagatgcagacaccccagccccattattaaatcaacctgagccacatgttatctaaaggaactgattcacaactttctcagagatgaatattgataactaaacttcatttcagtttactttgttatgccttaatattctgtgtcttttgcaattaaattgtcagtcacttcttcaaaaccttacagtccttcctaagttactcttcatgagatttcatccatttactaatactgtatttttggtggactaggcttgcctatgtgcttatgtgtagctttttactttttatggtgctgattaatggtgatcaaggtaggaaaagttgctgttctattttctgaactc

SEQ ID NO: 8512 - DNA, 433 bp, Homo sapiens
gcaaagaatgtgaggaaattatcaggaaaggaggttaaacatctgaaatgtatctcattcaacctgacagttctgtcaaaccgtatagagtatactgtgacatgaatacagaaaatggaggatggacagtgattcagaaccgtcaagacggtagtgttgactttggcaggaaatgggatccatataaacagggatttggaaatgttgcaaccaacacagatgggaagaattactgtggcctaccaggtgaatattggcttggaaatgataaaattagccagcttaccaggatgggacccacagaacttttgatagaaatggaggactggaaaggagacaaagtaaaggctcactatggaggattcactgtacagaatgaagccaacaaataccagatctcagtgaacaaatacagaggaacagccggtaatgc

SEQ ID NO: 8513 - DNA, 436 bp, Homo sapiens
  misc_feature (1)...(436): n = A,T,C or G
aaaacattagtttgaaaaatccccgttcccttcatccactgcccttgttctccacgtgggagtgtgcttgtggcccctcagaaagatagtctgctggctcctaggggttggggtgggggacacacctttttctcaggaagaggtgatggcaatgtaaaacatctaagcaaagttttaaatgaaaaaaaggaaacacatttaaacatcctgataatggagggaaggggggcacatttacacatagcccagaacttgtagaattctgcatagtgaatgtatattgaattagtctcctgccttatacattcaggaggaataaatttccataatgtaaggcnnaaaaaaaaaaaaaaaaaaaaaaaaaangggggggggcccttttaaaagattctttggggggcccaattttaccgggggtgggaagggttttactttt

SEQ ID NO: 8514 - DNA, 418 bp, Homo sapiens
ctgtaggtgcccacagtttctatagtcaagaggagaacttctcccacaaatgacaaatgcaaatccccctagaagcgactggttgaggctggagtgcccaggacctttgatgggattgttggggaaggaggggcacaaagcaggagctgctggccctggggtgtcactgcccagacccctgctttctctgcagactctctgaactgcctaaagaactgcatgagcatcacgatgggctctgtgaggccctcggtggagcagttccataagtatcttccctggttcctgaacgaccggcccaacatcaaatgtcccaaaggcggcctggcagcatacagcacctctgtgaacttgacttcagatggccaggttttatcctccaggttcatggcctatcacaagcccctgaaaaactcag

SEQ ID NO: 8515 - DNA, 393 bp, Homo sapiens
tgtgtagtattttcccagtcagctttgccatactgacgtcaatcatttgagagaaattattcagattttatttttgtatctgtggtaacaaaacattaaccaaaagattttctgtccagaagcctccccgaccccccaagctatttgctcacattaacaaattaaagtgcctgaagcataattcattctttacctgtatactaaaaaccctgttgtattgatttttttataataagcctttttacctctgtgtaaaaaatatatatacaagtgtatgatgtacattttagttcttaacttttttttatggtttctaatatgtatgaccaatgtagccattgctttaaaatgtaccgtgtaaatataaacacatcctatcaaaaaaaaaaaaag

SEQ ID NO: 8516 - DNA, 393 bp, Homo sapiens
tctcaaactccagagctcaagagattctcctgcctcagcctcctaagtacctgggattacaggcatgtgccaccacacctggcttaaaatactatttcttattgaggtttaacctctatttcccctagccctgtccttccactaagcttggtagatgtaataataaagtgaaaatattaacatttgaatatcgctttccaggtgtggagtgtttgcacatcatttaattctcgtttcacctttgtgaaacatgcacaagtctttacagctgtcattctagagtttaggtgagtaacacaattacaaagtgaaagatacagctagaaaatactacaaatcccatagtttttccattgcccaaggaagcatcaaatacgtatgtttgttcacctt

SEQ ID NO: 8517 - DNA, 412 bp, Homo sapiens
cactgggaacacaaacttgctggcgggaagagcccggaaagaaacctgtggatctcccttcgagatcatccaaagagaagaaaggtgacctcacattcgtgccccttagcagcactctgcagaaatgcctcctcagctgcaaaacggcctgaacctctcggccaaagttgtccagggaagcctggacagcctgccccaggcagtgagggagtttctcgagaataacgctgagctgtgtcagcctgatcacatccacatctgtgacggctctgaggaggagaatgggcggcttctgggccagatggaggaagagggcatcctcaggcggctgaagaagtatgacaactgctggttggctctcactgaccccagggatgtggccaggatcgaaagcaagacggttatcgtcacc

SEQ ID NO: 8518 - DNA, 397 bp, Homo sapiens
gcgaaaaaaatcaaattttaaaatggacgatggatctgagtagacacttctcaaaaaaaatacatgcaagtgggcaataggcatatgaagaaatgctaaacatcactaattatcagggaaatacaaatcaaaactacaatgaaatatcatttcaccccagttaaaatggctattatctggccaggcgctgggattacaggcatgagccaccgcacccagccttcgcccacattacttttaacacacgttgtggcttaggtatttttgttatttatgaacatcataacataaaaataaccccttcatactgaagattcagagtcaacataacttttgtggttggatactattctactgcatatattctataatttagttaaccattccaatattttag

SEQ ID NO: 8519 - DNA, 402 bp, Homo sapiens
cggacgcgtgggattttagatttttaaaaaattctctttcaaaaattaccttactgaagcttcaaacaactctgagaagtaggtatcattgcattgataagacacaaggagactgagactccaaaaatgtgaatcagtggctctaagtcacagagttagcaaataacaaaacaaggccttagttttcaattgcagcattccatggaaggtggatggacatacctgatgaatgtgttacctgatcaaattagttttaccatcagtatagtatatctcttctttgaagagtcccagtgtgctgtatgtaattcagtgcttccagatttatttaagggctaaccccttttcctttttctatttcccagaattattctctataaaattaattttggaaaattcttt

SEQ ID NO: 8520 - DNA, 395 bp, Homo sapiens
  misc_feature (1)...(395): n = A,T,C or G
gcgctaggacttctagcccctgaactttcatccgaatacttcttttccaaaggagtgacttcaggcccttgtatgactgtcagcaggacgtgaccatggagaacactgtgtgtttcttggtcttgaccagcctctctcatgcttttggccagacagacatgtcgaggaaggcttttgtgctttccaaagagtcggatacttcctatgtatccctcacagcaccgttaacgaagcctctcatagccttcactgtgtgcctccacttctacacggaactgtactcgacccgtgggtacagtattttctcgtatgccgcctagagacaagacaatgagattctcatattgtggtctaaggatataggatacaggtgtacagtgggtgggtctgacatn

SEQ ID NO: 8521 - DNA, 400 bp, Homo sapiens
  misc_feature (1)...(400): n = A,T,C or G
attcagaagtcgcgtttctgtagtgtggtggattcccactgggctctggtccttcccttggatcccgtcagtggtgctgctcagcggcttgcacgtagacttgctaggaagaaatgcagagccagcctgtgctgcccactttcagagttgaactctttaagcccttgtgagtgggcttcaccagctactgcagaggcattttgcatttgtctgtgtcaagaagttcaccttctcaagccagtgaaatacagacttaattcgtcatgactgaacgaatttgtttatttcccattaggtttagtggagctacacattaatatgtatcgccttagagcaagagctgtgttccaggaaccagatcacgatttttagccatggaacaatatatcccatgggagan

SEQ ID NO: 8522 - DNA, 392 bp, Homo sapiens
  misc_feature (1)...(392): n = A,T,C or G
cccacgcgtccggcaactcgggaggctgaggcaggagaatggcgtgaacttgggaggcggagcttgcggtgagccaagatcgtgccactgcactctagcctgggcgacagagcaagactgtctcaaaaaaaaattaaaattaaaattaaaaacaaataatcctgccttttacaggtgaaactcggggctgtccatagcggctgggaccccgtttcatccatccatgcttcctagaacacacgatgggctttccttacccatgcccaaggtgtgccctccgtctggaatgccgttccctgtttcccagatctcttgaactctgggttctcccagccccttgtccttccttccagctgagccctggccacactggggctgcctttctctgactn

SEQ ID NO: 8523 - DNA, 393 bp, Homo sapiens
cggacgcgtgggcagcgtgcgggtgtgctctttgtgaaattccaccatggcgtaccgtggccagggtcagaaagtgcagaaggttatggtgcagcccatcaacctcatcttcagatacttacaaaatagatcgcggattcaggtgtggctctatgagcaagtgaatatgcggatagaaggctgtatcattggttttgatgagtatatgaaccttgtattagatgatgcagaagagattcattctaaaacaaagtcaagaaaacaactgggtcggatcatgctaaaaggagataatattactctgctacaaagtgtctccaactagaaatgatcaatgaagtgagaaattgttgagaaggatacagcttgtttttagatgtcctttgtccaatg

SEQ ID NO: 8524 - DNA, 402 bp, Homo sapiens
cccacgcgtgcgatggtgttgacagatacctctccattatgagctggacaaagccttctccgataggaacaccctcatcagcgtacctggacaaggtctcacactctgaggatgactgtctatctttcaaagatcaccaatactttaatgtacagcttatccagcctggagcagtcaaggtctacgcctattacaacctggaggaaagctgtacccgggtctaccatccggaaaaggaggatggaaagctgaacaagctctgccgcgatgaactgtgccgctgtgctgacgagaattgcttcatacaaaagtcggatgactaggtcaccctggaagaacggctggacaaggcctgcgagccaagagtggactatgtgtacaagacccgactggtcaagggtg

SEQ ID NO: 8525 - DNA, 423 bp, Homo sapiens
  misc_feature (1)...(423): n = A,T,C or G
cggacgcgtgggtcacgggtttgccgccagaacacatgtgtcgtgaaaactacccctaaaagccaaaatgggaaaggaaaagactcatatcaacattgtcgtcattggacacgtagattcgggcaagtccaccactactggccatctgatctataaatgcggtggcatcgacaaaagaaccattgaaaaatttgagaaggaggctgctgagatgggaaagggctccttcaagtatgcctgggtcttggataaactgaaagctgagcgtgaacgtggtatcaccattgatatctccttgtggaaatttgagaccagcaagtactatgtgactatcattgatgccccaggacacagagactttatcaaaaacatgattacagggacatctcangctgactgtgctgtcctgattagtgctgctgn

SEQ ID NO: 8526 - DNA, 392 bp, Homo sapiens
ctgaccacgactctggtctttcctgttgttggcccctctggggctctacagaaacaggctgggttccaggagcccatctcccggctgtctccccctgccccgagtctggaagagggcaaggacacttccattcctctgtaccatggagtcctgcagccccttaacccctgcgtggcaactgtgtacagcttacccctgcctccagttgcaccacttctagatgtgcctttaaaagatctaactatgggatgggagaacttgagggtgatcgggaacctcccctgctgagggtggtgtcagggttccgtgactccagtgggccagtggtagcctgtcccagacaactccgtcaccccagctctgcctgtgcctttatccctgacagctgctgc

SEQ ID NO: 8527 - DNA, 401 bp, Homo sapiens
  misc_feature (1)...(401): n = A,T,C or G
caggcttgttatgggtctagcancctctgtggcatctcctgtcacattgggaaaatgaagaattccaggacatgggcttggagggcgccggtggagctatttcttctctgtgctgccctgggctgtctcagtttgcctggctccagaggtgaaaggccacattcctttgggtcaaatgcagtcaacaagagctttgctaagagcagacagatgcggagtgtggatgttaccctgatgcccattgattgtgagctgtctagttggtcctcttggaccacatgtgacccctgtcagaagaaaaggtacaggtatgcctacttgctccagccctctcagttccatggggaaccgtgcaacttctctgacaaggaagtcgaagactgtgttaccaacagaccatg

SEQ ID NO: 8528 - DNA, 387 bp, Homo sapiens
gagaacctcgtgttcctggcgcagaaactgttcaactacagcagcagccacctggaggactacagtggcctgtctgtgtcctggtcccagttcaacagggagaatttaccaggacggaattacactttctggcaatggtttgacggtgtgatggaagtgttaaaaaaacatctcaagcctcattggaatgatggggccattttggggtttgtaaacaagcaacaggcccatgacctactcattaacaagccagatgggaccttcctcctgagattcagtgactcagaaattggcggcatcaccattgcttggaagtttgattctcaggaaagaatgttttggaatctgatgccttttaccaccagagacttctccattcggtcccta

SEQ ID NO: 8529 - DNA, 393 bp, Homo sapiens
  misc_feature (1)...(393): n = A,T,C or G
cggacgcgtgggggccaagatggccgcgtgtgggatcctcgggtaccgggagcgaacgaggaggttctggctcagtgcatccactctgggagagcgtggacctggttcctgggggcgatcgacagtcacccatcaacattcggtggagggacagtgtttatgatcccggcttaaaaccactgaccatctcttatgacccagccacctgcctccacgtctggaataatgggtactctttcctcgtggaatttgaagattctacagataaatcaggctgtacaagaaacatggtgctcacatctgcatctggtgagggcctcaaactgtttcccctcatgttggaaggccaaggggagccaacgtgcagagatcacatgctgcacttagtgcatn

SEQ ID NO: 8530 - DNA, 451 bp, Homo sapiens
  misc_feature (1)...(451): n = A,T,C or G
tggaaaccggtggnnnnnntgtaattttccggtcgacccacgcgtccgtgaaaatgtaggcaatgagtactcctcagaactggattatcaccacttatatatagatgagactgtgaataggaatatccgggctaaccttcgtgtgcttcgttcaatcctggaaaacctgagaagcaaaatacaaaagttagaatctgatgtctcagctcaaatggaatattgtcgcaccccatgcactgtcagttgcaatattcctgtggcgtctggcaaagaatgtgaggaaattatcaggaaaggaggtgaaacatctgaaatgtatctcattcaacctgacagttctgtcaaaccgtatagagtatactgtgacatgaatacagaaaatggaggatggacagtgattcagaaccgtcaagacggtagtgttgactttggcaggaaatgggatccatat

SEQ ID NO: 8531 - DNA, 397 bp, Homo sapiens
  misc_feature (1)...(397): n = A,T,C or G
ttcttagaccatacagtcattctcagggtatgcttgagttaatgctgtcggatgcatctgtcatacaaagtgtttaacatatacgatttcatgattttggaaatatgcatacacccatgatatcactggcacagtcaagatattaaatatatccatcacctccnaaaaaaaaaaaaaaaaaaaaaaaaggggggggcccttttaaaagattccttggggggcccaaattttccggggggtggaaaagaaaaatttttttctttttggggggggttttaaaaaccaccttgggatttttgggaaggaaccttttttttggggggggaacttttgggcccaccccccccccaaaatttaaggcttttggggaaaaaaaaaatttttaaggggtaaaggg

SEQ ID NO: 8532 - DNA, 414 bp, Homo sapiens
  misc_feature (1)...(414): n = A,T,C or G
ttctggactctgcttcccctccaggagggaccaccctccccgactggcctgggatatctttacaagcaggcactgtatttttttattcgccatctgatccccatgcctagcagagtgctggcacttagtaggtcctcaataaatatttattaaatgatgagatgatggaaaaaaaaaaaaaaaaaaaaaaaaaaaggggggggcctttttaaagaacccttggggggcccaaatttaacccgggctggcaaggaaaaatttttttctttaaggggggccaaataaaaaccaacctgggaattttgggaaaggaccttttttttgggggggggcctaattggcccaccctccctccagaaattaaagcctttagggaaaaataaaaattttaaggggtaaagggggaaaaactcn

SEQ ID NO: 8533 - DNA, 384 bp, Homo sapiens
tcgcggacgcgtgggtcgactcaatgagttaatactatttcactgagcccaagatggaaacttggtttgacctaaaacatctgattaatataggctagctgatttcttaaaaattcgttgcattgaaggatattttgcatgtctgtaacacctgtcaatacttgtttgtattgatttctgatattcttgcagctgactacgtgtaattgggcagatcagctttgcagtagattatgctgcatcctcgtggcaaaattctgtattcttagtgattgttacaaacccctttattgctgtctgagaaagtgaaagattgtgtatttctattaaaacatttacaatcaaaaaaaaaaaaaaggggcgccctttttaaagaaccctttg

SEQ ID NO: 8534 - DNA, 414 bp, Homo sapiens
  misc_feature (1)...(414): n = A,T,C or G
tgtatgccaaattagcatttagtattttgcacaaagtctaagggaccatggctgcctgccttggggaggaaccatatctccctctgggccgcttctggcctcttggagccatgggccaaaggccaaggggatgggcagaggtctgtgtttggtctggcccagttccccatcattaaactcagcctgactgctgcctannaaaaaaaaaaaaaaaaaaaaaaaaaaaaagannnncaattaaaaaaaaaataaaaagggggggggcttttttaaaaaatccctgggggggcccctttttttctggggggggaaaaaaaaaatttttttttttttggggggaaaaaaaaaacctttttgggggtatttagaaagacacccctcttttgggggggaaaaaatttcccagaacaccaa

SEQ ID NO: 8535 - DNA, 457 bp, Homo sapiens
  misc_feature (1)...(457): n = A,T,C or G
aatgaacgctttaggaccgcccggaatccggncaccatgagtccggtctgtagctgccacagcctccagcgggggctacagttgaaaccctcacaccacgcaggaagaggtcatcatcatgtcggacgatttcttatggtttgaaggcatagctttccctactatgggtttcagatccgaaaccttaagaaaagtacgtgatgagttcgtgataagggatgaagatgtaataatattgacttaccccaaatcaggaacaaactggttggctgagattctctgcctgatgcactccaagggggatgccaagtggatccaatctgtgcccatctgggagcgatcaccctgggtagagagtgagattgggtatacagcactcagtgaaacggagagtccacgtttattctcctcccacctccccatccaggtattccccaagtctttcttcagttccaag

SEQ ID NO: 8536 - DNA, 382 bp, Homo sapiens
gtcagcctagcaacaaagaagatgtggatgatcttgtgagtcagctaagacagacagaagagcaggtgaatgacttaaaggagagactcaaaacaagtacgagcaatgtggaacaatatcaagcaatggttactagtttagaagaatccctgaacaaggaaaaacaggtgacagaagaagtgcgtaagaatattgaagttcgtttaaaagagtcagctgaatttcagacacagttggaaaagaagttgatggaagtagagaaggaaaaacaagaacttcaggatgataaaagaagagccatagagagcatggaacaacagttatctgaattgaagaaaacactttctagtgttcagaatgaagtacaagatgctcttcagag

SEQ ID NO: 8537 - DNA, 410 bp, Homo sapiens
tcagtcgcgagcgaacgaccaagagggtgttcgactgctagagccgagcgaagcgatgcctaaatcaaaggaacttgtttcttcaagctcttctggcagtgattctgacagtgaggttgacaaaaagttaaagaggaaaaagcaagttgctccagaaaaacctgtaaagaaacaaaagacaggtgagacttcgagagccctgtcatcttctaaacagagcagcagcagcagagatgataacatgtttcagattgggaaaatgaggtacgttagtgttcgcgattttaaaggcaaagtgctaattgatattagagaatattggatggatcctgaaggtgaaatgaaaccaggaagaaaaggtatttctttaaatccagaacaatggagccagctgaaggaacagatttctg

SEQ ID NO: 8538 - DNA, 471 bp, Homo sapiens
  misc_feature (1)...(471): n = A,T,C or G
atgatcgtntgcgaaaatgatcgcccttcccgggnccacccacgcgtccgcccacgcgtccggcacctgggttggtcccgaagccttcaaccacctgcacgcctgccagggcctctctggggcagccatgaaggccctcggcctgctcctttgtcttgctcagctctggggctgccactcagccccacatggcccagggctgatttatagacaaccgaactgcgatgatccagaaactgaggaagcagctctggtggctatagactacatcaatcaaaaccttccttggggatacaaacacaccttgaaccagattgatgaagtaaaggtgtggcctcagcagccctccggagagctgtttgagattgaaatagacaccctggaaaccacctgccatgtgctggaccccacccctgtggcaagatgcagcgtgaggcagctgaaggagcatgctgtcgaaggagactgtgn

SEQ ID NO: 8539 - DNA, 454 bp, Homo sapiens
  misc_feature (1)...(454): n = A,T,C or G
natgatcccatgcggacccccgaatcccggcaccatgagttcctccctggncccannngngtatgnctttgccaaggtgccctgcaggacctccctccgggccacaccctcagctgcctcttcaggaaccggagctcattactgccttccctcccagggaggccccttcagagaggagaggccacaggagctgcattgtggggggacaggctcaagcaattctgtccccatcaaggggtcagctggagagacccaagaccctatctgttcaccagggacccaaaatccaaggggatgcttccctctgccctctttcctgcccctccccatcatacctgcacccaccccagccagggctccctgtccagaattcggttctcctcaggacgccaactcccagagctaaggaccaaggagaagacagcctctccacccccaagccaggcgggtgagg

SEQ ID NO: 8540 - DNA, 364 bp, Homo sapiens
gacgcgtgggattatatatttatatatagtcttttctgttcataatggcattagtctctgagtacattttatattatctttgttgccacatgtcaggatacaacacaatagttttataaataacaactgtactttgattttaggtactaatttaatgctttagtttttactactttgaaaggggaggttcatctaagtattactgataacagggatccaacttaaagtaaaagttggaaagggcaagagtcttttaagcggaacttcaattctgttgtcatggttacttatatataatgaatataaatagacaaataggacttggaaaatgtggtatattctaagtcaagatgctatgaagttg

SEQ ID NO: 8541 - DNA, 176 bp, Homo sapiens
tagcccagctcaagcaagcggtaacccttggacaagacttagcagcatatacaacctatgaggtctacccaacttttgcagtgactgcccgaggggatggatatggcaccttctgaagatgcttttttaaatttaagaataagacacacaaaactctattaaaaaaaaaaaaaagg

SEQ ID NO: 8542 - DNA, 385 bp, Homo sapiens
tcgaccttgtgtttgatgttggagatggttcagaaagactggataatgactcatatataaatgttcaagaaataaaactggtgatggaaataattaagcttattaaagacaaaagaaaggatgttagttttcgaaacattggcataataactcattacaaggcccagaagacgatgattcagaaggatttggacaaagagttcgatagaaaaggaccagcagaagtagacactgtggatgcattccagggtcggcagaaggattgtgttattgttacgtgtgtcagagcaaatagcatccaaggttcaattggattcctggcaagtttgcagagattgaatgtcaccatcacacgagccaagtacagcctcttcatcctcggaca

SEQ ID NO: 8543 - DNA, 385 bp, Homo sapiens
tcgctccgagcagagcctggtggtgtccggcgtgcagcatcagtccaccctggagctcagcgaggtcggcgtggaggcggcggcggccaccagcattgccatgtcccgcatgtccctgtcctccttcagcgtgaaccgccccttcctcttcttcatcttcgaggacaccacaggccttcccctcttcgtgggcagcgtgaggaaccccaaccccagtgcaccgcgggagctcaaggaacagcaggattccccgggcaacaaggacttcctccagagcctgaaaggcttcccccgcggagacaagcttttcggccctgacttaaaacttgtgccccccatggaggaggattacccccagtttggcagccccaagtgaggggccgtg

SEQ ID NO: 8544 - DNA, 466 bp, Homo sapiens
  misc_feature (1)...(466): n = A,T,C or G
cgccaatgatangtttgcggaaccactgaggaccnctcgggncgacccacgcgtncgattatagagttcaggtgtgtgcaaaaatgatgagaatgaggacccgggaagatatgatatttaagaaactgtttgaagaaggtttgaacattcaaaagcaaagattgcgagacctaagaaactatgccaaagaaaagcgagatgaacaaaggagacgccaccaggatgaactggactccatggagaactactataaggaccagttttcattgctggcagaagccatatcacaggaacatcaagaacttaaagccagagagaaatctcaggcccagacattacataaggtgaagagggagctgagatctaagatggagaaggaaattcagcagctgcaggacatgataacacagaatgatgatgatgttttcttccgggaactggaagctgagcgcttcagatctcggct

SEQ ID NO: 8545 - DNA, 422 bp, Homo sapiens
agggagttggtttgttatgatgggaaatgagtcagttttcagggtcctgagaaaattgcttcattcatggctgtgtttgagataactaaagtaaattttttttcaggtatttggtgtcatgttttggagttaatatttagtgcttatataattttaagttattacataatttttattggtatatatttgataggtactaggtattggattctcaccaaaccagtagaatggtattctctcttaatatgtgattgcctgtaatggccaggtagatataccttaaagtaatatgaaaggttttatatgtatattaaaatgtttgtacttttaaatctgaaagggtatcttgaatttttactgccgttacttcagaattatttgggcattatgactttttcattgtacaaaaaaatatttctaaa

SEQ ID NO: 8546 - DNA, 360 bp, Homo sapiens
gggatccagcctgacccggcccgtggaggcccttttccagctgtggaccgcagaacctctggaccaggcagctgcctcggccagcgccattgacatctccaagtggaggaccttccagacagcactcttcctggaccggctcctggatgggtccccgctgccgcaggaggtggtgatgagcctgtccaagtgctactcctccctgctggactcgatgaacgctgagatccgcatccgctggctgcagattgtggtccgcaacgactactatcctgacctccacagggtgcggcgcttcctggagagccagatgtcacgcatgtacaccatcccgctgtacgaggacctctgcaccggtgc

SEQ ID NO: 8547 - DNA, 428 bp, Homo sapiens
  misc_feature (1)...(428): n = A,T,C or G
gcatggccacaccccaccccacttctcccccaaaaccagtttccctgccccctgacgctgctgattcgggctgtggcctccacgtatttatgcagtacagtctgcctgacgccagccctgcctctgggccctgggggctgggctgtagaaaagttgttggggaaggagggagctgaggagggggcatctcccaacttctcccttttggaccctgccgaagctccctgcctttaataaactggccaagtgtggcaaaaaaaaaaccaaaaaaaaggagacctaaaaaaaaaaaaaaggggggcccctttaaaaagaatttagggggggcccctgttatacgcgctctggaagtttttttgcttcctctatagtgaggaagataaaaacctcgtcggtgactctagaggaaaaacattatcttgtggggn

SEQ ID NO: 8548 - DNA, 435 bp, Homo sapiens
acaaatggcgccctacagcctactggtgactcggctgcagaaagctctgggtgtgcggcagtaccatgtggcctcagtcctgtgccaacgggccaaggtggcgatgagccactttgagcccaacgagtacatccattatgacctgctagagaagaacattaacattgttcgcaaacgactgaaccggccgctgaccctctcggagaagattgtgtatggacacctggatgaccccgccagccaggaaattgagcgaggcaagtcgtacctgcggctgcggccggaccgtgtggccatgcaagatgcgacggcccagatggccatgctccaattcatcatcagcgggctgtccaaagtggctgtgccatccaccattcactgtgaccatctgattgaagcccaagttgggggcgagaaaaacctgcgccggggcaa

SEQ ID NO: 8549 - DNA, 361 bp, Homo sapiens
tgcatggagtaaggcttactcccaccccagcctaaggaggcagttagtgatgtgctaccctgccagggaaaccacaattttgccatggatctgtgcaacccacagatgaggagatccccttgtgagcccatgccaccagggcctttggtctcaagcacagagctgtgcagtctctcggaggctgcttgggttgtggccagtggcagcaggctggagactgcctaagatgaccaagttcccagggggaggggaggcagccatcactgcggtttcagttggccattttcccctgctggtccagaaagatcggacggcttggacagagaagaattcctcacagtgcagcacagtagctgtggca

SEQ ID NO: 8550 - DNA, 366 bp, Homo sapiens
gacgcgtggggcagtagaggccattcatagagctgtggaattcaatcctcatgtgccaaaatacctactagaaatgaaaagcttaatcctacccccagaacatatcctgaagagaggagacagtgaagcaatagcatatgcattctttcatcttgcacactggaagagagtggaaggggctttgaatcttttgcattcttttcggatgatcccttatcccttggaaaaggggcacctattttatccttacccaatctgtacagaaacagcagaccgagagctgcttccatttcctcagcactttgtttgcccccttaaactttgtcatggagaaagtggagagcatcctcccatccagtctgtggg

SEQ ID NO: 8551 - DNA, 501 bp, Homo sapiens
  misc_feature (1)...(501): n = A,T,C or G
cgacgttcnnnnnnaggggnnnnaattgaacgcctgcgatagagcgccgtaagcccgggtcgacccacgcgtccgtgggttttgtgatcctcctcaggaaccaagtcacactcatcggcttcaccctaatgttttggtgcgaattcactgcctccttcctcctcttcctgaacgccatcagcggccttcacatcaacagcatcacccatccctgggaatgaccgtggaaattttaggccccctccagggacatcagattccacaagaaaatatggtcaaaatgggacttttccagcatgtggcctctggtggggctgggttggacaagggccttgaaacggctgcctgtttgccgataacttgtgggtggtcagccagaaatggccggggggcctctgcacctggtctgcagggccagaggccaggagggtgcctcagtgccaccaactgcacaggcttagccagatgttgattttagaggaagaaaaaaacattntaaan

SEQ ID NO: 8552 - DNA, 412 bp, Homo sapiens
cactgggaacacaaacttgctggcggtaagaagcccttttgaaacctgtggatctcccttggagatcatggggagagaagaaaggtgacctcgcattcgtgccccttaacagcactctgcagaaatgcctcctcagctgcaaaacggcctgaacctctcggccaaagttgtccagggaagcctggacagcctgccccaggcagtgagggagtttctcgagaataacgctgagctgtgtcagcctgatcacatccacatctgtgacggctctgaggaggagaatgggcggcttctgggccagatggaggaagagggcatcctcaggcggctgaagaagtatgacaactgctggttggctctcactgaccccagggatgtggccaggattcgaagcaagacggttatcgtcacc

SEQ ID NO: 8553 - DNA, 397 bp, Homo sapiens
aaggatgtcttcctgggcatgtttttgtatgaatatgcaagaaggcatcctgattactctgtcgtgctgctgctgagacttgccaagacatatgaaaccactctagagaagtgctgtgccgctgcagatcctcatgaatgctatgccaaagtgttcgatgaatttaaacctcttgtggaagagcctcagaatttaatcaaacaaaattgtgagctttttgagcagcttggagagtacaaattccagaatgcgctattagttcgttacaccaagaaagtaccccaagtgtcaactccaactcttgtagaggtctcaagaaacctaggaaaagtgggcagcaaatgttgtaaacatcctgaagcaaaaagaatgccctgtgcagaagactatctatccg

SEQ ID NO: 8554 - DNA, 412 bp, Homo sapiens
tgacttaatcgtctttttggcagaccagaatgcaccctattttaaacccaaagtaaaggtatctttcaagaatcacagtgcattgataacaagtgtagtccctggggattatgatggagattctcaaatggatgtccttctgacatatcttcccaaaaattatgccaagagtgaattaggagctgttatcttctggggacaaaatcaaacattagatcctaacaatatgaccatactcaataggacttttcaagatgagccactaattatggatttcaatggtgatctaattcctgatatttttggtatcacaaatgaatccaaccagccacagatactattaggagggagatggactctcactctgtcacccaggccgaagtgcagtggtacaatcatagctcactgcagc

SEQ ID NO: 8555 - DNA, 400 bp, Homo sapiens
ctgctcaacacactgggtcttttcacaggctgaagatgaccatggacttgtttggtctcctgctgctcactgacccagacaaagtgaccataggcctgttgttgtgggatggccgaggggaggggctccggctccttctgcgtgacactgaccgcttctccaggcacgttggagggacccttggcactgaacccattaccggggcccaggccttcctcagaaaccagctgagcttgggaacaggcagcgcccctcccctgcgtgtggctcccaggcttcctctgtctgtgacccttactgatccaccctttgtatctcaggccagatttaccaagaagggctctggggatctccagcagcatcagatgacggcagacgcacgctgagggttcatggcaat

SEQ ID NO: 8556 - DNA, 420 bp, Homo sapiens
cggacgcgtgggcacatttctgatatacatcacggagttactgaaaaagctgcaatcaaccacagtcatgaacccctacatgaagcttgctccaggagaacttactatcatcctctaattttttaaaagaaatcttcatttattcttcttttccaattgaactttcacatagcacagaaaaaattcaaactgcctatattgataaaaccatacagtgagccagccttgcagtaggcagtagactataagcagaagcacatatgaactggacctgcaccaaagctggcaccagggctcggaaggtctctgaactcagaaggatggcattttttgcaagttaaagaaaatcaggatctgagttattttgctaaacttgggggaggaggaacaaataaatggagtctttattgtgtaaaaaaa

SEQ ID NO: 8557 - DNA, 405 bp, Homo sapiens
aaaatcattgaagatgctcataacagtggaaggaagagtgctgcctttattgctgaatccatgcggagttgtggcggacaaataattcctccagcaggctacttccagaaagtggcagaatatgtacacggcgcagggggtgtgtttatagctgattaatttcaggggggctttggcagagttgggaaacatttctggagcttccagatgtatggagaaaactttgttccagacatcgtcacaatgggaaaaccgatgggcaacggccacccggaggatgtgtggtaacaaccaaagaaattgcagaagccttcagcagctctgggatggaatattttaatacgtatggaggaaatccagtatcttgtgctgttggtttggctgtcctggatataattgaaaaag

SEQ ID NO: 8558 - DNA, 421 bp, Homo sapiens
cgcatcttctggcggaccgtgcgaggtatgctgccccacaaaaccaagcgaggccaggccgctctggaccgtctcaaggcgtttgacggcatcccaccgccctacgacaagaaaaagcggatggtggatcctgctgccctcaaggtcgtgcgtctgaagcctacaagaaagtttgcctatctggggcgcctggctcacgaggttggctggaagtaccaggcagtgacagccaccctggaggagaagaggaaagagaaagccatgatccactaccggaagaagaaacagctcatgaggctacggaaacaggccgagaagaacgtggagaagaaaattgacaaatacacagaggtcctcaagacccacggactcctggtctgagcccaataaagactgttaattcctcaaaaaaaaaaaaaaa

SEQ ID NO: 8559 - DNA, 412 bp, Homo sapiens
cggacgcgcgggcacatttgtgatatacatgacggagttactgaaaaagctgcaatcagccacagtcatggacccctacatgaagcttgctccaggagaacttactatcatcctctaattttttaaaagaaatcttcatttattcttcttttccaattgaactttcacatagcacagaaaagattcaggctgcctatattgagaaaaccatacagtgagccaggcttgcagtaagcagtatgactataggcagaagcacatatgagctggacctgcaccaaagctggcaccagggctcggaacgtctctgaactcagaaggatggcgttttttgcaagataaagaaaatcaggatctgagatattttgctaaacttgggggaggaggaacacataaatggagtctttattgg

SEQ ID NO: 8560 - DNA, 465 bp, Homo sapiens
  misc_feature (1)...(465): n = A,T,C or G
ntttgtttgaatccctattgaccgccntgcaaaacccgcnncgacccacgcgtncggcgattctcctgccttagcctcccgagtagctgggattacaggtgcccaccaccacgcccagctaatttttgtatttcagtagagacgaagtttcaccatgttggccaggtgggtctcaaactcctgacctcaggttatctgcacacctcggcctcttaaggttctgggattgcaggcgtgagccattgtgcccggcccataaaagaactttattatatttctaaaattcaatcatatggaagaatctattgagcaggttagcctttgcttgactttcctcctctgttactccagccttggctggggtgttttgtagaattttcagagcatgggagacagacaactggagcttcctcctgcccttggcccatgcttttgggagagcaaaaggcaaaagattgaaacccn

SEQ ID NO: 8561 - DNA, 394 bp, Homo sapiens
atgaggcgcctgggggcagtgtcctcgcgggccagcgacgggcaggacgccccgttcgcctagcgcgtgctcaggagttggtgtcctgcctgcgctcaggatgagggggaatctggccctggtgggcgttctaatcagcctggccttcctgtcactgctgccatctggacatcctcagccggctggcgatgacgcctgctctgtgcagatcctcgtccctggcctcaaaggggatgcgggagagaagggagacaaaggcgcccccggacggcctggaagagtcggccccacgggagaaaaaggtgagaaaggagattccggtgacataggaccccctggtcctaatggagaaccaggcctcccatgtgagtgcagccagctgcgcaaggccatc

SEQ ID NO: 8562 - DNA, 418 bp, Homo sapiens
  misc_feature (1)...(418): n = A,T,C or G
cccaggcttgggcaggaaactctctgactttggacttgaaacaagctatattgaagacaactgcaatcaaaatggtgccatatcactgatcttctcactcaaagaagaagttggtgcattggccaaagtattgcgcttatttgaggagaatgatgtaaacctgacccacattgaatctagaccttctcgtttaaagaaagatgagtatgaatttttcacccatttggataaacgtagcctgcctgctctgacaaacatcatcaagatcttgaggcatgacattggtgccactgtccatgagctttcacgagataagaagaaagacacagtgccctggttcccaagaaccattcaagagctggacagatttgccaatcagattctcagctatggagcggaactggatgctgaccacccn

SEQ ID NO: 8563 - DNA, 403 bp, Homo sapiens
  misc_feature (1)...(403): n = A,T,C or G
cctcaaagaaaatgacaggaagtggcatctatgcacccaattcttcaagagcatttcattatgatatgaagacagaagagggaaaactcctcctctcgcaactggattcccacccatcccattctgcagtggtgaactggacttcctatgccagcagtatagaagcgctctcatcaggaaacaaggaatttaaaggcactgtctttttcgatgaattcacttttgtgaagctcacaggagttgcaggaaattatacagtttgtcagaaagatctctgctgtcatttaagctacaaaatgtctgagaacataccaaatgaagtgtacgctctaggggcatttgacggactgcacactgtggaagggcgctattatctacagatttgtaccctgttgaaatgaan

SEQ ID NO: 8564 - DNA, 411 bp, Homo sapiens
  misc_feature (1)...(411): n = A,T,C or G
cccacgcgtccgtggatcctcacagctgcccacaccctgtatcccaaggaacacgaagcgcaaagcaacgcctctttggatgtgttcctgggccacacaaatgtggaagagctcatgaagctaggaaatcaccccatccgcagggtcagcgtccacccggactaccgtcaggatgagtcctacaattttgagggggacatcgccctgctggagctggaaaatagtgtcaccctgggtcccaacctcctccccatctgcctccctgacaacgataccttctacgacctgggcttgatgggctatgtcagtggcttcggggtcatggaggagaagattgctcatgacctcaggtttgtccgtctgcccgtagctaatccacaggcctgtgagaactggctccggngaaagaan

SEQ ID NO: 8565 - DNA, 416 bp, Homo sapiens
cacaatgatttctccagtgctcatcttgttctcgagttttctctgccatgttgctattgcaggacggacctgtcccaagccagatgatttaccattttccacagtggtcccgttaaaaacattctatgagccaggagaagagattacgtattcctgcaagccgggctatgtgtcccgaggagggatgagaaagtttatctgccctctcacaggactgtggcccatcaacactctgaaatgtacacccagagtatgtccttttgctggaatcttagaaaatggagccgtacgctatacgacttttgaatatcccaacacgatcagtttttcttgtaacactgggttttatctgaatggcgctgattctgcccagtgcactgaggaaggaaaatggagcccggagcttcctgtctgtg

SEQ ID NO: 8566 - DNA, 415 bp, Homo sapiens
tcctttttaccttgaatcacagtggcttatctaaaaatataagcttttttctgccatattctgaattcgctgaaggtaaagactatgtctgattcctctctttgtcctctgcacccagcgtagggcctgaaacagagtagctagcagtaaagatacactgaatgaatgaatgagtcaaccatccttggcctctggagctaattgagaaggctacggggagttccgctgtacggagaaggatgttgcatccctttgtagattgtgtagcattcataacctgctgaacactcaccctcaatgtatattctctggtctggcctgcttcaagggcagatacactacttcctgggatgggcctttatctggcttaagcttggatgtccctggctttcccaaggatcacacgcccgatgaa

SEQ ID NO: 8567 - DNA, 410 bp, Homo sapiens
  misc_feature (1)...(410): n = A,T,C or G
cccacgcgtccgaacagcagggtcttattcaacatgctcaaaggaacctaacattcatgagaacaccagaaaggcaagaatttcaagggttattttaactaaaaatctgaggagacagaatgagaagaggcctatcctttagacattaaacacatgattaaacacaagtcatccaaagagagtgcaccagctgtagaacaaaagggacagagtggatgcatcagagaaactccttcaatcatataaaattaatttatgacaaactgaatttaagaaaaccagaggccgggtgcggtggctcacgcctgtaatcccagcaccttgggaggctgaggcaggcagattgcttcagctcaggagtttgagaccagcctgggcaacatggtgaaaccctgtctctcttaaaaatn

SEQ ID NO: 8568 - DNA, 384 bp, Homo sapiens
aaaatgctagtatgttttgctcacttcatatgtaacaggtgcccttatgttgtgctgtatcctgtgctttttctgtgggaccattccattcaggagcaaagagcaccatgattccaatcttgtgtgtgtttactaacccttccctgaggtttgtgtatgttggatattgtggtgttttagatcactgagtgtacagaagagagaaattcaaacaaaatattgctgttcttcagttttgtttgtggaatttgaaattactcaaatttaaaataaattactggactgtggaaataacatagaattgaagttttaattaaataccactcaaacgaaaaaaaaaaaaaaaaaaaaaagggggggccgttttaaaggatccctcggggg

SEQ ID NO: 8569 - DNA, 401 bp, Homo sapiens
tgaagctgttccggcattactatgtcatggtcatctgttacgtctacttcacccgcatcatcgccatcctgctgcaggtggctgtgccctttcagtggcagtggctgtaccagctcttggtggagggctccaccctggccttcttcgtgctcacgggctacaagttccagcccacagggaacaacccgtacctgcagctgccccaggaggacgaggaggatgttcagatggagcaaaatgacggactctgggttccgggaaggcctctccaaagtcaacaaaacagccagcgggcgggaactgttatgatcacctccacatctcagaccaaagggtcgtcctcccccagcatttctcactcctgcccttcttccacagcgtatgtggggaggtggagggga

SEQ ID NO: 8570 - DNA, 385 bp, Homo sapiens
gctcctcatccaaagaacaactgctgattgaaacacctcattagctgagtgtagagaagtgcatcttatgaaacagtcttagcagtggtaggttgggaaggagatagctgcaaccaaaaaagaaataaatattctataaaccttcaaaaaaaaaaaaaaaaagggggggccgttttaaaggatccttgggggggccaaagtttacccgggcttgcaacgtattagttttttccttatggggagccgaattaaaacctacctgggaatttttggaaaggacccttactttgggggggggacatattgggccaacctccctacaaaaatttaaagctttagggaaaatataaaatttttaggggaaaaaggggtaaaactacctgca

SEQ ID NO: 8571 - DNA, 401 bp, Homo sapiens
aacaaacccacctcctcagaattgcagaagatgcaagagaaacagaaactgatcaaagagccaggctcgggagtgcctgttgttctcattacaacccttctggttattccggaggttgtcctgctggccattgccatatttattcggtggaaaaaatcaagggcctttggagcagattctgaacacaaactctagacgagttcaggaagagtactgggaagatttataggaaagggaagtggaggcttaaaccttggtaatttctttgcaagccgtaagggctacagtcgaaaagggtttgaccggcttagcactgagggcagtgaccaagagaaagaggatgatggaagtgaatcagaagaggagtattcagcacctctgcctgcgctcgcaccttcctt

SEQ ID NO: 8572 - DNA, 387 bp, Homo sapiens
tttgggatcaataggaaagcatatgcagccaaccattattctaatggtgtgaaatgatatgaccacaattgtaagtaggaaagtcacccaagcgcttctgctttcacttaagcgtgtggcccgcaatactgtatgaacaagcatgatcttgttactgtgatattttaaatatccacagtactcactttttccaaatgatcctagtaattgcctaaaaatatctttctcttacctgggatgtatcaatttttgccagtatttttatacggaaaaaattgtattgaaaacacttatgatgcagctgataagaggaatttggcataattatggcgggcgattattttttatactgtatgtgccatagctttactactgtggaaagacgag

SEQ ID NO: 8573 - DNA, 384 bp, Homo sapiens
ttttgtgtttcccaaagagtcggatacttcctatgtatccctcaaagcaccgctaacgaagcctctcaaagccttcactgtgtgcctgcacttctacacggaactgtcctcgacccgtgggtacagtattttctcgtatgccaccaagagacaagacaatgagattctcatattttggtctaaggatataggatacagttttacagcgggtgggtctgaaatattattcgagggtcctgaagtcacagtagctccagtacacatttgtacaagctgggagtccgcctcagggatcgtggagttctgggtagatgggaagcccagggtgaggaaaagtctgaagaagggatacactgtgggggcagaagcaagcatcatcttggg

SEQ ID NO: 8574 - DNA, 387 bp, Homo sapiens
aaagtacatcacatggatgtggtacatttaatttaaccatttacctgttaatggtcacctaggttattttgtcatctttttccccctataatgtggcattgaacattttagtaccttaatctctgtgtgtttttaattctttacctaggataaatgtctctatgtgatattaggataaaaaatgattaaaaaattagaaagtttgtaccaattttaactaatgaaaatgtttgcattggctgggcacagtggctcatacctataaatcccagcattttgggaggctgaggtgggaggattgcttgagtccaggaattcaagactggtctgagcaacatagtgagacctcgtctctacaaaaaaatattttttaaaaattagccggac

SEQ ID NO: 8575 - DNA, 428 bp, Homo sapiens
  misc_feature (1)...(428): n = A,T,C or G
ggctgccagcgtttcatgatcaacatgggagactcccacgtggacaccagctccaccgtgtccgaggcggtggccgaagaagtatctcttttcagcatgacggacatgattctgttttcgctcatcgtgggtctcctaacctactggttcctcttcagaaagaaaaaagaagaagtccccgagttcaccaaaattcagacattattctcactctgttgcccaggctggagtacagtggcgtgatctcggctcactgcaacctccgcctccctagttcaagtgattctcctgcctcagcctcccgagtaggacctcctctgtcagagagagcagctttgtggaaaagatgaagaaaacggggaggaacatcatcgtgttctacggctcccagacggngactgcagaggagtttgccaaccgcctgtcca

SEQ ID NO: 8576 - DNA, 423 bp, Homo sapiens
cggacgcgtgggttgagagcttaaaagagcgcatacttttgcttggcatgggagctcaggcctgtaatcccagcactttgggaagctaaggcaggcggatcacgacgtcaggagttcaagaccatcccggccaacatggtgaaaccccgtctctactaaaaatacaaaaattagctgggattacaggaatgcgccacaacgcccagctaatttgttacctacactctaattaataattaatactttcttattttaaaaagtagtactatttaatataatcaagataggagatttaaaatgagcaagtgattcatttgctcttttaaagaagcccgttgacttacgctcttaaaaaagaagttggtgggttacctcacttattgttcatgcttaaacatatccatttgtacaggcttatttctg

SEQ ID NO: 8577 - DNA, 415 bp, Homo sapiens
gcgtcagcccctacagccccgtcctcaagttcttcatggtcaagtccgtcatctttctttccttctggcaaggcatgctcctggccatcctggagaagtgtggggccatccccaaaatccactcggcccgcgtgtcggtgggcgagggcaccgtggctgccggctaccaggacttcatcatctgtgtggagatgttctttgcagccctggccctgcggcacgccttcacctacaaggtctatgctgacaagaggctggacgcacaagccttctcacctgccccttccgctccctgcccggcaggccgctgtgcccccatgaaaagcatcttcagcagcctcaaggagaccatgaacccgcacgacatcgtgcaggacgccatccacaacttctcacctgcctaccagcagtacac

SEQ ID NO: 8578 - DNA, 494 bp, Homo sapiens
  misc_feature (1)...(494): n = A,T,C or G
gcgcccctatgatcccatcgataatgaaacccttgggaacgcnccgaatcccgggcgacccacgcgtccgcacgtctgcccatgatgcgtttttgcgagcagcggttctttccgcgtgcagcagccggactgccgggagcccttcctgtcctgctgccaatttgctgagagtctgcgcaagaagagcagggacaagggccaggcgggcctccaacgagccctggagatcctgcaggaggaggacctgattgatgaggatgacattcccgtgcgcagcttcttcccagagaactggctctggagagaggaaacagtggaccgctttcaaatattgacactgtggctccccgactctctgaccacgtgggagatccatggcctgagcctgtccaaaaccaaaggcctatgtgtggccaccccagtccagctccgggtgttccgcgagttccacctgcacctccgcctgcccatgtctgtccgccgctntgagcagg

SEQ ID NO: 8579 - DNA, 452 bp, Homo sapiens
  misc_feature (1)...(452): n = A,T,C or G
ggcggtacncacctgaaccctcgatgatcgcnctgaanaccggncgacccacgcgtccggtctctggaacacgctgcggggctcccgggcctgagccaggtctgttctccacgcatgtgttccgcgcgccccgtttatgcatgtcgtccggcatccatgtagcgctggtgactggaggcaacaagggcatcggcttggccatcgtgcgcgacctgtgccggctgttctcgggggacgtggtgctcacggcgcgggacgtgactgcggggccaggcggccgtacagcagctgcaggcggagggcctgagcccgcgcttccaccagctggacatcgacgatctgcagagcatccgcgccctgcgcgacttcctgcgcaaggagtacgggggcctggacgtgctggtcaacaacgcgggcatcgccttcaaggttgctgatcccacaccctttcn

SEQ ID NO: 8580 - DNA, 499 bp, Homo sapiens
  misc_feature (1)...(499): n = A,T,C or G
gccccgtggnnaatagatagcgtcggnatagancnccatntgcagggncgacccacgcgtccgtaagctcaaaaattcactatttgaatatcagaagaattataaggattctcattcgttgaccactaatataatggaaattttgagaggcgatttttcctcagccaataaccgtgataatacctacaaccgagtgtcagaggatctgagaagcagaattgaagtcctgaagcgcaaagtcatagaaaaagtacagcatatccagcttctgcagaaaaatgttagagctcagttggttgatatgaaacgactggaggtggacattgatattaagatccgatcttgtcgagggtcatgcagtagggctttagctcgtgaagtagatctgaaggactatgaagatcagcagaagcaacttgaacaggtcattgccaaagacttacttccctctagagataggcaacacttaccactgataaaaatgaaaccagttccagag

SEQ ID NO: 8581 - DNA, 483 bp, Homo sapiens
tttgatcgcatgcaggaccgctgaggaacctccgggacgacccacgcgtccgcaaaatatttaaagattgtttccttagagtcttgattttttggactggggccaggcgtggtggctcacacctgcaatcccagcaccttgggaggccgaggcaggcggatcacgaggtcaggagttcgagaccagcccggccaacatatttaaagattgtttccttagtgtcttgaagttttgcacaaaattcttttttttgagatggagtctcactctgtcacccaggctggagtgcagtggcgtgatcttggctcactgcgacctctgcctcctgggttcaagcaattctcccgcctcggcctcccaagtagctgggattacagacgtgtgccaccatacctgggtatattttgcatttttagaggagagggagtttcaccatgttggccaggttggtcttgaactcctgacctcaggagatcctcctgc

SEQ ID NO: 8582 - DNA, 411 bp, Homo sapiens
cccacgcgtccgggaaagtaagtcctgaccaggtgttcccacatatgcctgttacagataactacattaggaattcattcttagcttcttcatctttgtgtggatgtgtatactttacgcatctttccttttgagtagagaaattatgtgtgtcatgtggtcttctgaaaatggaacaccattcttcagagcacacgtctagccctcagcaagacagttgtttctcctcctccttgcatatttcctactgcgctccagcctgggtgatagagtgagactctgtctcaaaaaaaagtatctctaaatacaggattataatttctgcttgagtatggtgttaactaccttgtatttagaaagatttcagattcattccatctccttagttttcttttaaggtgacccatctgg

SEQ ID NO: 8583 - DNA, 423 bp, Homo sapiens
cggacgcgtgggctggtgctgcggccacaccaccctggggtgctcattgacagagctgccataatgaacttgaaaggacgggaatcacgagggaagctggggctcccctgcccacaggagaggatccccgttcttcaagcttctctgctcagtgtctactaacgaccgacatttgctaatgtaaataatagtaaattattgagaattctaattcttttacacagtctgtttttaatctattttaattaaataaaatctatgactctaaaaaaaaaaaaaaaaaaaaaaaaaaaaaggggggggccgttttaaagaacccctgggggggccaaattttacggggggggggaaagttttatttttttccttaagggggggccatttaaaacctacctggggatttttggaaaggaccctttcttt

SEQ ID NO: 8584 - DNA, 421 bp, Homo sapiens
gggagtaggctacaccaaatattaccctgtggagttatacttccgagatgcaaagattggtacgatatatgaaggagcttccaacatccagttgaacaccattgcaaagcatatcgatgcagaatactgacgtctataggagtgggacccctccctggtgtcactgctgtaaaattttaaacggttgtgtcttgttgggagtaagtgccttgcgtgggaataaacttccacagcattcgaatattttaatgaagcccttagtcagggtcctggtgttggcctttttggttttctcttttcaggctgtttaacttaggcacaggagatccacttttaaacttgggaaataagcacctgtatttttttccaaaactgtttttaaagctgtatacgcatacatatatatatttttactctggct

SEQ ID NO: 8585 - DNA, 410 bp, Homo sapiens
ccaggaacctagcagtctcccaggtggtgcataaggctgtgcttgatgtatttgaggagggcacagaagcatctgctgccacagcagtcaaaatcaccctcctttctgcattagtggagacaaggaccattgtgcgtttcaacaggcccttcctgatgatcattgtccctacagacacccagaacatcttcttcatgagcaaagtcaccaatcccaagcaagcctagagcttgccatcaagcagtggggctctcagtaaggaacttggaatgcaagctggatgcctgggtctctgggcacagcctggcccctgtgcaccgagtggccatggcatgtgtggccctgtctgcttatccttggaaggtgacagcgattccctgtgtagctctcacatgcacaggggcccatgg

SEQ ID NO: 8586 - DNA, 417 bp, Homo sapiens
ccgacatattagaaatgctcctgaaaagtggcaacaccgcctaactcagtaccaggacctcttttaaattcaatttcttttttctttcagagagataacaaacgaattcattatttcccccattcacatcttaccacaaattatttttatcaggttaaaactggtcatctacggaattgtagaaaggtgacataggaactgtcttcactgctggaagaataaaagagtctgaggtatagacactgccctggtgacaccttctcagaacattgttgggggacaggggaggcaggcgcaagtaggggatagaatctgaccctgacatgcagctatcacctggcagagagactcgtcaaagcaaattataacgaccagtactatttttttttggaattgaaaacccaagaagccctaaaa

SEQ ID NO: 8587 - DNA, 432 bp, Homo sapiens
tgaacccgggaggcggagcttgcagtgagccgagatcatgccactgcactctagcctgggcgacagagcgagactccgtctcaaaaaaaaaaaaaaaattagcgggtggggggggggcccccttgtagccccacctcctcaggaggctggggcgggaaaatcccttgaccctgggaggggggggttgcagggacctaaaataatccctttgccctccaccctgggtaacaaaaggaaactcctttttaacaaaaaaaaaaaaaaaggggggggccccccaagcaaatttagggggggccttacttggtttgggggagttaactgccccatacccccaaagccgggtttaagggtgacctttgcccctttgccctgggcagttcttttattccttgggggacgggaaaaaccaaaccctgcttcccatttctt

SEQ ID NO: 8588 - DNA, 487 bp, Homo sapiens
  misc_feature (1)...(487): n = A,T,C or G
natgatagccttcgaaccattgatatcctgcggaaccgccccggaattcccggaacgacccaagcgtgcgcttaattctaaaacaaattttgtaatacaaaacgcttaattaagaaaaaattggtgtactgaaaagcaaaagataatctactttgttaagataatttgtcactaactggttgaataatgcacagtttttgtttaaggttacacatttatgcctggattaaataacaatagtaaaacttgacaagtcttttgaaaaacagctgctaaacatattgctttctggaatgtaatcattaacaacaaatattctcttattctatacaattgcagaatgctagtggaactttcttgtaggttatttgacaatgaatgttaattgatttattttttaaaaatgtaaaatcctcttatccctttaaggccaggttaagctttcatgtccctgtgatagaaaatttcaaatgctggcttctaattg

SEQ ID NO: 8589 - DNA, 417 bp, Homo sapiens
  misc_feature (1)...(417): n = A,T,C or G
gaggcagagcttgcagtgagccaagatcgtgccactgcactccagcctgggcaacagagcgagactccatctcaaaaaaaaaaaaaagggggggtccaaaccccataaaaaccaccttccaaaaggggccccaaatttttgtttttatgggaggggggggtataaaaaaaaggcccctttattttaggggggaaagagggtttttttagaaaattttacctaaggcgggacccctacttcatccctgtactttcattcccccaaaaaaaccctagtgggttttatggaatggaaggtaccaggggaacccgggaaagttttaaaaggaaataggtaggggttttaaaagtcttaggctaggaaaacccttgttaagtccaacccaaaaaccagaaccttaaaaaaaggacttctaan

SEQ ID NO: 8590 - DNA, 457 bp, Homo sapiens
attgatagcattaggaccgcccgaagtcggtcacattgacgccgtagtgctcctcaggagccagccccacccttagaaattatgttttccatgaggatcgtctgcctggtcctaagtgtggtgggcacagcatggactgcagatagtggtgaaggtgactttctagctgaaggaggaggcgtgcgtggcccaagggttgtggaaagacatcaatctgcctgcaaagattcagactggcccttctgctctgatgaagactggaactacaaatgcccttctggctgcaggatgaaagggttgattgatgaagtcaatcaagattttacaaacagaataaataagctcaaaaattcactatttgaatatcagaagaacaataaggattctcattcgctgaccactaatataatggaaattttgagaggcgatttttcctcagccaataaccgtgataatt

SEQ ID NO: 8591 - DNA, 387 bp, Homo sapiens
  misc_feature (1)...(387): n = A,T,C or G
ttgatgcaactagcgtctggcagcaggaatccaaccagtgccctgagttctgaggcagagaggaggacagaagaaacaagaggctggagattgtcaaattcagtatcccagttggctcttgattcttggtgaaaccatccctcagctcctagagggagattgttagatcatgaaactaattaccatccttttcctctgctccaggctgctactaagtttaacccaggaatcacagtccgaggaaattgactgcaatgacaaggatttatttaaagctgtggatgctgctctgaagaaatataacagtcaaaaccaaagtaacaaccagtttgtattgtaccgcataactgaagccactaagacggttggctctgacacgttttattn

SEQ ID NO: 8592 - DNA, 364 bp, Homo sapiens
cccacgcgtgcgggaagatgtccggaaaagcccgtgcgcagcgagacatctaagagacattcatttggattcccctcttctttctctttcttttccctttgggcccttggccttcctatgatgatatgagattctttatggaagaacatgaatataagttttgtcttgccttggttattagcacaaaactttaccatgttagatgttgaaagaagaaagggaaggaatgagagagagtgaaaaggagagggtaacagaaaaaaaaaaaaaaggggcggccgctttaaaggatccctgggggggccaaacttaacgcggccgtgcaaagcaaaatgtttttccttatagggagtcccattataac

SEQ ID NO: 8593 - DNA, 407 bp, Homo sapiens
  misc_feature (1)...(407): n = A,T,C or G
acggtgttcgaactgaagcgcatcgtcgagggcatcctcaagcggcctcctgacgagcagcggctgtacaaggatgaccaactcttggatgatggcaagacactgggcgagtgtggcttcaccagtcaaacagcacggccacaggccccagccacagtggggctggccttccgggcagatgacacctttgaggccctgtgcatcgagccgttttccagcccgccagagctgcccgatgtgatgaagccccaggactcgggaagcagtgccaatgaacaagccgtgcagtgagacccccaagaggcccatttcccccaataaaagagatttggaananaaaaaaaaaaaaaaaaaaaataaaaaaaaaaaaaaaaannannnnnnnnnnnnnnnaaattaattgtgct

SEQ ID NO: 8594 - DNA, 385 bp, Homo sapiens
ttctttttgcaatgttattagatgttctatagtgctattaggaattgccttccgaatggaggttcatgtataatactcatttacaattcaatatataattacacaaataatttttaaatataatcaatagtaaagactgttctgtggatggtagtgtttaatacattttctattttgtacagcgatttcaggccttttgttttcttaaaatcagcagctgtttggcctaattcttagcattattttgtcctttgcgccagtacttttttgtgcacgctttttgtgatctgtgttaaaaacctgcattgccaacattgcagctcgaacttaaacttgttattcaaataaatatttaattttttaaattgctcttgtataatcagat

SEQ ID NO: 8595 - DNA, 422 bp, Homo sapiens
tctgcagctcagcatggctagggtactgggagcacccgttgcactggggttgtggagcctatgctggtctctggccattgccacccctcttcctccgactagtgcccatgggaatgttgctgaaggcgagaccaagccagacccagacgtgactgaacgctgctcagatggctggagctttgatgctaccaccctggatgacaatggaaccatgctgttttttaaaggggagtttgtgtggaagagtcacaaatgggaccgggagttaatctcagagagatggaagaatttccccagccctgtggatgctgcattccgtcaaggtcacaacagtgtctttctgatcaagggggacaaagtctgggtataccctcctgaaaagaaggagaaaggatacccaaagttgctccaagatgaatttt

SEQ ID NO: 8596 - DNA, 425 bp, Homo sapiens
  misc_feature (1)...(425): n = A,T,C or G
atagacgtccgtagaaacctcgattggcaaaaagcaacagatatctcttgcaacacaaatggttagaatgattttgaagattgatgacattcgtaagcctggagaatctgaagaatgaagacattgagaaaactatgtagcaagatccacttctgtgattaagtaaatggatgtctcgtgatgcgtctacagttatttattgttacatccttttccagacactgtagatgctataataaaaatagctgtttggtaaccatagtttcacttgttcaaagctgtgtaatcgtgggggtactatctcaactgcttttgtattcattgtattaaaagaatctgtttaaacgncaaaaaatgaaaaaagaacaaannananaaaaaaaaaaaaaaaaaanaanannnaanancccctccgccccctctgg

SEQ ID NO: 8597 - DNA, 383 bp, Homo sapiens
  misc_feature (1)...(383): n = A,T,C or G
tctccctctgtccctctgtccctctgaccctgcactgtcccagcaccatgggacccacctcaggtcccagcctgctgctcctgctactaacccacctccccctggctctggggagtcccatgtactctatcatcacccccaacatcttgctgcttgagagtattganaccatngagatcaaagcccacaacgcgcaaggggatgttccagacactgttactgtccacgacttcccaggcaaaaaactagtgctgaccagagagaagactgtgctgacccctgccaccaaccacatgggcaacggcaccttcacatcccatccaacagggagttcaagtcataaaaggggcgcaaccagttcgtgaccgtgcaggccaccttcg

SEQ ID NO: 8598 - DNA, 424 bp, Homo sapiens
atgatgtccgtgcgcttaccccaggccacgcccgagaacctccaggaggccaggacgttagtgaagagcatggaggatagttgaatgaccaacatcaatgacgggctggtgaggggcatcagtatgctaaacaaggcccgagaggagcacagaatcccagagaggagcacctacattgtcatcatgctgactgatggggatgccaatgttggcgagagcatacccgaaaaaattcaatagaatgtgcggaatgccatcgggggcaagttccccttgcataacctgggctttggcaacaatctgaagtataacttcctggagaacatggccctggagaaccatgggtttgcccggcgcatttatgaggactctgatgccgatttgcagttgcacggcttctatgaggaggtggccaacccactgg

SEQ ID NO: 8599 - DNA, 419 bp, Homo sapiens
  misc_feature (1)...(419): n = A,T,C or G
ggttcctggcagccttcaccctccctgcgctcctggccaccctggccccccaaggcgtccgcaccaccctctcagtaccttcgagggtgggctctgagagtgaggatgaagacctcctgagcgagctggaacttgcagacagggacgggcagccgggctgcacgacagccacatgccccattcaggtagggtgggcgcccagccccacttccccatggcaggcggcggtccctggggtgccctcgcctgcctggagcagtagggtgggggctggtggaagttgcgggcaggaaggctggctgctgggtgtcttaagaggaggaagctggctcctggcctgcccagttgcgtgtagattctgcagaagtggcctccctttggggcagtgtggaaaaggggagaagagaggcctcattctn

SEQ ID NO: 8600 - DNA, 415 bp, Homo sapiens
ccttgccctcccaaagtgctgggattacaggtgtgagccaccgtgcccagctgtttttatataagcatgcagggaaaagtcagccagcacactcaggaagtcattgtcactcagggctttgtgagtcaccccagtaagccaggcctcatagaattaaagtggccgaggaaaggtgaaagtatgttgcactgggaggtagaaccccagggtctggatcctggttctgccccattcactggatgatcttggctaagacacattttctcggagcctgtctataaaatgggctaatactcaacctactgcatggagtcacagcaaggagtaagtgaaatgacaaggcagaaggaaacaccaaatttccattcagaggaataactataggccttaatctggatgaagtctcccatgaaaa

SEQ ID NO: 8601 - DNA, 327 bp, Homo sapiens
  misc_feature (1)...(327): n = A,T,C or G
tttgacgcctcggaccgcattggaaatnctggtcgacccacgcgtccgggaaacctggagagagatgcctgggccattcgctattttgtgtctgaaggcttcgagttcttctgtgcccagtccttctccaagaacttcgggctctacaatgagagagtcgggaatctgactgtggttggaaaagaacctgagagcatcctgcaagtcctttcccagatggagaagatcgtgcggattacttggtccaatccccccgcccagggagcacgaattgtggccagcaccctctctaaccctgagttcagatctcatggtcagaatccggga

SEQ ID NO: 8602 - DNA, 481 bp, Homo sapiens
  misc_feature (1)...(481): n = A,T,C or G
taatgaaaccctcggaccgcattgaaaccctggtcgacccacgcgtccgcggtggctcacacctgtaatcccagcactatgggaggccaagacgggcagatcacaaggtcaggagatcgagaccatcgtggctaacacggtgaaaccccgtctctactaaaaatacaaaaaaaatagccgggcgtggtggcaggcacctgtagtcccagctactcgggaggctgaggcaggagaatggcgtgaacccgagaggcagagcttgcagtgagctgagatcacgccactgcactccagcatgggcgactgagcaagactccgtctcaaaaaaaaaataaagaaatcaaattcagcttttctgttttgtggccacctcacaaacactttgtttcttggtaggtacatctaccctttagattccttgacctggattgaatactggcctaaaaacacaacatgttcatcgggtcaagcatttttagtn

SEQ ID NO: 8603 - DNA, 412 bp, Homo sapiens
agacataatggaatcaggcttcacctccaaggacacctatctaagccatttgaaccctcgggattacctagaaaaatattacccgtttggttctaggcactctgcagaaagccagattcttaagcaccttctgaaaaatcttttcaagatattctgcctacacggtgtgaagggagacctgctgattgacatcaggtctggccccactatatatcaactcctctctgcttgtgaatcctttaaggagatcgtcgtcactgactactcacaccagaacctgcctgagctggagaagtggctgactaaagagccacaggcctttgactgggccccagcggtgacctatgtgtgtgatcttgaagggaacacagtcaagggtccatagaaggaggagaagttgatacaggcagcc

SEQ ID NO: 8604 - DNA, 414 bp, Homo sapiens
cccacgcgtacgataaagtccaacactgggggaacaggaagttaaaaatctaccctccccttctgaaatgggaggcagctctttgatactgggattgaattctgtcagccatttctttaaacgatatgattcactgcgaagtgacataaaccatcactaacactgattacagccacataaaagcaggaggttagagagaatactgcacgtgcacaagttcccaggagagcacctgcctggccccctttacagagagaggatggcagtttatacctcatcctcaggaaatcacatttcagcatgagctgagtctggcccctgatgtttgcacagtgctgttccattcattagctcactaatcaccaataacccaccagggccaggagtggtagctcacacctgtgatcccagcag

SEQ ID NO: 8605 - DNA, 413 bp, Homo sapiens
gaaagaaggcctatgattatttccaagctaagaaaatccctattgtttcctccctggctgatccacttgacacccctccagattctaaagaaggaatagtggtggagtcaaaccatgactcgcacatggcaaaagaacgggcccacagtacagcctcacattcttcttccaattctgaagatacagagatgtgatgaaaacaagtaatagctttggctgtttatttgatagctgtttctgggtatttaataggaatcctttctcaaggaatgagttgtgacctgtttactgtctctttagaagaaaaactccactggaaaccattcaccatgtgtgattgtcttctgttatcatttgtcttacaggcggctattgcagacggctaatttatgcttaacttaggaagagataag

SEQ ID NO: 8606 - DNA, 477 bp, Homo sapiens
  misc_feature (1)...(477): n = A,T,C or G
ctttgacccccntcatgaccattgaggaccttccgggncgacccacgcgtccggcctctccctcccttcctcaggcatcagagcggagacttcagggagaccagagcccagcttgccaggcactgagctagaagccctgccatggcacccctgagaccccttctcatactggccctgctggcatgggttgctctggctgaccaagagtcatgcaagggccgctgcactgagggcttcaacgtggacaagaagtgccagtgtgacgagctctgctcttactaccagagctgctgcacagactatacggctgagtgcaagccccaagtgactcgcggggatgtgttcactatgccggaggatgagtacacggtctatgacgatggcgaggagaaaaacaatgccactgtccatgaacaggtggggggcccctccctgacctctgacctccaggcccagtccaaagggaatcctgagcat

SEQ ID NO: 8607 - DNA, 409 bp, Homo sapiens
atgagcgttataaggctgccatgcggagggcattccacatccggttgatagcgcggcgcctgggttggtgagaagatggtcgtgaattaggctacgcttacagagccctttctggagacgtggccttaaatatacacagagtcttcgtgagagccctcaggagcctgggctcagaggagcagattgccaaatgggacccactctgcaaaaacatccagatcatcgcaacgtatgcacagacagagttgggacatgggacatatcttcagggcctggagactgaagccacctatgacgcagccacccaggagtttgtgatacacagccccacgctgactgccaccaaatggtggcctggagacttgggacggtcagccacccatgccctggtccaggcccagctgatctg

SEQ ID NO: 8608 - DNA, 402 bp, Homo sapiens
aagaatatgtagataatggacttgtttatatatagtttttctcacgccaaaccctcttgccttgaaattaaaaaaaaattggatctgataaaactcatggcaacattaattaatgtatatgcttacctgaaataatatactttacgaaaaacctgtgacttgcctgtttctccccgctccaacgaaatctttaactctcctaacatatgtataattctactcagaaaacctcaaaggatattgggggatataaatcttacttgaaaacatagctgcagaaatgttttggccttttggagtgggggaaggacaaatctgatcctgtaatctttttctttccagtaatcccttgagtctgctgcatgaggacatggacaataaattagtatatgatcctcagat

SEQ ID NO: 8609 - DNA, 402 bp, Homo sapiens
caagaagaaaatctctgccacgtccatcttctttgaatctatgccctacaaggtgaacccagatactggctacatcaactatgaccagctggaggagaacgcacgcctcttccacccgaagctgatcatcgcaggaaccagctgctactcccgaaacctggaatatgcccggctacggaagattgcagatgagaacggggcgtatctcatggcggacatggctcacatcatcgggctggtggcggctggcgtggtgccctccccatttgaacactgccatgtggtgaccaccaccactcacaagaccctgcgaggctgccgagctggcatgatcttctacaggaaaggagtgaaaagtgtggatcccaagactggcaaagagattctgtacaacctggagtc

SEQ ID NO: 8610 - DNA, 410 bp, Homo sapiens
  misc_feature (1)...(410): n = A,T,C or G
aaaatacacgagtggctttgacgagctccagcgcatccatttccccagtgacaaagggcactgcgtggacctgccagacacaggactctgcaaggagagcatcccgcgctggtactacaaccccttcagcgaacactgcgcccgctttacctatggtggttgttatggcaacaagaacaactttgaggaagagcagcagtgcctcgagtcttgtcgcggcatctccaagaaggatgtgtttggcctgaggcgggaaatccccattcccagcacaggctctgtggagatggctgtcgcagtgttcctggtcatctgcattgtggtggtggtagccatcttgggttactgcttcttcaagaaccagagaaaggacttccacggacaccaccaccacccaccacccacccatn

SEQ ID NO: 8611 - DNA, 398 bp, Homo sapiens
gcccggctactgacgcgcagtgccagaccttagccctcacggtccttaagtctcggtcgccctcgcctcgcagcctgccacccgcgctcagctgcccgcctcctcagccagccatgctggagcatctgagctcgctgcccacgcagatggattacaagggccagaagctagctgaacagatgtttcagggaattattcttttttctgcattggatttatctacgggtacgtggctgaacagttcgggtggactgtctatatagttatggccggatttgctttttcatgtttgctgacacttcctccatggcccatctatcgccggcatcctctcaagtggttacctgttcaagaatcaagcacagacgacaagaaaccaggggaaagaaaaattaaga

SEQ ID NO: 8612 - DNA, 396 bp, Homo sapiens
ggaaaaagaaaggagagaatgaaaaagagaagaatgaaaagaaagaaaaaaggaaggaaggagaaagagagggagggagggagagagagagagaaagaaagaaaaaaagaaaaagagaaagaaaaaaagacagatgtatgttcattgttcatttcagggaataaatgctaattacatcaatctcattgtcttacataatatgccagatttcaatgaaatattataagatggccaaagcagcaagaaaaaaaaatactctgtcaagagacaaagcaatcaaaagaatcaaattcagatataacacagttgttggaaataccagagaagaaatttaataatgctaaagtctctagtgaagaaggtagaaagcatgcctgttcagatggcgaattcagc

SEQ ID NO: 8613 - DNA, 424 bp, Homo sapiens
aactgatgaaaactttaagccaatcttaatgcactagcctctgtagtgtaaggaagtgtgagaaggagtttcttaatgagtttacacgtttaaatcaagcatattataagttatatgccatgtgttgaaggcttttctatttatatatataaagatttttagtatttgtttttagtgtccttgtgttgcaataatttaactcctttgactcagttgctgaaaatatttcttctattaagaagtgctcttgacttcaacacccaaacactgaaaatcatgtcaatgttacccaaagataagtttttatacagatacacaccttataagttctgatttattttcttactcattatgctgtgttctaaataaatcatgaatgagaagagtgctttattgtgaaattatttaaaactgtcctttaaaa

SEQ ID NO: 8614 - DNA, 412 bp, Homo sapiens
agcagatgtgcacgtagctgtggtggtgagaccaggcaacgcaggattaacagatgatgagaagacttactacagcctcatcacatccttcagtgaactatacctgccttcctcaacctagagaagggttgttaaggcagaccgccctgttccccagagttgtccctgtagtgtctaggtttattctaatggtaaaagtaacttacttaaaaaacatatgtacacatatgtatgcaagtatgtatatatgtgtatgctcagattaacttccataggtacataagtgaaagaagtctcagttcagtgaacacaaaacttatttaaagatgctttatatgtagaaattggttcaaatcatactctaacccttagtgagggcaaagtgtagttggtagaagaaattgctaaatac

SEQ ID NO: 8615 - DNA, 381 bp, Homo sapiens
  misc_feature (1)...(381): n = A,T,C or G
ctaacctttatcctaacacgaattttatccttgtcccaatttaaaaaactttttctcttaatttaaaaaaaacaattaatagctttattttttagagtagttttaggtttacagaaaacttgagcaagagtacagggtttcaatgtactgtcatccaccccagtttcctcattattaacatcttacatttgttgcaattgatgaacgaatattagtatattattattaattagtggtttatattagggttcactttttgtgttgcaaaattctatgcattttcttctcctgattttttttttaaaggcaggatctcagtctcccaggctggagtgcagtgatgcgatcacagctccctgcaacctccacatcctgggctan

SEQ ID NO: 8616 - DNA, 380 bp, Homo sapiens
aatgttttaaattctccagttttttgttatatagggatcaaccagctaagaaaagattttaatcaagttgaattgaggggattaatatgaaaacttatgacctcttcctttaggagggagttatctaaaagaaatgtctattaaggtgatatatttaaaaatatttttgggtgttcctggcagtttaaaaaaattggttggagaatttaggtttttattagtaccatagtaccatttatacaaattagaaaatgttatttaacagctgaattatctatacatatctttattaatcactattgttccagcagttttcaagtcaaattaataatcttattagggagaaaattcaattgtaaattgaatcagtataaacaaag

SEQ ID NO: 8617 - DNA, 409 bp, Homo sapiens
cgagggaaaccaaggctcttagggcaggaggcttgtccgagattagcacctgcgtgctccaggctctgagttctgtcccctcagctgtccggcccctgggtgctcactttaatctcaagtcattcatcttactattaaacgtgagcccagaaatattgttgtaatggagaacgatgcctgcgagtctccaaagccttccctcggaacggttccattaaatctctcctgctcagaaccacccaatccaattcatggagcgccacgtggtctacagcacagctggttagggccagcggaggtttatttatagctgggctcctggctgcctggtaaccggccattgccacctttaaagagtcttgggatattatctacctctattcagcttgaaatcgggcatgcagtgcct

SEQ ID NO: 8618 - DNA, 467 bp, Homo sapiens
  misc_feature (1)...(467): n = A,T,C or G
agcaaaggccnatttgatcccncgtagacgccctcgaaatccccgncgaccacgcgtccgcgtgcctcctggtctcagtatggcgctgtcctgggttcttacagtcctgancctcctacctctgctggaagcccagatcccattgtgtgccaacctattaccggtgcccatcaccaacgccaccctggaccgggtgagtgcctgggctagccctgtcctgagcacatgggcagctgcctcccttctctgggcttccctttccctgctggctgtggtcggacccccactcccggctctgcctttttctcttctgggtccccagggtgaaattctcaccagcccaggggactctggaggcaccccctgcctccaaacacagaagcctcactgcagagtccttcacggaggacggttctgtgctgggcctggaggggctgcctggggggcaatgactgatcctcagggtg

SEQ ID NO: 8619 - DNA, 399 bp, Homo sapiens
  misc_feature (1)...(399): n = A,T,C or G
cccacgcgtccgcgagatctctgctgcctcctgaggaatccgtctggctggaggggcgggaactgtggcttttncaaaccatctccatcatcctgcttcctatgccccagagcacaagttccagctggtcttttgggagtggcccctgcccccaaaggtggtctgcttttgctggggtaaaaaggatgaaagtctgagaatgcccaactcttcattttgagtctcacgccctgaaggttcctgaggatctagcttcatgcctcagtttccccattgacttgcacatctctgcagtatttataagaagaatattctatgaagtctttgttgcaccatggacttttctcaaagaatctcaagggtaccaatcctggcaggaagtctctcccgatatcaccg

SEQ ID NO: 8620 - DNA, 492 bp, Homo sapiens
  misc_feature (1)...(492): n = A,T,C or G
gagcccttttgatcgccgtggnaccgtgcaggactttccgggncgacccacgcgtccgcccacgcgtccggaccagcaccatggcggttggcaagatcaagcgccttacgaattgcggcaaaaagggagccaagaagaaagtggttgatccattttctaagaaagattggtatgatgtgaaagcacctgctatgttcaatataagaaatattggaaagacgctcgtcaccaggacccaaggaaccaaaattgcatctgatggtctcaagggtcgtgtgtttgaagtgagtcttgctgatttgcagaatgatgaagttgcatttagaaaattcaagctgattactgaagatgttcagggtaaaaactgcctgactaacttccatggcatggatcttacccgtgacaaaatgtgttccatggtcaaaaaatggcagacaatgattgaagctcacgttgatgtcaagactaccgatggtgactagcttcatttgt

SEQ ID NO: 8621 - DNA, 401 bp, Homo sapiens
aacaaacccacctcctcagaattgcagaagatgcaagagaaacagaaactgatcaaagagccaggctcgggagtgcctgttgttctcattacaacccttctggttattccggtggttgtcctgctggccattgccatatttattcggtggaaaaaatcaagggcctttggagcagattctgaacacaaactcgagacgagttcaggaagagtactgggaagatttagaggaaagggaagtggaggcttaaaccttggtaatttctttgcaagccgtaagggctacagtcgaaaagggtttgaccggcttagcactgagggcagtgaccaagagaaagaggatgatggaagtgaatcagaagaggagtattcagcacctctgcctgcgctcgcaccttcctc

SEQ ID NO: 8622 - DNA, 398 bp, Homo sapiens
gaagcctggcatcaatggaaatcccatcaccatctttatgagcgttatccctccaaaatcaagtggggggatgctggcgctgagtacggcgcggagtccactggcgtcttcaccaccatggagaaggctggggctcatttgcaggggggagccaaaagggtcatcatctgtggcccctctgctgacgcccccatgttcgtcatgggtgtgaaccatgagaagtatgacaacagcctcaagatcatcagcaatgcctcctgcaccaccaactgcttatcacccctggccaaggtcatccatgacaactttggcatcgtggaaggactcatgaccacagtccatgccatcactgccacccagaagactgtggatggcccctccgggaaactgtggcgtga

SEQ ID NO: 8623 - DNA, 394 bp, Homo sapiens
cggagctccgggcactcagacatcatgagttggtccttgcacccccggaatttaattctctacttctatgctcttttatttctctcttcaacatgtgtagcacatgttgctaccagagacaactgctgcatcttagatgaaagattcggtagttattgtccaactacctgtggcattgcagatttcctgtctacttatcaaaccaaagtagacaaggatctacagtctttggaagacatcttacatcaagttgaaaacaaaacatcagaagtcaaacagctgataaaagcaatccaactcacttataatcctgatgaatcatcaaaaccaaatatgatagacgctgctactttgaagtccaggaaaatgttagaagaaattatgaaatatgaag

SEQ ID NO: 8624 - DNA, 394 bp, Homo sapiens
gttctaggagaaccaagtcaggaaaggaagaatgccttgacaaaagacaaaaaactccaagctggccaggcatggtggctcacgcctgtaatcccagcactttgggaggccaagcggggcagatcacgaggtcaggagtttgagaccagcctgaccaacatggtgaaaccccgtctctactaaaaatacaacaattagctgggcttggtggcacacgcctgtaatcccagctactcaggaggctgaggcaggagaatcgcttgaactcgggaggtggaggttacagtgagccaggatctcaccactgcaatccagcctgggcgacagagtgagactccatctcaaaacaaaacaaaaaacaaaaaactccaagccaaacattgggtgacttagg

SEQ ID NO: 8625 - DNA, 403 bp, Homo sapiens
  misc_feature (1)...(403): n = A,T,C or G
cggacgcgtgggtcgcccacgcgtccggngctgtgaattctttcttcatccccgcattcccaatatacccaggccacaagagtggacgtgaaccacagggtgtcctgtcagaggagcccatctcccatctccccagctccctatctggaggatagttggatagttacgtgttcctagcaggaccaactacagtcttcccaaggattgagttatggactttgggagtgagacatcttcttgctgctggatttccaagctgagaggacgtgaacctgggaccaccagtagccatcttgtttgccacatggagagagactgtgaggacagaagccaaactggaagtggaggagccaagggattgacaaacaacagagccttgaccacgtggagtctctgaatcacn

SEQ ID NO: 8626 - DNA, 394 bp, Homo sapiens
attttatatttttaagagatggggtttcaccatgttggccaggctggtctcaaactcctgacctcaggtgatccgcccaccttggcctcccgaagtgctggttttgtagatgggagccaccatacccggcctagtcgcacattttacaggctcccaaaccacagcagaatacccgactgcctcatccctctgcacccatcatgacagtgggcgtgctggctgtaggcagaggtggcttttcccccaggttcctgggagcacgtggtgttttatggtcacctacccgggaacactgaccctggggcctctgcaggtttcttggcattgtcacaaagggaagaagcccacctgtggctggccggctgccaggtcagagccaaggcaggcaaggcct

SEQ ID NO: 8627 - DNA, 474 bp, Homo sapiens
  misc_feature (1)...(474): n = A,T,C or G
cccgcccccnnnaaatgagtacctagagcctccganaccgcccggaatcccggtcgacccacgcgtccggctgggagtccgcctcagggatcgtggagttctgggtagatgggaagcccagggtgaggaagagtctgaagaagggatacactgtgggggcagaagcaagcatcatcttggggcaggagcaggattccttcggtgggaactttgaaggaagccagtccctggtgggagacattggaaatgtgaacatgtgggactttgtgctgtcaccagatgagattaacaccatctatcttggcgggcccttcagtcctaatgtcctgaactggcgggcactgaagtatgaagtgcaaggcgaagtgttcaccaaaccccagctgtggccctgaggcccagctgtgggtcctgaaggtacctcccggttttttacaccgcatgggccccacgtctctgtctctggtacctccn

SEQ ID NO: 8628 - DNA, 393 bp, Homo sapiens
  misc_feature (1)...(393): n = A,T,C or G
acaagacagaggagaagggcctgagtttctggggaggcgaagggtgggaagccgctccacttaatccttatgccaaagtggcagatctgggggccctgttctgcctcccttctgcatgagcaggaatctctcagggcagcgctgttagcgagagcggacaaaattaaaagactgcgagtacccgctgatttccagaatcctgcatgggccatgtgagaagatcgccaggatcttcctgatggaagctgacttgggcgtggaagtcccccatgaagtcgctcagtacattaagtttgaaatgccggtgctggacagttttgttgaaaaattaaaagaagaggaagaaagagaaataatcaaactgaccatgaagttccaagccctgcgtctgan

SEQ ID NO: 8629 - DNA, 419 bp, Homo sapiens
cccacgcgttcgtgatctatctaaacctggtggggagaattatccccacattgtctcatggaaagactcaacttgcaactgtgccctccacactatccttacttctgtctccactctgataccagagtgcagccatgcagatggttattccagctctggtcacccgactcctttcaccaaattgctcctaactggaagatctcactttccccttgtgggggaggaaccgatgccagtgggagggatgtgcccctgaccattaacgactgttttttttttttttttttttaaaaaatggagttttgggggcggcccccccccaccacggggaaccactcaaattgcattaccccttggggggaaaggggccccttacaatcccaatttttaaagggtggggggcgcctgtcgttttcccc

SEQ ID NO: 8630 - DNA, 368 bp, Homo sapiens
taccttgataaggtgtcagatcacacactgagcttgttcttcacggttctgcaagatgtcccagtatgagatctgaaaccagccatagggaaagtctatgattactacgagacggatgagtttgcaattgctgagtacaatgctccttgcagcaaagatcttggaaatgcttgaacaccacaaggctgaaaagtgctttgctggagtcctgatctcagagctccacagaagacacgtgttcttgtatctttaaggacttgatgagtaaacactttttctggtcaaaaaaaaaaaaaaaaaaaaaaaatggggccgggcatttaaaaagttttaatgagggcccatggatacggggcggagctatctat

SEQ ID NO: 8631 - DNA, 365 bp, Homo sapiens
tctccagatacgtgggaggccaagagcatttcgctcacttgctgatcctcagggacaccaagacctacatgcttgcttttgacgtgaacgatgagaagaactgggggctgtctgtctatgctgacaagccagagacgaccaaggagcaactgggagagttctacgaagctctcgactgcttgcgcattcccaagtcagatgtcgcgtacaccgattggaaaaaggataagtgtgagccactggagaagcagcacgagaaggagaggaaacaggaggagggggaatcctagcaggacacagccttggatcacgacagagacttgggggccatcctgcccctccaacccgacatgtgtacctcagct

SEQ ID NO: 8632 - DNA, 369 bp, Homo sapiens
attcgggccgagatgtctcgctccgtggccttatctgtgctcgcgctactctctctttctggcctggaggctatccagcgtactccaaagattcaggtttactcacgtcatccagcagagaatggaaagtcaaatttcctgaattgctatgtgtctgggtttcatccatccgacattgaagttgacttactgaagaatggagagagaattgaaaaagtggagcattcagacttgtctttcagcaaggactggtctttctatctcttgtactacactgaattcacccccactgaaaaagatgagtatgcctgccgtgtgaaccatgtgactttgtcacagcccaagatagttaagtgggatcgagacatg

SEQ ID NO: 8633 - DNA, 365 bp, Homo sapiens
ttcccgcggcgggtgatgcgctggagacttatctctgctgcctaggctgagtgcagtgtgtgatcgaggcgcactgcagccttgacctcctgggctcaagcgatcctcacctcggcctaccgagtagctgggactacaggcacgcgccactacactcggatttctgacagtcagacttgtccacaagaactcaactggcaaggctgcttttctgtgctaaaactggggagctagtgggcaccatgaagatcttctgcagtcgggccaatccgaccacggggtctgtggagtggctggaggaggatgaacactatgattaccaccaggtgattgcacggtcatcttatgatgatatgctacatgac

SEQ ID NO: 8634 - DNA, 402 bp, Homo sapiens
cccacgcgtccgcggcaaggccaagctgcgcagcatgtttgagcgatttctggagaagaagaagcagaaggagcaggagcgggtgagagccacgagccaaggtgggcacttgatgtcggatctcttcaacaagctggtcatgaggcgcaagggcatctctgggaaaggacctggggctggtgaggggcccggaggagcctttgcccgcgtgtcagactccatccctcctctgccgccaccgcagcagccacaggtagatgaggacaaggacgactgggaatcctagggggctccatgacaccttcccccgcagacccagacttgggccgttgctctgacatggacacagccaggacaagctgctcagacctgcttccctgggagggggtgacggaaccagca

SEQ ID NO: 8635 - DNA, 365 bp, Homo sapiens
gctggtctcaaactcttgacttcatgaccctcccgccctggcctaccaaagtcctgggattacaggcgtgagccaccacgttcggcctgtaccaacattttatgaacaaatcttttaatgatggacgattatgctgcttccagtatttacaaaccattttgcagcgaatattctagaacagaactctttggtatgttcgcatatatgtaggataatagataataactggctggggcaaggggcatgtgtgttttcggccgtggtgggtactgccaaaatgccccacaaagagggaccattaatttttaattattcatgtaatacatgaatacatgctacttgtgaagaaatagaacatcacacat

SEQ ID NO: 8636 - DNA, 369 bp, Homo sapiens
gagcagcaaagtctctcgcgacaccctgtacgaggcggtgcgggaagtcctgcacgggaaccagcgcaagcgccgcaagttcctggagacggtggagttgcagatcagcttgaagaactatgatccccagaaggacaagcgcttctcgggcaccgtcaggttggcaccgttctgatcccacccagccctcagtgcccccgtgcttgcccctcccctgcaggctcccgctgagccggaggcgggcacgtcggtactgatgtgctagggtagttcagaccccctgctccgggcaggcgcggctggacggacccccaccctgggtcttaaaacatgaggggaggcgtgggtaggcctcggccgagcccgccg

SEQ ID NO: 8637 - DNA, 361 bp, Homo sapiens
tacgataaggtacaaaatgaggccaagacacccttgaagaagttcttgttgaagctggctgtttccagtaaattcaaagagcttcaaaagggtatcatcaggcatgatagtttctgggacaagctcatctttgcaaagatccaggacagcctgggcggaagggttcgtgtaattgtcactggagctgcccccatgtccacttcagtcatgacattcttccgggcagcaatgggatgtcaggtgtatgaagcttatggtcaaacagaatgcacaggtggctgtacatttacattacctggggactggacatcaggtcacgttggggtgcccctggcttgcaattacgtgaagctggaagatg

SEQ ID NO: 8638 - DNA, 368 bp, Homo sapiens
gcgcggcgcagtcttcctgctttggcggtgtctctcaagccatctccccggttgttgtgcacagccacgaaacaaaagaacagcggccagaacctggaagaggacatgggtcagagtgaacagaaggcagatcctcctgctacagagaagaccctcctggaagagaaggtcaagttggaggaacagctgaaggagactgtggaaaaatataaacgagctttggcagacactgagaacttacggcagaggagccagaaattggtggaggaggcaaaattatacggcattcaagccttctgcaaggacttgttggaggtggcagacgttctggagaaggcaacacagtgtgttccaaaagaagatattaa

SEQ ID NO: 8639 - DNA, 365 bp, Homo sapiens
  misc_feature (1)...(365): n = A,T,C or G
aatcttaatctttgcattttatttaaaatgcattttgcaaattaaaaaaagccccgtgtgttaggtggctagtattcattctcggtggtcacttatcttgtgcatgacacctgctcatttttaccgctgggtatattacctcatttcagtaggttttccttttttttctttttcttttttttgccacagaacactgtacaaaattaaaatgaggaaaataaaggttgagactattaacttaattacagcaatggaagattttccaaacctaattcgaaacattagcaattagctttttaaatatctgaggcatttgcagttttaatttcgctgtactttaggtaatttaatattgatttcctggn

SEQ ID NO: 8640 - DNA, 361 bp, Homo sapiens
ctgtccgagggccactttgccgccgggggccttctgcgcccgggtaaggggctcgcactgccgtccgggtagctgctgtcagggctccctgactggcttgggactgagagacagaggttgtggggcaggaggagggttggatgggggcacgaggggcaatgggagagtgagtggggctgaaagaggcaggaggaacgggacaggaggagcggcggttggggcacgcacagagtgcaagacgctgagcaatgcaggtactgaagaattcaactgggggccgagcatggctgggggcccaagagacaggatgagggaggagggccgaagggggcccagactggagaagaggccggcttgttcc

SEQ ID NO: 8641 - DNA, 366 bp, Homo sapiens
aaaagataaaaatacttttgttaagatcgcgtttctgactttattcaggagtatggcaattggtatgggaattactggaatggagctttgcacttggggaaagagactgagctcaacttcaaatacaacaaggagaagtgtggattcgtatccaaggagcagagtggctggggtggggtgtctgagtggaaaactacaaaatgggagagtaattcttgctaaactgactcaccaggtttcctggtgatgccaggccattgttgtcagacatcacctgcggggtggtgagagggatgagaaaggtgattagatattgagagtgatcagatattgagggtgggagatttgggttaaaaccaaattgtc

SEQ ID NO: 8642 - DNA, 362 bp, Homo sapiens
ttgttaagatcgtgtggcagactttattcaggactatggcaataggtataggaattactggaatggagctttgcagttggggaaagagactgagctcaacttcaaatacaacaaggagaagtgtggattcgtagccaaggagcagagtggctggggtggggtgtctgagtggaaaactacaaaatgggagagtaattcttgctaaactgactcaccaggtttcctggtgatgccaggccagtgttgtcagacatcacctgcggggtggtgagagggatgagaaaggtgattagatattgagagtgatcagatattgagggtgggagatttgggttaaaaccaaattggcaggattcttgcta

SEQ ID NO: 8643 - DNA, 368 bp, Homo sapiens
aatctcctctgctctggaggcaggaacagtgtgggtgaattgctatggcggggtaagtgcccagtgcccctttggtggattcaagatgtctggaaatggaagagaactgggagagtacggcttccatgaatatacagaggtcaaaacagtcacagtgaaaatctctcagaagaactcatacagaaaatacaggagtggagagaagctcttcaatagctaagcatctccttacagtcactactataggagattttaaagacaaaagttttcttttcttgatttttttaaacataagctaagtcatattagtattaatactacccatagaaaacttgacatgtagcttcttctgaaagaattatttgcct

SEQ ID NO: 8644 - DNA, 373 bp, Homo sapiens
agggagcgaaccatgccaggctcaaagcacatctctccccaaactccccaggtggggacagcaggccaaaggcctccacataacccctcagggaggcctggagtccagatgctgtactccagtatctaaacaatcactgaatcttaaagctgacaggttcaaagctcttactttgggccgagcgcagtggcttacgcctgtaatccaggcactttcggaggctgaggtgggtggatcacctgaggtcaggagtttgagaccaacctagccaacatggtgaaaacccatctctactaaaaatacaaaaattagctgggcgtgttgacacgtgcctgtaatcccagctactcggtaggctgaggcagaagaatcg

SEQ ID NO: 8645 - DNA, 366 bp, Homo sapiens
gagccggacctgtctcatggatccagcctgacccggcccgtggaggcccttttccagctgtggaccgcagaacctctggaccaggcagctgcctcggccagcgccattgacatctccaagtggaggaccttccagacagcactcttcctggaccggctcctggatgggtccccgctgccgcaggaggtggtgatgagcctgtccaagtgctactcctccctgctggactcgatgaacgctgagatccgcatccgctggctgcagattgtggtccgcaacgactactatcctgacctccacagggtgcggcgcttcctggagagccagatgtcacgcatgtacaccatcccgctgtacgaggacctc

SEQ ID NO: 8646 - DNA, 362 bp, Homo sapiens
taaatgctttgattgttcatatcaagaaattgattgaacgttctcaaaccctgtttacggtacttggtaagagggagccggtttgggagagaccattgcatcgctgtccaagtgtttcttgttaagtgcttttaaactggagaggctaacctcaaaatattttttttaactgcattctataataaatgggcacagtatgctccttacagaaaaaaaaaaaaaaaaaaaaaaaaaaaaaggggggggccctttttaaaaattccttgggggggccaaagttatccggggaagcgaaaggtatacttttttccttttggggggcgaatttaaaaccaacctgggatttttggaaaaaaaacctt

SEQ ID NO: 8647 - DNA, 366 bp, Homo sapiens
aagagtgctgacttcactaacttcgatcctcgtggcctccttcctgaatccttggattactggacctacccaggctcactgaccacccctcctcttctggaatgtgtgacctggattgtgctcaaggaacccatcagcgtcagcagcgagcaggcgttgaaattccgtaaacttaacttcaatggggagggtgaacccgaagaactgatggtggacaactggcgcccagctcagccactgaagaacaggcaaatcaaagcttccttcaaataagatggtcccatagtctgtatccaaataatgaatcttcgggtgtttccctttagctaagcacagatctaccttggtgatttggaccctggttgc

SEQ ID NO: 8648 - DNA, 362 bp, Homo sapiens
acggcgggtttgctgagatctgtggccggcggtagctggttgccgaggagcccaagtagaagaaatatggagtttagagcctgagaattttgaaaaattaaagccagttcatgggttaatttttcttttcaagtggcagccaggagaagaaccagcaggctctgtggttcaggactcccgacttgacacgatattttttgctaagcaggtaattaataatgcttgtgctactcaagccatagtgagtgtgttactgaactgtacccaccaggatgtccatttaggcgagacattatcagagtttaaagaattttcacaaagttttgatgcagctatgaaaggcttggcactgagcaattcag

SEQ ID NO: 8649 - DNA, 470 bp, Homo sapiens
  misc_feature (1)...(470): n = A,T,C or G
tgccatgtccnatactgaaccncgtagacagcctcgaaanccccggncgaccacgcgtccgctgaaggactatgaagatcagcagaagcaacttgatcaggtcattgccaaagacttacttccctctagagataggcaacgcttaccactgataaaaatgaaaccagttccagacttggttcccggaaattttaagagccagcttcagaaggtacccccagagtggaaggcattaacagacatgccgcagatgagaatggagttagagagacctggtggaaatgagattactcgaggaggctccacctcttatggaaccggatcagagacggaaagccccaggaaccctagcagtgctggaagctggaactctgggagctctggacctggaagtactggaaaccgaaaccctgggagctctgggactggagggactgcaacctggaaacctgggagctctggacctggan

SEQ ID NO: 8650 - DNA, 368 bp, Homo sapiens
  misc_feature (1)...(368): n = A,T,C or G
tagatgacttggataaagaactaaacaactacattatgcgatgtanagaatggtatggctggcatttccctgaattaggaaaaattatttcagataatttaacatactgcaagtgtttacagaaagttggcgataggaagaactatgcctctgccaagctttctgagttgctgccagaagaagttgaagcagaagtgaaagcagctgcagagatatcaatgggaacagaggtttcagaagaagatatttgcaatattctgcatctttgcacccaggtgattgaaatctctgaatatcgaacccagctctatgaatatctacaaaatcgaatgatggccattgcacccaatgttacagtcatggttggg

SEQ ID NO: 8651 - DNA, 369 bp, Homo sapiens
tatgtgtgcacagaatttctccctctaataaaaccccaagggagagtggtgaacgtatctatcatcatgagcgtcagagcccttaaaagctgcagcccagagctgcagcagaagttccgcagtgagaccatcactgaggaggagctggtggggctcatgaacaagtttgtggaggatacaaagaagggagtgcaccagaaggagggctggcccagcagcgcatacggggtgacgaagattggcgtcaccgttctgtccaggatccacgccaggaaactgagtgagcagaggaaaggggacaagatcctcctgaatgcctgctgcccagggtgggtaagaactgacatggcgggacccaaggccaccaag

SEQ ID NO: 8652 - DNA, 475 bp, Homo sapiens
  misc_feature (1)...(475): n = A,T,C or G
aggcgggtnnnnnnaaattgacgacctagnacatgcccggaancccgggacgacccacgcgtccgcacgatgaaattctggccctccaggattacaacctaacgtcgattccgaaggctcacatccatgactgctgacaggaactcctccgtaccctcaaccagccagacagccagctccagctgaccaccggcaatggcttgttcctcagcgagggcctgaagctagtggataaggatttggaggatgttaaaaagctgtaccactcagaagccttcactgacaacttcggggacaccgacgaggccaagaaacagatcaacgattacgtggagaagggtactcaagggaaaattgtggatttggtcaaggagcttgacagagacacagtttttgctctggtgaattacatcttctttaaaggcaaatgggagagaccctttgaagtcaaggacaccgaggaagaggacttcca

SEQ ID NO: 8653 - DNA, 409 bp, Homo sapiens
  misc_feature (1)...(409): n = A,T,C or G
cttctgatttgttttaagaattttgctattcttttttctgctgactttggattcatccattgagtctttcaacatttattgaatacactatggttttggtaatagtctctgtcttgaagccaggaaagactgaatatgccacaatcccagaatcatgggtaggaatggagaaagggaagaaaacagcaaagagctgtaagccaatagtaagtgtgccaataaacagggtctagagcacagcagttgggcttggaagagttacacacacttggctagaatgtattatagtcaggatctgaatctatattccctaatgcccctgagcctatttccttacctcttaggngggggtagagcccctatgcatagggtagacaggagtagtaaaggagaaaaatgtgtgaactag

SEQ ID NO: 8654 - DNA, 409 bp, Homo sapiens
aatagacaaagggggtgtgatgagtgttaacttggttgttccagaggtaaaccaggtctcagggaagagcctggagctgctattgcttaggaagttgtacgtgccttgaaatgtccactacctgaggacgcagcatctggtgggcccggggctgctggggccaaggagggaccttgaccttctggtgcctgcccctccccggcctacgtgccatccgcgtgacgctaggtcagcgctgccggttctttaccaaatgtgcttgcttctcctaagttatttataaagagaaatcactaatggactctactggtttgagtgcttctgagctggatgaccgaccgcctgtatgtttgtgtaattaattgccataataaactttgatgagtcacaaaaaaaaaaaaggaaaaaa

SEQ ID NO: 8655 - DNA, 419 bp, Homo sapiens
gatgcagagatcggcatgtcaccttggcaggtgatgcttttccggaagagtccccaggagctgctgtgtggggccagcctcatcagtgaccgctgggtcctcaccgccgaccactgcctcctgtacccgccctgggacaagaacttcaccgagaatgaccttctggtgcgcattggcaagcactcccgcaccaggtacgagcgaaacattgaaaagatatccatgttggaaaagatctacatccaccccaggtacaactggcgggagaacctggaccgggacattgccctgatgaagctgaagaagcctgttgccttcagtgactacattcaccctgtgtgtctgcccgacagggagacggcagccagcttgctccaggctggatacaaggcgcgggtgacaggctggggcaacctgag

SEQ ID NO: 8656 - DNA, 423 bp, Homo sapiens
cgccgacagcctgcaggcctcgctgaggcccttcgcctacgagctcaaggccaagatcgaccagaacgtggaggagctcaagggacgccttacgccctacgctgacgaattcaaagtcaagattgaccagaccgtggaggagctgcgccgcagcctggctccctatgctcaggacacgcaggagaagctcaaccaccagcttgagggcctgaccttccagatgaagaagaacgccgaggagctcaaggccaggatctcggccagtgccgaggagctgcggcagaggctggcgcccttggccgaggacgtgcgtggcaacctgaggggcaacaccgaggggctgcagaagtcactggcagagctgggtgggcacctggaccagcaggtggaggagttccgacgccgggtggagccctacgggga

SEQ ID NO: 8657 - DNA, 412 bp, Homo sapiens
gatgcagagatcggcatgtcaccttggcaggtgatgcttttccggaagagtccccaggagctgctgtgtggggccagcctcatcagtgaccgctgggtcctcaccgccgcccactgcctcctgtacccgccctgggacaagaacttcaccgagaatgaccttctggtgcgcattggcaagcactcccgcaccaggtacgagcgaaacattgaaaagatatccatgttggaaaagatctacatccaccccaggtacaactggcgggagaacctggaccgggacattgccctgatgaagctgaagaagcctgttgccttcagtgactacattcaccctgtgtgtctgcccgacagggagacggcagccagcttgctccaggctggatacaaggggcgggtgacaggctggggcg

SEQ ID NO: 8658 - DNA, 403 bp, Homo sapiens
agttcagtgacaggatcttggctcacggcaacctctgcctcctgggttctagcaatcctcctgagtagatgggatttcaggcacccaccaccatgcctgggtgatttttgtgttttagtagagatggagtttcaccgtgttggccaggctggtcttgaactcctgaccttaagtgatccacctgcctcggcctcccaaggtactgggattacaggtgtgagccactgtgctcggccttatttatattttatatattgttgatatagttgaatttatgtatgccattaaattatttgtttctatttatctcatgtgttttgtgtttctctacccctttttaaatcccgccttcttttttgttgtggtaaaaaatacgtaaagaaaaatttaccattttaaccat

SEQ ID NO: 8659 - DNA, 424 bp, Homo sapiens
  misc_feature (1)...(424): n = A,T,C or G
cgcatcttctggcggaccgtgcgaggtatgctgccccacaaaaccaagcgaggccaggccgctctggaccgtctcaaggtgtttgacggcatcccaccgccctacgacaagaaaaagcggatggtggttcctgctgccctcaaggtcgtgcgtctgaagcctacaagaaagtttgcctatctggggcgcctggctcacgaggttggctggaagtaccaggcagtgacagccaccctggaggagaagaggaaagagaaagccaagatccactaccggaagaagaaacagctcatgaggctacggaaacaggccgagaagaacgtggagaagaaaattgacaaatacacagaggtcctcaagacccacggactcctggtctgagcccaataaagactgttaattcctcanaaaaaaaaaaaaaaaa

SEQ ID NO: 8660 - DNA, 423 bp, Homo sapiens
cggacgcgtgggcacatttctgatatacatcacggagttactgaaaaagctgcaatcaaccacagtcatgaacccctacatgaagcttgctccaggagaacttactatcatcctctaattttttaaaagaaatcttcatttattcttcttttccaattgaactttcacatagcacagaaaaaattcaaactgcctatattgataaaaccatacagtgagccagccttgcagtaggcagtagactataagcagaagcacatatgaactggacctgcaccaaagctggcaccagggctcggaaggtctctgaactcagaaggatggcattttttgcaagttaaagaaaatcaggatctgagttattttgctaaacttgggggaggaggaacaaataaatggagtctttattgtgtaaaaaaaaaa

SEQ ID NO: 8661 - DNA, 394 bp, Homo sapiens
  misc_feature (1)...(394): n = A,T,C or G
cagtttctaatttttaaaactgatgtggtttgcatttcataaaaggcaaagtttacagaaccataaacattctcaattttctttatgctagacatataaattatttttcaaactgtatagatttggggtaaaaagttgtctcagttcctctcccaattgcaatgagaaaaaaaagcttaatttttacattatacttaattttctaaaaccatgtaactccattgaacacatttttcaacttaaggtctgcatagcagacttttaataaccttgggatttatctggtagaacaatatgtgttctacatttttttcataattatatattgggnatgttaaaactattttccagttgttttgtctgtaaaactgtctttatcaatatgcttaatggg

SEQ ID NO: 8662 - DNA, 476 bp, Homo sapiens
  misc_feature (1)...(476): n = A,T,C or G
naatgaacgcctcaggaccattgaggaccttccgggncgacccacgcgtccgagcgctctgcgggccagtggactgcggctggggaccccagcactgacgtcccgtggacttttggaaaaagacttccaaaaagcagcccactttattcacagagggatagagctgaccctgcagatccagagcgacactggtgtcagagccaccctgaaagagttcaaggagagactggcaggggataagtaccaggcggccgtgcaggctctccgggaggaggttgagagcttcgcctctctcttccctctgcctggcctgcctgacttctaaaggagcgggcccactctggacccacctggcgccacagaggaagctgcctgccggaggacccccacctgagagatggatgagctgctccaaaggggaactgttgacactcgggccctttgaggggggttcttttggacttttttcatgattg

SEQ ID NO: 8663 - DNA, 435 bp, Homo sapiens
cctgtggaaattgggtctgtacagccatttcctgtgtcggaaagaatcagaagggggcccagacccagacagaggaggagatgaccagatatgtccaggagctccaaaagcatcaggaaacagctgaaaagaccaagagagtgagcaccaaagagatctaatgaggaggcacagaccagtgtctggatcccagcatcttctccacttcagcgctgagttcagtatacacaagtgtctgctacagtcgccaaatcaccagtatttgcttatatagcaatgagttttattttgtttatttgctttgcaataaaggatatgaaggtggctggctaggaagggaagggccacagccttcatttctaggagtgctttaagagaaactgtaaatggtgctctggggctggaggctagtaaggaaactgcatcacgattgag

SEQ ID NO: 8664 - DNA, 412 bp, Homo sapiens
gccagactgttgaaatgctgaaatgattaaggttgttgcagtttcaaagtcagaggaatcgtgcttcggatttcttatgttttctagttctctgctttttcagttcacagtgggttgtggtgcattcagtattccatctttgttgaacggaggcgtacttgccattgattcacatgactacattgaattctgtactgtcattttctagatgtttggccacagaaactttttcccacttaacatttgttaacagcctgcataactaatcttgtacattgcttttattattgtttttttctgtgtatgtttttccctttttttcttttgtttttacctttttgtgtttttgtgtgttttttttttttatttttttgttgttgtcctttttttttgtttttgtttgtgtttttcg

SEQ ID NO: 8665 - DNA, 434 bp, Homo sapiens
cagccaaccaggggcctgcccatgccagggagctgcaagccgccccgccattctctacgcacttctgagctccagcctcaaggctgtcccccgaccccgtagccgctgcctatgtaggcagcaccggcccgtccagctatgtgcacctcatcgcacctgccgggaggccttggatgttctggccaagacagtggccttcctcaggaacctgccatccttctggcagctgcctccccaggaccagcggcggctgctgcagggttgctggggccccctcttcctgcttgggttggcccaagatgctgtgacctttgaggtggctgaggccccggtgcccagcatactcaagaagattctgctggaggagcccagcagcagtggaggcagtggccaactgccagacagaccccagccctccctggctgcggtgcagg

SEQ ID NO: 8666 - DNA, 491 bp, Homo sapiens
  misc_feature (1)...(491): n = A,T,C or G
gcattgcccnccgttcnncacccttgtgccccctgacagagcncgtaancccgggccgacccacgcgtgcgaaagaaatttatgcctagcggttggaggcctatagaaagggaaagcagtatgttcctatacggctatttttatgtttttggctggagaaagctaggggaagcagccttgtaatcaattgctttggcatacctgagcccttgcaggatgcacattggctatttcgtactcacacaaagaatattacttagtacaatactgacaccaggaaagctgaatctatataagatagtaaaagatgctaagcaacaaaactggctatattccttcatttatttattcatttatttctaaataaatgagcattgattaagcagccacactgtgctaggtaacgggaattacagggtcattgatttcactagggtggcaccacgataaatatcttgtgagctcagagatctagatcaccgaaaatgaag

SEQ ID NO: 8667 - DNA, 400 bp, Homo sapiens
ttagaaaagaaagtaaaacttgcacattcaaagctcatgatttgtacagtcacacctggcagtagcactgcacagttacaaatatgcacacacgttaactgctatgcataaatattgacagttaaaccagaacacaattgaaacagtgacataaatacctacaggattcagaattgttccagggtaatataaattattctacttgttcactctccccaccctcttgaacttgttagaagatttgctgctttagcagaatctttccaagattgagaaaagtgtatcaacctaggattttcattactatatagtcacataaatggaggaggagatatatttggcttctgcctctgcaacaattagtatgaacatatttctttctctagggaataataggttg

SEQ ID NO: 8668 - DNA, 497 bp, Homo sapiens
  misc_feature (1)...(497): n = A,T,C or G
agcatgggcncccggncggccaactgaaaccttcgattgagcgcgctcggaaccggcccggaanncccggggcgacccacgcggccgaaaccgctcaagtctgccttaaagagccttacaagccatccagtccctgcagctccacaagctgacccatccggggccttgtgctccacagaatgggtctgctccttcccctggcactctgcatcctagtcctgtgctgcggagcaatgtctccaccccagctggccctcaacccctcggctctgctctcccggggctgcaatgactcaaatgtgctggcagttgcaggctttgccctgcgggatattaacaaagacagaaaggatggctatgtgctgagactcaaccgagtgaacgacgcccaggaatacagacggggtggcctgggatctctgttctatcttacactggatgtgctagagactgactgccatgtgctcagaaagaaggcatggcaagactgtggaatg

SEQ ID NO: 8669 - DNA, 424 bp, Homo sapiens
gcgggcagatcacaaggtcaagagattgagaccatcctggctaacatggtgaaaccccgtcttttcttaaatgtttcaatttcagtaactttaggggcacaagtagttttggttacatggatgaattctacagtggtgaggtataggattttgggaggctgaggcgggcagatcacaaggtcaagagattgagaccatcctggctaacatggtgaaaccccgtctttactaaaaatacaaaaattagctgggtatggtggcacatgcctgtaatcccggctactctggaggctgaggaaggagaatcacttgaacctgggaggcagaggttgcagtgagccaagatcacaccattgtactccagcctgggcgacaagagcgaaactctgtctcaaaaaaaaaaaaaaaaaaaaaaaggggccgg

SEQ ID NO: 8670 - DNA, 402 bp, Homo sapiens
gaggcagagcttgcagtgagccaagatcgtgccactgcactccagcctgggcaacagagcgagactccatctcaaaaaaaaaaaaaatggggtggccgaaccccttaaaaaccaccttccaaagggggccccaattttttttttttttgggaggggcgatttgaataaaaatgcccttttattttaggggggaaagagggtttttttaggaatttttacctaaggcgggatccctactttttccttgtcctttctttcccccaaaaaaaccctagtgggttttttggaatggaaggaaccaggggagcccgggaaagttttaaagggaaataggtaggggttttcaaagtcttaggctaggaaaacccttgttaagtccaacccaaaaaccagaaccttaaa

SEQ ID NO: 8671 - DNA, 424 bp, Homo sapiens
  misc_feature (1)...(424): n = A,T,C or G
cggacgcgtgggcaaaggttgggcgaaacccagaaagctatgctagatccccccaagcccagtcgaggtccctggcgacagcccgaacggaggcacccaaagggaggggagtgccacgcccctaaaggtacccgtgacacccaggaactgccacctcctgaggggcccctcaaggagcccatggacctaaagccagaaccccatagccaaggagttgaaggtcctccacaagagaaggggcctggcagctggcaggggcccccaccccgcaggactcgggactgtgttcgctgggagcgctctaaaggccggacacccggttcttcctaccctcgcctgcctcggggccagggagcataccggcctggtactcggagggagtccctgggcctggaatctaaggatggttcctagcaggacttgn

SEQ ID NO: 8672 - DNA, 413 bp, Homo sapiens
gcgctggattacttttcagaaagaagtaatcctttttatgacagaacatgtaataatgaagtggtcaaaatgcagaggctaacattagaacacttgaatcagatggttggaatcgagtacatccttttgcatgctcaagagcccattcttttcatcattcggaagcaacagcggcagtcccctgcccaagttatcccactagctgattactatatcattgctggagtgatctatcaggcaccagacttgggatcagttataaactctagagtgcttactgcagtgcatggtattcagtcagcttttgatgaagctatgtcatactgtcgatatcatccttccaaagggtattggtggcacttcaaagatcatgaagagcaagataaagtcagacctaaagccaaaaggaaagg

SEQ ID NO: 8673 - DNA, 479 bp, Homo sapiens
  misc_feature (1)...(479): n = A,T,C or G
aattgatacgctttgcggnacctttgaggactttccgggncgacccacgcgtccgctgcagaggggtccatacggcgttgttctggattcccgtcgtaacttaaagggaaattttcacaatgtccggagcccttgatgtcctgcaaatgaaggaggaggatgtccttaagttccttgcagcaggaacccacttaggtggcaccaatcttgacttccagatggaacagtacatctataaaaggaaaagtgatggcatctatatcataaatctcaagaggacctgggagaagcttctgctggcagctcgtgcaattgttgccattgaaaaccctgctgatgtcagtgttatatcctccaggaatactggccagagggctgtgctgaagtttgctgctgccactggagccactccaattgctggccgcttcactcctggaaccttcactaaccagatccaggcagccttccgggagccacgn

SEQ ID NO: 8674 - DNA, 393 bp, Homo sapiens
ttccaataacacatgattttcttttggcttcttcatttctcttgctcaccaggaagtaacaaaagtatagctttgacagagatggtgttgataatttcaattctagttgatcgcgacaattttcaaataaggaagagggggcttttatccttgtcgtatgacaaccatgacgctacggaaaaactgacgcttaaaagtccacttttaacactatatttatttatgtacgatctgtcaaagaagacttccaaaatgatctattaattaaaccagactctgttgcaataaaaaaaaaaaaaaaaggacccccgctttaaaatactccttggggggccgaatctcacgcgagcatgcacctgcaatgctttatccttatccgcgtattttaacccg

SEQ ID NO: 8675 - DNA, 382 bp, Homo sapiens
  misc_feature (1)...(382): n = A,T,C or G
cccctccccccgagcgccgctccggctgcaccgcgctcgctccgagtttcaggctcgtgctaagctagcgccgtcgtcgtctcccttcagtcgccatcatgattatctaccgggacctcatcagccacgatgagatgttctccgacatctacaagatccgggagatcgcggacgggttgtgcctggaggtggaggggaagatggtcagtaggacagaaggtaacattgatgactcgctcattggtggaaatgcctccgctgaaggccccgagggcgaaggtaccgaaagcacagtaatcactggtgtcgatattgtcatgaaccatcacctgcaggaaacaagtttcacaaaagaagcctacaagaagtacatcaaagattn

SEQ ID NO: 8676 - DNA, 439 bp, Homo sapiens
  misc_feature (1)...(439): n = A,T,C or G
acggaactctctgaggccctcgccgaaccccgggncgacccacgcgtacgcccctccccccgagcgccgatccggctgcaccgtgctcgctccgagtttcaggctcgtgctaagctagcgccggcgtcgtctcccttcagtcgccatcatgattatctaccgggacctcatcagccacgatgagatgttctccgacatctacaagattcgggagatcgcggacgggttgagcctggaggcggaggggaagatggtcagtaggacagaaggtaacattgatgactcgctcattggcggaaatgcctccgctgaaggccccgagggcgaaggtaccgaaagcacagtaatcactggtgtcgatattgtcatgaaccatcacctgccggaaacaagtttcacaaaagaagcctacaagaagcacatcagagattacatgaag

SEQ ID NO: 8677 - DNA, 421 bp, Homo sapiens
acactacaaggctcggagctccgggcactcagacatcatgagttggtccttgcacccccggaatttaattctctacttctatgctcttttatttctctcttcaacatgtgtagcatatgttgctaccagagacaactgctgcatcttagatgaaagattcggtagttattgtccaactacctgtggcattgcagatttcctgtctacttatcaaaccaaagtagacaaggatctacagtctttggaagacatcttacatcaagttgaaaacaaaacatcagaagtcaaacagctgataaaagcaatccaactcacttataatcctgatgaatcatcaaaaccaaatatgatagacgctgctactttgaagtccaggaaaatgttagaagaaattatgaaatatgaagcatcgattttaaca

SEQ ID NO: 8678 - DNA, 491 bp, Homo sapiens
  misc_feature (1)...(491): n = A,T,C or G
cgcgccccaatgatcccatggatttgatcgcatctgaggnccgaccacgcgnccgcagataaaaagctcaccatattcaaaactgagctgttgttccgcgaatcttttgaggaaactcacatcaagagttaattgggaagaagaggcagcttctggcttgctaacctctctgaaagacaacgtgcccaaggccacaggggtcctttatgattatgccaacaagtaccactgggaacacacagggctcaccctgagagaagtgtcttcaaagctgagaagaaatctgcagaacaatgctgagtgggtttatcaaggggccattaggcaaattgatgatatcgacgtgaggttccagaaagcagccagtggcaccactgggacctaccaagagtggaaggacaaggcccagaatctgtaccaagaactgttgactcaggaaggccaagccagtttccagggactcaaggataacgtgtttgatggcttggtcg

SEQ ID NO: 8679 - DNA, 493 bp, Homo sapiens
  misc_feature (1)...(493): n = A,T,C or G
gcccccatagatccccttaggnatagatcnccatttgcagggtcgacccacgcgtccggaaatcagaacaaagaatggacagagttggggagtgtataatgtggttcttatgcaggaaaagtgttccagcacagaatacagccagtgcaaatgccctgggatagcaatgcactaaacatgtttaaagaactgcaatgagacagtgtgaccaaaagagaacgtgagtggagaaaatggcagagacaaattaggagaagcagtgagaagccagatcgcgtggttctatgttatcacatggtaaacctttaaaaattattatctgagcgagacaggaagcctttctagtgctttagaaaaaagaaataatatgctttaaattaggttttacaaagatcacattttggtgaatagactaagatgtcacagatggaagtcaagggaagtggcaagagcacatggaagaggatgcaagaagaatcatgatgagggatgg

SEQ ID NO: 8680 - DNA, 499 bp, Homo sapiens
  misc_feature (1)...(499): n = A,T,C or G
tgcatgtcnnnttttgatagcgtgcaggaactgacagccattgcagggncgacccacgcgtccgcccacgcgtccggtggaagaattacttgaaactgtttttattcaggtggctactaaagaagaggagctgaatgcaataagaacagaaaattcatctctgacaaaagaagttcaagacttaaaagctaagcaaaatgaccaggtttcttttgcctctctagttgaagaacttaagaaagtgatccatgagaaagatggaaagatcaagtctgtagaagagcttctggaggcagaacttctcaaagttgctaacaaggagaaaactgttcaggatttgaaacaggaaataaaggctctaaaagaagaaataggaaatgtccagcttgaaaaggctcaacagttatctatcacttccaaagttcaggagcttcagaacttattacaaggaaaagaggaacagatgaataccatgaaggctgttctggaagagacagaa

SEQ ID NO: 8681 - DNA, 424 bp, Homo sapiens
  misc_feature (1)...(424): n = A,T,C or G
gcgcacctttcctgagaagccagacttccactgatggaagagctgaaaacacaagcccaggagtgcagacactgccctaattgcttcctgagaattcccatattaataaagaagaaaattatctgccaaaaaaaaaaaaagggggggcccgttttaaagaacccttgggggggccaagttttacggggggtggcaaggtaaaatttttttccttaaggggggccatttaaaaacccgcttgggaattttgggaaggaaccttttttttggggggggaccttatgggcccaacccccctccagaaattaaaggcttgggggaaaaaaaaaatttttaaggggtaaagggggaaaaacaccctccttatccttgctgttaaaaaagttgccnnccncncnncgggcccccttattgagcggggggg

SEQ ID NO: 8682 - DNA, 501 bp, Homo sapiens
  misc_feature (1)...(501): n = A,T,C or G
tgcaaggtgggncaatagatccccatcnganatagataagcatttggagggncgccccacgcgtccgcccacgcgtccgtgtttttgtatgaatatgcaagatttcatcctgattactctgtcgtgctgctgctgagacttgccaagacatatgaaaccactctagagaagtgctgtgccgctgcagatcctcatgaatgctatgccaaagtgttcgatgaatttaaacctcttgtggaagagcctcagaatttaatcaaacaaaattgtgagctttttgagcagcttggagagtacaaattccagaatgcgctattagttcgttacaccaagaaagtaccccaagtgtcaactccaactcttgtacaggtctcaagaaacctaggaaaagtgggcagcatatgttgtaaacatcctgaagcaaaaagaatgccctgtgcagaagactatctatccgtggtcctgaaccagttatgtgtgttgcatgagaaaacgccagta

SEQ ID NO: 8683 - DNA, 434 bp, Homo sapiens
ctctcataacagtctgattcttatgagttgggcatcctgtgtttccctttaggggcctgcttccttcaaatagaggagatgggtgctatgaaacctattcactctggacttgggatggctcttctccatcttcccaagtctgagctggagcctccatgcccaactctgctctgctcttctatttcctgacagcagctaaggcatgttcctgttctgcccccaaattgaccttactaacagtgagaacttggaggagtcttcgggtcttgggaaatccaagttttcccggaaacgttttgttgtaaacagtgtccacactctttgctccaataaagctcggttccttaagccaaaaaaaaaaaaaaaaggggcggccgttttagaggatccttggaggggcccaagttaacgcgggcatgcaacgttttatcttt

SEQ ID NO: 8684 - DNA, 429 bp, Homo sapiens
cggacgcgtgggtcgacccacgcgtccgttcacgcgtccggaggggatgagaaacatggagtccaacgcaggccatctgacaaggatggaatacgccatgaagtcccttagccttctctaccccaagtccctctccaggcatgtgtcagtgcgtacctctgtggagacccagcagctgctttcggagcccagccccaaggcccccagggcccggccctgccgcgtaagcacggcggatcgaagcgtgaggaagggcatcatggcttacagccttgaggacctcctcctcatggtccgggacactctgatgctggcagacaagcccttcttcctggtgctggaggaagatggcacaactgtagagacagaagagtacttccaagccctggcaggggatacagtgttcatggtcctccaaaaggcgcagat

SEQ ID NO: 8685 - DNA, 434 bp, Homo sapiens
aaggatggtgtattccacgtgttcactaaaccctattgaggatgaagcattcatagcatctttactggaaaaaagtgaaggtgctttggagcttgctgatgtggctaatgaactgccagggctgaagtggatgcctggaatcacacagtggaaggtaatgactaaagatgggcagtggtttacagactgggacgctgttcctcacagcagacacacccagatccgacctaccatgttccctccgaaggacccagaaaagctgcaggccatgcacctggagcgatgccttaggatattaccccatcatcagaatactggagggttttttgtggcagtattggtgaaaaaatcttcaatgccgtggaataaacgtcagccaaagcttcagggtaaatctgcacagaccagagaaagcacacagctgatccctgcct

SEQ ID NO: 8686 - DNA, 427 bp, Homo sapiens
  misc_feature (1)...(427): n = A,T,C or G
gcgctgcccccccgcacctccaatcccactcgatctcgctcccatgagccggaagccatccacatcccacaccgaaagccccaaggcgtggacccggcctccttccacttccttgacaccccaatcgccaaggtctcagagctccagcaacggctccggggcacccaggacgggagcaagcactttgtgaggtcccccaaggcccagggcaagagtgtgggtgtgggccacgtggccagaggggcaagaaacaagccccctctgggacccgccatccctgcggtgtccccctccgcccacctggctgccagcccggccctcctcccctccctagcccccctcgggcacaagaagcacaagcaccgagccaaggagagccaacagggctgccggggcctgcaagcaccactggcctcaagtggccctn

SEQ ID NO: 8687 - DNA, 411 bp, Homo sapiens
  misc_feature (1)...(411): n = A,T,C or G
caaatgctgtacaattagccaagtctttaggtgttgattctcaaataaaaaagtattcctcagtatcagaaccagctaaagtaagtgaatgctgtagatttatcctaaatttgctgtagcagtggggaagagggacggatatttttaattgattagtgtttttttcctcacatttgacatgactgataacagataattaaaaaaagagaatacggtggattaagtaaaattttacatcttgtaaagtggtggggaggggaaacagaaataaaatttttgcactgctgaaaaaaaaaaaaaaaaaaaaaaaaaaaaaaaaaaaaaaaaaaaaaaaaaaaaaaaaaaaaaaaaaaaaaanaaaaagggggggcttttttaaaaaatctttggggggggcccattttttctgtg

SEQ ID NO: 8688 - DNA, 415 bp, Homo sapiens
cggacgcgtggctgtcaacaatgttccgtgttgaatatgcatctaaagttgatgagaactttgactgtgtagaggcagatgatgttgagggcaaaattagacaaatcattccacctggattttgcacaaacacgaatgatttcctttctttactggaaaaggaagttgatttcaagccattcggaaccttacttcatacctactcagttctcagtccaacaggaggagaaaactttacctttcagatatataaggctgacatgacatgtagaggctttcgagaatatcatgaaaggcttcagacctttttgatgtggtttattgaaactgctagctttattgacgtggatgatgaaagatggcactactttctagtatttgagaagtataataaggatggagctacgctctttgg

SEQ ID NO: 8689 - DNA, 416 bp, Homo sapiens
  misc_feature (1)...(416): n = A,T,C or G
cccacgcgttcgatttaaaaggcagtgttttatagctttagctcatggtcaaggtggtcacatgacaatggcttaagctcagtgtgcttctgcaccttatgttgtctatgtatttttaatccaaatgttgcctgcaaatatgtgatcccttattatttaagtttcctgtattatgaaccattgcccgttttaaatcacacagaagattctgaatctgtaaaaactacacatgtcaatgttttacagctacgtaattcgaattgacttgattttttcaagtaatcctagaaagggggagcattccatatagaaactgctgaaactgccacaggtgcttctccgaaaaccttacagttgtggcattgaatgttcagtatcgcttcctttctgcacacgaggcatactgttgagcctgn

SEQ ID NO: 8690 - DNA, 416 bp, Homo sapiens
  misc_feature (1)...(416): n = A,T,C or G
ttgtgatgacgaatcctgctctaaaatacacatggagctttcttgtttcttattaggcctcanaaagaagtcagttaacgtcacccaaaagcacaaaatggattttagtcaaatatttattggatgatacagtgttttttaggaaaagcatctgccacaaaaatgttcacttcgaaattctgagttcctggaatggcacgttgctgccagtgccccagacagttcttttctaccctgcgggcccgcacgttttatgaggttgatatcggtgctatgtgtttggtttataatttgatagatgtttgactttaaagatgattgttcttttgtttcattaagttggaaaatgtcaagaaattctgctgttacgacaaagaaacattttacgctagattaaaatatcctttcatcaatgg

SEQ ID NO: 8691 - DNA, 416 bp, Homo sapiens
cccacgcgtacggtttgattagattgacatttttacttttcccacttccagctctaaaagtctgtggttaggggactataagagactgggttgattatagataacatttgtggaccattaccttatgccatttacatgttgatttaatgctcataacaaccgtatgaggcaggcactgttattcccattttacagttgagaaaaatgagactcagtttaaaacatgcacggggaacaaggtaactttttgggggggaggaaatgttctaaaacttggttctggtcatggttgcagaactctgtagatttacagttgtatatttcgagtgggtgaattttataatatgtaaatcgtacctcagtcttgctgttgagaagaagatggtacgttagaaaatacaaggcggggctgtatg

SEQ ID NO: 8692 - DNA, 422 bp, Homo sapiens
  misc_feature (1)...(422): n = A,T,C or G
gccaggcctcccgcagcctcatggactgctttgccgatatcctgttcgccctgaacaagcactgcttcagcctcctgagcatgtggatcaaggaggccctgcagccacctggtttcccctctgcccgcctcagccctgaacagaaggataccttcagccagcagatccttcgcgagcgagtgaacaagaggcgggtgaaggagatggtgaaggagttcacactgctgtgccggggtctccatggcacagattacacagctgactactgaggggtgcccccatcccatccaccccttctcttcatccttccctattcccaaagagtaaacctggaccctcnnaaaaaaaaaaaaaaaaaaaaaaaaaaaaaaaaaannnnnaaaaaaaaaaaaaaaaaaaaaaaaaaaaaagggggccccccg

SEQ ID NO: 8693 - DNA, 407 bp, Homo sapiens
attttacatacaaagcattttgtgctttcattcaattagtttaactatattcagtttctgtattatttctctctgatctatcctgtaattattatatactttagaagaaaagatcagttcatattgttagactgaataattctacatgaagttaaaagttagcaatttaaaaaattttgctgcataataaagataattatagttacatgtattgatttaagtctcacacactgtgctaataagtcctttgcacatattattggattctagagcaaccctaggatttgggtactattatttccatttgacagatgaaaaacctaatgcatagaaagataagtagaccagtcaaggtctacagctagtaaaatgctcagattgaaacctaaatcttttctcactcactt

SEQ ID NO: 8694 - DNA, 419 bp, Homo sapiens
  misc_feature (1)...(419): n = A,T,C or G
cttcacttaggaacgtaatcgngtcccctatcctacttccccttcctaattccacagctgctcaataaagtacaagagcttaacagtgaaaaaaaaaaaaaaaaagggggggcccttttaaaggacccctcgggggcccaaacctaacccgggcttgcaaaggaaaacttttttccttataggggggcgcattaaaacctacctggggatctttggaaaggacctttacttttggggggggaaaaattgggacaccctccttccaaaaatttaacgctctagggaaaataaaaacttttaaagggaaaaatgggtaaacctacctccatatcctggctgcttaaaaaatggggnangccaanagcatttcgctcacttgctgatcctcagggacaccaagacctacatgcttgcttttg

SEQ ID NO: 8695 - DNA, 415 bp, Homo sapiens
agaagaccatagctgagaactaatgccaggcttgccgtatgcccttgcctgaaagcaagatttcagcctggaagagggcaaagcggacgggagtggacaggagtggatgcgatatgatgtggtttgaagctgatgggtgccagccctgcattgctgagtcaatcaataaagagctttcttttgacccaaaaaaaaaaaaaaggggggcggctttaaagatcccttggggggccgaatgttaacccgggcgtgaacaatgacttttttctttttgggggccccttttataaccacgttggatctttttggaggaaaacctattttttgggtgggcatttattgggacattatttccaaggagtttcttacttttaggcaaataataatattttaaaggataaaggggttaaaccgg

SEQ ID NO: 8696 - DNA, 425 bp, Homo sapiens
gctcatactcaatgaagctggactatactggagagcagtaggaaatagcacttttgctattgcctgtcttcagagggctttgaatttagctccacttcaataccaagatgttcctcttgtcaacttggccaaccttttgattcattacggccttcatcttgatgccactaagctgctacttcaagctttggccatcaatagctctgagcctctgacctttttgagcctgggaaatgcttaccttgctctgaagaatatcagtggggcacttgaggcctttagacaggccttgaaattaaccaccaaatgtccagagtgtgaaaacagcctgaagttgatccgctgtatgcagttttatccttttctgtacaacatcacttcttctgtttgcagtggtaattgtcatgagaaaaccctggacaacg

SEQ ID NO: 8697 - DNA, 414 bp, Homo sapiens
tgatttatagtattccatttagatttgatagatatgcttaagcaacctataaatcattctcaatgttatggacactacttggtttgctctagggtgatatacggcattactctgtctcttcaatccatccaactaaatggaacaagggacgacttgcatgtgactcctacttggcttctatccaccaacagaaattataccatatagtgaaaggcaattttctaaataatttcattactaatatgaactgtgaagggggcattttttcatttgtccttttctgctatcaccttcctcttgtcagaatgaatatagacactgtatctaagggggaccaaagaaaaaatatcgaactttcaccaaagttttcatgaaaacccaaaagctttaaaagttactatcaagagattgaaa

SEQ ID NO: 8698 - DNA, 421 bp, Homo sapiens
cccacgcgtccgggcggcgccgccgcagatcccggacacccggcgggagctggcggagctcgtgaagcggaagcaggagctggcggaaacattggcaaatttggagcgacagatctatgcttttgagggaagctacctggaagacactcagatgtatggcaatattattcgtggctgggatcggtatctgaccaaccaaaaaaactccaatagcaaaaatgatcgaaggaaccggaagtttaaggaagctgagcggctcttcagtaaatcctcggttacctcagcagctgcagtaagtgcattggcaggagttcaggaccagctcattgaaaagagggagccaggaagtgggacggaaagtgacacttctccagacttccacaatcaggaaaatgagcccagccaggaggaccctgaggat

SEQ ID NO: 8699 - DNA, 414 bp, Homo sapiens
  misc_feature (1)...(414): n = A,T,C or G
catgaagcttctcacgggcctggttttctgctccttggtcctgggtgtcagcagccgaagcttcttttcgttccttggcgaggcttttgatggggctcgggacatgtggagagcctactctgacatgagagaagccaattacatcggctcagacaaatacttccatgctcgggggaactatgatgctgccaaaaggggacctgggggtgcctgggctgcagaagtgatcagcgatgccagagagaatatccagagattctttggccatggtgcggaggactcgctggctgatcaggctgccaatgaatggggcaggagtggcaaagaccccaatcacttccgacctgctggcctgcctgagaaatactgagcttcctcttcactctgctctcaggagatctggctgtgaggccn

SEQ ID NO: 8700 - DNA, 421 bp, Homo sapiens
  misc_feature (1)...(421): n = A,T,C or G
caaccccactcgcctttggcacaatgaaggggagaacctttatttcccttctttttctctttagctcggcttattccaggggtgtgtttcgtcgagatgcacacaagagtgaggttgctcatcggtttaacgatttgggagaagaaaatttcagagccttggtgttgattgcctttgctcagtatcttcagcagcgtccatttgaagatcatgtcacattagtgaatgaaggggctgactttgcaaaaacatgtgttgctgatgagtcagctgaaaattgtgacaaatcacttcataccctttttggagacaaattatgcacagttgcaactcttcgtgaaacctatggtgaaatggctgactgctgtgcaaaacaagaacctgagagaaatgaatgcttcttgcaacacaaagatgacan

SEQ ID NO: 8701 - DNA, 417 bp, Homo sapiens
aaaaaattcaaactgcctatattgataaaaccatacagtgagccagccttgcagtaggcagtagactataagcagaagcacatatgaactggacctgcaccaaagctggcaccagggctcggaaggtctctgaactcagaaggatggcattttttgcaagttaaagaaaatcaggatctgagttattttgctaaacttgggggaggaggaacaaataaatggagtctttattgtgtatcataccactgaatgtggctcatttgtattgaaagacagtgaaacgagggcattgataaaatgttctggcacagcaaaacctctagaacacatagtgtgatttaagtaacagaataaaaatggaaacggagaaattatggagggaaatattttgcaaaaatatttaaaaagatgaggtaa

SEQ ID NO: 8702 - DNA, 405 bp, Homo sapiens
tggagtgctcctcaggagccagccccacccttagaaaagatgttttccatgaggatcgtctgcctggtcctaagtgtggtgggcacagcatggactgcagatagtggtgaaggtgactttctagctgaaggaggaggcgtgcgtggcccaagggttgtggaaagacatcaatctgcctgcaaagattcagactggcccttctgctctgatgaagactggaactacaaatgcccttctggctgcaggatgaaagggttgattgatgaagtcaatcaagattttacaaacagaataaataagctcaaaaattcactatttgaatatcagaagaacaataaggattctcattcgttgaccactaatataatggaaattttgagaggcgacttttcctcagccaataac

SEQ ID NO: 8703 - DNA, 404 bp, Homo sapiens
agcggcatggcggccgggtgtaagacgcccgaccctcctcttccctgtcttcgccgccgccgctgctggagtcactgggaccctctagtctgcgtgtgttagttgtaatcccgccgccctcctgtcagccctccgctccgccggccctccttccttccgccgccgcagccagcccgagggtcggccggctgtgtaacactctcccaccccacccaccagcccgcgggccagcaccatggaggacgtgaagctggagttcccttcccttccacagtgcaaggaagacgccgaggagtggacctaccctatgagacgagagatgcaggaaattttacctggattgttcttaggcccatattcatctgctatgaaaagcaagctacctgtactacagaaacatggaa

SEQ ID NO: 8704 - DNA, 386 bp, Homo sapiens
gttcttccatatcttctacttagtattactgggtttttaagagttttgtttttcttaatcagttgcaccttttgtcttgttattgtatgtggttttttttgggggggggtatcttgttcaaatttcaatttaaattcatttaatcaaatacattatttcttgattttaaaagattggaccatacagaaattatggttcaccctgcccccatactgccaaaccacccaacttgattttgacactatgtatcctttgagcagttttcgtattcattgttctctgccagatgaactggaagatgaaatgaaaacgtcatttatatccccattagagatgtattttagataagtttttgccatataatttgttcccttgtaaaatatctc

SEQ ID NO: 8705 - DNA, 423 bp, Homo sapiens
  misc_feature (1)...(423): n = A,T,C or G
gtggattacctgaggccaggagttcgagagcagcctgaccaacatggagaaaccccgtcgctactaaaaatacaaaattagccgggcgtggtggctcatgcctataatcccagatacttgggaggctgaggcaggagaatcgcttgaacccggtaggcggaggttgcggtgagctaagatcgcaccattgcgctccagcctgagcaacaagagtgaaactacatctcaaaaaaaaaaaaaaaaagggggggccgttttaaagaacccttgggggggccaaacttaacgcgggctggcaaggtaatatttttttccttatagggagccgaataaaaacctacttgggaattttgggaaggaacctttatttttggggggggacatattgggccaacctccttacagaaattaaaggctttaggn

SEQ ID NO: 8706 - DNA, 420 bp, Homo sapiens
tacgacgagtcgggcccctccatcgtccaccgcaaatgcttctaaacggactcagcagatgcgtagcatttgctgcatgggttaattgagaatagaaatttgcccctggcaaatgcacacacctcatgctagcctcacgaaactggaataagccttcgaaaagaaattgtccttgaagcttgtatctgatatcagcactggattgtagaacttgttgctgattttgaccttgtattgaagttaactgttccccttggtattaacgtgtcagggctgagtgttctgggatttctctagaggctggcaagaaccagttgttttgtcttgcgggtctgtcagggttggaaagtccaagccgtaggacccagtttcctttcttagctgatgtctttggccagaacaccgtgggctgttacttgc

SEQ ID NO: 8707 - DNA, 384 bp, Homo sapiens
accaatgcataaggcattatgaaggcagcacagtcccctaaaagaagacaccgaagagccctgtaggggtgcagcccatactgaatgaacacaccttctgtgctggcatgtctaagtaccaagaagacacctgctatggcgatgcgggcagtgcctttgccgttcacgacctggaggaggacacctggtatgcgactgggatcttaagctttgataagagctgtgctgtggctgagtatggtgtgtatgtgaaggtgacttccatccagcactgggttcagaagaccatagctgagaactaatgcaaggctggccggaagcccttgcctgaaagcaagatttcagcctggaagagggcaaagtggacgggagtggacaggagtg

SEQ ID NO: 8708 - DNA, 402 bp, Homo sapiens
ttttctatgtatttaaagaaaaatgcaccaggatggtgtctgtgcacgtgactattagaggagcgtctgtagaagtacctggtttggtcagtgcagttgtgcaatctgagggccttgtttcctcctcccctttccccttctccccaccaaaggaaaatatccctcttaatgatttcgtagttcagtttactgaatgattaccacctgtaattcctctttggattgtgtagactcaacatgagacattcctttctgctttctggagggcaccaggggcctttctctttgataaattttttttgtctgttgacaaaaacaaaaatcttttttcaaatgtagtgctggtgaaaaggtagggctgagtgattaccttagccacagggtggctgagcaggaactata

SEQ ID NO: 8709 - DNA, 431 bp, Homo sapiens
tcctcccaggaataaggactattctctttgtaactgcccttttgatatttaatagtggaaatattgagagatacagaaaattaaataattgtttccttttacctctcatatagttttgttaaggcttgttaattgtcgtgatatctttgtttcaagaccctggggacttctggcctggtgtggtggctcacgcctgtaatccccagcattttgggagaccaaggcaggcaggtcaccttaggtcatgagttcgagaccagcctggccaacatggcgaaaccctgtctctactaaaaatatatttaaaaaaaaaaaaaaagttagttgcccatggaggcggccgcctgtaatcccagttattcaggaaactgaggcaggagaattgcttgaacctgggaggcggaggctgcagtgagttgagattgcaccat

SEQ ID NO: 8710 - DNA, 408 bp, Homo sapiens
agggaggcggtggcccttctgttgctagaccgagcctgtgggatataccaaggcagaggagcccatagccatgaggagcctcggggccctgctcttgctgctgagcgcctgcctggcggtgagcgctggccctgtgccaacgccgcccgacaacatccaagtgcaggaaaacttcgtcacagaaaaggagtgtctgcagacctgccgaactgtggcggcctgcaatctccccatagtccggggcccctgccgagccttcatccagctctgggcatttgatgctgtcaaggggaagtgcgtcctcttcccctacgggggctgccagggcaacgggaacaagttctactcagagaaggagtgcagagagtactgcggtgtccctggtgatggtgatgaggagctgctgcg

SEQ ID NO: 8711 - DNA, 474 bp, Homo sapiens
  misc_feature (1)...(474): n = A,T,C or G
catggacgctgtcgggacgatgacgacctccgggncgacccacgcgtccgggtgaactgattttttttaaaccaaagtttagaaagaggtttttgaaatgcctatggtttctttgaatgggaaacttgagcatcttttcactttccagtagtcagcaaagagcagtttgaattttcttgtcgcttcctatcaaaatattcagagactcgagcacagcacccagacttcatgcgcccgtggaatgctcaccacatgttggtcgaagcggccgaccactgactttgtgacttaagcggctgtgttgcctatgtagagaacacgcttcacccccactccccgtacagtgcgcacaggctttatcgagaataggaaaacctttaaaccccggtcatccggacatcccaacgcatgctcctggagctcacagccttctgtggtgtcatttctgaaacaagggcgtggatccctcaacct

SEQ ID NO: 8712 - DNA, 427 bp, Homo sapiens
cggacgcgtgggataagatctgtgctctcacgtagggtggatgaggggctgccaagttagcaatgaatgtttcccatttcttcttagtttatggactttccataaactcaggatggcagtttggttggttggagaaggatatggtgatggcgggagttacaatacgttacttataggggaagataggcttttgaaaggttaaagcttaaaagtgagaatggaaaagggatgaatgaatgaacatgatgaggtgagagggaagaggtaaagggaaaaggagaacttactacgtctagctggaggattgtaaatgcaccaatcagcatgctgtgtctagctcaagaactcaagctccatgaggagatgtttcattgtcgagagcagtcatgatgccctgcactccacacaatgcaacagagtgaaagag

SEQ ID NO: 8713 - DNA, 407 bp, Homo sapiens
actagatctatatcgcgagcggtccgcccttatttttgagtgagggctcgatctgctcggagaaaggatggacttaacggaatgagccacctggggccctaatgactcctgtctccttacttttacaggagctgggcctgctgcgagggcccctgtataccctgagggatgggggaggaggcctgcctaccttcctggagaattacttaattggctctgcgcgggagcagctacttgaagctctccatgacttgggactgctgcagactggctctatttcaagccttacgattccagctcatcactagaggcagccctccatggacccatgaaaactgagatgaggaccttggtactatggagggagggaaggacctgggaatgttttcttattggatgtgagagag

SEQ ID NO: 8714 - DNA, 397 bp, Homo sapiens
cggacgcgtgggtggctccacgtgcctcctggtctcagtatggcgctgtcctgggttcttacagtcctgagcctcctacctctgctggaagcccagatcccattgtgtgccaacctagtaccggtgcccatcaccaacgccaccctggaccggatcactggcaagtggttttatatcgcatcggcctttcgaaacgaggagtacaataagtcggttcaggagatccaagcaaccttcttttactttacccccaacaagacagaggacacgatctttctcagagagtaccagacccgccagaaccagtgcttctataactccagttacctgaatgtccagcgggagaatgggaccgtctccagatacgagggaggccgagaacatgttgctcacctgc

SEQ ID NO: 8715 - DNA, 432 bp, Homo sapiens
  misc_feature (1)...(432): n = A,T,C or G
cccacgcgtncgctggggttcgctggaactttcctaggtgattacttcgggatcctcaaggaggcgagagtgaccgtgttccccttcaacatcctggacaaccccatgtactggggaagcacagccaactacctgggctgggccatcatgcacgccagccccacgggcctgctcctgacggtgctggtggccctcacctacatagtggctctcctatacgaagagcccttcaccgctgagatctaccggcagaaagcctccgggtcccacaagaggagctgattgagctgcaacagctttgctgaaggcctggccagcctcctggcctgccccaagtggcaggccctgcgcagggcgagaatggtgcctgctgctcanggctcgcccccggcgtgggctgccccagtgccttggaacctgctgcctttgggg

SEQ ID NO: 8716 - DNA, 407 bp, Homo sapiens
ctctatctgcaagcctgactctgccagcctcccctggtagaaaagaagtttacccactccctgcacgcctgccgtccctgccccgctgggcagcccttcagtgtggctggcgttggggccagtgagttgcctctttccctccttgtctggccccagtggtctggggagcccccaggcacacctaagcgtcgtggagcattgttctgccacagccctgcatactgaccccgggaggctgggcaggtggacagccccagccaccaccttcagcctagcctgtcccccaaggatggtgaagctcagcaggggtctgagggtagccggccagaagaggctggaacctcctgctcaagtctagacccctacttctctgctgcccccaccctgccagagctgatgtttccaat

SEQ ID NO: 8717 - DNA, 398 bp, Homo sapiens
  misc_feature (1)...(398): n = A,T,C or G
tgatattcaccatgtgcgcacaagcatggaagccaacttcctcagctacgaggtcctgactgtagctgccttgcccatgctgaagcaaaacaatggaagcataggtgccgtctcctctctggctgggaaagaggcttatccaatggtagctgcctattctgcaagcaaggatgctttggatgggttcttctcctccatcacaaaggaatattcagagtccacggtcaatgtatcaatcactctctgtgttcttggcctcatacacacagaaacagccatgaaggcagttactgggataggccatatgcaagcagcaccactggaggaatgcgccctggacatcatcaaagggggagctctgcgccaagaagaagtgtattatgacagctcactctggn

SEQ ID NO: 8718 - DNA, 396 bp, Homo sapiens
  misc_feature (1)...(396): n = A,T,C or G
gcaaacataaggaagctgaggattgcattatagcttatgatgactggcgggtgaaactgactattgcttttctagcccaggatgtggatggatctacttctcctcaaataggagataaagttgaatttactattaacgacaaacagaggcctggacagcaggnggcaacttgtgtgcgacttttaagacgtaattctaactccaaaaggctcttgggttatgtggcgactctgaaggataattttggatttattgaaacagccactcatgataaggaaatctttttccattacagtgagtgctctggcgatgcagatagcctgtaactgggggacatggtcgagtataacttgtccaaaggcaaaagcaactaagtcagtgcagaaaaagccaacg

SEQ ID NO: 8719 - DNA, 460 bp, Homo sapiens
cactgatcgccttagctgatcgcgtgaaggccggctcgacccacgcgtgcgagggggcctctgggcctggagaagctgcccctgcgccagcctgggcctgagaagggggccctggacctggagaagccgcccctgccccagcctgggcctgagaagggggccctggacctgggcctgctgtcccaggagggcgaggcggccacacagcagtggctggggggccagcggggggtgcgtgtgcctcttctgggcagcagactgccctatcagcccccagccctgtgcagcctgcgagctctgtccggtctcctactccacaagaaggccctggagcacaaggccacctccctggtggtggggggcgaggctgagcggccggccggagcactgcaagcctcactggggctggtgcgggggcagctccaggacaacccggcctacctcctgttgcgggcgcggg

SEQ ID NO: 8720 - DNA, 398 bp, Homo sapiens
cttagtgtaatataccagcttgtatgccatggattttcaaccagataacatacctttcctgctctggtgcttagagactatcaactccctcctttagtgaaggagccgtgttagagcttccgagaatagctccactggagagaagtggaatcctatatagaatgctgcactaattgacaacacagcctataggccaatgcatgagtaaaaaaaaaaacaattactggctcactggctttgaaaagtcacttactattgttgctgaaacttgctgagctgtttatagagaatgatgataacagaacttttcctctgtatcactggtgtttaggtgaattaattaaacattgtgatcattagtaccaggtattattatctttaagagtcttccacttcag

SEQ ID NO: 8721 - DNA, 250 bp, Homo sapiens
aaattgatcagcccttgcgactgaggaccgtaattaccggctcgacccacgcgtgcggtttttaaatagtcaaacttcaagaaacaatctaaacaagtttctgttgcatatgtgtttgtgaacttgtatttgtatttagtaggcttctatattgcatttaacttgtttttgtaactcctgattcttccttttcggatactattgatgaataaagaaattaaagtgataaaaaaaaaaaaaaaaaaggggg

SEQ ID NO: 8722 - DNA, 398 bp, Homo sapiens
tggtcacaagaggggtggaacattcctgcaaatggtttcaatatatgcagatgtctcgatataggaatgaaattacgtctttggaacaacttaaataagtcaaatatacttggagctttaaaaattaaaaggagagagattcgagcaccttttctgctgccatgacaaccatgcaaggaatggaacaggccatgccaggggctggccctggtgtgccccagctgggaaacatggctgtcatacattcacatctgtggaaaggattgcaagagaagttcttgaagggagaacccaaagtccttggggttgtgcagattctgactgccctgatgagccttagcatgggaataacaatgatgtgtatggcatctaatacttatggaagtaaccctatttcc

SEQ ID NO: 8723 - DNA, 435 bp, Homo sapiens
aatgatagcatcgagaccctaggataccatgggacgacccacgcgaccgaaactctatagctgtcttgtgtaaccttgtcatggggttagcactgatatttctttgtacttgggcatatgttaaatactctggggagttcagagaaattggaacagtgattgatcagattgctgaaacactatgggaacaggtattgaagcccctgggtgataatttgatggaggaaaacataaggcagtctgtaacaaactctatcaaagcaggcctgactgaccaggtgtctcatcatgccagattaaagacagactgacagttcatctcctcacggactccactctctttttttttcatgcttgctgtacaatgagaactcaaataaaaataaaccaaagtttacaatcaactgtagaaggatttaatgtaactggctttac

SEQ ID NO: 8724 - DNA, 440 bp, Homo sapiens
  misc_feature (1)...(440): n = A,T,C or G
natggagcctatgcggnnattgagcgccatnggccgggncgacccacgcgtccgggcaatgaatgctatgaagtaaagcaggaaagtgagggggtggaagtcgtgttttacagagggtggtcaaggaaggcaacttttgaatgaaaaccagaacggagatggtggggagggagccatccagagaggcagcataggaagggcaagtcgagcacgaggcccccttggttgacatggagtgaggaggagagtgtgagataggtggaagcggaactgggctctgagagtaactgccctcttgacatctttacctcttcagtaaagtcttggagaaatcccatcgtgcgtgctgggaacattatagttttagagaatgttcatatagtccaagggctcagaaataattgccttaacacttttacatttataaaaagcaggcaatg

SEQ ID NO: 8725 - DNA, 424 bp, Homo sapiens
  misc_feature (1)...(424): n = A,T,C or G
tacgtgaccaccccaagtcccccagggcccgctggccagggttcccgggccaggcgggtgaatctccacagacatcctcggtctcctactcccagccctagaaagtgggcatgaactggcattgatcctgtcatgacgatggcctanagttgggagcagcgcgtacggcgcccagctgtaaacgcattgcagggtattaactcgtttaatcgcagtcgtctgtgtggatgactgacaaggaggaagtcttgactatatccctagctagataattccgcctccagtatgcagaagtatctctagttgggatttaataactccgtttggtttcatggcatttgttttggtaggtcagctaaccatctcaactgataatgactttgtgtttacgatgacataaaaattcctttgaaaaataacttcg

SEQ ID NO: 8726 - DNA, 412 bp, Homo sapiens
cttccgaggctaaatcggctgcgttcctctcggaacgcgccgcagaaggggacctggggacgagatccggcgcctcttcatgaagccactcgccagcccgccgccctctgccgccgcaccctgcacacccgcccctctcctgtgccaggaacttgctactaccagcaccatgccctaccaatatccagcactgaccccggagcagaagaaggagctgtctgacatcgctcaccgcatcgtggcacctggcaagggcatcctggctgcagatgagtccactgggagcattgccaagcggctgcagtccattggcaccgagaacaccgaggagaaccggcgcttctaccgccagctgctgctgacagctgacgaccgcgtgaacccctgcattgggggtgtcatcctcttccat

SEQ ID NO: 8727 - DNA, 425 bp, Homo sapiens
cggacgcgtgggtccggacgcgtgggcggacgcgtggtcggccaatcaagtggacttttcagaggtggagagagccagattcatcatcaatgactgggtgaagacacacacaaaaggtatgatcagcaacttgcttgggaaaggagccgtggaccagctgacacggctggtgctggtgaatgccctctacttcaacggccagcggaagactcccttccccgactccagcacccaccgccgtctttttcacaaatcagacggcagcactgtctctgtgcccatgatggctcataccaacaagttcaactatactgagttcaccacgcccgatggccattactacgacatcctggaactgtcctaccacggggacaccctcagcatgttcattgctgccccttatgaaaaagaggagcctttctctg

SEQ ID NO: 8728 - DNA, 373 bp, Homo sapiens
  misc_feature (1)...(373): n = A,T,C or G
accatggcctctcacaagctgctggtgaccccccccaaggccctgctcaagcccctctccatccccaaccagctcctgctggggcctggtccttccaacctgcctcctcgcatcatggcagccggggggctgcagatgatcgggtccatgagcaaggatatgtaccagatcatggacgagatcaaggaaggcatccagtacgtgttccagaccaggaacccactcacactggtcatctctggctcgggacactgtgccctggaggccgccctggtcaatgtgctggagcctggggactccttcctggttggggccaatggcatttgggggcagcgagccgtggacatcggggagcgcataggagcccgagtgn

SEQ ID NO: 8729 - DNA, 102 bp, Homo sapiens
cggacgcgtgggtcgcgagcggccgcccttaaagactgtctttttagcaaaaaatttcagtaaagtgttttctgtaatctttttttaaaaaaaaaaaaaagg

SEQ ID NO: 8730 - DNA, 400 bp, Homo sapiens
aatatacacgagtggctttgacgagctccagcgcatgcatttacccagcgacaaagggcactgcgtgggcctgccagacacaggactctgtttggatagcatcccgcgctggtactacaaccccttcagcgaacactgagcccgctttacctatggtggttgttatggcgacaagaacaactttgaggaagagcagcagtgcctcgagtcttgtcgcggcatctccaagaaggatgtgtttggcctgacgcgggaaatccccattcccagcacaggctctgtggagatggctgtcgcaatgctcctggacatctggattgtggcggtggcagccatcttgggttactgcttcttgccgaaccagagagaggacttgcacggacaccaccaccacccgcca

SEQ ID NO: 8731 - DNA, 410 bp, Homo sapiens
ctcccggagctggaggggggcaagcgggttccgaggtgcaaagcctggtgccccgagccctgcggagctcggggccagcatggcccccacgctgcaacaggcgtaccggaggcgctggtggatggcctgcacggctgtgctggagaacctcttcttctctgctgtactcctgggctggggctccctgttgatcattctgaagaacgagggcttctattccagcacgtgcccagctgagagcagcaccaacaccacccaggatgagcagcgcaggtggccaggctgtgaccagcaggacgagatgctcaacctgggcttcaccattggttccttcgtgctcagcgccaccaccctgccactggggatcctcatggaccgctttggcccccgacccgtgcggctggttggag

SEQ ID NO: 8732 - DNA, 423 bp, Homo sapiens
  misc_feature (1)...(423): n = A,T,C or G
cgcaaaacttatgtgaccccgcggagacccttcgagaaatctcgtctcgaccaagagctgaagctgatcggcgagtatgggctccggaacaaacgtgaggtctggagggtcaaatttaccctggccaagatccgcaaggccgcccgggaactgctgacgcttgatgagaaggacccacggcgtctgttcgaaggcaacgccctgctgcggcggctggtccgcattggggtgctggatgagggcaagatgaagctggattacatcctgggcctgaagatagaggatttcttagagagacgcctgcagacccaggtcttcaagctgggcttggccaagtccatccaccacgctcgcgtgctgatccgccagcgccatatcanggtccgcaagcaggtggtgaacatcccgtccttcattgtccgg

SEQ ID NO: 8733 - DNA, 414 bp, Homo sapiens
cggacgcgtgggcaggaatgcctttgtgttttcgcagtgaacctccttggcctgggcgaagctgtgtggaccaagcaagtcaggagtgtggccatgttttctgagcaggctgcccagagggcccacactctactgtccccaccatcagccaacaatgccacctttgcccgggtgccagtggcaacctacaccaactcctcacaacccttccggctaggagagcgcagctttagccggcagtatgcccacatttatgccacccgcctcatccaaatgagacccttcctggagaaccgggcccagcagcactggggcagtggagtgggagtgaagaatctgtgtgaactgcatcctgaggagaagtgctgtgtggtgggcactctgttcaagggcatgccgatgcagccctccatc

SEQ ID NO: 8734 - DNA, 479 bp, Homo sapiens
  misc_feature (1)...(479): n = A,T,C or G
atggtaannttttgacgcccgtcgaccgcntcgaancccggtcgaccccgcgtccgcggacgcgtgggatgaataacctgccacatctgcaggtggtaggactaacatggggtcatatatcttgggatcttctggctctaccaccacaagatattatccttgcatctgatgtgttctttgaaccagaagattttgaagacattgtggctacaatatattttttgatgcacaagaatcccaaggtccaattgtggtctacttatcaagttaggagtgctgactggtcacttgaagctttactctacaaatgggatatgaaatgtgtccacattcctcttgagtcttttgatgcagacaaagaagatatagcagaatctacccttccaggaagacatacagttgaaatgctggtcatttcctttgcaaaggacagtctctgaattatacctacaacctggtctgggacagtatcaatactg

SEQ ID NO: 8735 - DNA, 424 bp, Homo sapiens
cccaggctggagtgcagtgtcacgatcttggctcactgcagctgcctcctggcttcaagcagttctcccacctcagtctccagagtagctgggattacaggcatgtgctaccatgcccggctaatttttgtattttcagtagagacggggttttggcatgttggccaggttgttctagaactcctggcctcaagtgatccgcctgcctcatcctcccaaagtgctgggattacaggcgtgagccactgcacccggcccaaattcattttaaaataacaataataaacccattacatgttaccataaatatgtttttacgaaaaatgactattttccataacaaattttagtgagaagtatggcattgttttatatttttgcaaatcttatttaatgtctggcttaatagacacctggattcttg

SEQ ID NO: 8736 - DNA, 416 bp, Homo sapiens
  misc_feature (1)...(416): n = A,T,C or G
cccacgcgtccgctctcagtaaggaacttggaatgcaagctggatgcctgggtctctgggcacagcctggcccctgtgcaccgagtggccatggcatgtgtggccctgtctgcttatccttggaaggtgacagcgattccctgtgtagctctcacatgcacaggggcccatggactcttcagtctggagggtcctgggcctcctgacagcaataaataatttcgttggacacgttgaaaaaaaaaaaaaaaaaaaaaggggggcccctttaaaagaacccttggggggcccaaatttaaccggggctggcaaggaaaaatttttttcctttagggggggcgatttaaaacctccctgggaattttgggaaggaaccctaccttggggggggggccaaaatggcccaacctcccacn

SEQ ID NO: 8737 - DNA, 417 bp, Homo sapiens
ctcagtcccagctccctcatgggaaccgcaggcatccactccccgagccactggcagaggtgccaggaaagctgggtctgagccagagacctctcggccatcgcccctgggcagctactcccccatccggagtgttggcccctttgggcccagcactgactcttctgcctccacttcgtgctcccctgccccagagcagcccacagccacagaaagcctgcccccatggagccactcctgtccttctgctgtccggcctgccacctcccagcatccgcagaaggaggatcagaagatactgaccttgactgagtaccggctccatggaacaggaagcttgccgcctctgggctcctggcgatctggcctcagccgagcagagagcctggcccggggaggtggtgagggcaacatggc

SEQ ID NO: 8738 - DNA, 427 bp, Homo sapiens
  misc_feature (1)...(427): n = A,T,C or G
gagtgctcctcatgagccagccccacccttagaaaagatgttttccatgaggatcgtctgcctggtcctaagtgtggtgggcacagcatggactgcagatagtggtgaaggtgactttctagctgaaggaggaggcgtgcgtggcccaagggttgtggaaagacatcaatctgcctgcaaagattcagactggcccttctgctctgatgaagactggaactacaaatgcccttctggctgcaggatgaaagggttgattgatgaagtcaatcaagattttacaaacagaataaataagctcaaaaattcactatttgaatatcagaagaacaataaggattctcattcgttgaccactaatataatggaaattttgagaggcgatttttcctcagccaataaccgtgataatacctacaaccgagtn

SEQ ID NO: 8739 - DNA, 432 bp, Homo sapiens
cggacgcgtgggtggagtttcactcttgttgcccaagctggagtgcaatggcgcgatctcggctcaccacaacatccgcctcctgggttcaagcgattctcctgcctcagcctcctgagtagctgggaatacaggcatgcgccactacacctggctaatttttgtatttttagttgagatggggtttttccacgttggtcaggctggtctcgaactcctgacctcaggagatccgtccacctcagcctcccaaagagctgggattacaggtgtgagctaccgcgcctggccatgatgatattattaaacaccattattcacatttcaaataataacaatactttttgtttttcaaaaataaaatgcaatgttatataaagctataaactaagttctttatgatatttgagcaacaactcaggaatataacat

SEQ ID NO: 8740 - DNA, 424 bp, Homo sapiens
cggactcgtgggcggacgcgagaaaccatatggtttgtgctatagcttctcttgaaaactttgttagctatttaacaatctcactgtaactgagtgaaagctttaatcaagaactgcccatgacatatagatgcctttggttcattggctacttctgtagttgaaaggaagttgaactatttttttggacccagtaagtttgtcctttccacttgggtgttgaaagagcttatgagcagcagctgttctgatttttgttggttgttttctctagggaacaagctaccctctgagtcagcactggacttgaagataaatcctacaattcatgaaactgactgattcgactaaaggatggatagtttgggcagcgttggacagctctatgaggggtctgtttgtttaactgaagggattgttgagt

SEQ ID NO: 8741 - DNA, 492 bp, Homo sapiens
  misc_feature (1)...(492): n = A,T,C or G
cggagcggtnnnnnnnnnaattgatcgccttcggaccgcccggattcccttgaaacccatgcgtccgaacatgtcagtgtaccagatcgaatcacaggaagggcgggactaaaggaactacaagctgttagcccttcccgaatttggaattttgttgaaattaatgtttctatggaagaactgcagaaattaagaagaactcgaatatgtcacttaattcggccattggatacagttttggatgatagcattggctgtgcagtctggtttgcttctagaggaattggttggttagtggcccaggaaggagtgaaatcctatcagagcaatgcaaaggtagttctcactggaattggtgcagatgagcaacttgcaggttattctcgtcatcgtgtccgctttcagtcgcatgggctggaaggattgaataaggaaataatgatggaactgggtcgaatttcttctagaaatcttggtcgtgatgacagagtg

SEQ ID NO: 8742 - DNA, 497 bp, Homo sapiens
  misc_feature (1)...(497): n = A,T,C or G
agagttacnnaattgagnccttactgaacgccntgcggaaccgcgccggaanncccgggtcgagccacgcgtccggactagttctagatcgggggcggccgttcgcgatctataactagtcggaagaatatggctatgtgtaccaacgatataacagactttacagtaaaagaaatagaggcagggtcagatgattacacaaatttggtaggggcatttgtatgccagtcaacaattattccttctgaaagtaagggtttccgagcagccttatcatcacaatccatcattctggcagatacattcataggagtcacagttgaaaccacattgaaaaatattaatataaaagaagatatgttcccagttccaacaagccaaataccagatgtgcatttcttttataagtcttctacagcaacaacatcttgtattaatggccgatcaactgctgtgaaaatgaggtgtcatcctactaaatctggagcaggagtgat

SEQ ID NO: 8743 - DNA, 466 bp, Homo sapiens
  misc_feature (1)...(466): n = A,T,C or G
gtggtgcagannanncccacaaattgatacctnactgagggacctggcacggaaccccgggtcgacccacgcgtccgaccagcctggccagcatggtgaaaccccgtctctactaaaattacaaagattagctgggcctggtggcacatgcctgtaattttagctacttgggaggccaaggcaggagaatctcttgaaccaggaggtggaggttgcagtgagtcgagatcccaccattccactccagtctgggcgacagagactcaaaaaaaaaaaaaaaaaagggccaaaaaaatggataaccccctggcgggtggtgggggggaaaaagggccattaattatttccaactttttcgggaaaaaagtgggggggaaaggaaaagcccctgttttttgggggggggtcggggggaaaaattggggggaaaatttaaggaaaaaaaaccattaaaaacccttttctt

SEQ ID NO: 8744 - DNA, 494 bp, Homo sapiens
  misc_feature (1)...(494): n = A,T,C or G
ggatgggnnnnnnnnaatcgatcagcctcggnaccgcnccggaattcccgttgagacccatgcgtccgcccacgcgtncgaaaaagcttcagcggtcactgaaagtgcttacaggtacagctagtatggggatggaatatgccccattagccaggccaacagatctcatataggagaatctgttttatgtttgttggacagtgggtgagttatcgcagttatgccttttttttctgtcactattttatgtcccttatcactgtgcctttaacctactgaaatgcagttgaggccgggtgcggtggctcacgccaagatggcgccactacactccagcctgggcaacagagggagactccatctcaaanaaaaaaaaaaaaaaaaaagggggactcccggtttattggggggaaaaaagcaactttccgggggggtttttttggttttttaaaaaaaaacccgggcccttttggagggtttttttatattccttt

SEQ ID NO: 8745 - DNA, 403 bp, Homo sapiens
  misc_feature (1)...(403): n = A,T,C or G
cctggctccccctgctggtgtctagagtttttttccctctcctgtccttgtgttgaaggcagtaaactaagggtgtcaagccccattccctctctactcttgacagcaggattggatgttgtgtattgtggtttattttattttcttcattttgttctgaaattaaagtatgcanaataaaaaaaaaaaaaaaaaaaaaaaaaaaaaaggggggggccctttaaaaaaacccctgggggggccaaatttaaccggggaggggaaggaaaaatttttttcctttagggggggggaataaaaacccccctgggaattttgggaaagaaccctttttttgggggggggaaaaatggggccaacccccccccaaaaatttaagcctttagggaaaaaaaaaaatttt

SEQ ID NO: 8746 - DNA, 497 bp, Homo sapiens
  misc_feature (1)...(497): n = A,T,C or G
cggagcgtnnnnnnnnaaatcgatcgccttcggaaccgcnccggaattcccgttgagacccacgcgtccgggccatggcccgtgatgagaagaattactatcaagataccccaaaacagattcggagtaagatcaacgtctataaacgcttttacccagcagagtggcaagacttcctcgattctttgcagaagaggaagatggaggtggagtgactggtttacatcacagctgccccaggctgaggcgtcccccggaccagtgaagctggagccagggtgtaaggcaaggaggtgctgtgtggctccagaggagctggccaggtcccatggaatcagaaggttacacacacacgtgcacactccccgctctggggaaggaactgttctcagaggctccaatttatattcatctgggggttcacggaaaagccagaacctgctgttttcagggtgggtgatgtaaatatagtgtgtacataataaagcaaatatatt

SEQ ID NO: 8747 - DNA, 401 bp, Homo sapiens
attcactactgtttttgaagtgagaaagtatcagccatttagcatttaagttggggtatttagagcctgtaatctaaatgctggctcaaatttattccccagctacttcttataccactattcttttaatgtttgcataatcataagcacctcaacacttgaatacataatctaaaaattatatagtaaagctggtagccttgaaaatgtcagtgtgatatctattatgtagataaatatatatagtggcctttcaggactgtcacagtaacactttatttacagagctaatgtttgtcctaaattttcaggaccctagaggagagctttatacaattaccgatgtgaatttctctaaagtgtatatttttgtgtccagttatattatttaaaaaagtgtt

SEQ ID NO: 8748 - DNA, 430 bp, Homo sapiens
aaggcctgctggggctttccatggccttctgctgtttctcgccaacactacccaggactcttgctacctggttccaactccagacaaccactatgccaggcccggagcctctgaggcatcggccagtccaggccctcatctgaggtaagaatgtacatcagctggcagccccaagcaagtggctgcagggacactgatgccacagctcctgggccggccctcacatctgaaactggttgccgagagccctgagccaaggcaaggatttgccaaaaatgttctgggggcccagcaaatgcaagagccgacctggggctgcacatcccttgcccatcccaaaaagactgttccttgcaagaatttgttccctcttgctgggcggggactgcttcttgaccaaaacaacttcaagctccaggtattttctacc

SEQ ID NO: 8749 - DNA, 495 bp, Homo sapiens
  misc_feature (1)...(495): n = A,T,C or G
aagtggaatgaggactgatcgccctgcgggaagncccggaacgacccacgcgtccgcactcacgatgaaatcctggagggcctgaatttcaacctcacggagattccggaggctcagatccatgaaggctgccaggaactcctccgtaccctcaaccagccagacagccagctccagctgaccaccggcaatggcttgttcctcagcgagggcctgaagctagtggataagtttttggaggatgttaaaaagttgtaccactcagaagccttcactgtcaacttcggggacaccgaagaggccaagaaacagatcaacgattacgtggagaagggtactcaagggaaaattgtggatttggtcaaggagcttgacagagacacagtttttgctctggtgaattacatcttctttaaaggcaaatgggagagaccctttgaagtcaaggacaccgaggaagaggacttccacgtggaccaggtgaccaccgtgaag

SEQ ID NO: 8750 - DNA, 421 bp, Homo sapiens
ctgaacgttagatattttttttccatggggtcaaaaggtacctaagtatatgattgcgagtggaaaaataggggacagaaatcaggtattggcagtttttccattttcatttgtgtgtgaatttttaatataaatgcggagacgtaaagcattaatgcaagttaaaatgtttcagtgaacaagtttcagcggttcaactttataataattataaataaacctgttaaatttttctggacaatgccagcatttggatttttttaaaacaagtaaatttcttattgatggcaactaaatggtgtttgtagcatttttatcatacaagagattccatccattcactatacttttctaactgagttgtcctacatgcaagtacatgtttttaatggtggctggcttttgtgcttgtccttgaagg

SEQ ID NO: 8751 - DNA, 426 bp, Homo sapiens
  misc_feature (1)...(426): n = A,T,C or G
caagacaagtgaagtcaactgttaccgctgtggcgagtcagggcaccttgcacgggaatgcacaattgaggctacagcctaattattttcctttgtcgcccctcctttttctgattgatggttgtattattttctctgaatcctcttcactggccaaaggttggcagatagaggcaactcccaggccagtgagctttacttgccgtgtaaaaggaggaaaggggtggaaaaaaaccgactttctgcatttaactacaaaaaaagtttatgtttagtttggtagaggtgttatgtataatgctttgttaaagaaccccctttccgtgccactggtgaatagggattgatgaatgggaagagttgagtcagaccagtaagcccgtcctgggttccttgaacatgttcccatgtaggaggtaaaaccan

SEQ ID NO: 8752 - DNA, 503 bp, Homo sapiens
  misc_feature (1)...(503): n = A,T,C or G
cccccgcccgnnnnnaattgaacgctgtgatagagcgcctgtagcaccggtcgacccacgcgtccgcggacgcgtgggcatccctcgaatccaccagcacgagcgtcccacccgcgcctgggaccatggccactgactcatgggccctggcggtggacgagcaggaagctgcggctgagtcgttgagcaacttgcatcttaaggaagagaaaatcaaaccagataccaatggtgctgttgtcaagaccaatgccaatgcagagaagacagatgaagaagagaaagaggacagagctgcccagtccttactcaacaagctgatcagaagcaaccttgttgataacacaaaccaagtggaagtcctgcagcgggatccaaactcccctctgtactcggngaagtcttttgaagagcttcggctgaaaccacagcttctccaaggagtctatgcgatgggtttcaatcgtccatccaagatacaagagaacgcattgccactgatg

SEQ ID NO: 8753 - DNA, 403 bp, Homo sapiens
  misc_feature (1)...(403): n = A,T,C or G
ctntgaagaacccaatcctctggaatgtggctgatgtggtcatcaagttccctgaggaagaagctccctcgactgtcttgtgccagaaccttttcactccaaaacaggaaattcagcacctgttccgcgagcctgagaagaggccccccaccgtggtgtccaatacattcactgccctgatcctctcgccgttgcttctgctcttcgctctgtggatccggattggtgccaatgtctccaacttcacttttgctcctagcacgattatatttcacctgggacatgctgctatgctgggactcatgtatgtctactggactcagctcaacatgttccagaccttgaagtacctggccatcctgggcagtgtgacgtttctggctggcaatcggatgctggcccn

SEQ ID NO: 8754 - DNA, 395 bp, Homo sapiens
  misc_feature (1)...(395): n = A,T,C or G
aagtgcacaagtctttttaaaagaaacatggtttacttgcacaaaactgatcagttttgagagatcgttaatgcccttgaagtggtttttgtgggtgtgaaacaaatggtgagaatttgaattggtccctcctattatagtattgaaattaagtctacttaatttatcaagtcatgttcatgccctgattttatatacttgtatctatcaataaacattgtgatacttgaaaaaaaaaaaaaaggggggcccgttttaaagaacccttggggggcccaaattttacgggggctggcaaggttttatttttttccttatagggggcctatttataacctacctgggaattttgggaaagaaccttttcttgtggggggggacataatggaacaacn

SEQ ID NO: 8755 - DNA, 389 bp, Homo sapiens
ccttggggcagtcctgtgtgaggattaatggacggtggtggcaggtaggctgtggggtgggctggaggcctctccagagaggctcaacaaggaaaaatgccactccctacccaatgtctcccacacccaccctttttttggggtgcctaggttggtttcccctgcactcccgaccttatcttattgatcccacatttccatggtgtgagatcctctttactctgggcagaagtgagccccccccttaaagggaattcgatgcccccctagaataatcttatccccccacccgacttcttttgaaatgtgaacgtccttccttgactgtctagccactccctcccagaaaaactggctctgattggaatttctggcctcctaaggctccc

SEQ ID NO: 8756 - DNA, 398 bp, Homo sapiens
ctctggaccccaactgtacccgggacctcaccgactgcctgctcgtggaaatggagaaggaaaagcacagtgcatagcgcttgtacacaatggacggtatcaccgtgactgtggccgacctgttctttgcggggacagagaccaccagcacaactctgagatatgggctactgattctcatgaaataccctgagatcgaagagaagctccatgaataaattgacagggtgattgggccaagccgaatccctgccatcaaggataggcaagagatgccctacatggatgctgcggtgcatgagattcaacggttcatcaccctcgtgccctccaacctgccccatgaagcaacccgagacaccattttcagaggatacctcatccccaagggcacagtc

SEQ ID NO: 8757 - DNA, 388 bp, Homo sapiens
cggccccaggcagcgtgtgtcggtcgcctagtctggagaactagtcctcgactcacgagatgaagttttaccatgttggccaggctggtctcgaattcctgacctcaagtgatctgcccaccttgacctcccaaagtgctgggattacagtgcaaggatgatgctgaaaggaataacaaggcttatctctaggatccataagttggaccctgggcgttttttacacatggggacccaggctcgccaaagcattgctgctcacctagataaccaggttccagttgagagtccgagagctatttcccgcaccaatgagaatgacccggccaagcatggggatcagcacgagggtcagcactacaacatctccccccaggatttggagact

SEQ ID NO: 8758 - DNA, 386 bp, Homo sapiens
cgttccctgtttcccagatctcttgaactctgggttctcccagccccttgtccttccttccagctgagccctggccacactggggctgcctttctctgactctgtcttccccaaggcagggggctctctgagtgcagggtctgatgctgagtcccacttagcttggggtcagaaccaaggggtttaataaataacccttgaaaactgaagaaaaaaaaaaaaaaaatttaaaaaaaatataattatgaaaaatgaaaaaaaaaattatactttactgtattaataaccggcggagacccgcttaacttactgtgttggaggctcgccgacattcatgttaaagggtctgtcgaagcaatctattattcttgtgtttacctgccggg

SEQ ID NO: 8759 - DNA, 395 bp, Homo sapiens
  misc_feature (1)...(395): n = A,T,C or G
aaccttcatcaagtattatgctccatggtgcgtatattgtaagactctggctgctacttgggaggaactctgtaggaacgaaactcctgggctggcgggggtcaagaccgccgaactacactgctctgctgaacggaatatctgctgcaagtattcggtgcgaggctaccccacgttattgcttttccgaggagggaagaaagtcagtgagcacagtggaggcagagaccttgactcgttacaccgctttgtcctgagccaagcgaaagacgaactttaggaacacagttggaggtcacctctcctgcccagctcccgcaccctgcgtttaggagttcagtcccacagaggccactgggttcccagtggtggctgttcagaaagcagaacatacn

SEQ ID NO: 8760 - DNA, 429 bp, Homo sapiens
gacttcttttggttttctttctctttggggcacctctggactcactccccagcatgaaggcgctgagcccggtgcgcggctgctacgaggcggtgtgctgcctgtcggaacgcagtctggccatcgcccggggccgagggaagggcccggcagctgaggagccgctgagcttgctggacgacatgaaccactgctactcccgcctgcgggaactggtacccggagtcccgagaggcactcagcttagccaggtggaaatcctacagcgcgtcatcgactacattctcgacctgcaggtagtcctggccgagccagcccctggaccccctgatggcccccaccttcccatccagacagccgagctcgctccggaacttgtcatcttcaacgacaaaaggagcttttggcactgactcgggcgtgtgctga

SEQ ID NO: 8761 - DNA, 423 bp, Homo sapiens
  misc_feature (1)...(423): n = A,T,C or G
acccacgcgtccggttgagatcaatgggatgttcattcccaaaggggtggtggtgatgattccaagctatgctcttcaccgtgacccaaagtactggacagagcctgagaagttcctccctgaaagattcagcaagaagaacaaggacaacatagatccttacatatacacaccctttggaagtggacccagaaactgcattggcatgaggtttgctctcatgaacatgaaacttgctctaatcagagtccttcagaacttctccttcaaaccttgtaaagaaacacagatccccctgaaattaagcttaggaggacttcttcaaccagaaaaacccgttgttctaaaggttgagtcaagggatggcaccgtaagtggagcctgaattttcctaaggacttctgctttgctcttcaagaaatn

SEQ ID NO: 8762 - DNA, 412 bp, Homo sapiens
  misc_feature (1)...(412): n = A,T,C or G
actagttctagatcccgagggcagatcgtgttcatgaatcgagagcccaagaggaccctgacctcggtctcggggtttgtggaccatcacctggcaccctccttctactttgaggccttctactaccatggagaccacccagtggccaactccctgcgagtggatgtccaggctggggcctgcgagggcaagctggagctcagcgtggacggtgccaagcagtaccggaacggggagtccgtgaagctccacttagaaaccgactccctagccctggtggcgctgggagccttggacacagctctgtatgctgcaggcagcaagtcccacaagcccctcaacatgggcaagggctttgaagctatgaacagctatgacctcggctgcggtcctgggggtggggacagtgccn

SEQ ID NO: 8763 - DNA, 437 bp, Homo sapiens
gcatgtgataccatcaagcctgatgtccaaaagagctaagaatatttctccaagcagaagtgagcgctgggctgttttagtgccaggctgcggtgggcagccatgagaacaaaacctcttctgtattttttttttccattagtaaaacacaagacttcagattcagccgaattgtggtgtcttacaaggcaggcctttcctacagggggtggagagaccagcctttcttcctttggtaggaatggcctgagttggctttttgggcaagctactggttttgatgatgtattagtagagcaacccattaaacttttggatgtttgattaaacttgaacttggaacacttaatttttttaaaaaatgggcggcctttttaaaaaatcctctggggggcccatctttatgtgttttttgttcctttaatgtttttcattat

SEQ ID NO: 8764 - DNA, 406 bp, Homo sapiens
  misc_feature (1)...(406): n = A,T,C or G
tccggctccttctgcgtgacactgaccgcttctccagccacgttggagggacccttggccagttttaccaggaggtgctctggggatctccagcagcatcagatgacggcagacgcacgctgagggttcagggcaatgaccactctgccaccagagagcgcaggctggattaccaggaggggcccccgggagtggagatttcctgctggtctgtggagctgtagttctgatggaaggagctgtgcccaccctgtacacttggcttccccctgcaactgcagggccgcttctggggcctggaccaccatggggaggaagagtcccactcattacaaataaagaaaggtggtgtgagcctgggaaaaaaaaaaaaaaaaaaaaaaaaaanggggggcccgccttcgga

SEQ ID NO: 8765 - DNA, 391 bp, Homo sapiens
cattggcatccatgatcttgctgcaatcagcgatagaagaatcgagcgggtctgcaatccctccctcagtgagctgcctgccttcctgggggctgaaggtggtctgaactctgggttcatgatagctcactgcacggcagcagcccttgtttctgagaacaaggctctgtgccatccctcgtctgttgactccctctccaccagcgcagccacggaggaccacgtctccatgggaggatgggcagcaaggaaagccctcagggtcatcgagcatgtggagcaagtgctggccatcgagctccttgcagcctgccagggcatagagtttctacgtcccctgaaaacaaccactccgctggagaaggtctatgacctggtgcgctctgttgta

SEQ ID NO: 8766 - DNA, 412 bp, Homo sapiens
tttcagaatctcctgaattacgtcagaagtcaccattgtttcagtttgccgagatatcttcaagtacgtcccactctgatgcttctacaaagcagagtcaaacatctgccttgtttcagtttgcagagatttcttcaaacacttcgcagttgggtggtgctgagcctgtaaaacgctgtggaaagtctgcactctttcaactggcagaggcaagttcctaagaatatattgagataagatctgcagaggtggaaattacaaaatattctaacagtgtttccctaaactgtaccatctctcctgtgaccataaaatgagttacatctaattttcaacaatgagagggttaacctttaatttgggaaaactgaattttgctactaagagtcattaagcattgctaaaggttacc

SEQ ID NO: 8767 - DNA, 383 bp, Homo sapiens
  misc_feature (1)...(383): n = A,T,C or G
agcaccattcaggtctgccctggagagcagcccagcagacccggccacgctcagtgaggacgaagcgcgcctcctgctggctgcactggtgcaggactatgtgcagatgaaggccagtgagctggagcaggagcaagagagagagggctccagcctggacagccccagatctaagcggtgcggtaatctgagtacttgcatgctgggcacatacacgcaggacttcaacaagtttcacacgttcccccaaactgcaattggggttggagcacctggaaagaaaagggatatgtccagcgacttggagagagaccatcgccctcatgttagcatgccccagaatgccaactaaactcctccctttccttcctaatttcccttcn

SEQ ID NO: 8768 - DNA, 393 bp, Homo sapiens
tgagccaagattgtgccactgcacttcagcctgggcaacagagcgagactccatctcaaaaaaaaaaaaaaaaagggtctatggagggggggggaaataaatttttggggggcataatttttttttcccacggggctaaacggggaaatttgtttttaaagtaaaagggctaattttttttccctcacgtggtttttaacccaaaaaagcgcccaaaaaaattggacccggaatttggttccctttccaccttttaccttaaatgaaaaaaccggcggaagggggggaaaaataagtaccaaaataaaaaaccccaattgacccccagcctgtataatcacctcaaaccacccagcggggaataaaccaaaaaaccttggcccggcctttttt

SEQ ID NO: 8769 - DNA, 393 bp, Homo sapiens
tcacgctgagcacccatgagtgtgccggcctttcataacgggacataaacctggccagcttcatcgaacaagtagcagtgtccatgacatagaccctgcccttcctctttgaattcttccgggggaaggggtgactgaactgggagtccagggagggagctgaggagcccttaccctcccaccactcccctcccaagacccagccgccgccgttgagggctgagtccttgctgtgggatgtgccagtgtccccaccaacaccaggaatttagaccttttccctgcaccactctcttcatcctgggggctctgttacactaatttgaataaactctcccctttctttgcaacttcccagcaacaataatgattttcttgccaggccgtctcttg

SEQ ID NO: 8770 - DNA, 462 bp, Homo sapiens
  misc_feature (1)...(462): n = A,T,C or G
ccaaactgaagccttcggaaccgctgatgaccntccgggncgacccacgcgtccgggctctaccccaacatgaacctggaactccagggattagtgccctctgctccgctcctgaacttcagccctgggaatctgtctgtggacccctatatggagatagatgcctttgtgctcctgcccagctccagcaaggagcctgtcttccggctcagtgtggccactaatgtgtccgccaccttgaccttcaataccagcaagatcactgggttcctgaagccaggaaaggtaaaagtggaactgaaagaatccaaagttggactattcaatgcagagctgttggaagcgctcctcaactattacatccttaacaccttctaccccaagttcaatgataagttggccgaaggcttcccccttcctctgctgaagcgtgttcagctctacgaccttgggctgcagatc

SEQ ID NO: 8771 - DNA, 394 bp, Homo sapiens
  misc_feature (1)...(394): n = A,T,C or G
atctatgacatattccaaaagctcaacagcaacacccaggtagttttgctgtcagccacaatgccttctgatgtgcttgaggtgaccaagaagttcatgagggaccccattcggattcttgtcaagaaggaagagttgaccctggagggtatccgccagttctacatcaacgtggaacgagaggagtggaagctggacacactatgtgacttgtatgaaaccctgaccatcacccaggcagtcatcttcatcaacacccggaggaaggtggactggctcaccgagaagatgcatgctcgagatttcactgtatccgccatgcatggagatatggaccaaaaggaacgagacgtgattatgagggagtttcgttctggctctagcagagttttgn

SEQ ID NO: 8772 - DNA, 431 bp, Homo sapiens
aacggaagagtggattatttggtcactgaggaagagatcaatcttaccagagggccctcagggctgggcttcaacatcgtcggtgggacagatcagcagtatgtctccaacgacagtggcatctacgtcagccgcatcaaagaaaatggggctgcggccctggatgggcggctccaggagggtgataagatcctttcggtaaatggccaagacctaaagaacctgctgcaccaggatgctgtagacctctttcgtaatgcaggctatgctgtgtctctgagagtgcagcacaagttacaggtgcagaatggacctataggacatcgaggtgaaggggacccaagtggtattcccatatttatggtgctggtgccagtgtttgccctcaccatggtagcagcctgggctttcatgagataccggcaacaact

SEQ ID NO: 8773 - DNA, 409 bp, Homo sapiens
gaagatggcggaacaggctaccaagtccgtgctgtttgtgtgtctgggtaacatttgtcgatcacccattgcagaagcagttttcaggaaacttgtaaccgatcaaaacatctcagagaattggagggtagacagcgcggcaacttccgggtatgagatagggaacccccctgactaccgagggcagagctgcatgaagaggcacggcattcccatgagccacgttgcccggcagattaccaaagaagattttgccacatttgattatatactatgtatggatgaaagcaatctgagagatttgaatagaaatagttatcgagttaaaacctgcaaagctaaaattgaactacttgggagctatgatccacattaactacttattattgaagatccctattattgggat

SEQ ID NO: 8774 - DNA, 497 bp, Homo sapiens
aagtgggaactgacgactgagggcctgtcgcggaaggcccggaacgacccacgcgtccgctgacctgggacagtgaatcgacaatgccgtcttctgtctcgaggggcatcctcctgctggcaggcctgtgctgcctggtccctgtctccctggctgaggatccccagggagatgctgcccaaaagacagatacatcccaccatgatcaggatcacccaaccttcaacaagatcacccccaacctggctgagttcgccttcagcctataccgccagctggcacaccagtccaacagcaccaatatcttcttctccccagtgagcatcgctacagcctttgcaatgctctccctggggaccaaggctgacactcacgatgaaatcctggagggcctgaatttcaacctcacggagattccggaggctcagatccatgaaggctttcaggaactcctccgtaccctcaaccagccagacagccagcttcagctgaccacc

SEQ ID NO: 8775 - DNA, 462 bp, Homo sapiens
  misc_feature (1)...(462): n = A,T,C or G
aattgatcgccctgcggnaccattgatgactntccgggtcgacccacgcgtccggagaggggaaccctcctccatcttttttgcaacatctcatttcttccttttgctgttgcttcccccctcacacacttggttttgttctatcctacatttgagatttctattttgtgttgaacttgctgctttttttcatattgaaaagatgacatcgccccaagagccaaaaataaatgggaattgaaaaaaaaaaaaaaaaaaaagggggggcccgttttaaagaatccttgggggggccaaatttaaccggggcttgcaagggattatttttttccttttggggggccgatttaaaccctccctgggaattttgggaagggacccttctttttggggggggccttattggcccaacctccctccagaatttaaaggctttagggaaaataaaaaatttttaggggg

SEQ ID NO: 8776 - DNA, 395 bp, Homo sapiens
caaagatgaccgaaagattgcctgtgccgctgttgactgcgtcaaagacaagaaccaagacctgtgccagcaggaggcggtcaagggctaccccactttccactactaccactatgggaagttcgcagaaaagtatgacagcgaccgcacagaattgggatttaccaattatattcgagccctccgggagggagaccatgaaagactagggaaaaagaaggaagagttataattcctgcctcagaaaaagcttttccattacactgtgaatgatacctgttttgttgtttctgaatttccacatgttctgaagacaaattttttatagccgcttatggccattttgtacaattttgaaataaaattaaaccatttaaaaaaaaaaaaaaaaaaag

SEQ ID NO: 8777 - DNA, 393 bp, Homo sapiens
cctggtctcagtatggcgctgtcctgggttcttactgtcctgagcctcctacctctgctggaagcccagatcccattgtgtgccaacctagtaccggtgcccatcaccaacgccaccctggaccggatcactggcaagtggttttatatcgcatcggcctttcgaaacgaggagtacaataagtcggttcaggagatccaagcaaccttcttttactttacccccaacaagacagaggacacgatctttctcagagagtaccagacccgccagaaccagtgcttctataactccagttacctgaatgtccagcgggagaatgggaccgtctccagatacgagggaggccgagaacatgttgctcacctgctgttccttagggacaccaagacc

SEQ ID NO: 8778 - DNA, 402 bp, Homo sapiens
ctctttagcaatgacaggttgaaagatggtttgtgcttgtcggaatcagaaacagtcaacaaagagcgagcgaacagttacaaaaatccccgcacgcaggacctcaccgccaagcttcggaaagctgtggagaagggagaggaggacaccttttctgaccttatctggagcaacccccggtatctgataggctcaggagacaaccccactatcgtgcaggaagggtgcaggtacaacgtgatgcatgttgctgccaaagagaaccaggcttccatctgccagctgactctggacgtcctggagaaccctgacttcatgaggctgatgtaccctgatgacgacgaggccatgctgcagaagcgtatccgttacgtggtggacctgtacctcaacacccccgag

SEQ ID NO: 8779 - DNA, 431 bp, Homo sapiens
cagaaatcctcctcggctctctagcgtgagctttcccaaggggccacgcccagcttgccttctgattggtccagctggtgggttgtcttccgccatctttgatcagggcactaaggatgctcccgacggccttcacagtgacggcggagaccctgccccgccagctgctcagtacgtgccgcgtagcccgtgcgagccaagtgtgagtccgggcgagcgcctgcggagctagcactgggcccagaatgagagggaggcggaggagcagcgatcacgtggttttagggactgtctaataattccacgccagcattgccggtgtttcagggggtgggaaccgctgcgttccccatcaacttttctcccacccaccacccttcccaacctacaagcccagctcagcttgaggtaactgctgaccggactgtcct

SEQ ID NO: 8780 - DNA, 392 bp, Homo sapiens
  misc_feature (1)...(392): n = A,T,C or G
gagggtccacatggcattgagagggtgctgcccgctcaatgcccagcagcagctctggaaggcagtgctcagccccatcaccactgtcccgtggatgcctgtgtacctcttgccttttctgggcttgcgtttctctcctctagtgggtggggatgactttcaatgactttcaatacttcccctgaaggaagaatgataaggagaaatgtctgttttgaggaaagggctttgaattccccagatactgaacaatttgtgtttgtgactgatggagaatttcaggaatgaatgagaaagcctttgcgaaactatgcaacagtttacatcagtcatgtgaagtatttgtctaaaacagagcaaactgaagaccaaattattctcctgttgaggtn

SEQ ID NO: 8781 - DNA, 287 bp, Homo sapiens
cgcatctggagggccatcttggcacagcgagcaggatccacaccagtcacctctggaccctgagagctgaatgagggcatcataggccagacaggcccaaggatggatgaatggagaggacaaaggcagcttctgacacaccagccccaggacctggggcgactggaggaagccaggcgagtggggcccaggactggttccagtgagagaaaccaaccacaggcacccaagcactaccagacaaagcgtattaaacagaacacttttgaaaaaaaaaaaaaaggggg

SEQ ID NO: 8782 - DNA, 462 bp, Homo sapiens
  misc_feature (1)...(462): n = A,T,C or G
aaatggatcgccctgcggnaccgttgaagaccttccgggacgacccacgcgtccggattctcccacctcagcctccccagtagctgggatttcaggcacacaccaccacgtccagctaatttttgtatttttgtagagacggggttttgccatgttggctaggctggtcttgaactcctgacctcaggtgatccgcccgcctcggcctcccaaaatgctgggattacaggcatccaaagcgctggaattacaggcatgagccaccgcacccggccttatcagttgattaagtgaaccttcagtgggcaaagttgttttaaaatgtactgatacttgagccttgcctgcagaggttgatgtcactgatttaaggtgggcccagccagtggttcagttttgcctgtcttcgagtgattggaatgtacagccaagagagtgtaattatggtgctggcagaagtan

SEQ ID NO: 8783 - DNA, 400 bp, Homo sapiens
  misc_feature (1)...(400): n = A,T,C or G
cggacgcgtgggactagttctagatcgcgagcggccgcccttttttttttttttaaaataagaacctttcgttttttaaaaagtcccttaaccccccggggatcccccccttgattttctccaaccccgaagggcacttttattggcaaagtggggccacacacccatggaatttttttgttggggccaaaaggccttttaaactttagtttttgtcttccacccccagttggccttaaaaacccccacggcccagccttaaagctcctgcccttacccactttttgttacaataagggctgaaggaccccaaaaaaaaaaaaaaaaaaaaaaaanggggggggccccttttaaaaaaacctctgggggggccaaaatattgggggggagggaaaataat

SEQ ID NO: 8784 - DNA, 466 bp, Homo sapiens
  misc_feature (1)...(466): n = A,T,C or G
ttttgattgaacgcctgcttgaccgccntggaaancccgcgncgacccacgcgtccgtgcccctccggctggatctcatctccctgccccctgtcccctcaggctctcaaaggacctgctgccccgtcaactgggtggagcaccaaggcagctgctactggttctctcactccgggaaggcctgggctgaggcggagaagtactgccagctggagaacgcacacctggtggtcatcaactcctgggaggagcagaaattcattgtacaacacacgaaccccttcaatacctggataggtctcacggacagtgatggctcttggaaatgggtggatggcacagactataggcacaactacaagaactgggctgtcactcagccagataattggcacgggcacgagctgggtggaagtgaagactgtgttgaagtccagccggatggccgctggaacgatgacttctg

SEQ ID NO: 8785 - DNA, 403 bp, Homo sapiens
  misc_feature (1)...(403): n = A,T,C or G
cggacgcgtgggaaaaaatttcatgctttaaataaatttcaaagacacaccctttcactgctgatgcanaggaaagggaaagggttcttgttacttgagaatttgcttctgatttaaacaaacaagacttactttaataaaagaaagagaaaaacaaaagattcccaggttgttatgtgcttcttctgcaagcagagaggcaaatgttaatgacaattccatataccaaaagacacattttttacttcaaagttttgtccttgtgttaggcagtctgagcagcgagtgatccagagcgcagccaacaaagcagcagatagcagtgtacagaaagcaaaaaaggaactgtatgtgaggcacttgtttctgttaatatccatattcctgttaacacacacccttg

SEQ ID NO: 8786 - DNA, 416 bp, Homo sapiens
accacgcgtgcgcccacgcgtgcggggaaaagttttggcaggagcgggagaattctgcggatcctgcgggacggcggcggtggcgccgtatgcagccgggacagtgttgtacagtgttttgggcatgcacgtgatactcacacagtggcttctgctcaccaacagatgaagacagatgcaccaacgaggctgatgggaaccaccctgtagaggtccatctgcgttcagacccagacgatgccagagctatgactgggcctgcaggtgtggcgccgaggggagatcatccatggagcagccacaggaggaagcccctgaggtccgggaagaggaggagaaagaggaagtggcagaggcagaaggagccccagagctcaatgggggaccacagcatgcacttccttccagcagctacg

SEQ ID NO: 8787 - DNA, 410 bp, Homo sapiens
cggacgcgtgggcggacgcgtgggttctacctctgtttcagatttttgaaacacttattttaaaccaaattttaatttctgtgtccaaaataagttttaaggacatctgttcttccatacgaaataggttaggctgcctatttctcactgagctcatggaatggctctgcttatgatactctgcacgctgccttttagtgagtgaggagtttggggttgcctagcaacttgctaacttgtaaaaagtcatctttccctcacagaaagaaacgaaagaaagcaaagcaaagtcagtgaaagacaatctttatagtttcaggagtaaatctaaatgtggcttttgtcaagcacttagatggatataaatgcagcaacttgttttaaaaaaatgcacaatttacttcccaaag

SEQ ID NO: 8788 - DNA, 393 bp, Homo sapiens
tatggcgctgtcctgggttcttacagtcctgagcctcctacctctgctggaagcccagatgcccattgtgtgccaacctagtaccggtgcccatcaccaacgccaccctggaccggatcactggcaagtggttttatatcgcatcggcctttcgaaacgaggagtacaataagtcggttcaggagatccaagcaaccttcttttactttacccccaacaagacagaggacacgatctttctcagagagtaccagacccgccagaaccagtgcttctataactccagttacctgaatgtccagcgggagaatgggaccgtctccagatacgagggaggccgagaacatgttgctcacctgctgttccttagggacaccaagaccttgatgtttg

SEQ ID NO: 8789 - DNA, 365 bp, Homo sapiens
taacgcgcagccagccttgtgaagcccatgcccggcagccatggcggtggaaggaggaatgaaatgtgtgaagttcttgctctacgtcctcctgctggccttttgcgcctgtgcagtgggactgattgccgtgggtgtcggggcacagcttgtcctgagtcataccataatccagggggctacccctggctctctgttgccagaggtcatcatcgcagtgggagtcttcctcttcctggtggcttttgtgggctgctgcggcgcctgcaaggagaactattgtcttatgatcacgtttgccatctttctgtctcttatcatgtgggtggaggtggccgcagccattgctggctatgtgtttagag

SEQ ID NO: 8790 - DNA, 385 bp, Homo sapiens
  misc_feature (1)...(385): n = A,T,C or G
caagatttggctccaagagctattcgcagagaaactttctcgcacaaaaagccaccgcccccgaaacccgcgggaaatctgtttcctgtgaaaggcctggcctccgggcattggcggtttccctgatcctctctcccaaattttccggcaggggattgatcgaggcgacatttangactggggtgggcgagggagtggcggttctcgtcccaagttacaggtgaggacgttcaggccaaggcgtagccaagatcgcgccgccctgtagcttgaggaggcgccgggattcgaaccaaggctgtgcccaatcctaagccctgcgaggtcttgtggaaccgacatgacccactctttggtttgtccagagacagtgagcagggtgagg

SEQ ID NO: 8791 - DNA, 406 bp, Homo sapiens
cactgtgcctgacctataatactgttgtcaattaaaaataaaacaaatgatttttagaaagataatattatggaaattaatattaatagaaaatagataatagggctgggagctgtggctcacgcctgtaatctcagcactttgggaggccgaggtgggcggatcacttgaggtcaggagtttgagaccagcctggccaacatggtaaaaccctgtctttactgaaaatacaaaattaggcaggcgcggtggtgagcgcctgtaatcccagctactcgggaggctgaggcaggagaatcacttgaacccgggaggcggaggttgcagtgagccgagattaagccattgcgctccagcctgggcaacaagagtgaaactccgtctggaaaaaaaaaaaaagaaaagg

SEQ ID NO: 8792 - DNA, 485 bp, Homo sapiens
  misc_feature (1)...(485): n = A,T,C or G
tatggatcgtnntcggaanantganttctatgcgggaccgcnccggaaggcccgggncgacccacgcgtccgccaaggagcatggagttctgttcttctggcgcggttacctggccaatgtcatcagagactttcccacccaggctcttggcttcgccttcaaagataaatacaagcagatcttcctgggtggtgtggacaagagaacccagttatggcgctactttgcagggaatctggcatcgggtggtgccgcaggggccacatccctgtgttttgtgtaccctcttgattttgcccgtacccgcctagcagctgatgtgggttaagctggagctgaaagggaattccgaggcctcggcgactgcctggttaagatctacaaatctgacgggattaagggcctgtaccaaggctttaacgtgtctgtgcaggggattatcatctaccgagccgcctacttcggtatctatgacactgcaaag

SEQ ID NO: 8793 - DNA, 409 bp, Homo sapiens
  misc_feature (1)...(409): n = A,T,C or G
cggacgcgtggggagctccagcatcccctttgctcgaaatggaccccaactgctcttgcgccactggtggctcctgcacgtgcgccggctgctgcaagtgcaaagagtgcaaatgcacctcctgcaagaagagctgctgttcctgctgccccgtgggctgtgccaagtgtgcccagggctgcgtctgcaaaggggcatcggagaagtgcagctgctgtgcctgatgtgggaacagctcttctcccatatgtaaatagaacaacctgcacaacctggatttttttaaaaatacaacactgagccatttgctgcatttctttttatactaaatatgtgactgacaataaaaacaattttgactttaaaaaaaaaaaaaaaaaaaaggggcgccccttttaaagaacccctn

SEQ ID NO: 8794 - DNA, 393 bp, Homo sapiens
  misc_feature (1)...(393): n = A,T,C or G
taccaggataccttggaattcctgatggccagtctggatttctgcaagtccttctggaaaatctgtgtggaacggcatgccttctttagactttttgaagagcccaaaccaaagcccaagcccgtcctctttagccgggggtcatcatttcggttcagtggtcggactcagaagcaggttctcgactatgttaaagaaggaggacataagaaggtgcagtttgaaaggaagcacagcaagattcattctatccggagccttgcttcacagcctacagaactgaattcggaagtgctggagcagtctcagcagagcaccagccttacatttggagaaggtgccgaatctccagggggccagagctgccggcgaggaaaggaaccgaaggtttcn

SEQ ID NO: 8795 - DNA, 404 bp, Homo sapiens
cccacgcgtccgcccacgcgtccgaggatattaatgaacttattaccgatgctcagttagaagcaaggactgaactccatgacagaacagcagtaatcaaggagaatgaaagagagaagaggcccaagcttgaaaatctgcctgacacagaagaccaagaaactgtggacattaattcagtcagtgaaggaaaagagaataatataatgataaccttagaaacaaatattgaacataatctaaaatctgaggaagaaaaggatcaggaaaagcaacagatgtttgaaaataagcttataaaatctgaagaaattaaagatactattttgcaaacagtagatttagtttctcaagagactggagaaaaagaggcaaatattcaggcagttgatagtgaaagtggg

SEQ ID NO: 8796 - DNA, 372 bp, Homo sapiens
cggacgcgtgggagatttttcaaacagaataaataagctcaaaaattcactatttgaatatcagaagaacaataaggattctcattcgttgaccactaatataatggaaattttgagaggcgatttttcctcagccaataaccgtgataatacctacaaccgagtgtcagaggatctgagaagcagaattgaagtcctgaagcgcaaagtcatagaaaaagtacagcatatccagcttctgcagaaaaatgttagagctcagttggttgatatgaaacgactggaggtggacattgatattaagatccgatcttgtcgagggtcatgcagtatggctttagctcgtgaagtagatctgaaggactatgaaga

SEQ ID NO: 8797 - DNA, 391 bp, Homo sapiens
  misc_feature (1)...(391): n = A,T,C or G
cttaacttgaaattgggcctaaggagtgagaactacaaaaatacaaaatgcttgtccaggactcagccatgcacaccttgagcagcgccggcaggaggcacggaaggaactgtgctccgttctcctcactgtcatggtgccaccagtgtctgatgaagggcagagtgacccagactgcaggcagtaactgacttcacacagtccctggcatttagtcatctgtgattgttttatcactctggactgtgcagagccacctgccaccgagatctgcattccgactgcctatgaacgggtgtgggggccgggggctggcttgctgaagtcttcaacttgcactcggagctcctttgatacctcagagctggctgtcaggtggcagctcacaccn

SEQ ID NO: 8798 - DNA, 395 bp, Homo sapiens
cccacgcgtccggaaaactctcagttaagtcattattattattattttagagatgggggtcttgctgtgttgtctaggatggtcatgaacccctaggctcaagtgatcctcccacctcagcctcccaagtaactgggaagacaggcacgcgttaccatgtttagctaaattgtttttattatgctgtggttatttaaatttacgaatataaagtaggaaaaatgtgcttttatttctagttcttatacagctaaaaaaaaaccacaacaaatttacaaattaaatacaaatgaaaccacaaaatgaatactattcaattaaaaatattatagtaatttaacgtgacaaatgatgtattttgctaaaactgtcatccgtcgtattgttactatggt

SEQ ID NO: 8799 - DNA, 391 bp, Homo sapiens
  misc_feature (1)...(391): n = A,T,C or G
agcccctgatgaaaaatgactcattgtgcagtgttcagagatatgtgataaaccatcatacttcctgcaatggaacatggtcagaagatgtgggaaatcacacgaaattcactttcctgtggacagagcaagcacatactgttacggttctggccatcaattcaattggtgcttctgttgcaaattttaatttaaccttttcatggcctatgagcaaagtaaatatcgtgcagtcactcagtgcttatcctttaaacagcagttgtgtgattgtttcctggatactatcacccagtgattacaagctaatgtattttattattgagtggaaaaatcttaatgaagatggtgaaataaaatggcttagaatctcttcatctgttaagaagtn

SEQ ID NO: 8800 - DNA, 390 bp, Homo sapiens
tagcatttgtgccaatttctggttgtgaatggtgacttcatgctggagccaagtgctaacatgccttgggtcaagggatggaaagtcacccgtaaggatggcaatgccagtggaaccacgctgcttgaggctctggactgcatcctaccaccaactcgtccaactgacaagcccttgcgcctgcctctccaggatgtctacaaaattggtggtattggtactgttcctgttggccgagtggagactggtgttctcaaacccggtatggtggtcacctttgctccagtcaacgttacaacggaagtaaaatctgtcgaaatgcaccatgaagctttgagtgaagctcttcctggggacaatgtgggcttcaatgtcaagaatgtgtctgtc

SEQ ID NO: 8801 - DNA, 399 bp, Homo sapiens
gtgacttcaccccatggtggggagaacagcctgtgctggggtcaaggtagaaggaggatgagccccgaggctcctggagagtctgagcctgggtgaggaaggggaggaggtggtccctgatctcagggcggggagagccaatgaggagacggagccatagcacgcggctctcagctgggggatcctggtcccctcaccatctcctctcccccagtctagggacaggaagatggttggcgacgtgaccggggcccaggcctatgcctccaccgccaagtgcctgaacatctgggccctgattctgggcatcctcatgaccattctgctcatcgtcatcccagtgctgatcttccaggcctatggatagatcaggaggcatcactgaggccaggagctctg

SEQ ID NO: 8802 - DNA, 393 bp, Homo sapiens
  misc_feature (1)...(393): n = A,T,C or G
cccacgcgtccgaccaaggtggcacttactcaaaagcatctactcctaatggttatgataatggcattattggggccacttggaaaacccggtggtattccatgaagaaaaccactatgaagataatcccattcaacagactcacaattggagaaggacagcaacaccacctggggggagccaaacaggctggagacgtttaaaagaccgtttcaaaagagatttacttttttaaaggactttatctgaacagagagatataatatttttcctattggacaatggacttgcaaagcttcacttcattttaagagcaaaagaccccatgttgaaaactccataacagttttatgctgatgataatttatctacatgcatttcaataaacctttn

SEQ ID NO: 8803 - DNA, 392 bp, Homo sapiens
  misc_feature (1)...(392): n = A,T,C or G
tcatacctctcatcaagaagaactcacttgaaagctgtggggtccggacaaccaaaaatgaagaggagaatgaaaaggaaaaggagctccagctggaatatctgctgggtgcctttgaaagcctgggcaaagcctggccgcgaaacgcggagacccaacgttgttatcgtcaggagctgtgcaaactgatgtgtgaacggctaaaactcagcacgtggaaagtgcagctaggagtcctgcaatcaatgaatgccttttttcaggggttaatgcttttggaagaagaacatgccgatcctgaggctttggctgaaattctgcttgaaacttgtaaatcaatcacatattctttagaaaataagacctactcatctgtgagaacagaagctttn

SEQ ID NO: 8804 - DNA, 483 bp, Homo sapiens
  misc_feature (1)...(483): n = A,T,C or G
agatggccnccccttctccccctaatgnaccggtagagcccgtaancccggncgaccacgcggcgggagcccactccctgggattttgttctgtcttcaccctttactacctgtgtgatcatgttcaagtcttgtagtctctccatgctagaattttggtgtgttgataatggagacagttatcatatcttcctcatagagttctttcaagattttaatgtacaaagtgtctagaacagtgccagacacatagtaagcactcaataaatgttaggagttattgtgatttgatttttgtttaagaattattatgaatattataggggttttgcagaagaaggaaatgtgaagaaaactgctttaagttggcatgagaatgttaagtcttctgttgttgttgtcaacgaagtaataatctcagaaatatttgttgaaggaaaaacctaagtttgctgttgaatgatatataaaaaactaataatt

SEQ ID NO: 8805 - DNA, 404 bp, Homo sapiens
  misc_feature (1)...(404): n = A,T,C or G
aggtcaggaatttgagaccagcctgaccaacatggataaaccccatctctactaaaaatacaaaattagccgggcatgggggcgcatgcctgtaatcccagctactcgggtggccgaggcaggataatggcttgaacccgggaggcgaaggttgcagtgagccgagatcgtgccattgcactccagcttgggtaagaagagtgaaattctgtctccaaaagaaaaaaaaacaaaacaaaacaaggatttccacatattaacatacattgggtatgtatagtccacagaggtagtaagtatcttttgacaggtcacattaaatcaccagatcataaggtagaattttgaatcgtattagttgaagagaccactaacatttttatttgataaagccattggattan

SEQ ID NO: 8806 - DNA, 392 bp, Homo sapiens; identical to SEQ ID NO: 8246

SEQ ID NO: 8807 - DNA, 479 bp, Homo sapiens
  misc_feature (1)...(479): n = A,T,C or G
natagataagcccctgcggaaccatggatgacctttcgggncgacccacgcgtccgcccacgcgtccgataatttctggcactcaccagcctctatcattatgactttccccccagtgtattatttctctaataggtttccttttcacgttcttttagcacagactggcactttaccctctcaatttggaagttagcccctctcctctgttacttttcccttcacccaactacagctgtgatctagaacattcatagtcatatttctgctactactaccttcatttatcaagactttttatgagaataggtaaaccaagcaataacttcctaggactgaatcaccaccccagaagagcgagaggctcctttcatatgcctgaggccacaccccttaacctgttctgacaaaatagtggctggcccatgtaccagctccattcagaaattcaggaagagaaaagacagccctgttgtcac

SEQ ID NO: 8808 - DNA, 409 bp, Homo sapiens
tggatgccacagttcccctcccagcggactccgaggggacatggcttcgctggggcccctttccccatatctaagccccacggtcctcctgctggtcagctgtgacctgggcttcgtgcgagcagaccggcctccctctcctgtgaatgtgacggtcactcacctcagagccaactcgggcactgtgtcctgggacgtcccagaaggcaacatcgtcattggctactccatttcccagcaacggcagaatggccccgggcagcgtgtgattcgggaggtgaacaccaccacccgggcctgtgccctctggggcctggctgaagacagtgactacacagtgcaggtcaggagcatcggccttcggagagagagtcccccagggccccgggtgcacttccgaactctcaag

SEQ ID NO: 8809 - DNA, 386 bp, Homo sapiens
ttaacatatttaaaatacttaggacatggcctggttcgtgacagatggtgtttaacatcattgtcatatgaagaacactctctgtgggccaatggaggtgtgccttaaaattcttcatcttgcctgattttgtttgcataacttctggagagtctgtgtcctcctcatctaggccacctttccattttttgtgaaagatgaccttgtccctgcagtctccgccaggagtcacacagcttttcacagcagctgccatctttaattctttttcctgagattccagcaaggttgtgacattgtcacttttttgttctagactcttttaaattttctgcatttgcctgaaaagcacccctgtaagaatagatttctcatggctctaaaaa

SEQ ID NO: 8810 - DNA, 402 bp, Homo sapiens
  misc_feature (1)...(402): n = A,T,C or G
ccagctcctcctgccgtgttaggggttgagcctctacaacataatgtcatccaggcttggaatcagagagccatggacaccattccacactataccatttactatccatgggggcaaacaattaaagtcctccacccccagctttccatgtgtcaaatggtagtgatagttcttggctagtatccagtgcctggctggacagggaatgccaataggtaataacaatgattatctggcaattgtaatgaaaatatgctcggagtatgagagaagactacttgggacactcagcctgtgttactaaaagcagaggcgccaaggcagggtggccatgcagccttttgctcttgtctgccctctgtgctcacacagcactgggttgaggtctgcactccacctttn

SEQ ID NO: 8811 - DNA, 418 bp, Homo sapiens
  misc_feature (1)...(418): n = A,T,C or G
caaagatttggtgttttctacttgggatcacaaagcataaggacacttcaactgtccagagggttattcaggaggctggtggtggcatgatgagtgtggagaaaacaacctaaatggtaaatataacaaaccaagagcaaaatctaagccagagaggagaagaggattatcttggaagtctcaaaatggaaggttatactctataaaatcaaccaaaatgttgatccatccaacagattcagaaagctttgaatgaactgaggcaaatttaaaaggcaataatttaaacattaacctcattccaagttaatgtggtctaataatctggtattaaatccttaagagaaagcttgagaaatagattttttttatcttaaagtcactgtctatttaagattaaacatacaatcacataacn

SEQ ID NO: 8812 - DNA, 401 bp, Homo sapiens
tgaagctgttccggcattactatgtcatggtcatctgctacgtctacttcacccgcatcatcgccatcctgctgcaggtggctgtgccctttcagtggcagtggctgtaccagctcttggaggagggctccaccctggccttcttcgtgctcacgggctacaagttccagcccacagggaacaacccgtacctgcagctgccccaggaggacgaggaggatgttcagatggagcaaaatgacggactctgggttccgggaaggcctctccaaagtcaacaaaacagccagcgggcgggaactgttatgatcacctccacatctcagaccaaagggtcgtcctcccccagcatttctcactcctgcccttcttccacagcgtatgtggggaggtggaggggg

SEQ ID NO: 8813 - DNA, 437 bp, Homo sapiens
  misc_feature (1)...(437): n = A,T,C or G
ttttctttaggacataaagagagccctagggtgctctgaatctgtacatgttcttgtcataaaatgcatactgttgatacaaaccactgtgaacattttttatttgagaattttgtttcaaagggattgctttttcctctcattgtcttgttatgtacaaactagtttttatagctatcaacattaggagtaactttcaaccttgccagcatcactggtatgatgtatatttaattaaagcacacttttccccgaccgtatacttaaaatgacaaagccattcttttaaatatttgtgactctttcctaaagccaaagtttctgttgaattatgttttgacacacccctaagtacaaggtggtatggttgtgtacacatgctgccttcttggggattcaaaaacaggtttttgattttgaatagcaattactgatan

SEQ ID NO: 8814 - DNA, 407 bp, Homo sapiens
  misc_feature (1)...(407): n = A,T,C or G
accatctgccttcatgaaaggcgctggctgccgggcactggtcatagcacctctctttgggattgctcaaggggtctattttattgggattggagagcgcatcttaaagtgttttgactagacagagctggaggtcaagtccctgcgcttgccgccctctctctagctgtttcacttancctagagggggcaagggcaggtggggccactctggcctgcctggtcctctgcgttgtagtgctacctcaatctcgggagaaacagccctatattctaacaagttgagcacagccttcttccccttcgtgtctacactcgttttcctttgtgggcacagctaccaggggcttttggaagcccctaaccacctacttttcaacaaaaatggtactttcgttgtattaatt

SEQ ID NO: 8815 - DNA, 181 bp, Homo sapiens
  misc_feature (1)...(181): n = A,T,C or G
aactatgccatgntcaaggagggacctgaagctgacaagtaccgcctaacatatgcctactttgctggcggggatgctggagatgcctttgatggctttgattttggcgatgatcctagtgacaagtttttcacatcccataatggcatgcagatcagtacctgggacaatgacaatgata

SEQ ID NO: 8816 - DNA, 192 bp, Homo sapiens
aatgacctaaaaatgtgctactgtaccttgctcattttgcagatatagaagctgaaacatgggttaggttacttactaaaagtccacctgtggcgacctgcaaataatgcttatttatactaaagatgagtttatctgatagagttaggaagtttcttcttttgagtaagagtattgctataacatatattt

SEQ ID NO: 8817 - DNA, 404 bp, Homo sapiens
cccacgcgtacgcccacgcgtgcgggcctacagtggcggcctggacacctcgggcatcctcgtgtggctgaaggaacaaggctatgacggcattgcctatctggccaacattggccagaaggaagacttctaggaagccaggaagaaggcactgaagcttggggccaaaaaggtgttcattgaggatgtcagcatggagtttgtggaggagttcatctggccggccatccagtccagcgcactgtatgaggaccgctacctcctgggcacctctcttgccaggccctgcatcgcccgcaaacaagtggaaatcgcccagcgggagggggccaagtatgtgtcccacggcgccacaggaaaggggaacgatcaggtccggtttgagctcagctgctactcactgg

SEQ ID NO: 8818 - DNA, 405 bp, Homo sapiens
gttaaatgactgggtgaaaatcacatagctgtctggtgccagagccagcctatagtagagtcccctgaccccaagcccggtgctcattccactacctctcacacttcacaacaatttcctcaacacttgagggcccagaaagtctgatctctccagaatgatcagcccagaggaatgctgagaaatcacctggaggagggagcagaaagagaaggtttttaaggaggggcttctgaatacttgggagatacggaacggaccaaggaccacactccagggtgcattcgttgctccctggggcaccacttctggattacagtgtgccaggtcctttggaggccctaccccttccccattcattgccaccagtgagaaatgggggtgcccctgtgtaaagaaacctaa

SEQ ID NO: 8819 - DNA, 415 bp, Homo sapiens
  misc_feature (1)...(415): n = A,T,C or G
tggctgtggagtcccatggcggacgcccacttgttttgggcctgctgctgtgggtgctgggcccagaggtgtcccatgctgggaagatactgttgatcccagtggatggcagccactggctgagcatgcttggggccatccagcagctgcagcagaggggacatgaaatagttgtcctagcacctgacgcctcgttgtacatcagagacggagcattttacaccttgaagacgtaccctgtgccattccaaagggaggatgtgaaagagtcttttgttagtctcgggcataatgtttttgagaatgattctttcctgcagcgtgtgatcaaaacatacaagaaaataaaaaaggactctgctatgcttttgtctggctgtttccacttactgcacaacaaggagctcatgggctn

SEQ ID NO: 8820 - DNA, 450 bp, Homo sapiens
  misc_feature (1)...(450): n = A,T,C or G
ttaaacgcgtgtggannnnttgtaattttcggtcgacccacgcgtccggattgtgactacatcgtgcagaaagcacgggaacggttcgccaaaatcatgcgggagccctgggtagagcaagacaagtttgggaaggtgaagtttgctgtgctgcaaacgtatggggacaccacacacaccctggtggagaagatgaactacatcggccacttcttgcctggatatgaggccccagcgttcatggaccccctacttcctaaactgcccaaatgcagtctggagatgatcgaccacattgtgggaaaccagcctgatcaggagatggtgtccgcctccgaatggtacctgaaaaacctgcagttccaccgcttctggtccgtggatgacacgcaggtgcacacggaatatagctctctgcgatccattgtggtggccaactatgaagagtcc

SEQ ID NO: 8821 - DNA, 418 bp, Homo sapiens
  misc_feature (1)...(418): n = A,T,C or G
gactgcacacagtagaaggccaatattacttacagatatgtgcattactgaagtgtcaaaccactgacctggaaacgtgtggagaacctgtggggtcagcttttaccaagtttgaagacttctccctcagtggcacatttggaacgcgttatgttttcccacagatcattctaagtgggagtcagcttgcccctgaaagacattatgagatttcaagagatggacgcttgaggagccgaagtggagcccctttgcctgtcttagttatggccctgtatggaagagtgtttgagaaggaccctccacgcttagggcagggatctgggaaattccagtgatctcctttagcagagcccttttaggattagcctggctaagaaaggaagaaaaaaaagagatccgttagtgtctgtttaan

SEQ ID NO: 8822 - DNA, 381 bp, Homo sapiens
cggacgcgtgggcggacgcgtgggcgcggccccatccggagctgcgctagggcgagtccctgctgcgcccgccaagcctccccagcacttgctcctggcaggtgccccactccaaggcagggccgggagagtgggggccgttctgctgccctaagggcgggagggagagggtcccaaacagagtgctggccccccgaagaaagcaacccagggtttgtccaagcgataacgggctgggcttggcggggcggggcctcgcagcgggcaggagtgtggggtgcccctggagcgtctgggcagggccgggatgtggccgggtagctcccaagagctgggaatcgccacctgcccttccgactggcacccagtgtgcccacacag

SEQ ID NO: 8823 - DNA, 392 bp, Homo sapiens
gcgagacccgatccctgaaggggacctggatgatctgtcttgaggcggcacctcagggggtgggcagggcttggtccccctccccacagcaagggaaggcagctggctcttctgctgacctcaaataccagccttccccagtggggacgggagcttctggagctggtcccgccatcctcctttgccttcccaggccaactgctcatgctcggtaggtctgcagctcacctcctggaaggagaagggaggaactgggcctggggctggaggcctgggatccctcctttgtgggtctcacacatgattcctgctgcgagctggggcctacttccattgcatcattgtaaaggaagaaaaaagctgctaaaaaagagtggaccataacactgcag

SEQ ID NO: 8824 - DNA, 389 bp, Homo sapiens
cctgggtcgcccttcacaacggagggggcgtgggctggggtgaggtgatcaacgggggattcggcctcgtgctggacggtaccccggaggccgaggggagagccaggctgatgctcagctgggatgtctccaatggtgtggcccggcgctgctggtcagggaaccagaaggcctatgagatcatctgccagaccatgcaggagaacagcaccttggtggtgacactgcctcacaaggtggaggacgagcgggtgctccagcaggccctgcagctctgagggagccaggagtcgcggcccctgcctcccttcctccctggcgatcctcacctgcccagccatggcacacacccttcctgcacacccgcactacctgcacttctcgcacat

SEQ ID NO: 8825 - DNA, 416 bp, Homo sapiens
caatcaaaaggatcgttttgttttgtttttaaagaaaggtgagattggcttggttcttcatgagcacatttgatatagctctttttctgtttttccttgctcatttcgctgtggggaagaaatctgcactgtattgggattgtaaagaacatctctgcactcagacagtttacagaaataaatgttttttttgtttttcaaacaaaaaaaaaaggggacccttttttaaaagtccgttgaggggccctgtgcttaccgagtcgtgcactggatacgtttttgcctaaagaggagttgataaaacaacaaacgtgccatctttgaaaagaaccttttcttggtgggggcacctaaatgaaaacaactccccatgcaattaaaacttgctggggaaaaccaaatctgctcggtggggg

SEQ ID NO: 8826 - DNA, 410 bp, Homo sapiens
  misc_feature (1)...(410): n = A,T,C or G
agaccagcctgggcaacacagcgagatctcttgggggtaaaacaaaaagaaaaaaaaaagttcatacttctccaataaataaagtctcacctgttaaaaaaaaaaaaaaaaaaaaaaaaaaaaaaaaaaaaaaaaaaaaaaaaaaaaaaaaaggacaaaaaaaaaaaaaaaaaaaaaaaaaaaaaaaaaaaaaagaaaaaaaaaaaaaaaaaaaaactctccccggggggggggtttataaaaaacctcggggcgcccttaagaaaaaccctttttttcggtgggtctttttttttggcaaaactacataaaaaaaaaaatgtgttttgggaaaaaaaaatctttttggtgggcgggagaaaaaaaacccccccctctttttttgttggcggtttccntcacctccccct

SEQ ID NO: 8827 - DNA, 408 bp, Homo sapiens
gcgatgatcctagtgacaagtttttcacatcccataatggcatgcagttcaggacctgggacaatgacgatgataagtttgaaggcaactgtgctgaacaggatggatctggttggtggatgaacaagtgtcacgctggccatctcaatggagtttattaccaaggtggcacttactcaaaagcatctactcctaatggttatgataatggcattatttgggccacttggaaaacccggtggtattccatgaagaaaaccactatgaagataatcccattcaacagactcacaattggagaaggacagcaacaccacctggggggagccaaacaggctggagacgtttaaaagaccgtttcaaaagagatttacttttttaaaggactttatctgaacagagagatat

SEQ ID NO: 8828 - DNA, 409 bp, Homo sapiens
ccacgcgtccggtcttctgtgtagggcacactttaacccagtctctgttgctggggagtctctgctccgttttgtacagtcacagggaattctgatctgaaggggcaccttctgttcactcccacaaagtggtgtctggttctcactgagacgttttaagatttttccacaaatatttatatgtactaaatgtggaaccattagaaagttcttccaaaatctcattccagcatagttttggatttttcttttgtcttattttaaaataaggaagtcgagatgactttgatcattggtaacttgggcctgggccagacaaagtataaaacttacaaaagaatattctcatttggtcttaactaggtagatgtaatatatgactttttataaaaagggtatctatatgaac

SEQ ID NO: 8829 - DNA, 426 bp, Homo sapiens
  misc_feature (1)...(426): n = A,T,C or G
cggacgcgtgggaagccaacagtgaaaatgcttgaaagatctaaccatgtgagccggacagaagtcagcagcaaccatgtcttgatttaccttgataaggtgtcaaatcagacactgagcttgttcttcacggttctgcaagatgtcccagtaagagatctgaaaccagccatagtgaaagtctatgattactacgagacggatgagtttgcaattgctgagtacaatgctccttgcagcaaagatcttggaaatgcttgaagaccacaaggctgaaaagtgctttgctggagtcctgttctcagagctccacagaagacacgtgtttttgtatctttaaagacttgatgaataaacactttttctggtcaaaaaaaaanaaaataaaaaaaaaaagataaaaaaaacaattgttaagttattggt

SEQ ID NO: 8830 - DNA, 430 bp, Homo sapiens
cccacgcgtccggggctgcccagctcctggccatctgtaggagtcagagcccacatggccgggccctctgtagctccctcctcccatctccttcccccagcccaataaaggtcccttagccccgagtttaaaaaaaaaaaaaaaaaaaaaaaaaaaaaaaaaaaaaaaaaaaaaaaaaaaaaaaaaaaaaaaaaaaaaaaaaaaaaaaaaaaaaaaaaaaaaaaaaaaaaaaaatggggggggggggcctctttaaaaaatgatgggggggaagccctcatctgcggggggaaaaaaaagcctttttttttttggtgggaggaaaataaaaaaccgatgggggtaaagggaaaaaaccattcttttgggggggggtggttgggtgtacaccttcccccagacgggtagtctgggtgtagaaaacattggg

SEQ ID NO: 8831 - DNA, 483 bp, Homo sapiens
  misc_feature (1)...(483): n = A,T,C or G
catgatccgtctcgcgacntnatataatcctgcggaaccgcgccggaagtcccgggacgacccacgcgtacgattaccttcataaatagttggtacctacttcccaacccttataacaaaagttccatataaataccataataagagtgtatatatttaaataatcttaagcagctgcactgtactggcatatgaatcctttcaggtgaaataactttaaagagcctgttttaaaaatatttccaaatcttaatattttgaatgcagagttcagtgtataagagactgcatcacggtatctgccaccaggtttttattttattttgtttcttcctctagtggttaagcaattccactgggattttttctacttggaaaaaaacctttagcataatcagagaagacttcattaggttgcctacgattgtatgtgtatactcctatcattacctatctcagaactttctttgttttctcagttan

SEQ ID NO: 8832 - DNA, 479 bp, Homo sapiens
  misc_feature (1)...(479): n = A,T,C or G
catagacangccttcggaacnatttgaggactttccgggncgacccacgcgtccgcccacgcgtccggaaatataattgattctgatcactcttggtcagcttctttttctttatctttctttctccttttttaagaaaacgagttaagtttaacagttttgcattacaggcttgtgattcatgcttactgtaaagtggaagttgagattattttaaaacttcaagctcagtaattttgaacactgaaacattcatctaggacataataacaaagttcagtattgaccataactgttaaaacaatttttagctttcctcaagttagttatgttgtaggagtgtacctaagcagtaagcgtatttaggttaatgcagtttcacttatgttaaatgttgctcttataccacaaatacattgaaaacttcggatgcatgttgagaaacatgcctttctgtaaaactcaaatataggagctgg

SEQ ID NO: 8833 - DNA, 472 bp, Homo sapiens
  misc_feature (1)...(472): n = A,T,C or G
tttgaagacccctcgagaccctaggacagngcggtggaattcgcggctgcagcgctggtggaggaggaaactcgcagataccgacctactaagaactacctgagctacctgacagccccggattattctgcctttgaaactgacataatgagaaatgaatttgaaagactggctgctcgacaaccaattgaattgctcagtatgaaacgatatgagcttccagccccctcctctggtcaaaaaaatgacattactgcatggcaagaatgtgtaaacaattctatggcccagttagagcatcaagcagttagaattgagaatctggaactaatgtcacagcatggatgtaatgcctggaaagtatacaatgaaaatctagttcatatgattgaacacgcacagaaggaacttcagaagttaagaaaacatattcatgatttaaactggcagagaaagaacatgcaactcacag

SEQ ID NO: 8834 - DNA, 417 bp, Homo sapiens
tcgtccacgacaggagcttgttgggggagtaccagggttctgctgctttcctgcatctgagcaacacaacagagatcatcagttttaaatagagtagccctcacaatcaaaatatcatagaatatattgtaaagttatgttgctaattttcctttgaaatataaaatattttaagctttttgtcaaaagtggtaacatcttaatacaaataaaaacctttttgtggttgtaagatttagcttataaatcattcaaattgaagtgaaagaattaccaggtcattgttaatgacttagtctattaagaatatatgtatttttgtaaaggaaaagcacttgtagatatttaatcagtacaagatatgtcttttgcagaaataaaatgctgcttagagattctccttaaatattttttatt

SEQ ID NO: 8835 - DNA, 459 bp, Homo sapiens
  misc_feature (1)...(459): n = A,T,C or G
ccccgcccccnnnnnntttgatgttcgtagtccatgcggaggaactcgacagctatccccggttatgcctggccccacccagcagggagttggggtccccccacaggctgtgagctctgtgggccctgggatgtgatctagctcagatgccctctcatccttgatgtcatagttgagtgcacccaagtggcacccactggcggccaggggcacagcctggtggtggtggcaatagaactgtgcccctcctcagctcctcgcttcccctcccacagccccagccttactccaccatgcggacaatcattttgtacggatcacgggagcaatgctgtacggttttgtacactggtggtttgtttcctagaaaacccattgtgtctctggatttctagcacattactaaaagagcctctgctttgtnnnnnnnnnnnnnnnnnnnnnnnnnnnnnnnnnnnn

SEQ ID NO: 8836 - DNA, 460 bp, Homo sapiens
  misc_feature (1)...(460): n = A,T,C or G
natgagacctctgttggagngccgtaattcgccgagggccccttccccttggtgctctgtccccatccacctcctttcagctgctcctgggcctcagctctgcccagggccagccaggttctgctgggaagggaagggaatggggagaagggagaagcaagcagtgtctgagcctcaggagcttccccctccccctttgcctatcccctcccctctgcttgagccttgagccttgactgggagctgaaaggagttgcagctgttggcatgagacctccttctccccgtcttggggaggtggggaccagcagataaatcccacccttccttgagctgtcgctgtactctgaagttcagccagctcagattttataaaaattaattaaaatctcccgggaaaaaaaaaataaaaaaaaaaaaaaaaaaaaannnggggggccctttaaattaaaggggccct

SEQ ID NO: 8837 - DNA, 444 bp, Homo sapiens
atttgaaggacccctagtctagagcggcggaattcgcctgtagtcccagctactcaggaggctgggtcaggagaatcacttgaacccaggaggtaaaggttgcagtgagccaagatcatgccactgcattctagcctgggtgagagtgagactccgtctttctctctctctctataactatatagtaaaacattaataactatattggaaactatggcatctccttgttgcctatcccaatatctattttccctttccctttcctccatagtaataaaaccccaacttcattcagaaaggcagttaagtccagctgaaaattcccagtctcccttgaagttcagcataaccattttctagtcaatgatatgtaaatagaaatgtgtgtaggacttccagaaagacctcttaaacgagaggcacacttttttctttttttcttcc

SEQ ID NO: 8838 - DNA, 465 bp, Homo sapiens
  misc_feature (1)...(465): n = A,T,C or G
gggggtttgtagacattngnnattgtaggtcattagtcagtgcggtggaattcattaacctgtgagttaaatagaaaatcacaagggaatttagaggctgtttctaactgaaagaaaatgaaaactaaacatattaacatttatggattcttgctaaaacagtgtttagaggaaaacttagaatattaaatgcttatgttaaggtagaagaaaagtctgaaatcagttagctaaactttcaccttaattaattcaaaaaagaagagcagatccaaagcaagcaggagaaaagaaacaatagtgagtggacatcagcagaaatgaaaacagaacatcagagaaaaatcagtgaaagcaaaaactggttatttgaaaatatcaataaatttgaaaagcttcaagctagagtgatcaggaaaaaaagagaagatacaaattacaacattagcaatgaaagtgggaacc

SEQ ID NO: 8839 - DNA, 454 bp, Homo sapiens
  misc_feature (1)...(454): n = A,T,C or G
tatggaagnccatccgtatgctcctcggacagnccggnggaannccccatctttactaaaaatacataaattagccggatgtggcggcgttcacctgtaatcccagctactcatgaggctgaggcaggagaatcacctgaacccgggaggcggaggttgcagagacccgagatcaacgccactgcactctccagcctgggcaacaagaaggagactttgtctcctaaaaaaaaaaaaaaatttgggcaagggatctgaatacacttttctccaaaaaaaatttccaaagggccaaaaatccctttgaaaagactgtcagggtggggcgggggggttttcgcctataaccccaccccttgggaaagttggggggggaggaacactgggccccatgagtgggaaactagcttaggtaccaaggcaaaaccccttttttacaaaaataacagagttt

SEQ ID NO: 8840 - DNA, 417 bp, Homo sapiens
ttaagaggttccttcgcaaaaaatcaaagcccaaaaaatgtgtgaagaagtttgttgaatactgtgacgtgaataatgacaagtccatctccgtacaagaactgatgggctgcctgggcgtggcgaaagaggacggcaaagcggacaccaagaaacgccacacccccagaggtcatgctgaaagtacgtctaatagacagccaaggaaacaaggataaatggctcataccccgaaggcagttcctagacacatgggaaatttccctcaccaaagagcaattaagaaaacaaaaacagaaacacatagtatttgcactttgtactttaaatgtaaattcactttgtagaaatgagctatttaaacagactgttttaatctgtgagaatggagagctggcttcagaaaattaatcacat

SEQ ID NO: 8841 - DNA, 418 bp, Homo sapiens
  misc_feature (1)...(418): n = A,T,C or G
tctgaggaggaacatcttttcatgtttcttggccatttgcatttcctattatgaattgcttttgcccattttcctttttttagtgatgaaagtctaatgactaccttctcattgtataaaaaacacagttctttgaatagagagacccttttctccaatgctaccaatcacattccacttaccacagtttaacatacatcctctagtcacctttccgtacgaatatacatacacataaaaacactttttacataaataggatctcatattctgtagctttttaaaattttggtctcaaaaaaagataacaggtctttaaatttctttaatggttgaatatgattaaatactatgaaaatgccattatttattcccttaattnttttcctctcgctattacattgccaaagtaaacatt

SEQ ID NO: 8842 - DNA, 408 bp, Homo sapiens
aattctggaaattcaacaaataaataacacaggggaaggaaaactgtattccataaaatgtttgttacaaatgtttgccatagccttgtcgaagatgttgaaagatcagttcagtgaatcatgtatggtacatatacctgatcattgtcattcaggggcacaggagaaattttagctactaggagaaatgtttatggctgtgaaatgggaaaatatgcaaaactgtattccacaatagtaattgtatttaaaaaacgcatgtatgtggctgaaggttgaaaggagatactcaggaggctgaggcaggagaatggcgtgaacccgggaggtggagcctgccgtgagccgagatcgcgccactgcaccagcctggcggacagagcgagactccatctcaaaaaaaaaaaa

SEQ ID NO: 8843 - DNA, 415 bp, Homo sapiens
  misc_feature (1)...(415): n = A,T,C or G
ccgagataaccactcaagggggagcaaatttggatggatttacgacttcacaggcattgtgaggaaagagcattttccaaggctgttttgataaccctggggtgataagcagtgagccctcacacacttactttgacaatttcacatgcacttgtacttcattatttccctcttcaagagtcgtttctattctagtttctgccccatcccggggaatcctaaaggagaattaattcatctaagtaatctcaaaaaactgtaggaagggtgctctccctgagaagcttctcccacagtgctttggtgctgttaccttgaggtggtttggacagtcacggaagttttaggctgtgcatagtgatcatctggtaattntaaggtctttatcatttaaagaaacattcctcagtgtacn

SEQ ID NO: 8844 - DNA, 448 bp, Homo sapiens
  misc_feature (1)...(448): n = A,T,C or G
gggccggccnnctcnaaaagaacctagaggcgagtacanccgnggaattattggagaaatcttgcctataattctataaagagaaatgacattccacaaatgtcaagcatatcttttttacacagattatgcagagtgaagagttgtatcttatcccgttagtacagtatgtaatagtgggtctgctgctactttctgttttaaggtgtgaggtaacaattcaatctcttcttcaaatcaaaatgagaattctctggaataacagattcttgtttggtaaattattcacttcccttaattttatcttgccttgtctcttgccatatttgctgtttttatggataaataagatttatggtttagtacttgtgtctttatggcacaggttcaatttctacagtgaaaatggcataggttgcaggaaagaatttctgcatctggtacatgg

SEQ ID NO: 8845 - DNA, 463 bp, Homo sapiens
  misc_feature (1)...(463): n = A,T,C or G
cgccccccccngnnnaatagatattcgtagtccgtgcggaggaactccacctgagcccaggaggtcaaggctgcagcgagtcatgatcgcaccactgtactcatcctgggtgacagagctcttgctctgtctcgcggaggggaaaaaaagagagagagaaaaaagaaaatgacattacccaagtccagtgaagtatgtcggaattccatctttgacactaagtagctgggtaaccttaagccagtggtcctcccacagcctacaacatcagcatcacctgggaacttgttagagaaatgcaaactcttgggctttgccccagccccactaaatgatggttctgggcgtagagccctccaggtggttgggatgcctgctagcttgacaaccatggccttaggcaattcattggagctctttgaactggagtccccccacctggaaaacaggggtgagaatcctg

SEQ ID NO: 8846 - DNA, 456 bp, Homo sapiens
  misc_feature (1)...(456): n = A,T,C or G
tactagaacctccggaangtganggacctcctgaagcacaaagagnngangacagtccaagcactagtggaggaagttccgatggagatcaacgtgaaagtgttcagcaagaaccagaaagagaacaagttcagcccaagaaaaaggagggaaaaatatccagcaaaaccgctgctaaattgtcaactagtgctaaaagaattcagaaggaacttgcagaaatcacattggaccctcctcccaactgtagtgctggacccaaaggagacaacatttatgaatggaggtcaactatattgggacccccaggatctgtctatgaaggaggggtgttctttcttgacattaccttttcaccagactatccgtttaaaccccctaaggttaccttccgaacaagaatctatcactgtaatattaacagccaaggtgtgatctgtctggacatcttaaagg

SEQ ID NO: 8847 - DNA, 417 bp, Homo sapiens
gtccaggtggctgagccactgctggtgaagctggtctcggagctgacaccactcactgtccacgagggcgatgatgccacgttccggtgtgaagtctccccaccagatgccgatgtcacctggctgcgcaatggggccgtcgtcactccagggccccaggtggagatggcccagaatggttcaagccgcatcttaaccttgcgaggctgccaactgggggatgcagggaccgtgactttgcgggcagggagcacggccacaagtgcccggctccatgttcgagagacagagctgctgttcctacggcggttgcaggatgtgcgggcagaggaaggccaggacgtgtgtctcgaagtggagacaggccgagtgggtgcagcgggggccgtgcgctgtgtgcgaggtgggcagcccctt

SEQ ID NO: 8848 - DNA, 449 bp, Homo sapiens
  misc_feature (1)...(449): n = A,T,C or G
nactgatgaccatcttgaagngcgtnggaanncgaaccattgtcccccagtaagtctgcagagctgtgaaatgcagacaataacccttccctgcctgaaagagcacttttctggggagcccatgggagtcaggagcaaaagcatctgtcaaacaagtagatacccagagagtcacgtgaaatcatttctatgcctctgacagacgcttcttgagcgaagtttctgccctgagcccgcctgaccccttaggctgggctcagtaccctaccttgtcttcccaccagccgcctccctccatcaagttcctttccacgtctgcttgtgcccctgttgtccctcagtttgtccaccctcctccaatcttcccctccccaaacccatgactgatcagtggcccccaacctatgctcccacctccatgcaggtcttgggccctcggctgacctccn

SEQ ID NO: 8849 - DNA, 467 bp, Homo sapiens
  misc_feature (1)...(467): n = A,T,C or G
aaaaacctgatncccctcgnnnaactcgagatcactagtccagngcggnggaattcgaagcacgtgctgcagagccaccttggtctgagcacctgaggaccagcccctcctccctcagtgcgggtcatctcttgggggattttcttaaagtgaagaaagggggtggggaaccatattgcccctccctcccccatcaaacttccttcatttaacttgctataaaatgagtcatataaagaaactctatatgggtgaggtatatcccacttctgtgaaaacattacaaatcaaaccgcttctctcagtttatttaagatgcttttgttgcgagcggagctctagagtgaagcctcctgtgtgtgtgtgagataataacaccttgtaactcattacagctgggcactatttacataaaccagagctgagccaggcaggaatttgctgattaatttatttttaatggagtg

SEQ ID NO: 8850 - DNA, 453 bp, Homo sapiens
  misc_feature (1)...(453): n = A,T,C or G
ntttgaagcccttatggatngatcttcgcacagncnggnggaattctgggttcccagctggttttctggggaatgtggagcaggcgccggtcccaccgtttgtcaggccgaggtctgtgcgagcagataaagtgaggggctgagggcctggaacagctgtggcgggccagactgactgggagaggctgataagagcccagaaggagcccaggcggtcggcgtggcagcgccagaaatctgacggggtatcacgactggcaaagaaagttaaacacggccggatcgggggatggttggcggacctgcggagaaagataatggtaattgatggaatcaaagtcgcagcacagccttgtgttttcttggcaatgaattcccccacccctccccagtttctaaccccctggcattcttagagcccaggatgccccgtgagcaggctgcacactcaga

SEQ ID NO: 8851 - DNA, 481 bp, Homo sapiens
  misc_feature (1)...(481): n = A,T,C or G
aggggaccnnnaaactgagacaactgagtacgctgaggaagngcggaggaattcctctggggaaagagagcaagagagcacaaccaaataggcaatctataaaagactaagaatcagagtgtcaactaaagtgtcaaataacattaaatgctggaaagtaacggggctgagtgcagtggctcacgcctgtaatcccaacactttgggaggccaaggtgagaggatcactaaaggccaggagtttgagaccagcctgggcaacatagtgagacacccatctctacaaaaaaaaaaaaaaattagctgaatatggggccatatgcttgaaatcccaaaaactcgggaggctgaggtaaaaaaataacttgaccctggaaattcagggctgcagggagtcatgattgcaccattgcattccagcctgggtgacagagtgagaccttgtctataaaaagaatatattattattaaaacagcgctg

SEQ ID NO: 8852 - DNA, 415 bp, Homo sapiens
  misc_feature (1)...(415): n = A,T,C or G
cacgccgcggtcctcgtcgtgtgaagtaagaactctgctagagaggaaatggctgcttcatcatcatcctcctcagctggtggggtcagtggaagttctgtcactggatctggtttcagtgtctcagaccttgccccaccacggaaagcccttttcacctaccccaaaggagctggagagatgttagaagatggctctgagagattcctctgcgaatctgtttttagctatcaagtggcatccacgcttaaacaggtgaaacatgatcagcaagttgctcggatggaaaaactagctggtttggtagaagagctggaggctgacgagtggcggtttaagcccatcgagcagctgctgggattcaccccctcttcaggttgatactgcctggatggtcacctctggtgcgcagcan

SEQ ID NO: 8853 - DNA, 462 bp, Homo sapiens
  misc_feature (1)...(462): n = A,T,C or G
cttcgagcccctttttcgacgnacgcctagtccagngcggaggaattcgtgcatcctcatgtccccaaaccagtggttccccaagtgtggtcctgggagcctggctggggtcccaggggcacccctgagcacctccctgctctccttgcctttcagctgacctgatctccagcttcctgctcatcaccatgctcttcatcatcagcctgagcctactgatcggcgtagtcaagaaccgggagaagtacctgctgcccttcctgtccctgcaaatcatggactatctcctgtgcctgctcaccctgctgggctcctacattgagctgcccgcctacctcaagttggcctcccggagccgagctagctcctccaagatccccctgatgacgctgcagctgctggacttctgcctgagcatcctgaccctctgcagctcctacatggaagtgcccacctatctca

SEQ ID NO: 8854 - DNA, 455 bp, Homo sapiens
cttcgagatcactagtttagagggcggaattctttttcttctgtgcctgattaaattaactgcggtttttaatataaatatttattggtgtgctttgggagaaaaattatcttttcttgaaagaagttatcaaagcaaatttattatcttcacaagttaatgggagaatgtggttttgattctgggtgtttgaattgtgtaaacacacagcttccttgtgtgaagagagttgacctgtgctccttctactgtactttttttattttttaataggaaagtgatgtgcttcagagaagggttcctccttaatgttgaggttttttaaaaataaaaatactgtttttaagctcacaaaaaaaaaaaaaaaataaaagtgaatgcagcttttcaatgttagccacagtgtattttttcacttgtactaaaacccgcgtaaaaggtgacattatgtgcta

SEQ ID NO: 8855 - DNA, 446 bp, Homo sapiens
  misc_feature (1)...(446): n = A,T,C or G
nactgtngacatcttgaaggcgtgggaanncactaaaaagatgaaactatttctttagactaagtctctgctactccagctcatatatatgtcagatctgctctgtagtatttctgacatggagttgttataagatatgtgaaatcacttagaaaataaaatcagatgtgaatagtttagcaggatgaccaagccagatgcagactccttggcctatggcaaagttctgtgccagtgattttatttggagtctgggaactgatagcttgatataaaatcacctggtgtcaattaaatatacaaatctatcttttttaatagaatgaatcttctttgttcaataattgtaacttattatgtcaggtactaaattaacatccttaaggaggtcacaatctaggaggaacatgggcaaacagttacttattttatggcatacgctaact

SEQ ID NO: 8856 - DNA, 457 bp, Homo sapiens
  misc_feature (1)...(457): n = A,T,C or G
ggggaccccccgancttacccttgaaacctccgnncatgcggcttgtanaancannnaaatgnnnaactgctctgaaagctatccattttactttctaagctttcaaatttttgttagtgttttctcttttcctagttttgtctttgggtattgatgtcttttttatttttttactgccattggagagggttttcaggaaggagcagaggctaatgcatgcgtgtcacttactatctttaactgcaagttcaattctaattaatatctattccatttgcatcacaattgattcatgatctcagatgactcacagagattttacctacagctgttatctaggctcctttatctatttttccttcccggatattgtttagattccattggcttacatcgagtagagaacatcagccatacggaacctgctgtgagccttcacttgtacagtccaccttt

SEQ ID NO: 8857 - DNA, 451 bp, Homo sapiens
ccttgaacaatagtagatcattagcccagagcggtggaattccttttgctcattctctaggatagttcttatccagaatgtggtttcaggaattcttttttttagtttgaaaatgaatgtgaaacattttctttggtgtctttttttaaaaaaaaaaaaacccttattgctattttttcgggtttttgtttggttttgttttttgttggttttaccattaagtaatacccatcccaaaatttggcactttgggttaactggggaggcaaataaaatttagttttaatctggggggagctgaatgccctacaacaccttcaaagaaatcggagggtttcattctgccgagcctcatgctgcctacaaaacaccacaatttacctggggttttcaacattttaaggaatgaaaatccaagtagacttgcaagttggaaatgtttctttaaaag

SEQ ID NO: 8858 - DNA, 467 bp, Homo sapiens
  misc_feature (1)...(467): n = A,T,C or G
gaaaaactgagaccntcngaannactggagatcctagtacangcggnggaattcggaaacataggataaacttacttttaaaaaggaagttagtttcatcttcaaatgatatgctccatatgtttttcttcaaccctcagacagtttttcagctgaagtgcctctaaatataaagtaatgggcccaattgttactctaataaagctataataaatacactacaaggtgcataaaagctctgaaaacaaaggtgtatttattatactttttcagatactccacagtgttgaagaaattattatgtattctaaaatttattttgaataaaaagttttaaggatatatcactcaaatggttgcaattcctaaaggcatataaagaaaatgattatataaaattccaggtctgctactttacaaagttaatcatatccctttcccacattgaagtatgatacctctttatn

SEQ ID NO: 8859 - DNA, 442 bp, Homo sapiens
  misc_feature (1)...(442): n = A,T,C or G
attgtangtcatctgttagagcggcggaattcgactatatgccaggtctgctttcagatattcccaaataatgaacagttggagcagtacatggatgttcatctgtatacatgtggaatatgtggagcaaaatttaatttgaggaaagatatgagatcacattataatgccaagcatttgaaaagaacctgagtgattttctactgtactaatgtttagatgatagcagataaaacaccaaagcaaaggatatgagctatttaggaattgattatataagatgatttgttagaaacaaatttcaaggcccttttaactttaatatttttgtttaggattttaagtatctacatttaggtattaaatgtttatcatttttgttgtttcttaatagaattatttgtttttagtttttcttagctatgattaaaatttttaaatg

SEQ ID NO: 8860 - DNA, 453 bp, Homo sapiens
  misc_feature (1)...(453): n = A,T,C or G
nattgaagacttgagaccgctgcggggaactccgatagtctcattagcaatgtatgaaaattctagttgctttacagcctcaccaactctagttatcatcaacgtgtctaactagctattctagtaactatgttgagatatccattgtagttttttccttttttgtccccgtaccctaagctcctatccattgtagttttaatttgcattgccctgatgactagtaatgttaagcatcattatatgtgattataagctattgccgagtttcgtagaatatttgctaaaattttttgactattagaaaaagtaggctgtcttatattattattgagatgaaatcttttaatattctgattcatgctttatatgacctaagaaatctttgcaaaactcaaagggtcaaaagatattcttttatgttttcttctaaaaacataataatcttagctt

SEQ ID NO: 8861 - DNA, 456 bp, Homo sapiens
  misc_feature (1)...(456): n = A,T,C or G
ttttnatagaagactattagttcagcgcggtggaattcgtgagaagggggaaccttttagatcttgtaaagatgtcacagagcaaagggaaaagttgtgggactggcaggtacagagagagtgcatgcattgtgacttcagactgaggccagttgggagccaggcacccgggacaaagcactcagccggcaccatcttccccaggctgcttatctgcctgctgggaataatgcagccacagacctgtcagtggtcagagctcaagggaccttaaggggtcatggcatagcacctgagaaatgagcaaagttgatgacacaaagcgtttccattttcatatagattgcaaccgtctagaaagagaagggacaagataagacaggctctttgcttcaagtctgtgactttcacctgccaaccagggtggtgggttatcacccattttggtctgaccaa

SEQ ID NO: 8862 - DNA, 455 bp, Homo sapiens
ccccttgcgactactagatagaaggcctctagtccaagcggaggaagtcttgttattcttcattgacagaatgacttgggctcttgcacaactattcatgcctattctaataaagcattggtgttacttgagcttccttgccttacttggaaaatataaaagccttactgttgattgcccatgttggacttgatggaaaaattaaatatctttcattatgctttacaaaatactgtttatgattcagcaagtttggggaatgggagaggacaaaaaaaagttacatttaatctatgcatttttgccaagccatattgagttattttactactacagacattaggaaactaactgtacaaaagaaccaagtttaaaagcattttgtgggggacatcatttctataatgtgataatgtatttctttgtggttttaaatgataaagacattaagttac

SEQ ID NO: 8863 - DNA, 464 bp, Homo sapiens
  misc_feature (1)...(464): n = A,T,C or G
gcgcgggannttttccatgagctccatatgcattgtgcnggaactcgaacgagtaggagctgggttaagaggaaggtagggaagagtcttgaggaggatggcacgtacggacggttctggttgctgcaagcacttcactacggtcagggcataggaaaggagctctaacttgaaagccatgattgggctgtggaggttttgagaacctcatgaatttttatgcaaaattccatgtacctctgtattctccaatgcagtggttcatggcatcatttgtgggttccaaaaaggacttatggctcctcagaacaaaataaacactgatttgatattcaaagggggagcagaaagagagggcgccagcgatgttaccaggtgctaggccatgcagggcctcataagccatagtaagtggcttgacctcctttattctgaagggagtgggcatcaagggactggagatg

SEQ ID NO: 8864 - DNA, 438 bp, Homo sapiens
  misc_feature (1)...(438): n = A,T,C or G
gggttttaaactagtacttcagatagcgtggaancncgancngactgaaacaggccctggacccttccctcaagtctcaccagttctgctctcccatcaagcttcagatgccatgttgtactgggggaatgtagcccttgtgctccccaccccctacctccacctgagcctcaccctgctgttgagccctgagtggctaggggaaatgggaagaggattgccatggcctggccatcttgttgctgcttggttagatcatatagctaatgaattaggcaggggagctattttttgaagatgatgaactaaatgttgaagacaagtttgagatctgtaaaattttttggctttcacccccaaccagtgaccaaagacttgaccactcaaagtccagctccccagaacactgctcgacatggacaccggtgtgattgaagg

SEQ ID NO: 8865 - DNA, 451 bp, Homo sapiens
  misc_feature (1)...(451): n = A,T,C or G
atgcgtctccccctgaaatccgctagnggngcnagcacagngcgcgcggaantcggntttctctccagcctctcttaggaggggtaatggtggagttgtcatcttgtaactctcctttctcctttcttcccctttctctgcccgcctttcccatcctgctgtagacttcttgattgtcagtctgtgtcacatccagtgattgttttggtttctgttccctttctgactgcccaaggggctcagaaccccagcaatcccttcctttcactaccttcttttttgggggtagttggaagggactgaaattgtggggggaaggtaggaggcacatcaataaagaggaaaccaccacgctgtaaacaaaaaaaaaaaaaaataataaaaaaaaaaaaaaaacaaaaaaaaaaaaactccgatggacgataccattaactagaaaaaaagccccccg

SEQ ID NO: 8866 - DNA, 456 bp, Homo sapiens
  misc_feature (1)...(456): n = A,T,C or G
nattgagnatagtagacatctgtccgngcggtggaattcctgcccctttgtttacagctcctgcctcctcccttgaccacagcctggtttacaaattccatcagctcccagccccacctgccaaagtcccaggtttacaagccacgcttacttgctgtgtctgcgtggaattctctcctctgtcccctccagtctcctcattggagtgacctgaaggtgtggcttcctccactttttctcagtattactttgccttagttttccccaagagggaaggctggaactcttaactctgtaccccttgatagttatttaattctgtttctcctagtggttcacaattgaactgaattgagatggtgtcgggtggctaaggagacacctcacctctccttccccattgtgccgcctttatcaattgcctgttttgttttgtttgttttttaactttccatn

SEQ ID NO: 8867 - DNA, 586 bp, Homo sapiens
  misc_feature (1)...(586): n = A,T,C or G
gggatccccctttgannncccctttcgatcacctatccagagtggtgcaattccacactagggctgttgtacaaaatagtaatgatagccatggaagttttaccttattctgtgagaagtgttcttaaacttattaagtgtctaaactaaggtttagtgcttttttaaaggaaagttgtcccaggattcatcctaaagaaagcaaaagttaattcaactgatccaccaatggaattagatgggtagagttgggttcttgagttttaccaccacttagttcccactgaattttgtaacttcctgtgtttgcatcctctgttcctattctgcccttgctctgtgtcatctcagtcatttgacttagaaagtgcccttcaaaaggaccctgttcactgctgcacttttcaatgaattaaaatttatttctgttaaaaanaannnnnnnnnnnnnnnnnnnnnnnnanannaaaaaaaaaaaannaaaannnnnnnnnnnnnnnnnnnnnnnnnnnnnnnnaaaaaaaaacccccntcaaaataaaaggccccaaaaacccccaaacccccctcttcgttctttttatcc

SEQ ID NO: 8868 - DNA, 588 bp, Homo sapiens
  misc_feature (1)...(588): n = A,T,C or G
agggcgccnnntttganncccctttcgatcactagtccgagtggngcaattcgggagacagggaggaaggaagggctggggaggcggagagacagaccgagcgagcgacacacggacagcgactgacagcgacagaagcggggcccgggacttgggagacggcgaggttgcggggcgcgaggtgctgggcacggagctacagggacggagagccgagagccggggtcgcagcgtggagggggcgctggctgctgccgaagctgggagagcggcgtggcggaggcggagcggagccgagcgaggggccagcacggaacgctcccttggagaaacctgtttatgcaccctcctgcaatcccaccacctgcccaggccaagtgagcccctctccgctactggtgtttcataatgctgggagctactttgatttcatgcattgcccttcagctgccatgttatgaggacacttggagaaagctacaggagaggaactgaggtctcctgccatcagccacttgagtgagcatgggagtggattctccanactccagttaagacttgagatgccacagtggcagcactagctga

SEQ ID NO: 8869 - DNA, 479 bp, Homo sapiens
  misc_feature (1)...(479): n = A,T,C or G
gacctgagaccctcgcagngcactgantatctcgaaccngcacgnggncgagagattgtctgtactgatagcatctaatggatccctgctgaaggtggatgtgcagggagagattcggctcaagagcttccttcctagcggctctgagatgcgcattggcttgacggaagagttttgtgtggggaagtcagagctgagaggttatgggccaggaatccgggtcgatgaagtctcgtttcacagctctgtgaatctggacgaatttgagtctcatcgaatcctccgcttgcaaccacctcagggcgagctgactgtgatgcggtaccaactctccgatgacctcccctcaccgctccccttccggctcttcccctctgtgcagtgggaccgaggctcaggccggctccaggtttatctaaagttgcgatgtgacctgctctcaaagaggtaagagtgaggctggcctggctgagttcagc

SEQ ID NO: 8870 - DNA, 452 bp, Homo sapiens
  misc_feature (1)...(452): n = A,T,C or G
attganncccattgaagacccctagtccagngcggnggaattacaagatgaccgcaatccccttgtgagtgactaaaaaccccactgtgcctaggacttgaggtccctctttgagctcaaggctgccgtggtcaacctctcctgtggttcttctctgacagactcttcccctcctctccctctgcctcggcctcttcggggaaaccctcctcctacagactaggaagaggcaccctgctgccagggcaggcagagcctggattcctcctgcttcatcgattgcacttaggagagagactcaaagccctggggcccggccctctctgcatctctctctgatctagctagcagtgggggtgtcaggacagtgaggctgagatgacagaggtggtcatggctggcacagggctcaggtacattctagatggctgtcaggtggtgggtagctttag

SEQ ID NO: 8871 - DNA, 453 bp, Homo sapiens
  misc_feature (1)...(453): n = A,T,C or G
nattgacgaccactagaccaccgcggnggaattcgagacacagtgaggttgacttgtttaacattacaaagctcattttcagcacatctaagatttgaagcctagttcatttctttttcaactttcctattctttgcagaattagcacaatacagggaagctcctacagcaaataggaaacaaagagaccattagttttaaaaagtcaaagaaggtagtgctatcatgggcatgtacacctgatactccaaaggcttatgcagcagtagcctgtagattcttgggtaatgatgagccatcaactgtgtacaagccctgtgaagagataataataacagcaacagtgaacactcgctgatggttttactctgtgcctggctctattataaattcttcatatgctgtttctcactgtatcatcacaactcctatagataaggctctgagttggan

SEQ ID NO: 8872 - DNA, 454 bp, Homo sapiens
  misc_feature (1)...(454): n = A,T,C or G
attgannccccattgtaggacactagtccagngcggtggaattctgtgattagtgtctcatgtggaaccatggcatggttattgatgagtttcttaaccctttccagagtcctcctttgcctgatcctccaacagctgtcacagcttgtgttgagcaagcagtagcatttgcttcctcccaacaagcagctgggttaggaaaaccatgggtaaggacggactcacttctctttttagttgaggccttctagttaccacattactctgcctctgtatataggtggttttctttaagtggggtgggaaggggagcacaatttcccttcatactccttttaagcagtgagttatggtggtggtctcatgaagaaaagaccttttggcccaatctctgccatatcagtgaacctttagaaactcaaaaactgagaaatttactacagtagttagaatn

SEQ ID NO: 8873 - DNA, 461 bp, Homo sapiens
  misc_feature (1)...(461): n = A,T,C or G
cactgagnaccctggnactgatgacactagtaagngcgnggaattcccggctcgaggctggaagaggatcctgggcgccgccaggttctgtggacaatcacaatttgaatccaaggagggtctgtcctgttcgggctgctgctcgtcctggctgtcttctgccattcaggacatagcctgcagtgctacaactgtcctaacccaactgctgactgcaaaacagccgacaattgttcatctgattttgatgcgtgtctcattaccaaagctgggttacaagtgtataacaagtgttggaagtttgagcattgcaatttcaacgacgtcacaacccgcttgagggaaaatgatctaacgtactactgctgcaagaaggacctgtgtaactttaacgaacagcttgaaaatggtgggacatccttatcagagaaaacagttcttctgctggtgactccatttct

SEQ ID NO: 8874 - DNA, 224 bp, Homo sapiens
agctggtttcatgcccttctcaaatactttccaggactcctcatcacatgctaaaaaaaatctatactctttggactacatttgaagtcctttattatataaccccattctaccttatccactgtcttttctgggactcctctcaccactcattcagagcctcaccccagtgtctgttgctgcttcctctcatataactcatgacgccaaaaagccttacaata

SEQ ID NO: 8875 - DNA, 445 bp, Homo sapiens
  misc_feature (1)...(445): n = A,T,C or G
atggtgtttaacatgaganccctacgaagacgttggaattcgcacgtccttccccaggagccggtgagaagcgcagtcgggggcacggggatgagctcaggggcctctagaaagagctgggaccctgggaagccctggcctccagactggccaatcacaggcaggaagatgaaggttctgtgggctgcgttgctggtcacattcctggcaggatgccaggccaaggtggagcaagcggtggagacagagccggagcccgagctgcgccagcagaccgagtggcagagcggccagcgctgggaactggcactgggtcgcttttgggattacctgcgctgggtgcagacactgtctgagcaggtgcaggaggagctgctcagctcccaggtcacccaggaactgagggcgctgatggacgagaccatgaaggagttgaaggcctaca

SEQ ID NO: 8876 - DNA, 397 bp, Homo sapiens
aatctttctccaagaccatgttttactgttagtcctccaaaatgagtagagtcatatcgctgttaatgcaacttgttatacatgcttggcaaaaaacccagaaatataaacatttaaattgtgtgggtaattttgtatgctattaaagtgagtgtgcatcttattgaaggtgagatgggaagtttgaatctgctgttctctcatagtatgagcagttcaccatcctgattcctgtgttttaaaattttttttttaaaagtatggctttagctactttacctagtgctcagtgaataaatggctgtctgtccacactttgttggactaactggcagggtctgtctctaaaataattccttcctatagaatagtggtctgcaacatttttggcaccagg

SEQ ID NO: 8877 - DNA, 577 bp, Homo sapiens
  misc_feature (1)...(577): n = A,T,C or G
ccttagaaacactgttcagagaggngcaattcattagaaaacctatccagagattcgtaatacagntcttagaaccacagactatccctctttttagagcattctgatcaattgcaagtacttccacttcttccctaaatgcgctttgagtgttttccacctcagtagccttgcacacatcattacttctgcatccttctttgtgaccaagtgaatacctacctacctcttaagactcaacttcagtgattctgttttcataggctttttaaagcccttttcagtcaaattagatgctcctttgttctggtcctttactcttcccctcccatgttgtcgcactgatcacactgctttgtaattattttctttattgttggtaaactccatattttaaaaatttacctgtatacatagtgcttaatgcatggtaggcccttagtaatgtttttgaattaatgaggcatgattctaatgccaactttgcacaaaaagttgttctattggattcaaactgctatccctctataccgtggctgcaaggcatatagnatatatgccatcctgagaggagaan

SEQ ID NO: 8878 - DNA, 364 bp, Homo sapiens
ggattaagaatttttattttggacctggggtggtggctcacgcctgtaatcccagcactttgggaggccgacgcgggcggatcacctgaggtcgggagttggagaccagcctgaccaacatagagaaaccccgtctctactaaaagtacaaaattagccgggtgaggtggcgcatgcctgtaatcccagctacttgggaggctgaggcaggagaatcgcttgaacccgggaggcggaggttgcagtgagctgagatcacgccactgcactccagcctgggctcgaaactccatctcaaaaaaaaaaaggatttttattttgatacagggctgggtttaaatccaagggaagtctttaaaatatg

SEQ ID NO: 8879 - DNA, 472 bp, Homo sapiens
  misc_feature (1)...(472): n = A,T,C or G
ggggggccccgnntnggggngaatgagaccctagatttgagatcattagtccgtgcggtggaattcctgcatttaggcaggcactttaataccaaactgtaacatgtctcaactgtatacaactcaaaatacaccagctcatttggctgctcagtctaactctagaatggatgcttttgaattcatttcgatgtcaccacttttcgctctttaaaaacactgggtcaggtgaggacttgtttcagttcctataactaagtaaagggcggctttctcataacaaaggaaaaagtcttccccaaagatgaatttaagtctccacttttttctatacagaaaactcaaaactcaaagtttcaaagaaccaaaggactcttcctctgggcaccacaaacttccccttcctccactgagaagactgtctctcccgcaggaccctgaattattgaaatcgaaggctgactcctttctg

SEQ ID NO: 8880 - DNA, 461 bp, Homo sapiens
  misc_feature (1)...(461): n = A,T,C or G
nattgagacctgagnncgtgcggnggaactcccctggtggaggcggcttggcggagattcggagccgtcagcagctcagccagacgtccaggatcccaccccttgcaaaagaccaggccgtggaagccatgttcccaccagccagggggaaggtgcgggaatgcagatggctgagtaggtcatattgaggacatggcagcgcagctctggtaaaagagtgacactctggataatggagctgctctcgtttgaggatgtggcgatgtacttcaccagagaggagtggggccacctcaactggggtcagaaggacctctaccgagatgtgatgttggagaactacaggaacatggtcttgctgggtaggacacggcttgaagatagggctttgtctgtgttctgagtgtctgtgcaagcccttagtcccttatctgcaattccagaatcagaacaagcggaga

SEQ ID NO: 8881 - DNA, 464 bp, Homo sapiens
  misc_feature (1)...(464): n = A,T,C or G
atttgacaccttcgngttttgacaccatagtacagngcggnggaattcgcaagtaggctgctgcctcatctgaaaattcatataacaatatttttttcctaagtttgttgtgaggatgaattaaaagagctaaagtccatgcgttgggagaaccctagtgtgtttagtagataatccttccaaacattgattccatgggaggggataaatgataaaaggtaacaatagctaagagtgggagggggaccttgtggatattgaaagaatcagagaataggaatgatgttgggaggatgatgttatctctgtctagctttttaagtgctctttgtcctcaaggctatgtattgtaaatgatgagctatttgtgcggaatgccagttctgaagagatccaaagagccttcgctatgcctgcacccacgcctttctccatcccggtgcccaccctctttccagagcagg

SEQ ID NO: 8882 - DNA, 457 bp, Homo sapiens
  misc_feature (1)...(457): n = A,T,C or G
nactgagaccctaggcttgagcgncgatttacaacaccttgtccttggggaaaatttatcttgcagaatagaagatgagtggttatttttttgtgtgtgtgactgaaaattattgaaactgaaaactaaaatttttaaaaataaaaagacaactactggcgcggtgtctcaagcctgtagtcttagcactttgggaggctgaggttggaggattgcttgaggccaggaattcaagaccagcttggcaataaggcgaaaccccatctctacaaaaattgctaaaaagtagctgggtatgatggtgcatctgtaatcccagcaactctggatgattgcagctactctgggaggttgaggcaggaggatcacttcagcccaggtgtttggaggctccagtgagctatgaattgtgccattgcattcctactccagcctgggtgacatagcaagatcccat

SEQ ID NO: 8883 - DNA, 447 bp, Homo sapiens
  misc_feature (1)...(447): n = A,T,C or G
gtgagggnngnnattgaaaccntnnnnattgtagacattagtcagtgcggtggaattcgccagtggcttattaattccgatactagtttgctttgctgaccaaatgcctggtaccagaggatggtgaggcgaaggccaggttgggggcagtgttgtggccctggggcccagccccaaactgggggctctgtatatagctatgaagaaaacacaaagtgtataaatctgagtatatatttacatgtctttttaaaagggtcgttaccagagatttacccatcgggtaagatgctcctggtggctgggaggcatcagttgctatatattaaaaacaaaaaagaaaaaaaaaggaaaatgtttttaaaaaggtcatatattttttgctacttttgctgttttatttttttaaattatgttctaaacctattttcagtttaggtccctcaa

SEQ ID NO: 8884 - DNA, 558 bp, Homo sapiens
  misc_feature (1)...(558): n = A,T,C or G
cggttcccccnatcgatcacattgagngccggtcagacccaagcatcaacttgcanatctgccattaaactgctgtgcgacttcaggcatatcactgccttctctgggcttcagtgtccttttcatacctagaagtctgcggtctgaggctctttgggttcagacacactgttctaggcttctgtaggggaccttgtgatctgccgngcccctcctccctgttcttttctgtcctccccaccccaccctcagaagctgcttgctctgcccccaggacaggagcttgacggatgaggtgcagccagccacccaggtgccatttccagtctgacttccagaaatgtgcaccatgtcctagagcacagacccattggctggagcctcctgggagggttcaaaccatcagctctatgagaaatgcccagaaaggctttgccgactccatccgtctgtggaggctgcctgcctccggngtgggatgggtggttctcctccaattcagacccaagaggagcccccgagggcatgtaccttgtgggagcagctaagtacccttgg

SEQ ID NO: 8885 - DNA, 449 bp, Homo sapiens
  misc_feature (1)...(449): n = A,T,C or G
catcgattggtgcagcatcgcacangcggnggaantnctntgtggggcctgtccagagctgggagggtgcatgccctttcttcacggttctcattgtcttgcagggacaaggacatgaaagagtctcgtgcacaatatcaaactgcaactgtgacaccggcttccaaggagaagctcagagtttttacagcaggggtccccagtgctatactgcacacccagatactggtctgtggcctgttagggactgtgctgcacagcaggaggcgagcagccagcgagcaagcatgaccacctgagtcctgcctcctgtcagatcagcagcggctttagattctcatagcagcacgattcttatcgtgaactgtgcacgcaaaggatctagggtgcacactcacagatggtgcctgatgaactgtcactgtctcccatcacccccggatgggaac

SEQ ID NO: 8886 - DNA, 453 bp, Homo sapiens
gtttggtccccattgaagacccttagtcagtgcggtggaattccaaccatgagataatacaagccagggagaggcttgtattacatgacaggtgtaattagtctgctgagccagctttacccaatgaagggcatatgtgttagagagattagctaagagtagaaattcgagcatagaggccaggtgcggtggctcacgcctgtaatcccagcactttgggaggttgaggcaggcgtgtcacttgaggccaggagttcgagaccagcctggccaacatgatgaaaccccgtctctactacaaatacaaaaattagccgggtgtggtggcacacgcctgtagtcccagctactggggaggctgaggcagcattgcttgaacccaggaggtggaggttgcagtgagccaagatcacaccactgcactccagcctgggcgacagagggagacactgt

SEQ ID NO: 8887 - DNA, 567 bp, Homo sapiens
  misc_feature (1)...(567): n = A,T,C or G
ntagannacctatgnanacccttcnnnnnnncaattcggcagccagcgcaggggcttctgctgagggggcaggcggagcttgaggaaaccgcaaatatgtttttttctctttgaaagatagagattaatacaactacttaaaaaatatagtcaataggttactaagatattgcttagcgttaagtttttaacgtaattttaatagcttaagattttaagagaaaatatgaagacttagaagagtagcatgaggaaggaaaagataaaaggtttctaaaacatgacggaggttgagatgaagcttcttcatggagtaaaaaatgtatttaaaagaaaattgagagaaaggactacagagccccgaattaataccaatagaagggcaatgcttttagattaaaatgaaggtgacttanacagcttanagttagtttacaagttgtaggtgattaaaataatttgaaggcgatcttttanaaagagattaaaccgaaggtgattaacagaccttgaaatccatgacgcanggagaattgcgtcatttaaagcctagntaacgcatttact

SEQ ID NO: 8888 - DNA, 466 bp, Homo sapiens
  misc_feature (1)...(466): n = A,T,C or G
gcgcgggnnnttttnnccttgtattgcatgtgcattgtgctggaattcgtctgtcagtcgtagaaagtgaaaggaatttaaagcaggcgggaatgtaatggaacacacaaccaccactacacattttttaattactgagtataatgatgattgataggcttttgaaaatgtttgtcttggtaaactcactggtacctatcaatgtgtaggcaacattagtttattttgccaaatgtcctcttacagcatggaaactataaaacatctgctgcagcaaatctcaaccttgagtgtcatgagattaattacttttattaacactttccataagcatgtaatatatgacatataccaggaaagtcagcatttggtctcatttaggaatttgaaattttaaaaattatttaagattactagaaattgtttggtaaagaagagatgattatttttttctgtagcctattgn

SEQ ID NO: 8889 - DNA, 467 bp, Homo sapiens
  misc_feature (1)...(467): n = A,T,C or G
cggggngnnnnttttnatcgaaccctttccgattgatggacttcatttgattgaaattaaattcttaatttttccctgctacatacagcagctgaaatctttagcctattttgggctgcttcacatctgtctcaaacatgtactttagagacttgactagagtttatacaatttggtatttattcctctatatctcttctttacgggtactctaccatcattttctagttgctatggcaggcacaaatcattcttttttttttgaaacggagtctcgctctgtcgcccaggctgacgtgcaggggcgagatctcggttcactgcaacctctgcctcctgggttcaagcgattctcctgcctcagcctcctgagtagctgggactacaggcgcccaccaccatgcccggctaatttttgggtttttaggagagacggggtttcaccatattggcctagctggtctcca

SEQ ID NO: 8890 - DNA, 580 bp, Homo sapiens
  misc_feature (1)...(580): n = A,T,C or G
ccttcggtaccactgtncagagaggaggaattaatcgagatngcgtttctactcaccacgtgaaataaactatcaactgtataaagagaacaaagtgattttagaataaaatgcaggaaaaacttttttaaagatgttagtcttgtagcgtgaataaatttgccatcaccttttgtgtggtggcctggcaggtcatatacttttttttggcatatacctttttaaagactgtaattagtgcagtaacagtggggttttttttgtgcaactcttctaaaaacattcataatgcagtcatgtttatttttttctgttaaaatgtttttgacagttttaagagcagtcttttggctctgaccatttcttgttctgtttccaatgaaatcaataaaaaaaaagaagtactttaaaaaaaaaaaaaaaaaaaaaaaaaaaccgccccgttaaattaaaaggccccgttaaaccccccgaaccaccctcaatggggcttttaagtggccagccatttgtggtggcccctcccccgcctttctttgaccctgagggcccattccactggccttcttaaaaaaggaga

SEQ ID NO: 8891 - DNA, 442 bp, Homo sapiens
  misc_feature (1)...(442): n = A,T,C or G
attgaagatccctagtcattgcggtccacttccacttggccgatgggaacggtctgtcacagtctgctccttttttttgtccgccacacgtaactgagatgctcctttaaataaagcgtttgtgtttcaagttaactcaggttcttgtctgggttatacgactagggtttctccaggtttcttgagtggctcccaggcggtcaccgatcctccgcactctggaaatcctggccgtgcggtcttgccaaacgaagcttttcctttttgaggcggggggtcgtgtttgtcgattgcaccctctaccccaaacaaaacacaagcgtagtaggaatgttttattagcaaagaagtttcagagagtgggtggatcagggctctatcacttggtccccacctcaccttggtggggccagagtgagccccttcctgccacagtcacccn

SEQ ID NO: 8892 - DNA, 465 bp, Homo sapiens
  misc_feature (1)...(465): n = A,T,C or G
aaaaataacctgataccctagccgtgaatgcattccaagagcacgagtggacagaagcagggaggccccaggaggggacctcaggcatccagggtgggtgaggagggacattactttgtcaggacatccatgactcactactcagcatgttgtgctcctgagggaggatgaggttggagatccaggaaccaaagacctgggccacccccagcatggcagtcccatccaggagactcagagtgaggtggtcaccctggtcagtccactcccagggagtgacatggcagctttaccggctgggagagctacttctgggctgacactctggccccatacagcacatggcagggatctgctgggagctgagaacagagccttgactggtgggcaacaagcagaggatcccaccttggcctcaggggcttatcagtggcctggctctgttgagaagctgcaaggctcatn

SEQ ID NO: 8893 - DNA, 490 bp, Homo sapiens
  misc_feature (1)...(490): n = A,T,C or G
cccccttgaaacctanccagttggagacttatctctatcaaacttcttcggaccacagggcctctcacatggttgacaggtttcacagggaaatgattgtactatcccactgtttactaattcagtctgactgtcatccatgctgatatgctttcattttgctgtgatagggagagaatgcacatgtgcttctcggaatttgtgctgtcactggagcatttatttgagtgtctataatgtattcagggttgtgctaaaacctgtcagtagagaacaataagaagaagtcacaatctagttgtgctgagatatattcagttaggtgaaagaggtgctcttcaagccatatgactagatgagatcaccggtgaatatgtacagacaggggagaagaaagtgaggaccatcaagtgataggagaccaaagagtcttgtcaaggcatgccaagacaaggtccctcattctccagtcaacatagtggagaacgta

SEQ ID NO: 8894 - DNA, 469 bp, Homo sapiens
  misc_feature (1)...(469): n = A,T,C or G
cgcgccgaatggagaccatctgacaatggagngctattcgaccttcgaacctctaacattggttccaattcagaccaaaatgataggaggtggattttcttacagacaaagagtgcgactggctcaacaattaccacctgacctgcagggatgtgattgggaaggaattgcagaaacagggccgccaggaagctctcgagtggctcatcagagagacgcaacccatctccaaacagcattaataaatacctccccggttttgtttttgtaaaatgctctggaggaaggaagaaacgtggcagatccctgacatctttcccctttcctttccttcttccctacctcccctttttactttagactttaagaagaacagaaaatcttcttatcctctttgatattttattgcaaacactcagtcttttatgattttttaattgttgagaacaagccaagaataaaattgctg

SEQ ID NO: 8895 - DNA, 459 bp, Homo sapiens
  misc_feature (1)...(459): n = A,T,C or G
catgatgactaccagcnctcgcggnggcanncgnttttttgcaagtaaaagacaagaatcatatcacaaagctattttaaagagaattttctcttctgtcaataatcctgaggaatatttgccttaaaaagtaaaagcctatgtttacaaccgagtacaccacagagggagggggaggacattcgtagaagaaaactgacaagaagagaggatggaaaactagtctatcaaaacacttctgtccagacgtgtcaccagatgcatagttcagacaggattgcgcacaatctccaggttttcttcaacttcttcctattcataggaaattcaatcttcatttcatttttggtaactttccagggttagaaatactcatctccaacagaattctaaaacccatagaagaaatctagacacttcctgttacgtcttatttcccttttctgttactaatttccc

SEQ ID NO: 8896 - DNA, 465 bp, Homo sapiens
ttaacattgatacccttgcagtggagtgccattcctacagcagtggggccttttatgagcgaaaaatcgtcaccacggatctgcgtcagcgctgtaccgatggccacactgggacctcagtctctgcccccatggtggcgggcatcatcgccttggctctagaagcaaacagccagttaacctggagggacgtccagcacctgctagtgaagacatcccggccggcccacctgaaagcgagcgactggaaagtaaacggcgcgggtcataaagttagccatttctatggatttggtttggtggacgcagaagctctcgttgtggaggcaaagaagtggacagcagtgccatcgcagcacatgtgtgtggccgcctcggacaagagacccaggagcatccccttagtgcaggtgctgcggactacggccctgaccagcgcctgcgcggagcactcggaccagcggg

SEQ ID NO: 8897 - DNA, 508 bp, Homo sapiens
  misc_feature (1)...(508): n = A,T,C or G
aggccggcgcggnnngnnaattgactgacgtctctagtaccgngcggtggaattcgaaggaggtgctggcagaggaggagtgtccggcgttggggacccaggagcgacttagccgtggtggtgatgccaagtccccagttcttcaggaaaagggcctgcaggcctcccgggctccagccactcctagggatgaggacctggaggaggaggaagaggaggaggaggatgaggacgaggatgatttgctgacggctgggtgtcaggggctggtgacgtttgaagatgtggctgtgtacttctccctggaggagtgggaaaggctggaagcagaccagcggggcctctaccaggaagtcatgcaggagaactatgggattctcgtgtccttgggatacccaattcccaagcccgatctgatcttccggctggaacaaggggaagaaccttgggtcccagatagtccccgacctgaggaaggagacatcgtcactggcgtctacacagatga

SEQ ID NO: 8898 - DNA, 457 bp, Homo sapiens
  misc_feature (1)...(457): n = A,T,C or G
tcagatcactcgagcctccgcggnggcannnnnactctgagncttctgcttttaggggcgcagcctctgtggccctgtgacctgccttttgttagcctagaaatgggactgttgacatttagggatgtggccatagaattctctctggaggagtggcagtgcctggacactgcacagaagaatttatataggaatgtgatgttagagaactacagaaacctggccttcctgggtattgctgtctctaagccagacctcatcatctgtctggagaaagaaaaagagccctggaatatgaagcgagatgagatggtggatgaacccccaggtaggtgagagtgaatacaacagatgacctggatgagaggtccaacgtcaagaagaaagccagtctttaaagtgatttggaaagctgcattccaaaggaaaccgtttctggaaagcctgacatttaaag

SEQ ID NO: 8899 - DNA, 455 bp, Homo sapiens
  misc_feature (1)...(455): n = A,T,C or G
tttgaaaataggagcatcgcccangcggnggaattccaacaccaatgggaaataaaacttgcagccaattcattaaataatttgtacaatgctccaaactgatttgattgaatttcttccttaaaagtgatagaactgtgtataataaactgaactccatttgttagaaagtgaacaaattggacagttgctttttattgttgttgtttgtattagggaacaatctacatgctaatgaaaggcaggcttgactgattttctttggactggctgattgtcttggtgtcctgtggacttggccttggaacaggaaataattcgtatcagattattatgtcatggatatgcctttgctttcagacaacttgaacagagcagagatttagcaaacagaaaaattaaggacttaaaattctcatcaacatagaactctgctcttcagatgtactctaggg

SEQ ID NO: 8900 - DNA, 493 bp, Homo sapiens
  misc_feature (1)...(493): n = A,T,C or G
gcccttgagaccctatccangatgaggaactccgctttttttttaaaaaaagatgatggaagataagttaacactgtaacagaagaaaggtgtgattgccattatatatttagcaagtatggttatcatcttatatggagcttaaatcttgacttttcatatttctattacattttgggcatttaccactaaccagaccaaacaaccttggtaaggctgagatcttattaatacacttttacaggtaaaatattgacacttataaattctgttctttgacagaacaatatatggtactatatagatctactttattaagtagactaattataactcagatctcctatgtgccttatgatataacttggaagtaagtttgtgaaaaatcaagatatatgtgctgtttggtaaattaactgttttaagcccttctaacacctcactagttatgcactgttttacctcttatttctgaaactctttttatggtgan

SEQ ID NO: 8901 - DNA, 469 bp, Homo sapiens
  misc_feature (1)...(469): n = A,T,C or G
agacttaacattgattcccctttgnagngtggaggaactctctttgcggactacatagcattcaggaaagtacaaaaactaaacactaaatccccaactggccccaaagaccttttatgatgtgagagacaagagttcaccccagattaatttcttttatcattggctttatactctaacatatagatactctctatagcaaaaaagggatgaatggctttcaatattcatttctgtttatttttgtgagggaaaataatatatcaagaaaattttcttccacttagaaagctttaaagctgaagtagaggtgcagtcaagcttggatctgcaggaagaaccactaggccactgagtcatacttgagcttttcttactactgccccaatttctaaattgtgcataaatacaatcactctcaatttttgaagggctaattatctactttgtgggtgtgttttgttttttt

SEQ ID NO: 8902 - DNA, 475 bp, Homo sapiens
  misc_feature (1)...(475): n = A,T,C or G
tggggtgccgnatgttaatgatacctacngatanttnnacctccgnagngagccggaannactgaggacaggagttcaagaccagcctggccaacatggtgaaattccatctctactaattatacaaaaattagctgggcatggtggcaggcgcctataatcccagctactcaggaggctgaggcaggagaattgcttgaccccgggaagtggaggttgcagttagcaaccactccactgcactccagcctgagcgacagagcgagactctgtctcaaaaaaaaaaaaaaaaaaaggctaagcaccctagggtttttttggggaaataaaaactaaactggaggggttggaaaccaaaggggcgggggattaaaccaaaataataaaaatggctttttttcaaccttagtgggggaaaaaaaaaaccctttgtttatttgaacggtttaaaaacccgggggtggcccgttttttt

SEQ ID NO: 8903 - DNA, 553 bp, Homo sapiens
  misc_feature (1)...(553): n = A,T,C or G
cgctcctactactgacgtcgcctatcattctacaaacctcctctaagaacccgatgtgcgctantggcgaccaattaaattttcgaanacctttggnaaanngcgnngaaattnaatttgtaggccatctggccangcggnggaattcattctaaagtacttagcagtgagccatcaggcctaggccctcaaaaatgtgtgctggtactatgttagctgtcaatatcatatagggaggagaatacttaactaggaggcagaaaacctgggatttttattcatggccctgccatcaattagtaaagtgatcttaggcagtttactctttgactttctgttttcttatctgtaaaatgtgatgattataatagatatcaacaaagtccattccagttctgaagtttcatcattctgtaatttggaattctgtaatttggctttggcttcatggagttgacatctgtaaggctctgcagtatcaggtaaaaatttattttgatttgttttgaagatgcagatttcctttgatattctaggggagctctaattagtt

SEQ ID NO: 8904 - DNA, 482 bp, Homo sapiens
  misc_feature (1)...(482): n = A,T,C or G
cgccccccccccccccccccccatcgtcgaccctttgncgtctggtggaattcagaatattgaagatcacttcgaaaaacctgggaaagatataagaaatcatatcgtacagagactgtgtgaaagtaaagaagatggtcagtatggagaagttgtcagccaaattccaaatcttgatctgaacgagaacatttctactggattaaaaccatgtgaatgcagtatttgtggaaaagtctttgtacgtcattccctccttaataggcatatcctagctcactcaggatacaaaccatatggagagaagcaatataaatgtgaacagtgtgggaaattcttcgtttctgttccaggtgttagaagacacatgataatgcacagtggaaatccagcttataaatgtacgatatgtgggaaagctttttattttctcaattcagttgaaagacatcagagaactcacacaggagaaaaaccctata

SEQ ID NO: 8905 - DNA, 484 bp, Homo sapiens
  misc_feature (1)...(484): n = A,T,C or G
tggagcnncttnnaatagaagacattagnccagngcggatagaatncccatcttagaaacagccatctgctataactctttcaacagaaaaccaaaaccaaacgaaatgtctaaggaaaatgttttcttaatgagatgatgtaaccttttctatcacttgctaaaagcagaaaacatgtatcaggtacttaattgcatagagttagttttgcagcacaatggcgttgctttaatggaaaaaaaaaacagtaaaagtgaaatattactgttttaaggaaaactaatttagggtggcagccaataaaggaggttggtgtctaatttaagtgttaaatcaatttctttcattcagttagctctttacccaagaagaagtgaatgatttggagcttagggtatgttttggatcccctttctgataaacccattccctaccaattttatgtcataagagatttttttccccaaatctaaaacaatgtat

SEQ ID NO: 8906 - DNA, 463 bp, Homo sapiens
  misc_feature (1)...(463): n = A,T,C or G
agaaaaaaancctgatgacactgttgagtgccttgaattaacactcttgcttttcatttaaaatcatagctagaagagataagtttcgtaattttctctttttttgcctgtgaattataggggtatgcaaaatttgatatttggaccagaaaaatgttgagggtaattgcagtttatgagacagaaacatgcctccactgacacaatatagtgatcaaaaatttgctcatgtcttctttcagggcaatcatgactcatgcatcagttcttaagaatgacagagatgtccttggaattagtgacacactgattcgactttctgtgggcttagaggatgaggaagacctactggaagatctagatcaagctttgaaggcagcacaccctccaagtggaagtcacagctagtattccagagctgctattagaagctgcttcctgtgaagatcaaatcttcctgagt

SEQ ID NO: 8907 - DNA, 455 bp, Homo sapiens
  misc_feature (1)...(455): n = A,T,C or G
gggccggccnnttttnaaacggagcctagcagcancgtcgnngncannnggaagacggaggccctctttccttgcctaacgcagccatggctcgtggtcccaataagcatctgaagcgggtggcagctccaaagcatgtggatgctggataaattgaccggggtgtttgctcctcgtccatccaccggtccccacaagttgagagagtgtctccccctcatcattttcctgaggaacagacttaagtatgccctgacaggagatgaagtaaagaagatttgcatgcagcggttcattaaaatcgatggcaaggtccgaactgatataacctaccctgctggattcatggatgtcatcagcattgacaagacgggagagaatttccgtctgatctatgacaccaagggtcgctttgctgtacatcgtattacacctgaggaggccaagtacaagtn

SEQ ID NO: 8908 - DNA, 447 bp, Homo sapiens
  misc_feature (1)...(447): n = A,T,C or G
ttcgagaccctaggttnatgatgctgctagcaaagnccggnggaattcctttgtggaggctactattctctttaaatatgggtcatctagacagccaagcttgactgtctgaacccagttatgttccagggagcttgcagtactctctagttcctccactgactgctgtcaccaaaattcctagcccctgccttgtaagatctcttgcttatttatttatttatttatttatttatttatttatttatttatttatttattgagacagagtatcattctgcgatatgggcgcccccaccccaatccttatgttcaatagctatcccccatggcgcaggaggagtctgtgcagaggcgacctgaacatgtggtgtgaaccttccatgaacacgctatcaacatcctcacgcggcggcgctcttgacgactagaactcttgcattccgg

SEQ ID NO: 8909 - DNA, 463 bp, Homo sapiens
  misc_feature (1)...(463): n = A,T,C or G
gcgggncctgagttcattacactgngcggnggaantcaacacatttatagaacttctaaagggaagcattaatagtgatgttgcttgagcttatctttagctggagaagctaagctctttgctctcaaaatatatggtccacataatactgtacaaaatatttggcactaaaataatgtagctttccacttaaattaccttaaacaggaaatacttttatctcctatcatatcaaaatatttggcactaaaataatgtagctttccacttaaattaccttaaacaagacatacttttatctcatatcatatgcccttttgactacatagatacgtatctgttggaaactatttctagattttctaatatacgaatctaagagacttgtagcctgtttatctatagacgttgaggtcgacattaatctgctttaaacataagtgaagagacacaccatgttttg

SEQ ID NO: 8910 - DNA, 463 bp, Homo sapiens
  misc_feature (1)...(463): n = A,T,C or G
natcgagatcgtagtcagtgcggnggaattcggaccacttgaggccaggagttcaaggtgagcctgggcaacatagtgagaccctctctaaaagaaaataataaaaattaaaaatacaatataatacaatacaatattgtatttagttgtcatgatcctttagtctcctttaatcttttttttttttttttttttgggaaagggggtttccccctttcccccaggttgaaggcccgggggagggtttggggttatttaaacccccccctcccggggaaaagaaatttttgggccccccccccccaaggttttgaaattaaggggctgccccccccaattggggttattttggtttttttaaaaaaaaggggttttccccatgggggccggggggggctggaaccccggacctaaatttttggcctggcccacccccccaaaggggggggattaaggggggggg

SEQ ID NO: 8911 - DNA, 470 bp, Homo sapiens
  misc_feature (1)...(470): n = A,T,C or G
nttagaaaattcgtagaccactactccagagcggtggaattccaaaaagggatgtaattgttatgctgctgtgtccacaactgatgaatgtttgttgctatttgatggttggtaacaaattggtgggttctgctgtcagcactgctatcagagtacagttctattatattctcattaacataatgataaaattaacattaagaaaacactttctataagaatttatgagattctatgcaattaagcatgtaacagtgtggacagaaaatttgcagaaggctgtataataataaaaactttaaaaatatatttgtagaagtagtcagtgacctgagactttagactgttgatgactggcttgttgatatgttaatgtgaagtaattattccagtgaattgaagctgaaagtcaacatgtatatttattaatttagtttaagcttccttattgttaatcacagttgaggtan

SEQ ID NO: 8912 - DNA, 473 bp, Homo sapiens
  misc_feature (1)...(473): n = A,T,C or G
cccccccattgagaccattagnnaatgacgacctttagaccgngtggtggaattcgaacatcccaaataggagaacctctcacaagctggggcaggtcaccttatctttgtaagatgaggatatcatctagatcagaaatctgactagattggattctgaggagaagaacctactacaaggcaaggagccgttttttggctttgaaaagtcttgctgtcttgggtctacattttagggaagagcaggtacatggatccaggcttctgccaaaaaaaaaaagagaagaagatgacgatgatgaccagtcgtactatcttactgagccacagggatgcatgcttttcggggaaaacttcattcacaagtattccagacaccaggcttcaggcatggccatgagcaagaccagcaaataacagctttttgccttgcagccctgaccccaatgtctgctgtttccaacactggtgan

SEQ ID NO: 8913 - DNA, 473 bp, Homo sapiens
  misc_feature (1)...(473): n = A,T,C or G
cgcggaccnnnnnttgaaattttgagacctcgcagngcggggaattcgggaggggaaggtgactttcacaagtcctcttgtacaagggccaccgtgtgaaacctgatgtccagtgaagacacagcaatccaaatagatcactgccttccagccccagggtctacgcaacaaaaagccttccccattgaggccatctggcgagttctgcctccaatgtcctgggagcagtcagccagagctcagggcagggggcctccccagcctccattctgcagatcgttctttctgggcaattcatgctcattcccacacagaaaggtttgaggcaatttgtggaaggagcgttgtatcaggatggtttctaattcaggtggattaaggtatggatgctgtcttcactgctcacttgtcaaataactgaactcctgacttctttgaactctgggcttctaatctgtgaagtcagaataatn

SEQ ID NO: 8914 - DNA, 458 bp, Homo sapiens
  misc_feature (1)...(458): n = A,T,C or G
nttgagacccctgttttgagtggcgctaattcaagagcgatcgaaaaccttgtgtgtgtattggttgggtgggttgttaaaaactggcaggcctcaccatagataaatctgctatgattagtgaactattgggtacgcctctacaaatgtttagtatttacaggacttttctctgtggcagttgaatttctccagagaagaatccacagtatcctatctagggggtgtaagtctagcagctaactttctggaattgggcagagaaaaattgctgtttatttgcagagcaagaggttgttccgttctagtcttagctcttctggtaaacggctgtttccttgagcaggcagcttcagctctctaggctttaagttttctcatgtgtaaaaagagagggctccaggagctcatctgtgacatcccttancagggacacactaggcttactttaaagtgan

SEQ ID NO: 8915 - DNA, 468 bp, Homo sapiens
  misc_feature (1)...(468): n = A,T,C or G
gggcgcggaggccaccgaaacctaaggctagncttcatngnagaagcnangnaattnnaaaaaacgnctcaggttatttgcacatatgatcaggagtattatgaagacagattatcaaaaatatcaaccctatccttacctaatgagtggaagaaaacagagtaacggcattcatagagtgaaaacagatactgccgaactgctggaagactgtgcaacacttcaagaatctctgctcctttaatgacctaggtattttaaaaaacatatatacaaaaaaaatgtacattttaatgatttgtgtatttaaacaaaaaaaacaagtctttaaatttgagtattaaagtttggtcattaccttttccctgagatctggtctttctaaggcaatcatactgacatagacagtataagtcacaaatgttttataatccatgagttcataggatgtaaatgttgaaacagtgt

SEQ ID NO: 8916 - DNA, 478 bp, Homo sapiens
  misc_feature (1)...(478): n = A,T,C or G
gcagccccncnntttgagtccgtagaacangcggtttgattccgtcatncatacatgnatttttggaatcagttcttataaacagctcgattcagttttagctaaatttatagtttaggtagtatgttacatttgaatttttgtcttaagaaaagttgactgttcagatatttttctactgtaaagaaatatacttttctattaaagatctgtacatatttttacagtaaaatgctttatggaactagttttagagccctctatggctttaaggccttgcttactgcctgcaaattttgagaaatttaaaaataagcattctaacacttttattcccacagaaaaattccaagtcaaattatcaaatcaaacacaaaaataagtcttacctcttgtataagcatgttgtactaaaaaaaaattttgaaacattttgtatattggagatctctctcatcttactgttctttggctttaa

SEQ ID NO: 8917 - DNA, 477 bp, Homo sapiens
  misc_feature (1)...(477): n = A,T,C or G
cggtgnagnnngngnnnnnnnnntttgaagacatgattcccgtgcggaggaactccccctgatggggaggccatcgtcactggtgctggagacgagaccctgaggttctgtaacgtttttagcaaaacccgttcgacaaaggagtctgtgtctgtgctcaacctcttcaccaggatccggtaaacctgccaggcaggaccgtgccacaccagctgtccagagtcggaggaccccagctcctcagcttgcatggactctgccttcccagcgcttgtcccccgaggaaggcggctgggcgggcggggagctgggcctggaggatcctggagtctcattaaatgcctgattgtgaaccatgtccaccagtatctggggtgggcacgtggtcggngaccctcagcagcaggggctctgtctccctttccaaaaggcgagaaccacattggacggtcccggctcagaccgtctgtactcagn

SEQ ID NO: 8918 - DNA, 463 bp, Homo sapiens
  misc_feature (1)...(463): n = A,T,C or G
ctcgacnctagangacccttagtccagtgcggtggaattcgatttatttcaggccatgcacggtggctcacgcctgtaatcctagcattttgggaggccgaggtgggcggattgcctgagctcaggagttcgagaccactctgggcaacatggtgaaacctcgtctctactgaaatacaaaaaattagcggggcatggtggcacgtgcctgtagtcccagatactggggaggctgaggcacgagaattgcttgaactcgggaggtggaggttgcagtgagccaagatcatgccactgcactccagcctgggtgacagagtgagacttggtctcgaaaatatatatatatatatgtttatttcagcaaattctggaattatgccctcccctcccccctttttatttttgctgattgatgtttaaaagtggaccattaaaaaatgtaattccaagattgccttgn

SEQ ID NO: 8919 - DNA, 470 bp, Homo sapiens
  misc_feature (1)...(470): n = A,T,C or G
ccccaatagaagccnctngnnnnnactgatgaccatnagtccagtctggtggaattcaaaaaacaattatgtaattgaaaaccaatcgattgcctttattttgcttccacattttcccaataaatacttgcctgtgacattttgccactggaacactaaacttcatgaattgcgcctcatatttttcctttaacatcttttttttttgacagtctcaatctgttacccaggctggagtgcaggggtgctatcttggctcactgcaaacccgcctcccaggtttaagcgattctcatgcctcagcctcccaggagctgggattacaggcatgtgccataataaccagctaattttggaattttttatttttttttttaataaaaacggggtttcgaaaggttggccaggccgatctcaaacttctggcctgtagcgatcatgccgcctcagcctctcaaagtgctgagata

SEQ ID NO: 8920 - DNA, 482 bp, Homo sapiens
  misc_feature (1)...(482): n = A,T,C or G
ggggagacggccnnnnnnattgagncctcgtagacactagtcagtgtggtggaattcgtggggggattgcttgagcccagaagatgcaggttgcagtgagccgagatcatgccactgcacttcagcctgggcgacagactggactctgtctcgggaaaaaaaaaaaaaaaaggggaagagcgacaaaatatcccttttgaaaaaacagaaaattttatgtttggggttttttaccccaataaaaatttttttccccccatataatatcccttgggggttttaagaatttttttttccgggactctaaaaggaaaaccctccctaaaaatttgtttgggaaaatcccagttggccagccagtcttttgggaaataagaacggggggctccctttttggttaaaaaaattcttgggttcttctaatttaacaaaaaaatatattttttgggctaaggacaaaccaattattttttaccaaataa

SEQ ID NO: 8921 - DNA, 452 bp, Homo sapiens
  misc_feature (1)...(452): n = A,T,C or G
cttgactggcagacattagaccangcggtggaattcggagtcttttgtaaatcaagtaagaatccattaaagaaattaattttaaatgtgcattacctggttacataaaggactctagaacaacttaagttcttttgggactgttgaaacattgtctttaaggacagaatgtactgggtgcctttctctgtactctgaatatgcatgtgtattgcggtggggatgggggagttgggggccctcacttggtccttctctgttgtttttttccaggacaaagccaaaggccccttgttagctggccatccctgccccattttttcccctggtcctttcccctgtggccacagggaagtgtggcctgaataccccaccccggctcctctgcacccagagctgggggccacctcagaagtgtcatctctctctgagcacgcattcccctgcagcag

SEQ ID NO: 8922 - DNA, 464 bp, Homo sapiens
  misc_feature (1)...(464): n = A,T,C or G
ggccaactgagtcatagcacagaatggaggacttccagagatacacctgccatgtgcagcatgagggtctgcccgagcccctcaccctgagatgggagccatcttcccagcccaccgtccccatcgtgggcatcgttgctggcctggttctacttgtagctgtggtcactggagctgaggtcgctgctgtaatgtggaggaagaagagctcacatagaaaaggagggagctactctcaagctgcaagcagcaacagtgcccagggctctgatgtgtctctcacggcttgaaagtgtgagacagctgccttgtgtgggactgagaggcaagagttgttcctgccttccctttgtgacttgaagaaccctgactttctttctacaaaggcacctgaatgtgtctgtgttcctgtaggcataatgtgtggaggaggggagaccaacccaccctcatgtgcaccatgn

SEQ ID NO: 8923 - DNA, 481 bp, Homo sapiens
ggccccgcccccccccattgaccccccattgtcgatccactatccatgtggtggaattcgacaggaagcccaaggcagtgttcctcaccaataacttcagagaagtcagttggagaaaatgaagaaaaaggctggctgaaaatcactataaccatcagttactggtttcagttgacaaaatatataatggtttactgctgtcattgtccatgcctacagataatttattttgtatttttgaataaaaaacatttgtacattcctgatactgggtacaagagccatgtaccagtgtactgctttcaacttaaatcactgaggcatttttactactattctgttaaaatcaggattttagtgcttgccaccaccagatgagaagttaagcagcctttctgtggagagtgagaataattgtgtacaaagtagagaagtatccaattatgtgacaacctttgtgtaataaaaatttgtttaaagt

SEQ ID NO: 8924 - DNA, 470 bp, Homo sapiens
  misc_feature (1)...(470): n = A,T,C or G
gcccactgatngcctcngnnnnaactgatgacatnagtacagtgcggtggaattcccgccttggcctcccaaagtgctaggattacaggcgtgagacactgtgcccagcctatttttaaaattgtttatggagacagggtctcaccatgtggcccaggctagcaccactacgcccagctaatttttcatacaggtgggatttcaccatgttgcccaggctggtctcaaactcccgagctcaagcagtccaccccacttggcctcccaaagtgctggtattacaggtgtgagccactgcgctcagcccggttgattatcaattttatagttagtagattatgtggtctaagaaatatctgtctatctcaagatcatgaaaattgtctcctctgtttcattctacaagctttatcgttttatcttttttgtttgggtttatgatccaatttgacttaattgttgcatatgga

SEQ ID NO: 8925 - DNA, 464 bp, Homo sapiens
attgtagacatcgaggacccttaggccagagtggtggaattcccggagcggtgggcacagctcggcgcggagcgtcctgtcaggcggatgccgagggcgtcgcggactctccccgcgatgatgccgatgatattaactgttttcttgagcaacaatgaacagattttaacagaagttcctataacaccggaaacaacctgtctagatgttgtataattttgcatggaacctgtataaggcagctgccatttaactgaagtgtggaagggaaatgaacgtaccataccctttgatcatatgatgtacgaacatcttcagaaatggggtccacggagggaagaagtgaaattttttcttcgacacgaggacttcccaactgagaacagtgaactaggtggccgtcagactctatagcaacgaactcagagaaatgtactaaatgtacctgcagaataacgactgag

SEQ ID NO: 8926 - DNA, 461 bp, Homo sapiens
  misc_feature (1)...(461): n = A,T,C or G
ggacattatagccctcgaccgaatgaggacntctgcncagcgcncanannngaatttctttgggaagaaagtaaatctgatggctcactgatttttgaaaagcctgaataaaattggaaagactggaaagttaggagaactgactagctaaactgctacagtatgcaatttctattacaattggtattacaggggggaaaagtaaaattacactttacctgaaagtgacttcttacagctagtgcattgtgctctttccaagttcagcagcagttctatcagtggtgccactgaaactgggtatatttatgatttctttcagcgttaaaaagaaacatagtgttgccctttttcttaaagcatcagtgaaattatggaaaattacttaaaacgtgaatacatcatcacagtagaatttattatgagagcatgtagtatgtatctgtagccctaacacatgg

SEQ ID NO: 8927 - DNA, 473 bp, Homo sapiens
  misc_feature (1)...(473): n = A,T,C or G
gcccatagtatgcgtngnnnnnaactgatgatcctcagtccagtgcggtggaattcctactaaaaatacaaaaaaatagccgggcgtggtggcaggcacctgtagtcccagctactcggaggctgaggcaggagaatggcatgaacccgggaggcggagcttgcagtgagctgagatcgcgccactgcaccccagcctgggctacagagcaagactccgtctcanaaaaaaaaaaaaaaaaaaaaaaaattccctcttcctctaaaaaagaaaattgggggtcaaacggaatcccagggggaggggttttcccctgggccccccaccatttcaacagaaaaagggcccgggggacccaaacgggggggggaaggggccaggccccaccttaaaggccagaattgggggttgaaatgggtttgcccccgcccttggcccggttggtttcgggggggagtgaataaccctctttg

SEQ ID NO: 8928 - DNA, 457 bp, Homo sapiens
  misc_feature (1)...(457): n = A,T,C or G
catcgaggaccattcgtacgaccttagaccangcggnggaattcgatctgaggtgtggccattgggtggggtggtaggtgtgtgtggctctgggagatgtgtggcccttgaggtagtgtgaggtgtgcatttgtggtaccagtggggtgtggtttgtagacccaggcctggccagagctggctgtgtatgttcttggttcctgttggggagctccgaggagtttcctgaggtctggatgctggggtcgctgccctgcctgcctgtgctgggacagctgggcccagggtaggggatgaggctgtataagggaggtggtggtggacaagctgaggcctcagttaggacccctagcctgccttcctcccctccttgctccccatagggctaggtctttccttgaacccagggcagaggcctgtgcggaggggagctgaggatgcaatcaggggaggcggc

SEQ ID NO: 8929 - DNA, 462 bp, Homo sapiens
  misc_feature (1)...(462): n = A,T,C or G
nttgtagactagtagtccatgtggtggaattcgtgatgtgctgcagccaatgagatgggccagggacatgggcagatgtcttgttaaacaagtgtcctaatggggtcaacaaggcccgagtcagctttataggctcttagacctcatcaattccttctagctgatcgccagagccctaggacttgactcattctaactatactcacaagatgctggtttctaagtgacctctgggaaatctggcaaatgaacagccttgcagagagagcactgtgaacctggaaaggcctgagagtgactcagatttccctcaagagatgggaaaatgtgttcctcccattttcaagctttctccctcaatcaacgctggagcactggggacctgggcttcctccctggttctctctttccagactctatgaaggcttccaccttgctattaatacctncttgggaggccan

SEQ ID NO: 8930 - DNA, 469 bp, Homo sapiens
  misc_feature (1)...(469): n = A,T,C or G
ggtactgaaccgatanngngntagatgtctcttagtcgcagtgtggtggaattccttttccagcttcagacttactcacttccaccctttctaaaggcagtcttgagacagtgccttccttgaaaggtatcttggaggccttacactagaggatgttgacatgccctccagtggaaccctcctgatctgtgtcatcaggtctggaaagagtgagcttgtaccctttccagatccacagcattgcactgtcaacctttgcatctttaattggcccatttggaggcttctttgctagtggattcaaaagagccttcaaaatcaaggattttgcaaataccattcctggacatggtgggataatggacagatttgattgtcagtatttgatggcaacttttgtacatgtgtacatcacaagttttataaggggcccaaatcccagcaaagtgctacagcagttggtggtgct

SEQ ID NO: 8931 - DNA, 461 bp, Homo sapiens
  misc_feature (1)...(461): n = A,T,C or G
ccgggnaattgagtcgattagcccagngcggnggaattcggcgagtttagcctcagggggaaggagctccgggagaacgggatcaataggatctgaaacctgctggtgcccaatgagaattactgcaagtttgaggactggctgatgcccattctggaccagatggtgatggagcagaacacagaggtggggctggggcaacctggaggggccagttcagtgggagtcaggggaggcatggcctgaaggtcacatcctctcctagggtgtaaagtggacgccttctaagatgatcgcccggctgggcaaggagatcaacaacccagagtccgtgtattactgggcccagaaggtgaggacctaagcgggagcaaagtagccagactttggcatgtgttaacttatttcatctttccagcctcctggngattcagtactgttattctcagcatcctcactct

SEQ ID NO: 8932 - DNA, 454 bp, Homo sapiens
  misc_feature (1)...(454): n = A,T,C or G
nggtgctgaaaatgaaanccaggtttgcnagacaagcgnnggaantngagagaagcgtaatacacgtaaacaattttggaaaaccttcagttattgccactcgtttcaaacccacaaaatttctcacacaggacacaaaccatatgattgtaaggaatgtaggaagtccttcaattctttgggaaaccttcaaagacacatggcagtgcagcatggagatggaccttataaatgtaagttgtgtgggaaagcatttttctggcccagtttatttcgtatgcatgaaagaactcactctggagagaaactatatgaatgtaagcagtgttctaaagcctttcatttttacagttcttatctaagacatgaaagaacacgtactggggagaaactgtatgaatgtaagcagtgttctaaagccttccctgattacagttcttgtctaagacatgaa

SEQ ID NO: 8933 - DNA, 478 bp, Homo sapiens
  misc_feature (1)...(478): n = A,T,C or G
ggcagagggccggngncagccactgaatggatacagcggctgaggccntcgnnaggctcggcgnagncaccacaaaaagaagaagcccacctgtggctggctggctggccgccaggtcagagccaaggcaggcagggccttcctgtctggcttcttgaaggcagacacaagtctgcaggctgctcacgtcatctcattatcttttctcacgaggactacttcggatacaatcacagcaaccctggccttggccctgccctgtccctgccatgcaacttcacaactcagctggcctagacccctgggaggcctccaagtccctaaggttagacatctcctggggtgctatggactgtcggggctccaaggagccgagtgtgggggaaactcactgtgggaggcgctcctgacctgcagggagctggaatgctgtgggagggccctgaccccggngcccatggagctccctaggctcctc

SEQ ID NO: 8934 - DNA, 457 bp, Homo sapiens
  misc_feature (1)...(457): n = A,T,C or G
nattgatgaccatttganagcgcggnggaattcggctcatgtcaccgatccaaaggcagacccccgggctctcctagagtgtcggaggtaactaatgcaactggaaaaggagctggtagaacgtcaacctcaagtggacatgttacaggagatttcaaacagccttctcattaagggacatggagaagactgtattgaagctgaagaaaaggtgcatgttattgagaagaaactcaaacagttacgggagcaagtgtcccaagatttaatggccttgcagggaacccagaacccagcctcacccctgcccagcttcgacgaggtagactcgggggaccagcctcctgcaacatccgtgccagctccccgagcaaagcagttcagagcagtgagaactacagaaggcgaggaggagacagagagcagggtccccggcagcacacggccacagcgctct

SEQ ID NO: 8935 - DNA, 455 bp, Homo sapiens
  misc_feature (1)...(455): n = A,T,C or G
nctcgtagaacattagttcagcgtcgnggaattcgcagtgccgacgtcgtgggtgtttggtgtgaggctgcgagccgccgcgagttctcacggtcccgccggcgccaccaccgcggtcactcaccgccgccgccgccaccactgccaccacggtcgcctgccacaggtgtctgcaattgaactccaaggtgcagaatggtttggaaagtagctgtattcctcagtgtggccctgggcattggtgccgttcctatagatgatcctgaagatggaggcaagcactgggtggtgatcgtggcaggttcaaatggctggtataattataggcaccaggcagacgcgtgccatgcctaccagatcattcaccgcaatgggattcctgacgaacagatcgttgtgatgatgtacgatgacattgcttactctgaagacaatcccactccaggaattgtgat

SEQ ID NO: 8936 - DNA, 532 bp, Homo sapiens
  misc_feature (1)...(532): n = A,T,C or G
cttaacgctcatgatcattaaagtatccacctgtccttcaacctgggataataagagagaaaaaattgagacatttgagaccctaggaagngcggnggaaaacgcaggaggctccagngagctggttgagccactgcacgccagcctgggtgacagagcctgaccctgtcttcaaaaaaataaaaaattaaagtggcgtgaggtgaattgcatcagaccccacatatgaataaatggatggttggcaaagtgttatatataataagtacaattccttaggtgtccttaggtgtactactaaagtgggtttgtgatagcccatatatttagtcatttatgttcaatagtgttatattcatttgagaaattattttaagaaatttaaaattaagaaagttttaaaagtcctttagtaattagagatttctctgggtgggtggatacggttgtttctaattatcccacacatttaatcatttatgttcaatagggttgtattttttgagaaattattttaagaaatgcaaaaata

SEQ ID NO: 8937 - DNA, 486 bp, Homo sapiens
  misc_feature (1)...(486): n = A,T,C or G
tggtccgannccgggcannnnnnnaatggagaccattcgatagcgctgcggaanncccgacaagcctggcagaaggcagacatcaatacaaaatgggcagccacacgatggttcaagaagattgaagccagagaaaggaaagccaagatgacagattttgatcgttttaaagttatgaaggcaaagaaaatgaggaacagaataatcaagaatgaagttaagaagcttcaaaaggcagctctcctgaaagcttctcccaaaaaagcacctggtactaaaggtactgctgctgctgctgctgctgctgctgctgctgctgctaaagttccagcaaaaagatcaccgccgcgagtaaaaaggctccagcccataaggttcctgcccagaaagccacaggccataaagcagcgcctgctccaaaagctcagaagggtcaaaaagctccagcccagaaagcacctgctccaaaggcatctggcaagaaag

SEQ ID NO: 8938 - DNA, 455 bp, Homo sapiens
  misc_feature (1)...(455): n = A,T,C or G
ngcgtgcttaaccctgggacccttgagngtttgaanaanncnnngnggtgggnggatgctgagaacaggctgcagaccatgaagtaggaactggacttccagaataacatctacagtgaggagctgcgtgagaccaagcgccgtcatgagacccgactggtggagattgacaatgggaagcagcgtgagtttgagagccggctggcggatgcgctgcaggaactgcgggcccagcatgaggaccaggtggagcagtataagaaggagctggagaagacttattctgccaagctggacaatgccaggcagtctgctgagaggaacagcaacctggtgggggctgcccacgaggagctgcagcagtcgcgcatccgcatcgacagcctctctgcccagctcagccagctccagaagcagctggcagccaaggaggcgaagcttcgagacctggaggg

SEQ ID NO: 8939 - DNA, 471 bp, Homo sapiens
  misc_feature (1)...(471): n = A,T,C or G
aaggggcnnnnnnntttgatgacctcgaggacgtgcggnggaatccaactcatcacccaatctcactttttcacctctccatcatttgtccggccagggagcctgcaaacagtaggcgctcattatgtgctgattgtattcaatgggggagagagccatgaaactaagcaatgaaaggagccaggattattgccatcatagcgggggcgcagaggtcagagaaggcttactggaggaggaggtaccaagtcttaaaggatggggaggagtgagccctgggaggggaaagggaaagaaaggcaggggtcttggggtgggggagggaatggcataagcaaaggctgggaggtggggaagggttgttagtggcagtctctagaaaggctgggatgagcagaggattggggaggagagagaggcaggggaatggaacccttgtgttgaatgaatgaatgaatgaatgaatgaatg

SEQ ID NO: 8940 - DNA, 472 bp, Homo sapiens
  misc_feature (1)...(472): n = A,T,C or G
ggtgtgccaggccagnnnnnttttgagctgcataccatagaccangcggtggaattctgtttagaagacactggatagccatctgccaaggatggtgatgatggaatcctggcactggatgtggcattcgggcttgataaattttaagtgcataatctagattgggaataagggaagacacaggattccacaaatgttggcattatgctaatctgtattaattgtaataattaagaccacttcctggtttgtatcttgtctcctcagttggagaacataaaatgaaaacttgcttttcttgtgtctcttcacccagcctagttcagggctttgggtcttccagagaactcgatgtgcattgacaaatacataatcatctttatgccaagacggctccagaccctcctttaattaactttcttttcctcagctgttttcctctacatctgaactaaactaacttaaaactgta

SEQ ID NO: 8941 - DNA, 468 bp, Homo sapiens
  misc_feature (1)...(468): n = A,T,C or G
gaatgtnannntttgagnaccctaccctgagatcctagtacagtgcggtggaattcgtaaaaatctaactttatgttacttgtaagagctatgcctaaaatcaaaccacaaggtttgactgaaaatattagccagttatagtggtgtgtgcctgtggtcccggctacttgagaggctgagatgggagaattacttcaacccaaaaggttgaagttgcagtgaaccatgatcatgccactgcactccagtctaggtgatagagtgagactctgtcttaaaagaagcctgggcgcggtggctcatgcctataatcccagcactttgggaggctgaggtgggtggatcacctgaggtcaggagttcgagaccagcctggccaacatggtgaaaccctgtctctactaaaaatacaaaaattagccaggcgtggtggccacgcgcctgtagtcccttctacttgggaggctg

SEQ ID NO: 8942 - DNA, 452 bp, Homo sapiens
  misc_feature (1)...(452): n = A,T,C or G
gangggcgaattcgtagaccttngnattgtccatccctagtccatgtggtggaattcccagcctgggcaataagagtgaaactctgtctcaaaaaaagaaaaaatgatataaagtatttatttgtgtttatattttatggatacgtgtctatgtttatagattgcctgtatggtaccaacttgacataaataaattagtactcataaattaagtaaataagcccaaacgcttttcaagttcacagggcattagtaatctgtggtaaatgaagatagtttaaaatttggggtaaaataaaatagaaacattttctgaatttaatttagatatttttctgggtctatttgttagacaggtttacactatctctgctatttttttaaggacctaaaactgaatggacatagaaaattgaggaaagaaataaaaccgtaacaattataagaggtta

SEQ ID NO: 8943 - DNA, 459 bp, Homo sapiens
  misc_feature (1)...(459): n = A,T,C or G
ngcgtgctgaaaactgaganccaggctgngccagnaanaacggnggaantnggngcaggattccaacctcagttctctgagctgcttctgcaaaggcccccatgtccctccccacaccggccctgggcatagcctcagcgccaggcctctgtcctgccgagccatcctcccggcgccacactccgggagcacagcatcctcctctcacctgtgggtcagagcaggacagtgatggtgtccccagggctgagcaccaccccacgccctgccctcacccctcaccaccatctgtgcactgatgagtctccagtttagccaagggcttcgttcctggcatggagaatttgttcctggctgctgtgttcccagggggtgctgggggaagggttccgtggagcgagacaaggtgtcctcgggagcagggttccaccgggaagcgtttgggagccctgtatcacn

SEQ ID NO: 8944 - DNA, 460 bp, Homo sapiens
  misc_feature (1)...(460): n = A,T,C or G
ggggntttgagtccattacaatgngcggnggaantcaagttgctctcacaggcagcgtgcgggtgtgctctttgtgaaatttcaccatggcttactttggccagggtcagaaagagcagaaggttatggtgcagaccatcaacctcatcttcagatacttactaaatagatcgcggattcaggtgtggctctatgagcacgtgaatatgcggatagaaggctgtatcattggttttgatgagtatatgaaccttgtattagatgatgcacaagagattcattctaaaacaaaggcaagaaaacaactgggtcggatcatgctagaaggagataatattactctgctacaaagtgtctccaactagaaatgatcaatgaagtgagaaattgttgagaaggatacagtttgtttttagatgtcctttgtccaatgtgaacatttattcatattgttttgatg

SEQ ID NO: 8945 - DNA, 455 bp, Homo sapiens
aatagaagactagtaggacgtgcggaggaattcgttttataacaaaagtgtctttcatatgtgcaggaaacaaatatttttgataagcaagaaaacagtgtagcgtatatgtgccttaaagagagtttgggaatgtggaaatcatggtataaaaggactagtgataagcactgaaatcaattagatatgcagttgtctggatagtttccaaaacttcaaaaaattaaatgtgcaataaaaatatacacatgctgagtgtaaagtgtacaaatgctgagtctgggtaggagagtaaggttgtcaggacacccagttaagtttgaatttcatataagcaaagaataattgttttagtataagggtgtcccaaatattgcatgggacttacactaaaatttcatacatttgaaattcaaatttaactggtcatttccgtttttagctgctacatccgg

SEQ ID NO: 8946 - DNA, 459 bp, Homo sapiens
  misc_feature (1)...(459): n = A,T,C or G
gttgagcccctngnnnnnnncnattgtatgtccttagacagngcggtggaattccctgcatcggcctcccaagtagctgggattacgggtgcctgccaccatgcccatctcattttttgtatttttagtagacacggggtttcgctatgttggccagtctggtctcaaacccctgaccttgtgattcacctgcctcggcctcccaaagtgctgggattacaggtgtgagccaccgcgcccagcctctacctgtgtttttcttactcggatgggacacaaagcctcagatcatcagaaagctggaagcaatggtttcttttctgactcttggaatatcagagctggcttagaaccttctgtcttctcactctgtctttacagatgagggaatatgggccccttagggaagtgactcatcccagggcccaatttaagtctgtggctgagccagaacctgtg

SEQ ID NO: 8947 - DNA, 482 bp, Homo sapiens
  misc_feature (1)...(482): n = A,T,C or G
gggatggccnaattgannccctatagagacctctgtccagngcgnggaattccatttactctctgccgtgggtctgcagtcgctgcaacctaccctctctctgcctcagccttacacccaagcagtaggtctgtgctctccctgtctctaggtcgctgagagaggtgcttttcttcataaaacctttggggtttggatttccccaggaagatggagaatggaatactcactcttgggtctaatctttccccttgacccagaacttcctccccacaaaaatgcctttaaaaaccttcctgagacttaagcattctgccccacttactaactgccagttctccagcactgaggtggggcagataacggggcatatttaagggggcatctttgtgtaaaagatgcatggagtcaggagaaaaccaccttcataaactgctctgtgcaaagaggaataaaacattttttccaaactgaaaaaaaaa

SEQ ID NO: 8948 - DNA, 490 bp, Homo sapiens
  misc_feature (1)...(490): n = A,T,C or G
nactgagacctaaggccatgccgnggaactctgagctatcaatattttcatgtaagtatttcaaggagtagctctttaaaaatggtttctattttatattttaaaaattcattgtcatctaaatgcatgtttagtcacaatgtatcagtattgtgtttaaaggtgctcaacatcactttttgaaaactatgtttacatatttaaaatgtttaattattttgaaatgtatagggtattaaatacaagcttctaaaattttcagtatctatattggctttctctaacagctctacagcaaagtttgacatgttttttgtgtgtgtcatgtattgtaagttgtaatatctgtaggagtgagttggacattctaaattagcagcaaaaaattcacaattacagctcagcttgtttattcattatagtttccacatttccaacttccaagtgaactttatatatactacagtgaattatagataaatacatccct

SEQ ID NO: 8949 - DNA, 454 bp, Homo sapiens
  misc_feature (1)...(454): n = A,T,C or G
aatagaagactcgtagacccttagaccgngcggnggaattcgttgacaatggtagttttccttcctcaagcccctctgtgcccctagagcaccctggctgtggctgcctccttcatccaagagcagagtccatgttgggccaggagacttcagatccatgtcctggtgctgcctctggctttgtctttcctcagtgggcaggactgggtctgctggtccatctttacccttctctgagctatgcagccttggcctgctgcgtctccggcctgtattctctccccttcactcaggccctgggaaaccagcccagtttctggcaggagaggcagaggaggtcaatgcctttgctctgggcttcctgagcaccagcagtggtgtctctggagaagatgaagtagagcccttacacgatggagttgaagaggcagagaaaaagatggaagaagaaggt

SEQ ID NO: 8950 - DNA, 535 bp, Homo sapiens
  misc_feature (1)...(535): n = A,T,C or G
ngtcgatcactgctcagggggtagttatccatatgattgatgatgattggatttaggtttcctttntattatttgttttctggttatttctttttttggggggtttcttctgtttcttttttctgcctatttttggattaactgaatattttttagtgttatgttttattaattggcttttggctatatctgtgctatgtttttgctgtaggaattacaaaatatatacctaacctacctacttagagttagcattttacctctaaataaaatgtaaaagtattgcaaacatataggtttctttattctagcccccccttataattgtatatatgtgtgtgtgtatgtgtgtatatatatacactttcaatgtatgtagatatgtatctatactttcagtgtatattatatctacatgcatacattgcgtatgtatgtagatgtatatctgcatgcatacattgngngngtatggagatgtatatctgcatgcatacattgngtatgtatggagatgtatatctacgtgcatgcn

SEQ ID NO: 8951 - DNA, 472 bp, Homo sapiens
  misc_feature (1)...(472): n = A,T,C or G
cttcgaccccctnnnattgtacgaccactatccatgtggtggaattcgcaagataaaattaaaaagccagacatactttctatcaagctgcgtaaagagaaacatgaagtacaaatggatcacagacctgaatctgttgtgttggtaaaaggaatcaacacctttacattgctcaattttttgattaactctaagagtttagttgctacctcaggtccacaggcaggacttcctccaaccctcttgtcccctgttgctttccgaggtgccacaatgcaaatgcttaaggcacggagtgtgaatgtgaagacacaagctctttctggatacagagaccaatttagtttggagattacaggtcctatcatgcctcattctctgcattcactgaccatgctgctcaaatcttcacagagtggatctttctctgcagtactgtatccacacgagccaactgctgtatttaacatct

SEQ ID NO: 8952 - DNA, 466 bp, Homo sapiens
  misc_feature (1)...(466): n = A,T,C or G
gggagtaaaattgaanaccctntttgtagtcctctatcagtgcggtggaattcaaaaaccaataatgtgaatgtcagttcccgggtacagtcaactgcatttttctctggtgaccaagcttccactgacaaggaagaggattatattcgttatgcccatggtctgatatctgactacatccctaaagaattaagtgatgacttatctaaatacttaaagcttccagaaccttcagcctcattgccaaatcctccatcaaagatggcagcacaaagacagaaaaggggcaagtgatggtggtggctccacgcaaggcttggcggttttccctgcaacttcagacactcccagaggactcggactttttcttctgcacttttttggaaaatcgccaggtgccaaaaggtgcattttaaagcgctgactgtaaatgctttatttctttgattagtaccactagtctatg

SEQ ID NO: 8953 - DNA, 464 bp, Homo sapiens
  misc_feature (1)...(464): n = A,T,C or G
aagcncnnnnnnntttgagngcattacatagngcggnggaattcgtgagatcctgtctctaanaaaaataataataataaataaataagattagccaggagtggtggtatcgcacacctggggtcttagctactcaggaggctgagacaggaggatggcttgagcccagattgaagctgcagtgagctgtgtttctgccactgcactccagcctgggggatgtacatgtataggtaaatacatatataaattttattgtgtataattaaggtatacaacatgatgttatgggatacatatagttaaaaggttactacagtgaaattaacatatctatcatctcacatagttacccttttttatttttgtggcaaggtcagctaaaatctactcatttagcatgaatcccatatacagnacaattttattatctattatatattcttcatgttgtgcattagatc

SEQ ID NO: 8954 - DNA, 485 bp, Homo sapiens
  misc_feature (1)...(485): n = A,T,C or G
ggcgattggactcattcgagggcctgaanacgncaanctgcccttctgtgggccataatataaacataaatgtgtgtaatgataaaatgtcattttctttaaagagactacagctagctgcacattgtgtagagcagcttctaaattgttagactttgtgttgaaatgtaatattctatttattgagaaagtgatttaaaattattatttttaatcatagaaatcagggtttgggctgtattgatattgtcgatcatgaaatgtccacacttattctaagtggccaattatttggaaataaagaaggaaataaagatggcttcacatggaaatttaagttctttcagggtggagatttacttggttcatacaccttttgcctgaattaaagtatttcatgtaggaggacttttatcctttntgatagacagtttcatatatcttgaactcaatatctcagatctcttctactgtattactgaatn

SEQ ID NO: 8955 - DNA, 450 bp, Homo sapiens
  misc_feature (1)...(450): n = A,T,C or G
atagtagactctagtccatgcggaggaattccgctttttttaatcaattgtagagaatagtcatttttaatctaaattagagaattgtgatacaatggcagtcctcaaaggcgtaacgagttcatctttctttcaccataggggttatagttggcttgtgctactctggaatcattttactgtttgtttttattatcttaagtgctaattaaaaaaaaaataaaattttaaaaaaacctgtagtttcattacctttttgaataatgtcatacaaaaaatgtatttgtttttttgtgctgtgagaattgatgtttgtagattaataatcattttgtttagaattacaaaatagtttttaaatattgtctgagaaaagccaaagttaatgcaacctagtggaaactgtaagaccatttgagtattgtttgttttattgatgcatttggattn

SEQ ID NO: 8956 - DNA, 465 bp, Homo sapiens
  misc_feature (1)...(465): n = A,T,C or G
aatgagactagaggcatcgcggnggaacttcatattatttttcgaactctgattctgcatagtgaaatgagacaatatgatgcctgggatttttaccataaagcagacagtgcttgtattttcaactggagtacatgtattttctatgtaaagtagcttcctatgaaaatgtggacttttttgaaggttacatatgtttgtgttcaaagtaaaatatcctcattgctgcagcttactaagaatgtaaagaaaatagactttgctcgtgtagatatctagagaactgatattgcgtattaaaatatatatagataattttttaataagcatccaagtctgtttactttaagagaaccatttcccaaacagattttttttttatttcaagaaaattttgctaccatttaagtaagagaaggtgagaaggatgacagaggttgtattggtagctattgaattcatgaa

SEQ ID NO: 8957 - DNA, 454 bp, Homo sapiens
  misc_feature (1)...(454): n = A,T,C or G
atagaaaacctgatgacccttatacagngcggnggaattcgactctctcatgtccatttctctcaccaaggcctgtgtggactgtgggagcagctcccaagatcctggtcaccctgatgacccactcttctcagagctggatggactggggctggagcccatggaagagggtggaggcgagcagggcagcagcggtggcggcagtggtgagggagagggctgcgaggaggcccaaggcggggccaaggcttcaagctctcaggacttggctatggaggaggaggaagaaggcaggagctcatccagtccagccttacctacagcaggaaactgcaccagctagactccattctgggaccatctccaggagtccatgagaggctttcttctcctatgtcccaattctcagaactcagatgtggctagaccaaccagtgggaaactgccccagctn

SEQ ID NO: 8958 - DNA, 482 bp, Homo sapiens
  misc_feature (1)...(482): n = A,T,C or G
cggatcaccnnaatggagaccanatggagagccgtggaanacgncttatgccgaagagaaagtctccagagaatacagagggcaaagatggatccaaagtaactaaacaggagcccacaagacggtctgccagattgtcagcgaaacctgctccaccaaaacctgaacccaaaccaagaaaaacatctgctaagaaagaacctggagcaaagattatcagaggtgctaaagggaagaaggaggaaaagcaggaagctggaaaggaaggtactgcaccatctgaaaatggtgaaactaaagctgaagagatccacatctctcgctcaactgttaatgtctcaacctccagaggcaccccacccagcacactgtcagtaaaggggcagattgaaacagtgagagttaagggcacagaaaactgaatctgtagataacgagggagaatgaattgtcatgaaaaattggggttgattttatgtatc

SEQ ID NO: 8959 - DNA, 481 bp, Homo sapiens
  misc_feature (1)...(481): n = A,T,C or G
tgggcggnnnnnaggggcctgagaccctaggaagactgatgaccactagtacagcgcggtggaattctgtgaattagacctgtttaacatgtaatctgcaacatgcttcactgtctaattttccagagcccctcatataaggaactgtattattggtataatcatcatggtgaagaagttggtatgtgggggagagatgacagaaacagagagtaagtcagagctggctgcctgacagataaaaaggaaatgaccaaaaaaaaaaaagaacccaaaaaattcttttgtggcccccccaaaaaggggaggggtgggtaaaacagcagtaaactaaaatttttaaaactcaggtcttagctttatttattacctaggggaggccttgggggagtcttaaaataaagggatctttttttataaaaaaggaccagaaaaaccttctgggttaactccctggttgtctaacatggctgtagaagaa

SEQ ID NO: 8960 - DNA, 451 bp, Homo sapiens
  misc_feature (1)...(451): n = A,T,C or G
aatagatgacctttagaccgtgcggaggaattcattttaacctgtagcaaccttttgcattcataaatcttgtaatcatgttaccattacaaatggtatataagaggcagcgtgaaagcagatgagctgtggactagcaatatagggttttgtttggttggttggtttgataaaacagtatttggggtcatattgattcctgtgctggagcaaaagtcattacactttgaagtattatattgttcttatcctcaattcaatgtggtgatgaaattgccaggttgtctgatatttctttcagacttcgccagacagattgctgataataaattaggtaagataatttgttgggccatattttaggacaggtaaaataacatcaggttccagttgcttgaattgcaaggctaagaagtactgcccttttgtgtgttagcagtcaaatctattn

SEQ ID NO: 8961 - DNA, 473 bp, Homo sapiens
  misc_feature (1)...(473): n = A,T,C or G
nggttgaagnaccactagtacagtgtggtggatttgttttctttttccaatcaataggtcttttattgcatcatttaaatatcacaagtaggtcttaagtgtcatctggcatcttctttctgtagccaggtaactcttaaatcttattcatcagcctgctgaacagttcctttttcaaagacatagataccatccaaaaatttcctgaaatccttgtttttaactgggggggcttgctgaatcaaagccgctgaatttgaaacaagctcaatgtcatttccttcaaggattaattcatctttctgggcttgagatactgaacaagcaacacctggtctcatccgaaccctggggatgtatttttcacccaagaaatttcggatttcaacaagagacccattctcctggataacaacgttgatgggcaaattcaagtcctgttaaccccgtggggttctttgatgtcagattgg

SEQ ID NO: 8962 - DNA, 550 bp, Homo sapiens
  misc_feature (1)...(550): n = A,T,C or G
attttgatcccanntnanaannnntttcgaatcactatcagagtggtggaattcctgccactaggcagctagcccacctccccagccaccctcctccacaggtccaggtgccgctccctcccccaccacacatcagtgtctcctccctcctgctttgctgccttccctttgcaccagcccgagtctaggtctgggccaagcacattacaagtgggaccggtggagcagcccctgggctccctgggcaggggagttctgaggctcctgctctcccatccacctgtctgtcctggcctaatgccaggctctgagttctgtgaccaaagccaggtgggttccctttccttcccacccctgtggccacagctctggagtgggagggttggttgcccctcacctcaaagctcccccaaaggccagtaatggatccccggcctcagtccctactctgctttgggatagtgtgagcttcattntgtacacgtgtgacttcgtccagttacaaacccaataaactctgtagagtgaaaaaaaaaaaaaaaaaaaaaaa

SEQ ID NO: 8963 - DNA, 477 bp, Homo sapiens
  misc_feature (1)...(477): n = A,T,C or G
aggggatcataaagcctcngaanctcagtggctgcttcgaaagngcggnggaantctnccaaagagctaggattacaggcgtgagccaccttttggcctgggcattactttatagaacaagcttgtaaactttcttaaagcattatgagatttatgcacagaccagtttttttgtttatttgttgtagctcatcagcgatcgttagtgttagtgtattttatatgtggtccaaggccattcttcttcttccagtgtggcccacggaagccaaaagattggacacccctggtgtagaggattccccatgaaaataaagatttaagtaaatgagtttatttaatgtatggattaaaaactttaagactttaaatgtgtatgaagttggacttggttttccaggctcaagcaattcttctgcctcaaccttctgagtagctgggaccacagacctgtgccagcatgccctgctaattttt

SEQ ID NO: 8964 - DNA, 467 bp, Homo sapiens
  misc_feature (1)...(467): n = A,T,C or G
ggggaactataccctgaaggactgagttctctgaaaacgnanagaactttaaaatagtttaaaagaaccagtttaaatatccatcacatttaacaaatggtttatatagtacagaaattgaattcctttttcctaaaaccttttgtcaagaactaagaggtattttctacttagcatgagtaactttatatggtatctcagtcacaagatttcttccgttttcaggagtaggctttgatttcaagtggcctcattctcaaattcgagagattcatctccggcgttacaatttaagaagatcagcccttgagatttttcatgttgaccaatccaactactttctcaatttcaaaaaagaggtatgtattatggtttcaggaaatcccaaaatgctagctttaaatacgtttccagctagtgagctctaatggaactttgggctgtattcttttatcaagacaaaatgg

SEQ ID NO: 8965 - DNA, 467 bp, Homo sapiens
cttcgagcaccaattgacgacccttagtccatgtggaggaattcattggaaacaacaagcagaaagccaatctcattgttttaggagctgttccaagattgttgtacttgcttcagcaagaaacctcaagcacagagctgaaaactgaatgtgcagtggtgttgggaagtcttgctatgggtactgaaaacaatgtcaagtctctactggactgccatattatccctgccttattgcaaggactactgtccccagacctgaagtttattgaagcttgcctccgatgcctgcgtaccatcttcaccagtcctgtcactccagaggagctactgtatacagggccagatcatcaaacaattttatttaaccacggtgcagttcagaatattgctcacctactaacctcactgtcctacaaagttcgaatgcaagcactgaaatgtttctcagttttagcttttgaaaac

SEQ ID NO: 8966 - DNA, 453 bp, Homo sapiens
  misc_feature (1)...(453): n = A,T,C or G
gannggggaattgangacactagtttcgtcgaccctagtccatgtggtggaattcatcaaaagcacatcagtgccgaagaatcggtcatctaatgttaaaaccacttaaggaatttgaaaatacaacatgcagcacactgacaatacgtcaaagcttggatttgttccttcctgataaaacagctagtggtttgaataagtctcagatcctggaaatgaaccaaaaaaagtcagataccagcatgctgtctccattaaatgctgctcgttgccaagatgaaaaggcacaccttccaaccatgaaatcctttggtactcacaggagagtgacccacaaaccaaatctgttgggttctaaatggtttataaaaatattaaagaggcatttctcatctgtatcaatggaaacatttgttccaaaacaagacttcccacaggtgaagagaccactan

SEQ ID NO: 8967 - DNA, 457 bp, Homo sapiens
  misc_feature (1)...(457): n = A,T,C or G
tgaaggaannnnnngttagctgaatcctattcaggctgagaaccntcggcttaccactcttctctcatggatcctgataccaaactcatcggaaacatggcactgttgcctatcagaagtcaattcaaaggacctgcccccagagagagtaagtataaacccattattttcaaattttggtacgaaatgcctaacaatcttctgaaatgatcaaatcagaaaaattcttagctcagtcttctctctcaaattgcccttgtactttgcttggtagatactgtggtctagacctttcaagatagtggttatatgttgcatttaataggaaattgtattatttcttctgacttctccaggaaactcttttgagaaaatggaggaaatgtgcttaattctggacactgtttatcagttctttcaaacaaatctaatgctgttacgtctagaatgccacatg

SEQ ID NO: 8968 - DNA, 483 bp, Homo sapiens
  misc_feature (1)...(483): n = A,T,C or G
gggatggccnaaattgagnccctaactgagaccctaggccanngcgnggaantcctgaattttacttcacttatttttattaaattctagggggcagaatcttgtagattataaagtagtaatcctaattgaagatattactagaaacatcaaagcaaatgcaaacatatttttattgattttacatagacattatttctctgtaatccacagtctttggcttcatgccagggtcatagcaggctctcactacaaatgggttgaaacatttttgacagcagtaattttaccattgcaattgatcagagttattaaggtcattgcatctaaatgtaattaatactcaaaggaaatttagtcactcagtgtcatctgttgaattaagtcatctaaattaaaattataatttgtttttatcatgtgagcttagcgaatggtaattttcagatgtttgactgagtgaatttccttacaaactgatgt

SEQ ID NO: 8969 - DNA, 474 bp, Homo sapiens
  misc_feature (1)...(474): n = A,T,C or G
ggcggggnnnnnagggagactgagaccctaggccgattgatggccttcatctgccaccacaggagaaatggaccccagtccctgagcttccctcccctttgtctagatggtcctcttcagtccctgatggtcccatccccactccagggatcacgtgacttggcaaaccaagatgggggatgatacccccagagcctggctccaaggcctcctgaagaggcccatccttgcaacagaggaagggaaggcaggaaggccggttctgctcaaatgggaccccaggagaccaaagccctgagccgtgaatccagctcttccacttactactgtatggtgccaggcaaactgcacaacctggagtttttagtaaggttcctttgggatgcttgtcagcagcgaatacaatgtctgttcaacgtttgtcatcagctctcacctggagaagccttgttactgtggggaaagggaaccaan

SEQ ID NO: 8970 - DNA, 418 bp, Homo sapiens
cacatgcccagttactgtttatagtcctagaaatgcagattccttccacgtgaggcttacagttgagcatagcctcccaaataccacatgcagttcgtgaacatgagcacttgtagaatattgtgtaatatcttttagattaatggtttgagactttttttttcttttgaagtcctagaagggcagtagtgtttctttgcctttaaagaatatttggggctgggtgcgatagcttataccagtaatctcagcactttaggaggctgaggcgggagaatcattggaactcaggagttccaaaccagcctgggcaatgtagcaagatctcatctctactaaaaataaaaaaatttgccaggcgtggtggcatgtgcctgtagtctctgctactcgggaggctgaggtgggatgatcactt

SEQ ID NO: 8971 - DNA, 436 bp, Homo sapiens
  misc_feature (1)...(436): n = A,T,C or G
aagtgatgacctctaaccangccggggattattgccctcggtctgtctcttgcttcaacagtgtttggacggaacagatccggggactctcttccagcctccgaccgccctccgatttcctctccgcttgcaacctccgggaccatcttctcggccatctcctgcttctgggacctgccagcaccgtttttgtggttagctccttcttgccaaccaaccatgagctcccagattcgtcagaattattccaccgacgtggaggcagccgtcaacagcctggtcaatttgtacctgcaggcctcctacacctacctctctctgggcttctatttcgaccgcgatgatgtggctctggaaggcgtgagccacttcttccgcgaattggccgaagagaagcgcgaaggctacgagcgtctcctgaagatgcaaaaccagc

SEQ ID NO: 8972 - DNA, 546 bp, Homo sapiens
  misc_feature (1)...(546): n = A,T,C or G
ngctcgatncacagtccagtgtggngtaattccggcggagctctctactcggttctcggctggaagagactctctacagtgaccaggagctggcctatctccagcagggggaggaggccatgcagatagccttgggcatccttagcaaccaagagggctggaagaaggagagtcagcaggacaatggggacaaagtgatgagtaaagtggtcccagatgtgggcaaggtgttccggctggaggtcgtggtggaccagcccatggagaggctctatgaagagctcgtggagcgcatggaagcaatgggggagtggaaccccaatgtcaaggagatcaaggtcctgcagaagatcggaaaagatacattcattactcacgagctggctgccgaggcagcaggatacctggtggggccccgtgactttgtgagcgtgcgctgtgccaagcgccgaggctccacctgtgtgctggctggcatggccacagacttcgggaacatgcctgagcaaaaaggtgtcatcagggcggagcacggtcccactttgg

SEQ ID NO: 8973 - DNA, 548 bp, Homo sapiens
  misc_feature (1)...(548): n = A,T,C or G
agttgatcacantagnannncctcgatcnccactcagtgtggtggaattcgtcacaaaaccaggtacaggtagttctgaaccagaaggcaggccccaagaccatcctaagggccgccacacatgggctgatgcttggggccctgcagggagatggaccccttccagcagagctggaggagctgaggaaccgggtgcgggcaggtcctaagaaagagagctgggtcgtcgtcaaggagacacacgaagtgttggacatgctgttcccaaagttcttgaaaggactgcaggatgccggctggaagaccgagaagcaccagctagaggtggatgagtggagggccacatggcttctgtctcccgaaaagaaggtcttgtgagcagcccagacggaggcccaagcccagggcaggaacctggagcaaggacactttggccacagcaggacaggggaaaggcagctntatttttccttatggcaactgcagcgggtgggccaggccctcatgggaagtgactgccaatcagatgcagtgggccccatgcagag

SEQ ID NO: 8974 - DNA, 536 bp, Homo sapiens
  misc_feature (1)...(536): n = A,T,C or G
ngtcgaaaccactcgnggggttagaccacgattgagcaaggcatggtctgccaccagctgacggaaagcagccttctgtacaacagatgggagggtgaagggggcagaatgaaaatcgaaccaaccttttagctgttgcaaatcagaaggagccagagaagcaggcagtctcatgcatgagaggttacccttcaggatgacagagctgagggtctttgtaggagttgctcttgctgtgtaaagcactattgtcttggggttgagccctatggcagttcttggtaggttctgctgggcagaacatatgggttaaatctcggtagagagttttcctcatcctctatccgtaagtgtccttccatgcaaggtcccactctaggtgatagacagggaccccttctactgaacctttgaggaaaggaggaaggaagaaatgcgtttagatcttggatgcagacctttcaagggttaaatgtaccatatggatcaaccacatgcacatncttactacagaatccgtcctttcatttcaacta

SEQ ID NO: 8975 - DNA, 552 bp, Homo sapiens
  misc_feature (1)...(552): n = A,T,C or G
ntttgatcacccctcnnannnnatcgtatnactantccagagtggtgcgaattcgtttaattntggcaaagaaaagtttgaaggtatgttaaatatatacattcacataattttagtgaattttcagagtcatgtatgtgtaaattaatattgactcctttaattctcattgaataagacaggatatggcgaatgtgtcagtaacgtcagtaataaactattctttctttgaagtcaaaaaaggtgatcgaattgcacagctcatttgcgaacggattttttatccagaaatagaagaagttcaagtaagtattacaaaggaagatacagaataagtaatataacatcttaagtgaagaaatatatataatcttgagaatttaatatgctggttgtaactaaatagtatatatgactaaacttattttaagcaaatttaaaatactagttttagaatttctttanatgtttttcatgtagctattatgtagtattactttggataataagttatttaaacatactgtgaacttctaatattntattagaatt

SEQ ID NO: 8976 - DNA, 485 bp, Homo sapiens
  misc_feature (1)...(485): n = A,T,C or G
gccggaggccnaaattgaaaccctaactgagaccctaggccanngcgnggaanncggacaccctccaccagtaacaggcattgggaaggggaaggcagaaaagcggagtgcaaaatgaagtggtagtgggtgctaactaacaagagaacctttgaacacgatgggacagaaataaggtcatgcattttctactatctgtcacctgtggacaacttgccacttcaacagttctggacacttttaagctcccccgaggagaagataggaaacttggacaccctgtgtgggattgagaatcacaaaggggcagtctcgcacctggtcaagataaagctgaactgaactcttcattcacaagtgggattctcgtaagaggcaggaaagcagggaccgtctgtcactacacacagcaagaagaggtgaaccttaatgagggaagaaaacagattctattaggggaaaaaaacatttaatcagaaaataag

SEQ ID NO: 8977 - DNA, 532 bp, Homo sapiens
  misc_feature (1)...(532): n = A,T,C or G
ngtcaacaccatcagggggtagacgcctgtctaccaccactccaaggcattcttccaaatgtgaaatcctggaagtaagattgcaccttcttcctctcctgatcaacatcggtatgatgtctcctgttgcctcaccctttgtctgcagtatcactggataggactggtggaaagggagcagcctgacagagctccaaatgtggagaatatggcatccctccacctatatttgatgtggacggtaaggctaggcctgcaggatcccttatcctgaccaaagactgtgttggggtgccatttgaaaatcgcagggttgcaaaagaatacaatcttacttgcaggcggatattctctatactctcttttaatgcatctaaaaatcccaaacatcccctgggtggtgatcacttacagntgtgtccacctttattntatgtactgtgattaanaaaagaaaactttttgttatctgtgncaanngannangccngaagaccgacaaaataaaaaaacctggggccccgtgccgtcg

SEQ ID NO: 8978 - DNA, 451 bp, Homo sapiens
  misc_feature (1)...(451): n = A,T,C or G
aatagatgactcttagtccagtgcggaggaattcgttgttgcatgtaccaataatttatttctttttattgctgagaagtatttcatgggttgtttatccatttacccactgaagaacttttagtctgtttccatttttgggcaatatgaataatgtggttctgttataaacattcatgtccaggtttttgtgtgaatataagtttttatttctctacagttaatacctaggaatcagattcctgggttatatgataagtgtatgtttaactgccaaacatttctaaagtagctatttcattttgcatttccaccagcaatttataggagtttcaattgctccacatatttgccagcattgatattgtcattaagaaaagtcattctaataggtgggtggtggtatctcattttggttttcatttggagttccctaatgactaatgatgtn

SEQ ID NO: 8979 - DNA, 498 bp, Homo sapiens
  misc_feature (1)...(498): n = A,T,C or G
cgttcgaacggcggggccggnnanaattgagaactgagacactagcacagngcggtggaattcccagtacatacaccgacatacacacagtacaaatgagcacacccgccctgctgtgcacagctgttttctaatatagagaatttacaaaatatagaatttggcatatctatctgtgagatctccaaggctttcaataatacaaaataaaaaatacaaaaaagacaagtggggatccccgccctccccccgagtggcgtcctcgtttgcttgtgtgtctcttacacgcatacaactagcatagtctaaagaagggcacggagaacttgttttgttttatttaataaatatttttctcagaatcaccnnnnnaaaaaaaaaaaaaaaaaaaaaaaaaaaaaaaaaaaaaaaaaaaaaaaaaaaaannananaaaaaaaaaaaaannnnnnaaaaaaannnnnnnnnnnanaannnnnnnaaaaaccctccattccccc

SEQ ID NO: 8980 - DNA, 468 bp, Homo sapiens
  misc_feature (1)...(468): n = A,T,C or G
ncctggatgacactagtacatgcggggatttgatatcattggtcatttctattggtgaaatctttacaaaagtcacgaagtcttggcattttgattttacaggaaacgagtagaatgattgtataatttaactgtggtcataatgagctgggttcaaatctgttccaatgcttcctacaacataatcctattggaacccaggactgtgatatcaccttcaagttgtgtttttgtttttgtttttgttttttttagatggactctagcactgttgtctgggctggagtgcagtggcgcaatctcggctcactgcagcttctgcctcccaggttcaagcaattctgcgtcagcctcccgagtagctgggattacaggcgcccgccaccacgcccagttaattttttgtatttttagaagagacagggttttactatgttggccaggctggtctcanactcctgaccttgt

SEQ ID NO: 8981 - DNA, 495 bp, Homo sapiens
  misc_feature (1)...(495): n = A,T,C or G
cgtagttctgcctagcgctttttctctacctgcccttgggctcactaatatcaccagtattattaccaagaaaatattgagcttacctgattaaactttaaaaggtaattgtagatttaaattgagggaacctaatgattgttgctgtgaaacctttactaattcaaagttgcatgtgctatgacatctgtgacttgacttgcagagtgtacatgaaactgtataattgagtcattcagtaaaggagaacagtatcttggttaattgctactgaaaggttgagaaaggaatggtttgatatttaccacagcgctgtgcctttctacagtagaactggggtaaaggaaatggttttattgcccatagtcatttaagccgtggaaagttgaaaacttaacgaaatattgccaagaagattgtatgtggtnggtccagcctaaaaatgattttgtaggttgaaatcatagctacttacatagctntttcatatttctt

SEQ ID NO: 8982 - DNA, 462 bp, Homo sapiens
cttcgacgacccttggccagcgcggtggaattctttctgtctatcttaaaacacttcaaaacccttcctctgatgaagtaattgactttcatgtcagaaggcaagacttcttttgtgcttttggcaatttttgatggtaagatttgtgagctggttgtttagctattgtttgtcagctccaaacctgcccttctattctctttatgttactagtgtgggactggacaaactacatttctttttttttcagctactcccttctaccagtacaaggtgcttagataatggaagtcaaaaaataggagaaggtacatgctcattcttgtttacttattgtgtgttagtttcacttctacggtggttcttcaccctggcagtggcaattggtttgagactctgtattttactgtccttggacccaaccttaccttgtcctctcagaaataccagcaccagctagtc

SEQ ID NO: 8983 - DNA, 456 bp, Homo sapiens
attgaaacccattgaagaccctctagtcagtgtggtggaattcccacaggatggaaaaaggggctggccccagagttgagttctgagctcagctctccacctcttcctgcccgtctccagctcgctgcctccccctacttttccccaagctgggcagaatgccctcagcctgtgccggctggcacacatgccacatggtgcctggcgcgcgtctgggcaaggatgacgcccccaggaccggctgggataccaagccacccgctgcctcccccacctccagaacggagcgtccccatcccatcccctttcccagccagggactcggggagcaggcagggacacagcacagacagatacaaacacacagatgcacccagagacgcccacaggcgtgtgccccagagggacacagacacaggcgttcacacaggctcgggtacacacacgcacgctcac

SEQ ID NO: 8984 - DNA, 474 bp, Homo sapiens
  misc_feature (1)...(474): n = A,T,C or G
gcgctccnnnnnttcgagccctcgagaacctacgccanngcgtggaattctaaaaagcaaaatggggagggggaggaagcagtgacttttttttggtaattatgcgcttttttttaatttttagaatttgtctttttactgtgggtgggctgttgatatttcatcaagataagcatttctttcctgagttcaggtgactgaggaagagccacaaaacaaaacacaacaaaaccaaaccacagaatcatctttaacccaactttttatacgatgccccagttccccataactttgcacacaagcttctgtgttcagttgaattgtaactgctttttgtatttggagagagtgactattgaacttgaaaccttttaaaaaaaaaaaaaaaaaaaaaaaaaaacccccaaaaaagaaaaaaaaaaaaaaaaaaaaaaaacacaaaaaaaaaaaaaaaaaaaaaaacccccccccttc

SEQ ID NO: 8985 - DNA, 458 bp, Homo sapiens
  misc_feature (1)...(458): n = A,T,C or G
nttgttgacccctnnnaattgtagattattagtccgtgtggtggaattccttggcagatgacttgatctccgacattttcaccactattggctcagtgactgtcgccttgttactgatcctcttgctggccattgttgcttctgttgtcacctccaacaaaagggcaactcagggaacctacagccccagccgtcaggagaaggagggctcccgagtggaaatgtggaacttgatgccaccccctgcaatggagagactgatttaggagcattgtgtcccttcgagatggggatccacacactgtgaatgtgatgactgtacttcaggtatctctgacatacctgacaatgttaatctgcaactgggattacactggaactacaggaatgattcctttgaccaccttaaaaactttcacagtggttccgctcgacaccattgttttattatattatat

SEQ ID NO: 8986 - DNA, 477 bp, Homo sapiens
  misc_feature (1)...(477): n = A,T,C or G
aaatgatgaccatcgcaaaaaccgnngncctgatgacctctgtccangcggtggaattcaaaccatctactttttcttaacccaagtgataataaacaatattcacaactttcttaaatttttaaattgaaaaccaagggtttttcaaatataaacctagatgattttggtcacaaattgttaacatttgtcgatcctttgtatatactttggatatatattaaaggcaaaactatctcttgactaactgatggattcatttactaaagcacagctgtatgtatttttgaatacatattatgatcttgagactttataaatcaatttttatgactttatgcagttgtatagggattatgccctttcagttctatagggattatgcccttttataatacataatataccacagagattacaaatgttgaggaatgaaagcacttctttgctttggcaatcattttcagaccactatgt

SEQ ID NO: 8987 - DNA, 585 bp, Homo sapiens
  misc_feature (1)...(585): n = A,T,C or G
nttcgaaccccctactcgatcgccattccagaggggcaattaagatggcggcgacggccaggcggggctggggagctgcggctgttgccgccgggctgctcaggcggttctgtcataagttgaagaatccatacaccattaagaaacagcctctgcatcagtttgtacaaagaccacttttcccactacctgcagccttttatcacccagtgagatacatgtttattcaaacacaagataccccaaatccaaacagcttaaagtttataccaggaaaaccagttcttgagacaaggaccatggattttcccaccccagctgcagcatttcgctcccctctggctaggcagttatttaggattgaaggagtaaaaagtgtcttctttggaccagatttcatcactgtcacaaaggaaaatgaagaattagactggaatttactgaaaccagatatttatgcaacaatcatggacttctttgcatctggcttacccctggttactgaggaaacaccttcaggagaagcacgatctgaagaagatgatgaagttgtggcaatgattaaacgaattgttagatactaan

SEQ ID NO: 8988 - DNA, 451 bp, Homo sapiens
  misc_feature (1)...(451): n = A,T,C or G
attcgagttcactaccccangnggnggaattccggtggctcacgcctgtaatcccagcactttgggaggccaatgcgggtggatcacctgaggtcaggagtttgagaccagcctggccaacatggtgaaaccccatctctactaaaaaaaaattagctgggcatggtggcgggtgcctgtaatcccagctactcgggaggcggaggcaggagaatcacttgaacccaggaggcggaggttgcagtgagccaagatacgccattgcactccagcctggacaacaagagcgaaactctgtctcaaaaataaataaatgtgtagtgcagcctggacaacatggcaagaccctgcctctacaaaaaataaaaatcggctggatgtggtggtgcatgcctgtggtcccagctactcaagaggctgaggcaggaggattgcttgagccctgaaggtn

SEQ ID NO: 8989 - DNA, 450 bp, Homo sapiens
  misc_feature (1)...(450): n = A,T,C or G
acttgaaactgcattacactagaccangcggnggaattcctggaggcctctcccttaaggggctgtctttgttctccttggcctgtgtgggctggcttgagtgcatgttgtctttattccctgtatagcgctgaagagcatcacctgcaccattgattttgggggtcgggggaatactcaaggatgagcagatggggcctgcccgtctacgtgtgcaactggcagtccaggagctctgggtttctgataacaggatctcctttgggctcttgaggttggggagaagcattaggattacacagaggagctactgggacttagaaggaaccctggctgcctgaactgtggccgtgtctgggaggcgaggccacgacaggcctcaagcctcagatgctgctccacgagagccatcttccccagtggagtgcctgcctcccctgctaggcccgt

SEQ ID NO: 8990 - DNA, 470 bp, Homo sapiens
  misc_feature (1)...(470): n = A,T,C or G
aatcgtagatcgtaggccttgcggnggaattcgccgtggcgcgaacttgggactgcagaggcgcgcctggcggatctgagtgtgttgcccgggcagcggcgcgcgggaccaacgcaaggagcagctgacagacgaagaaaagtgctggacaggaagggagaattctgacgccaacatgcagcgaagtatcatgtcatttttccaccccaagaaagagggtaaagcaaagaagcctgagaaggaggcatccaatagcagcagagagacggagccccctccaaaggcggcactgaaggagtggaatggagtggtgtccgagagtgactctccggtgaagaggccagggaggaaggcggcccgggtcctgggcagcgaaggggaagaggaggatgaagcccttatccctgctaaaggccagaagcctgccctggactgctcacaggtctccccgccccgtcctgccacatctn

SEQ ID NO: 8991 - DNA, 460 bp, Homo sapiens
  misc_feature (1)...(460): n = A,T,C or G
tcncaatagaanganactagtccagcgtggtggaattcctagcctgggcgacaagagtgagactcgatctcaaaaaaaattatttgtaattaatttccattaataaaacagctaaaaatattatttaatttacaaaaaaaacttaacaatttttctggaatatggtattatgtaaactgaaatataaatttcgcatgtttttatttcagtgagaaaaggttagaaggaaataataggattcacgcacttcggaagaaaaatgtgcaatattatctaatttttgtagccatagcagtcttatgtttagccattatggtttgagatttgattggtgtgttcattttgtgtactgtttcagtttgaaggaattaaattttcttaaagttctaacttaattcatgttgttattcttggttatagcctcttcttcctgaaaacaagtgtataatatagcatatgn

SEQ ID NO: 8992 - DNA, 584 bp, Homo sapiens
  misc_feature (1)...(584): n = A,T,C or G
ntttganncccccactggatggccgatctgcacagagaaagctatctggaacatctctgtgtacatgggtaggacttttcagtggtgagcttcattataggtaagggaacagcttaacattttcctcagcctcacacccccagcattgttttttaaaggtttttcttcaggatgggtcagtttttctggagagaaatctatctcaggtagtaggaactgagctgtcagttctcagagacgaaataaggcaagaagctagctcattgttcagtatgcagagtttcactttatctccttgttttcagtaaggagtccactgccatttcggcccccagatgtttaggagttttcacctgccatctttacccattaatgttaaattaatgcaaacagtaacacaaaatatcagctgcctacaaacaggtatcatattgtacatattcacacagtaagaatagcagcaaagtattaaatatttgacatgttatctgatttaatcttcaaaactttactgtgaagtacgaactattattatccttatttggattcacttcaaccacattcttgcattataataccttatg

SEQ ID NO: 8993 - DNA, 473 bp, Homo sapiens
  misc_feature (1)...(473): n = A,T,C or G
aaattgaagaacccttcgtacangcggngganctgaagaccntctagatnaacgaggaaatagtggcccttgatcaaactatttaatatggccttagtagaattagctgtatttatacaaagttagactttagtgtgaaatgtaatcggtggctacattctcatcgttttaattaatgaaacttaaatggcttctcttcttccacatgtcctgtccttgacaagatgggcagtatcacaaaaggtcctggcattctaccatctaacactaggaactgtaaaatactgtgtaatattcttcttgtgtctcttttatctgtgtatctttgccattctattttctcagtgaatagtatgttttctcccattcactgataaattctctcatttgatgatgatacagggtttttaatttttgcaagattctcaatgcaagcattgttatgtatctagaaattatacctagagaaaaat

SEQ ID NO: 8994 - DNA, 478 bp, Homo sapiens
  misc_feature (1)...(478): n = A,T,C or G
ccctgaggcccctcgnnnnnccnnnnnactgatgaccattagtccagtctggtggaattcagcttgatgaaggcaagaaattgtctggttaactacagtttttgtctttccaattatagtaagtagcgcatggtcaatgcatgctcatcacatgctctagtgagtaactggttcccagtaagaaccatgtaatggctccagatgaatccaccttatctctcctccccgatcttttcctcatatctctcacaactatatactcactgagtcagtcagttaataagtatctacggcatatgcatttcctctgggatctctactagactggaacttgttctcatcactattttgatttctgagaaaatgaaaaatctagtatcatttttgcaaaatacattaagctctgtaaggacagatgactcttctctgatttattcagagctgcatccttgaatgtatcctcttctaggatagtatc

SEQ ID NO: 8995 - DNA, 472 bp, Homo sapiens
  misc_feature (1)...(472): n = A,T,C or G
cccctgagaacatcgaacangcggnggaaactaagatcgtcgnaganancnggcgnnancgntccttaaagatgtatatattttcttactgtacataaagatgttccttaaatcttacagaagggggcgcggcaaagggcctcgtgcagtgtgttcagattgcccctggggatcttctgtgtcttcagcgcccagccctgcgtgttcctggtgaagcagtttcacatcagtctctccagatagcactacgatgtattccgcttctgaacaggatcccatgccagtgtggaacaccttcccaatcttagttcagaagtggcttgtatgacctgttcaggggtcacatgaggtctcgccagtttcctgggtcctcttcagaggccagaaagttctaagttctgagtccccggccagggtcccttaacacctcggcacagaggctgttggcaagagtacaggctgcctctgtgtg

SEQ ID NO: 8996 - DNA, 554 bp, Homo sapiens
  misc_feature (1)...(554): n = A,T,C or G
natcgatcactgctcganggggatcgaattctctgcggagaaggcgatcagagacatatgcaggagcacaagttaaaggttgctcgcctggacaacatattcctgacacgaatgcactggtctaatgttgggggcttaagtggaatgattcttactttaaaggaaaccgggcttccaaagtgtgtactttctggacctccacaactggaaaaatacctcgaagcaatcaaaatattttctggtccattgaaaggaatagaactggctgtgcggccccactctgccccagaatacgaggatgaaaccatgacagtttaccagatccccatacacagtgaacagaggaggggaaagcaccaaccatggcagagtccagaaaggcctctcagcaggctcagtccagagcgatcttcagactccgagtcgaatgaaaatgagccacacctttcacatggtgtagccagagaagaggggtcaggactcttccctgtcgtagcttcatctgtagcctcactanagagaggaaactcttgtgctcaagcaaagagatggcc

SEQ ID NO: 8997 - DNA, 500 bp, Homo sapiens
  misc_feature (1)...(500): n = A,T,C or G
cgtanaggggagggcgggccnggnnnnaattgagacctgagagcactagcacagngcggnggaattcgcagaaaagcattattctaataccctaaaagcactaggaatatctgatgagtttgtttcaaagaaaggccaaagtggaaaagtacttgagtacttcaacaatcaagagacgaaaagtgtcactgaagacaaagaaagctttaatgaagaagaaaaaatagaagaaagagagaatggggaagaaaattattttattgataccaacagccaggattcttacaaggaaaaagatgaagccaatgaggaaagtgaagaagagaaatctgttgaagaatcacactgaatcatcaaggtctcctctctatgcccttgctgttgtttgcagcgtcagggtgtcagcagccgcatttgtgtttagaacatctgtggggacgcttctgatatgtgcagggctgttgatcaaagtcatctgtagcctgaaaagccttgatcca

SEQ ID NO: 8998 - DNA, 494 bp, Homo sapiens
  misc_feature (1)...(494): n = A,T,C or G
gganagtnacggccggnnnnnnnnnaaatgagacctgaaggcagtgcggnggaattcacggccggccccgatggctcacacctgtaatcccagcacttcaggaggctgagcagggtggatcgcctgaggtcaggagttcgagaccagcctggccaacatggtgaaaccacatctccgttaaaaatacaaaaattagcctggtgtagtggtgtgtacctgtggtcccaggtacttgggaggctgaggcaggagaattgcttgaacccacaaagcggaggttgcagtgagtggagattgcgccattgtactccagcctgggtgacagagactctgtgtcaaaaaaaaaaaaaaatttccccaggggggagggttttgttttgttggacccaaaaataatggacccacttccagcccagggattacccgggtttgttgtaaaaaggcagaaaaaaatttttccttggggttttggggggaagctgtgccttgccatt

SEQ ID NO: 8999 - DNA, 462 bp, Homo sapiens
  misc_feature (1)...(462): n = A,T,C or G
naattcgtagtcattagnncagngcgattgtagatcctctatccatgcggtggaattctacatacagagcacaggttcctctgatgattctgctctagcactgtgggcagatattaccagcaagtaccgtcaaggtgacagaaaagggcagattaaagaagatggctgtccatctgaccccacgagcaaacaggtagaaggtattgaaattgtggaacttcagctgtcacatgtgaaggacttgttccattgtgagaaatgtaaccgttcatttaaattgttttaccattttaaggagcacatgaaatcacactccactgagagtttcaagtgtgaaatatgcaataaacgatatcttcgagagagcgcatggaaacagcacctaaattgttaccaccttgaagaaggtggagtcagtaagaagcaaagaactgggaaaaaaattcatgtatgtcagtactg

SEQ ID NO: 9000 - DNA, 479 bp, Homo sapiens
  misc_feature (1)...(479): n = A,T,C or G
cattgacncccctgngacatgagaccactcggacgngcggnggaattcattaaaggtaattttctgttggctcataacaaatataccagcattcatgatagcatttcagcattttccaaggtaccaagtgtacttattttgttgttgttgttgttgttgtattttagaaggaattcagctctgatgtttttaaagaaaaccagcatctctgatgttgcaacatacgtgtaaaatgggtgttacatctatcctgccatttaaccccacagttaataaagtggctgaaaataatagtagctctggcttggtgcttgacctggttaaatactgtcttaaagctcatacaaaacaaataggcttttccataagtggcctttaagaaaacatggaagacaattcatgtttgacaaatgctgacagggtgaagaaagcccagtgtaaaaatgaatcgcgttttaagtgattcggttaaagagttt

SEQ ID NO: 9001 - DNA, 457 bp, Homo sapiens
  misc_feature (1)...(457): n = A,T,C or G
nttcgagcccattgatgacccttagtccagtgcggtggaattcgttggctaccagccagtgccataaggaaaaccattctggggctcttgagaggggcaaagcataatttgcatgtgggagaaatgttaatagtttgtgaccagaggacaagctgtggtttattaaagactgctgcaggttcctactatgcttctcatcaagaggcggaatctaatcaccttccccccttgaatcatggctggtctcagtgatgagtacgactggacagtgtggcacgagagatgctctgggacttctgaggggcgatcatgagaggccttacagcttctgcctgggcctcttggacacacaccctgggagaagccagacaaacctgactacctgacactgccagactgggaggaagtccatgcctggccacaaagagagggcttggtgccctgctcatgtcccaan

SEQ ID NO: 9002 - DNA, 470 bp, Homo sapiens
  misc_feature (1)...(470): n = A,T,C or G
gcggtccnnnncctgagaccttgagaacagtcgnggaagcccattctccggaaaggggcctcagtggagcacgtgtgccaccgcatccaccggtcactcgccagccagttcaagtacgccctggtgtggggcaccagcatcaagtacagtccgcagcgggtgggcctgacccacaccatggagcatgaggacgtcatccagatcgtgaagaagtaacggcgcctgccgggcctcccgcccacctgcctcgtttgcctggggaggtggtgccactgggacacacaaacacccagacagaaaaatacaaatacacgtaccccaggaaggggtccctcaagtctgtgctattgacagaagtttcttcagtaggcagacgaatagtgtgttggggcaaaggggctcgggtggaggcatttcccataagactgagccctctcatggaggttttgagtttgtagtgctgagcctgc

SEQ ID NO: 9003 - DNA, 455 bp, Homo sapiens
aaagaggaccatagaccaccgtggtggaattcatcagaagttttaaaacgccgttgctaggctttgaagggcttgactcaaagtggtccagtatttacttccccctgaaagtaacacattttgagcatttttccaaatataaaaagtagaactgtagcttttaatggctaaaggagctccactatcaaagtaaatgtgcttctctggcagcaaggacacatgtgcgtgaagaaaacaaggggggagcaggaagagtaggaaggtccctgtcacaggaatttgtgtggattcatgagtatttcaactgtagatttcattttgttttaaacatggagaaaatgtgttagccaaccttaacaactgatcaatagttctgcatatatccccacttaatatgtgtaatgggagatatattttgttgtttcatctaataatcaattttttaaataaatggg

SEQ ID NO: 9004 - DNA, 497 bp, Homo sapiens
  misc_feature (1)...(497): n = A,T,C or G
ggggggaggggnnnccatcgacccactaggatgagtgccgtaggacaaccancccaggacttctcaatacacaatgaagattttccagcattaccaggctccatctataaagatccaacatcaagtaatgatgacagtaaatctaatttgaatacatctggcaagacaacttcaagtacagatggacccaaattccctggagataaaagttcaacaacacaaaataataaccagcagaaaaaagggatccaggtgttacctgatggtcgggttactaacattcctcaagggatggtgacggaccaatttggaatgattggcctgttaacatttatcagggcagcagagacagacccaggaatggtacatcttgcattaggaagtgacttaacaacattaggcctcaatctgaactctcctgaaaatctctaccccaaatttgcgtcaccctgggcatcttcaccttgtcgacctcaagacatagactntcatgttcn

SEQ ID NO: 9005 - DNA, 582 bp, Homo sapiens
  misc_feature (1)...(582): n = A,T,C or G
ntttgatnccccnactgatgatcatcccgagagggcaantcccagaccttcttaccttcactttattactaatctctgtcaacatagaagtaaactctgttaactcctactttatctgttacttctttgcacatgaattgttctggattgggcacttttgtgggaaaagatttgcagtttgctttgaagaacaaaagttttcacagaagttatttttagaatataaaatatttttcccctctcttccagtgtcatgaaatagattaacttttaggatttttctgtttgtttttaaagttgaagaaaatccagaaagtaccatttctgtgagccaagttaaacaagaacccaaagaaccagcattgtctatggaagcaaaaaaaactgtggactataagaaattatctgctacataaattattgaagcttttcagaatttacaactctggtgacttctgatgtcttagaaaggaaggtgaatatagtcaaagcgtggcattgagataattggactgaagaccagtttgatgagaagcttttatttaanactgatatatttggtgccagttccatatttttacc

SEQ ID NO: 9006 - DNA, 483 bp, Homo sapiens
  misc_feature (1)...(483): n = A,T,C or G
natagatcannctctatttgatatctaggaagngcggcggaanncgagatatacattctgaattgcttttgaagtagcatcagagtatgtagtaaatatgttttatgtgttagtttgggattaaaatatgtaacaattctgcaaatgaattatataaaatggtcatattgagggactacacagtatatgaaggtcagatgacatatttggaagcacattgagagaaacaaaatattcttacacaaggttgttgttagaaatagtagtagcagtgagaatatgggacattcttaatgattcagaattgctggcatgcctattttctgtgaaccttgatatgtattcaactctgtcctgttacctttgtctcccgtagtcattctttgactgctgctgctgcctgtaatccactgtaagcctctcttggcaaaagagagattggtaactattagagagagaagttaaagacatgagccttattgt

SEQ ID NO: 9007 - DNA, 580 bp, Homo sapiens
  misc_feature (1)...(580): n = A,T,C or G
atttgagcacacttctgatgaccactccgagcggagcgacngnctggaactagggggtgccctcacagcggcacggagcccagtccctgtgctggaagtgagatgagctgttgtggggggtgggggactacgtctcacagatccctctcccagggcacatgaggagattcctcccccaaaacgcccaggaaggaagttaaattttaatatgggtctggtttagagaaactaggttagccatgcgtgggtgtttctggatgtttgggcagtaaggagagtcggtagctcaagaaatccgctggccgctaagcaggggtgaggggcaccgactgccatcccttcttcaaccacggccactcggccacatcagtgtctcctgccacctccctcgtgtccagcatcaacacagcactgcatccctgacccagggcagtggagaaaactcgcatccaaaaataaaccaggagtcagccaaaaacacgcaaattaaaattacacccttgccaggcgcggtggctcacgcctgtaatccaacactttgtgaggccgaagcaggccgatcacctggngtcaggagttc

SEQ ID NO: 9008 - DNA, 442 bp, Homo sapiens
  misc_feature (1)...(442): n = A,T,C or G
nttcgagatcgtagccctcgcggnggacttccattattaaaagtcataaggcatttatctgagtcattgctctacagagagcaattatatggcttgtaataataaaaagaatatttctctgtaatgcattgttgaaagacaaccagaatatcaagaaaatgtatataggaatatgctacttgcctcctccctgcatttcctcggggggcactatttgcaacatatgcctacagaattagactttcatacttagaagataaggtacactcttcttcttttatttatttatttatttatttttaggccattcttctggtttgccaaattctattaagacagtgatacatttgcttccttatttatgcatgcttagatcatgaacatgatgcccttctttttttttttttttttttggtcaaactgggataaaggccataggtaa

SEQ ID NO: 9009 - DNA, 567 bp, Homo sapiens
  misc_feature (1)...(567): n = A,T,C or G
ntgaaaactggatccctcttccnnnnncaattcgaagggaatggaccagggagtcccaggcctgggacccagagccaagaaagctgagatatcctgtgcaccatagggacttcaccaatggattacatgccatctgggacaggccatgtgggagaccccagttgtgcctttgctacagatctggaaaagacaaggtcatgggggcctccagtgtcctgcccctgcttggcccagttttgattgctggcatcttgccaccccaggtatccctggtattgtcctaagctgtatttgtgaattgtgctggtttcctgggcattgccacgcctaccacaggtgggtacattagaagccaccactggctttcaggcttgggggtgtcttctgagctcaagcctgcttctgggccaggccattgtcactggtagttgaagaaaaagcagttcccaggtgccagcaaagaccatctttcataactgtcactgtcttggccttgagaagagagcccgctctccgtggngcaccccatggaggacacagtaccagagtttacagagagggtgggcg

SEQ ID NO: 9010 - DNA, 466 bp, Homo sapiens
  misc_feature (1)...(466): n = A,T,C or G
aggcggtccaattgagncctancgtcagnggcatccgatnnagcnaacaaaccacgtcaancctacgctgtgcaagtaataatgtgattaaatttttgttggaggttacttcttccaagttgagtatggactattggcagattttattttttgcttgtcacttaaaactggctaaggtagataagctttgcacgaatgtaattcaaaatacactgtatacatatgtgtgtatctatgtgtgtgtgtgtgtgtgtatatatatgaaacaactgccatttagtcattccttagacaaatatgtgaatatttaccttatacaccaggccctgttttagattctggcaatatagcaatgaataaaacccacaaaaatccttgcccctgggccgggtgcggtggctcacgcctgtaatcccagcactttgggaggccaaggcgggtggatcacaaggtcaggagattgaag

SEQ ID NO: 9011 - DNA, 454 bp, Homo sapiens
gtttgaaacccccttgaggacccctagtcagtgtggtggaattcttttattttggggataaatagtagaaaaaagtgaaacagaatgaaggcaggtgttttttattctaatgatggaataatacagagatactggacgatctctagcagttaattattgtgacccatataaaattatacaggtcacagtataattctctattaccgtttttacaccagtaagtcttagataaactaagcatgcttatgaattatgtatacagttagaatgcattatttttacagaggaacaattgcttgtatgtactaacactgttctcttggcttgcctcaagttctactcattattttatataaaatactattaggctgggcacggtggctcacgcctgtaatcccagcactttgggaggtggaggctggcggattacttgaggccaggagttcgaggccag

SEQ ID NO: 9012 - DNA, 471 bp, Homo sapiens
  misc_feature (1)...(471): n = A,T,C or G
gaggcgtnnnnnnnattgagaccctgagaccctcggaagngcgnggaatttctgtcccaatcttaccagatgctactggacttgaatggttaataaaactgcacagtgctgttggtggcagtgacttcttttgagttaggttaataaatcaagccatagagcccctcctggttgatacttgttccagatggggcctttggggctggtagaaatacccaacgcacaaatgaccgcacgttctctgccccgtttcttgccccagtgtggtttgcattgtctccttccacaatgactgctttgtttggatgcctcagcccaggtcagctgttactttctttcagatgtttatttgcaaacaaccattttttgttctgtgtcccttttaaaaggcagattaaaagcacaagcgtgtttctagagaacagttgagagagaatctcaagattctacttggtggtttgcttgctctac

SEQ ID NO: 9013 - DNA, 482 bp, Homo sapiens
  misc_feature (1)...(482): n = A,T,C or G
catcgacaccctcgattgagtgccgtcaggcccngcccgaagaaggngccactggtggctgtggtatcaaggccccgtgcccagctctttgcctgcctgcttaggctgggcactcagcaggtcggcccccttcagctgcacaccggggccagccatgcggccaggaaccattatgaggtgctggtgctgggtgggggcagtggcggaatcaccatggctgcccgcatgaagaggaaagtgggtgcagagaatgtggccattgttgagcccagtgagagacatttctaccagccaatctggacactggtgggtgctggtgccaaacaattgtcctcatctggtcgtcccacggcaagtgtgattccatctggtgtagaatggatcaaagctagagtgactgagttgaacccagacaagaactgcattcacacagatgacgacgagaagatctcctaccgatatcttattattgctctcggaag

SEQ ID NO: 9014 - DNA, 404 bp, Homo sapiens
gcaaaataaggttttcttttttcccctttcttgtaataaatgataaaattccgagtctttctcactgcctttgtttagaagagagtagctcgtcctcactggtctacactggttgccgaatttacttgtattcctaactgttttgtatatgctgcattgagacttacggcaagaaggcattttttttttttaaaggaaacaaactctcaaatcatgaagtgatataaaagctgcatatgcctacaaagctctgaattcaggtcccagttgctgtcacaaaggagggagtgaaactcccaccctacccccttttttatataataaaagtgccttagcatgtgttgtagctgtcaccactacagtaagctggtttacagatgttttccactgagcatcacaataaa

SEQ ID NO: 9015 - DNA, 488 bp, Homo sapiens
  misc_feature (1)...(488): n = A,T,C or G
ccatcgacccccctcgactgaagtatcctcggacagngcggnggaantcctggagaaatgattgtcgggcaaccgtttattttttattgtattttatttgggtgatggatttttttataaacagttttacttgtgtcatattttaaaattactaactgccatcacctgctggggtcctttgttaggtcattttcagtgactaatagggataatccaggtaactttgaagagatgagcagtgagtgaccaggcagtttttctgcctttagctttgacagttcttaattaagatcattgaagaccagctttctcataaatttctctttttgaaaaaaagaaagcatttgtactaagctcctctgtaagacaacatcttaaatcttaaaagtgttgttatcatgactggtgagagaagaaaacattttgtttttattaaatggagcattatttacaaaaagccattgttgagaattagatcccacatcgta

SEQ ID NO: 9016 - DNA, 447 bp, Homo sapiens
  misc_feature (1)...(447): n = A,T,C or G
ntttgaagttccactactccagggcggnggaattcaaacaaaggaggctgctcgggctgggaggacaggtctggagtctctaacctgttgtcctgtgggctcaaggatacactgggcacattcagaacaccctgggtgggaggctacaggccaactgaagatactaatgctcgaacgaggaagataagtggctttgaaaaaggcttacacatatacacactccctaactaggctcaattacttggactaattacttaattgtaaaaggcaaaattataacacttttcatagaaaaaggtctgtatgacctcaagatagaaaaggatttcttaaataaaacatacaaaagagcaagccacaaaaaggaatattgatggttgtatttacataagaatcaagaacttcttttcatcaagacacatcgcaaagaaactaaaaagacaaact

SEQ ID NO: 9017 - DNA, 416 bp, Homo sapiens
cggggatgctcagggctggggctgcagagccgctgccctggccagggcaccctcatgcaccgacccaacccaggcctgggacgcacgtgtcctctcacagcgtcgtgcctgtgaaggtgggtcaaagggtgagagggcttccttctcacccttctctccataagtatcttgaagatccatggtttgttttgctctattgtttagtttttacttgggtgcaatgtgtacgtcaaaagtttttattttgatatttgaaagagaccaaatcaggcccagaccgcctctctggaaggtgttgtaggccattcaaaacgcctccggagtgtcgcaaaccaagtgcggaggggccctgaggttgtactgtaaacatcatagtgacttgtcttttcaaatatattcccactattttcgcagaa

SEQ ID NO: 9018 - DNA, 499 bp, Homo sapiens
  misc_feature (1)...(499): n = A,T,C or G
ggggaagggnnnngnnaatgcgaccntcgnattagatcatcggacangcggaggaantcgcttcctcacagcatggccaccttatggcagtgagactgcttacatggtaagtctgggctccagcatgaatgttccatcaagcaaggtggaagtcgcatggccttttctgactcagccttataagtcacacaactttacttttcccacattccattggtaacaaactagacacaaactcacaaattcaagaagtgggaggactgggctccaaatcttgataaaggagcagcacagttctggaagatggtgtgggacaggagatattctatggcaatctttggaagatacaatctgctacagtgtccccaaatccttattggattttttattatttatttattttgagacagagtctcactttgtcaccaggctggagtgcagtggtgcaatctcagctcactgcaacctccgcctcctgggttcaagcgattctcctgcg

SEQ ID NO: 9019 - DNA, 566 bp, Homo sapiens
  misc_feature (1)...(566): n = A,T,C or G
nttagatnactattnagagnggngcaattcntaagagaagctgagccattgcaatgagtccagattagggcttgttcctgcaggggctacagatgtgggggctggcacttgtggcagagggttccaaagtcatgggcatagagaagacaggttggcaggagcaagggcagaatgggagcggggtcctgggggtcctgttgggccctgaggaggactgcagaggtgtcggtgaggggtggacaggcaggcgtgtcagcacaaccctgagcccctgagctcaagtgcagggatggccgtgaagcangtgatggggaccctggcttgagcttcatcggtagcggngctggggtggacaccggngactggcggagagaagattgggtggnggccggccaaagcagtgtgtccctcanggagcgtggcagagcggngcgcgcacacangtctgctctccagttccttcgggagttcctcanattcagccagcttcagcttgccctggcacagaggagctgactgaggcttcagtacaaggcctgctctttcccctctgtcccctcangtgg

SEQ ID NO: 9020 - DNA, 484 bp, Homo sapiens
  misc_feature (1)...(484): n = A,T,C or G
tgatgcagagnncncctttatatnacccttcggattgagcaccctaggccangccgnggaattccaaaattcagaaagtctgtgaaggagccgcgtgcaagtgtgtataaactgattgtggttttaatgcaggaagaattggatctgacaatctctgcagagacaagaaaacaaacagcatgtaaaccagagattgcatatgcttataaagttagcatcacatccatcactgtagaaaatgtttttgtcaagtacaaggcaacccttctggatatctacaaaactggggaagctgtggctgagaaagactctgagattaccttcattaaaaaggtaacctgtactaacgctgagctggtaaaaggaagacagtacttaattatgggtaaagaagccctccagataaaatacaatttcagtttcaggtacatctaccctttagattccttgacctggattgaatactggcctagagacacaacat

SEQ ID NO: 9021 - DNA, 447 bp, Homo sapiens
  misc_feature (1)...(447): n = A,T,C or G
attttaatgatagcttatgagtaggtagacatccccagggncgcacgcgngagacttctccgccgcctgcgccgcagacgccgccgcgatgtgctacgtcgcctcctacctgctggctgtcctagggggcaactcctcccccagcgccaaggacatcaagaagatcttggacagagtgggtatcgaggcggacgacgaccggctcaacaaggttatcagtgagctgaatggaaaaaacattgaagacgtcattgcccagggtattggcaagcttgccagtgtacctgctgggggggctgtagccgtctctgctgccccaggctctgcagcccctgctgctggatctgcccctgctgccgcagaggagaagaaagatgagaagaatgaggagtctgaagagtcagatgatgacatgggattcggcctttgtgattaaattcctgctcg

SEQ ID NO: 9022 - DNA, 454 bp, Homo sapiens
  misc_feature (1)...(454): n = A,T,C or G
nattgaaaatagtagacctttgnccgngcggtggaattcgaaacttgaggctgctttggttcatgaatccaggtgttcccccggcagtcggcttcttcagtcgctccctggaggcaggtgggcactgcagaggatcactggaatccagatcgagcgcagttcatgcacaaggccccgttgatttaaaatattggatcttgctctgttagggtgtctaatccctttacacaagattgaagccaccaaactgagaccttgatacctttttttaactgcatctgaaattatgttaagagtctttaacccatttgcattatctgcagaagagaaactcatgtcatgtttattacctatatggttgttttaattacatttgaataattatatttttccaaccactgattacttttcaggaatttaattatttccagataaatttctttattttatattg

SEQ ID NO: 9023 - DNA, 488 bp, Homo sapiens
  misc_feature (1)...(488): n = A,T,C or G
ggtcgcccctttgagacctcgtagtaggcctgcgnannncacgcnngacctgccataagcggtataaaatccaaaaaaaggttcgagaacattatcgaaaattaataaaggaggctaaaaagcaggggcacaagaagcctaggaaagacccaggagttccaaacagtgctccctttaaggaggctcttcttaaggaagctgagctaaggaaacagaggcttgaagaactaaaacagcagcagaaacttgacaggcagaaggaactagaaaagaaaagaaaacttgaaactaatcctgatattaagccatcaaatgtggaacctatggaaaaggagtttgggctttgcaaaactgagaacaaagccaagtcgggcaaacagaattcaaagaagctggactgccaagaacttaaaaaggtgattgaagcctccgatgttgtcctagaggagttggatgccagagatcctctgggttgcagatgtcctcag

SEQ ID NO: 9024 - DNA, 434 bp, Homo sapiens
cctgaaagagataaagagaggcctgtccagtctttgaaaacatcaagagatacttcaccctcaagtggttcagcagtttcttcatcaaaggtgttagacaaacccagtaggctaactgaaaaggaacttgctgaggctgcaagcaagtgggctgctgaaaagctagagaaatcagatgaaagtaacttgcctgaaatttctgagtatgaggcgggatccacagcaccattgtttactgaccagccagaggaacctgagtcaaacacaacacatgggatagaattatttgaagatagtcagctaaccactcgctctaaagcaatagcatcaaaaaccaaagagattgaacaggtttaccgacaagactgtgaaactttcgggatggtggtgaaaatgctgattgaaaaagatccttcattagaaaagtctataca

SEQ ID NO: 9025 - DNA, 448 bp, Homo sapiens
  misc_feature (1)...(448): n = A,T,C or G
atgagagaccttagnnattgacgaccttagtcagngcggnggaattcacctgctgggatgacgtgagttgaggaggctcagcggaaagcgacaggaaagacagtaagctctctgaagtcaagaaccatagttgttttgttcactactgtatactcagcacctaatagtacttgggacataagtactcagggactatttgtcaaatgcaagaacatatgcccctaaagcagaagtcaggaaaaccagaaaaaatgcctttaagtattactgaaatgccacaggcctccacttaaattgaaaagcaagctaacccctcttgataaaaatgtggattgagatcaagaagcagcttctctgctccttatggaatctccacctggtttagcctgctgcctccactcctgcctccaccatgtccatcagggtgatccagaagtcctacaaggtg

SEQ ID NO: 9026 - DNA, 507 bp, Homo sapiens
  misc_feature (1)...(507): n = A,T,C or G
cccccccatcgagcnccnctcgncnnnatttgaaagtcctattccagngncgcggaaatccaaaagcagatttctgtatctgacattcacatgtttctgttgtcatgcttgaatgtatcagtacttgcagctttcccctgaagctgactttgcggtcacagcttttttttcctttttgccaacagctttattgagatataattcacataccatacaattaacccattttaagtctacagtttactggcttttagtagattcacagagttgtgcaactatcaccacaatcatttttagaacatgtttcttacccccaaaagaaaccttataccctttagctatcacctttccaattcccctgttgtccccagtcctaagcaaccactaatctactttacgtttctatagatttgcccgttctggatatgtcctgtaatagaatcatacaatatgtagccttttatgtcagacttcttttttacttagcatgttttcagggttcatcca

SEQ ID NO: 9027 - DNA, 470 bp, Homo sapiens
  misc_feature (1)...(470): n = A,T,C or G
gggccgcaaatgtagacactagnatgggtggccgtattcctagaacttctctaagcctatacgtttctgtggagtaaatattgggattggggggaaagagggagcaacggcccatagccttggggttggacatctctagtgtagctgccacattgatttttctataatcacttggggtttgtacatttttggggggagagacacagatttttacactaatatatggacctagcttgaggcaattttaatcccctgcactaggcaggtaataataaaggttgagttttccacaactgtgtgagtgggttccttgggaatttggtaactctgcctcctgcacctccctctgaacccacttcccaacccacttcccatcttccttttttcctgcctcctcattccatttcccatcacctgttttgcccagcattgtgttctgtttctggataatccaggcctttgcctgtggg

SEQ ID NO: 9028 - DNA, 485 bp, Homo sapiens
  misc_feature (1)...(485): n = A,T,C or G
ccgcggcccccccccccattgtagnccntattgtagattattagtccatgtggtggaattccttggttcaggaggcgttgggaagtctgctctgacagttcagtttgttcagggaatttttgttgaaaaatatgacccaacgatagaagattcctacagaaagcaagttgaagtcgattgccaacagtgtatgctcgaaatcctggatactgcagggacagagcaatttacagcaatgagggatttgtatatgaagaacggccaaggttttgcactagtatattctattacatctcagtccacgtttaacgacttacaggacctgagggaacagattttacgggttaaggacacggaagatgttccaatgattttggttggcaataaatgtgacctggaagatgagcgagtagttggcaaagagcagggccagaatttagcaagacagtggtgtaactgtgcctttttagaatcttctgcaaagn

SEQ ID NO: 9029 - DNA, 443 bp, Homo sapiens
  misc_feature (1)...(443): n = A,T,C or G
attttatggggcttttcgatattgaacctacgaaaacncaccatgccccaggctcagcagggagctgctggatgagaaagggcctgattttttgcacgactcattggatagatgttattcaactccttcaggttggcttgaactgactgactcatgccagccctacagaagtgccttttatgtattggagcaacagcgtgttggcttggctgttgacatggatgaaattgaaaagtaccaagaagtggaagaagaccaagacccatcatgccccaggctcagcagggagctgctggatgagaaagatcctgaagtcttgcaggactcactggatagatgttattcgactccttcaggttatcttgaactgcctgacttaggccagccctacagcagtgctgtttactcattggaggaacagtaccttggcttggctctcgacg

SEQ ID NO: 9030 - DNA, 458 bp, Homo sapiens
  misc_feature (1)...(458): n = A,T,C or G
nttgagacctttgagagcgtgcggaannccagncctactggcagcgagtgagagacctatctcaccatactctcaccaacactgtatgggagcttatggataaatagaaaatatgtgttttagttaggagtgactaacattctgattcaaccctctcttggggcctaagtttccttatgcatataaagagatagatagggaggcagctggagtatgtgatgcctgagagctaacattcaatggtcccttccatccttgctgctcattctttacttggataatggatgtttggaagtaactaatttctctcttaattggggtttccttgggggcgagacaagtcatttgcttaagacgtgatcccaggggaaaaaaaaattaagtagacgtgctctggtttaaggaaaacaaatatttggaaaccaaagctctaaacagagttttttaagaacaggaat

SEQ ID NO: 9031 - DNA, 471 bp, Homo sapiens
  misc_feature (1)...(471): n = A,T,C or G
aggagtaccnnntttgatncccctgatgacattagtcagtgcggtggaattcgatgaatttcaactatatgatattgtttatgttcctcagacatgttatttgtctttacaaagattggtttcaataaactgtgtgactgatattaaataaacatggaattttacacattcataatatttggtttcttgtgattttgatgaactatactttcaagcattgtcagttcatcctcatttacaaggaaacatttgctgtagcagagtgatgtagtgacttgctttacttaagataagtcaacttttctattcaatgtttaatgtgaaactgacttaaaaattttcttttaggccacatttacatttctgtttgtataacatgcattatactattttaacttaatactatggctatataaaccaaagacatcctaattctgtttttaatttattggtttgcaagataaataattt

SEQ ID NO: 9032 - DNA, 449 bp, Homo sapiens
  misc_feature (1)...(449): n = A,T,C or G
actagagaccctaggncttgacgacactagtcagtgcggtggaattcgcaaaaattctctgctaagactttttcaggtgaacataacagacttggccaagctagcatcttagcggaagctgatctccaatgctcttcagtagggtcatgaaggtttttcttttcctgagaaaacaacacgtattgttttctcaggttttgctttttggcctttttctagcttaaaaaaaaaaaaaaagcaaaaaatgctgggggttggcactcctggtttccaggacggggttaaaatccctgcggggtctttgctttgactacaaatctgtcttcaggactctttctgaatttctccttttctctgcaggggctattttttggagttttggggaggggggaggtaacaccacaatatctttgaactatatacatccttgaggtataatttgccaggaa

SEQ ID NO: 9033 - DNA, 439 bp, Homo sapiens
  misc_feature (1)...(439): n = A,T,C or G
cctagaggtacgattacnccagngcggnggaattcccaaacatctccctccccagcatcttcccatcatcacttctgctgctttttccttttctgtatctctgcttattgagtggctaatcagaagtctctcctcaagagcttgtaattctgtgttttaaattagatattttatttggatcctacccatattcttaatctttttcattgagtcaaccttattctctctgttgaatttactatatccacaaagagcagttcttatgatggctaatttctgatttatgtttctggtgcttgtgatagtgattcagtagatgatttaatgcacaaagaaggaggtcatatgctgggaaaagaaggaagagatagaaataagttagacgccgaatatataaactggtaattgagatgtcagttttaggccaaaatctaataan

SEQ ID NO: 9034 - DNA, 492 bp, Homo sapiens
  misc_feature (1)...(492): n = A,T,C or G
cgggattggncccctcganaccctaggcagngncgnggaattcgagcgagactccgtctcaaaaacaaacaaacaaacaaacaaacaaaatacttgcctgttaattctcatttctgagatcctgcagctaccttgggtggtggcctgtccaagcctggcctttgttttgttttgtttatttgttttgagacagtcttgttctgttgcccaggctggagtgcagcggcgtgatcatggctcactgcagcctcaaactcctgggctcaggcgatcctcccacctcagcctcccaagtctttgggattataggcgtgagccaccgtgctggcttgcctttggttctctgaactactccagttctttccactaaatccacccccctcttttttcccctttggttaatcagaatccatatcttttgctccagatcaaagaaccctacccgatgatcccttctccattcacaaaatcaataacatactcaaaatcaat

SEQ ID NO: 9035 - DNA, 480 bp, Homo sapiens
  misc_feature (1)...(480): n = A,T,C or G
ccgccccccccngnnnnngnattgtagaccctttgcagtctggtggaattcgcggagaacccctgcaggtggagcgcacgctcatctattacctggacgagattcccccgaagttctccatgaagcgcctcaccgccggcctcatcgccgtcatcgtggtggtcgtggtggccctcgtcgccggcatggccgtcctggtgatcaccaaccggagaaagtcggggaagtacaagaaggtggagatcaaggaactgggggagttgagaaaggaaccgagcttgtaggtacccggcggggcaggggatggggtggggtaccggatttcggtatcgtcccagacccaagtgagtcacgcttcctgattcctcggcgcaaaggagacgtttatcctttcaaattcctgccttccccctcccttttgcgcacacaccaggtttaatagatcctggcctcagggtctcctttctttctcacttctgg

SEQ ID NO: 9036 - DNA, 463 bp, Homo sapiens
catcgccgacatatagaggacccttagacagagcggaggaattcctattgtaactgatacttaaacagaaacaaatttaaggcatatgaactcaaagggaaaatgggaactatttattcagtggggctgttctttggtaatgttctatgataaaccttgatttttttttcttttttatatacaaatgttctgaagcaaggttacctctttcattttgatttgattttacccagttttaaaattcacagtagttgtttagaccattatgatatttaaatacttacagttttgcagcttaaatacatggagaatacttatggtagaaatactgaatttaagaagcacacaaggttccggaaattatataaattatggggaagaaccttcagttacttcttattgctaagtggattaagggaattcctagcttattaagaatatggtttattgaatccaggatatc

SEQ ID NO: 9037 - DNA, 497 bp, Homo sapiens
  misc_feature (1)...(497): n = A,T,C or G
cgcccaatcgaganccntagtccagngtggaggaactctaaaagcaggagaccaaattatttgtatggatgatgtgtatggaggtacaaacaggtacttcaggcaagtggcatctgaatttggattaaagatttcttttgttgattgttccaaaatcaaattactagaggcagcaattacaccagaaaccaagcttgtttggatcgaaacccccacaaaccccacccagaaggtgattgacattgaaggctgtgcacatattgtccataagcatggagacattattttggtcgtggataacacttttatgtcaccatatttccagcgccctttggctctgggagctgatatttctatgtattctgcaacaaaatacatgaatggccacagtgatgttgtaatgggcctggtgtctgttaattgtgaaagccttcataatagacttcgtttcttgcaaaactctcttggagcagntccatctcctattgattgttacc

SEQ ID NO: 9038 - DNA, 452 bp, Homo sapiens
  misc_feature (1)...(452): n = A,T,C or G
taaacctgataccntagatttgacgacattagtaagngcggtggaattcacttagtttattccttctttttgcaatttgctccagagaataaattgagtaccacagaacctgtgattagcatttcttcaaacaatgcagtgatagaactggcaaaatctccagagagccatggacattggagagagtggtattatggtgtaaacaacgattctttggaggaaaggttatttgtcaatgaagaaaatgttaatgagtttcttgaagaggtcctgagctctccattcaaacagtctatgtccttgaccccaccattaattgaagttcttcaagttactgataataagattcaaattaatgcaaagttgcaagaatgtagtaactctgatcagctacaaggaaaggaggaaagagtaaatgaagaaagtcatctaactgaaaaggaatatataga

SEQ ID NO: 9039 - DNA, 467 bp, Homo sapiens
  misc_feature (1)...(467): n = A,T,C or G
gcagggccngaatganncccactgagaccattgacagngcggggaatcggagaggtgagatgacccctagccttcaacactgggcaacagaggagacagctccatctacagccttggactagaccctggggaggaagaacgagcggtccaggctactcgggtttctggcaagagcagggtgcccaggctgggacccacacatctctctttcacttgggccttgcctttcttcctagaccctgggcccaaccctttctgaagcaacaaagaggggaagcaactaaggagaaaggcaaattgcatggagtttagcggcaggaaagattcctcagctacctgcccaaaggactgagacatgcattaagatatctttacccttctgagggcgtgatcatcattccaattccaccgggcttttacaaggattagaagtaatacatgtaatacaccaggcacatagtatgtan

SEQ ID NO: 9040 - DNA, 451 bp, Homo sapiens
  misc_feature (1)...(451): n = A,T,C or G
ttaacctcgtagacactaggncttgcgggcaattccgacagcccctctgtttttacaccaataacaagaattaagggggaagccctggcagctatacgttttcaaccagactcctttgccgggacccagcccgccaccctgctcgcctccgtcaaacccccggccaatgcagtgagcaccatgtagctcccttgatttaaaaaaaataaaaaataaaaaaaaaaggaaaaaaaaatacaacacacacacaaaaataaaaaaaatattctaatgaatgtatctttctaaaggactgacgttcaatcaaatatctgaaaatactaaaggtcaaaaccttgtcagatgttaacttctaagttcggtttgggattttttttttttaataaaaatcaagttgtttttgtttttaaggaaaagcgggtcattgcaaagggctgggggtaattttatg

SEQ ID NO: 9041 - DNA, 494 bp, Homo sapiens
  misc_feature (1)...(494): n = A,T,C or G
aggagtacccnnnaggnngnnnnactgattaccctagactgatggccgtaanaccancgacaggccaggacagnggagcttctccatgtggaaggaaacatcaggagtaaagcaaaagcatttctctaactccttcagcctgtatattactggagttcaagactaaggccacagtattgaaatgaatgtgtggatctgaaaagggagatgcacctgtcaaactgggaaggaagaatgtttgaaaatagaaaaataaaatgacctgggcttggattggggaaatcagttaacaaaacctgaatgacaacaggcacacacaactaggtgcatgcagcatatttaaaaaatatatgaggagctgattgatagcattaaatagtcaactggacccactggttgcatgtctctttcacaggtggaacgattctggatgcagagcaatgcaatagtggccgtcctcgctggcattggtttggctgcagttgtgtctgaga

SEQ ID NO: 9042 - DNA, 471 bp, Homo sapiens
  misc_feature (1)...(471): n = A,T,C or G
agggtaccngntttgagccaactgagatcatcgtacagngcggnggaantcggggacagggattaccttgaggtgccctggccctggcacacagagctgctaacacagaggactgggccttaggagggcaggcccagaaacacagcactggctctccagggtccccggtagacaccaatcccaccagccccagcctaggaggaagcctgcgggctcagagaccacctgcatgcatgacaccctcccctttcagcaggttctcagatggaggagacacctgtgatctagtggctcctgggtcctgcccacccggggccccagctctcccgccttgtttctctctttccttgctaagaacattccttccagagactgcctcccaccaccctctgggcttcggagcattggtggaacttttcagggttcatcagtggaactgggtgtgccgctgggctccccggacaggaagca

SEQ ID NO: 9043 - DNA, 550 bp, Homo sapiens
  misc_feature (1)...(550): n = A,T,C or G
gtttgaatttcgaatactattccagcgnggngcaantccaaagcaacaaatccttttagaaatctgtttacaaagcagatcagagatatcatcggttattgaaaaaagtgggtagagagtggactctcatgttccatattttccctttaactgagtcataaattatcttccatgctgactacagtgcttatttagtgcttactatacaaccatgaaaatttgttcatgcctcactctattgtgctgagatttcacagaaaccccgtgaacccaatgctacatacctaattatgtgtcaatttttgtccaatctcagaaaataactggaagtatttatttaagttatgcattcccctaactgataggcacaagtatcttggtcaaactgctatgaaaaaatgattcctggtagagatgtgtgattttgctggggttcatttcanggaaggaacagaccanaatttgggcagatgcagaggtcttggccttgaagcctgtcagccacccacatgctgtcaattctttgttagcacagtgcaccttgcatcgc

SEQ ID NO: 9044 - DNA, 508 bp, Homo sapiens
  misc_feature (1)...(508): n = A,T,C or G
aggggngggggnnnnnnncttatgttttccatactcagtgtggtggaattccaggatcccaatgacaagaccaaattctacgcagctggcctggtgtcctgggggccccagtgtgggacctatgggctctacacacgggtaaagaactatgttgactggataatgaagactatgcaggaaaatagcaccccccgtgaggactaatccagatacatcccaccagcctctccaagggtggtgaccaatgcattaccttctgttccttatgatattctcattatttcatcatgactgaaagaagacacgagcgaatgatttaaatagaacttgattgttgagacgccttgctagaggtagagtttgatcatagaattgtgctggtcatacatttgtggtctgactccttggggtcctttccccggagtacctattgtagataacactatgggtggggcactcctttcttgcactattccacagggataccttaattcttggttcctctttt

SEQ ID NO: 9045 - DNA, 483 bp, Homo sapiens
  misc_feature (1)...(483): n = A,T,C or G
gcccccnnnnnnnnaatgatagcctacgctgngncgnggaantcgtggtgggtacgggcacctcgctggcgctctcctccctcctgtccctgctgctctttgctgggatgcagatgtacagccgtcagctggcctccaccgagtggctcaccatccagggcggcctgcttggttcgggtctcttcgtgttctcgctcactgccttcaataatctggagaatcttgtctttggcaaaggattccaagcaaagatcttccctgagattctcctgtgcctcctgttggctctctttgcatctggcctcatccaccgagtctgtgtcaccacctgcttcatcttctccatggttggtctgtactacatcaacaagatctcctccaccctgtaccaggcagcagctccagtcctcacaccagccaaggtcacaggcaagagcaagaagagaaactgaccctgaatgttcaataaagttgattctttgn

SEQ ID NO: 9046 - DNA, 488 bp, Homo sapiens
  misc_feature (1)...(488): n = A,T,C or G
agcgggccggnnngnaattgactgcgtacataggccagngncgnggaattcatcaaataaaaatagatttctaaaaaaaagtatcataaaagataaagaagggcactttagaagaagaaaaggaataattgatcaagatgacataaaatttacaaatttatttgtgcctaataatagtctcaaattacataaggcaaaaactgatagaatgaaaggaagaaataggcaattataattggaaattttaatgtctctcagaagttgatagagtaaccaacaaaaaatcagcagacagaaaacctgaacaacattatcagtcactttgacctaattaatatttttagaacatttcactcagcaatagcaaaatgcacattcttttcaagtgcacatggaatgcttaccaagatagaccacattctggaccataaaaaagttttaataaatattaaaaaggttgaaatcaaatagtttggtctctgaccaca

SEQ ID NO: 9047 - DNA, 463 bp, Homo sapiens
  misc_feature (1)...(463): n = A,T,C or G
ggcgggngnnnnnaactggaccaaatcganagctgtgantnncacagaatcctaagctggccgcggggaccagggccttcagaggaggctttgcagctggccaagcaggagggcatcctcttgagggatgtcctgtccctgcagctggactttcggaacatcctccgcatagacaacctctggcagtttgagaacttgaggaagctgcagctggacaataacatcattgagaagatcgagggcctggagaacctcgcacacctggtctggctggatctgtctttcaacaacattgagaccatcgaggggctggacacactggtgaacctggaggacctgagcttgttcaacaaccggatctccaagatcgactccctggacgccctcgtcaagctgcaggtgttgtcgctgggcaacaaccggattgacaacatgatgaacatcatctaccttcggcggttcg

SEQ ID NO: 9048 - DNA, 456 bp, Homo sapiens
  misc_feature (1)...(456): n = A,T,C or G
taaacactgataccntnngaattgacgacatctatcagtgcggtggaactcgaaaaaggcaaaatttcagaattggatgaagaacagtttaaaagttcataatgaatccattctggaccaggtgtggaatatcttttctgaagcttccaacagcgaaccagtcaataaggaacaggatcaacggccactccacccagtggcaaatccacatgcagaaatctccaccaaggttccagcctccaaagtgaaagacgccgtggaacagcaaggggaggtgaagaagaataaaagagaaagaaaggaagaacggcagaagaaaaggaaaagagaaaagaaagaactaaagttagaaaaccaccaggaaaactcaaggaatcagaagcctaagaagcgcaaaaagggacaggaggctgaccttgaggctggtggggaggaagtccctgaggccaatggctc

SEQ ID NO: 9049 - DNA, 443 bp, Homo sapiens
  misc_feature (1)...(443): n = A,T,C or G
taaatttgtagacattagtcttgtgcggcgtattcaattgactgagaagatggagagggacagggcccagttaatggcagagcaagagaagaccctcgctcttaaacttcaggaacaggaacgccttctcaaggagggattcgagaatgagagcaagagacttcaaaaagacatatgggatatccagatgagaagcaaatcattggagccaatatgtaacatactctaaaagtccaaggagcaaaatttgcctgtccagctccctctccccaagaaacaacatgaatgagcaacttcagagtgtcaaacaactgccattaaacttaactcaaaatcatggaaaaaaaaaaaaaaaaaaaaaaaataatttaatggggnntnnnnggttgggggggataccattattacccatcttagaggctgggattctgactagatagcct

SEQ ID NO: 9050 - DNA, 468 bp, Homo sapiens
  misc_feature (1)...(468): n = A,T,C or G
tgcgttannnnactgtagacactgattagcgtgtggaattcctacagttgagaagaaaatgacagacaattatttttcctttaggtcaaaataatgtcactgctatctggataaattataagttcatatatttgaaataagatcctggaaacgaatttaaatggtgtcaaactgcagagcaacagggcttcagtatattcacatctaataggttaatatgtacatttggatgatgatttttcttgataacattaacattaattttattttttcagacatactgtaatttaaaaattaatgtgagcgtttgttttaagttcacagaaaacttaataattcaaattctcaggaattaaggactcaccataacattgtcagttctaatgaaattttgtaaaagatggcaagtttgttacctcacttgagtggggttttccttttcccccaattctaagagaatataatgtg

SEQ ID NO: 9051 - DNA, 443 bp, Homo sapiens
  misc_feature (1)...(443): n = A,T,C or G
attcgagaccctngnttttgtggtccttagtcagtgtggtggaattcctaggttcagacgttagtgaagtgaatactcaccgacggtatcggaatgtgccatttggaccggtcggcagcagctacggttgccggtcccgcactgaaaaacgacagtggtgacgggtgagctcccagaagcagaagaatgacaggcaacacctgaagccacgcagccgccgccatcttcacagccgtggagtgcctaccgaaagcatttcaccctcttccggactcattgcgtacacgccctcaccgccgcccagtttcggttcctaacaaaagcacgttcctcatcagccacccataatcaagacaaatttgccaaataaatcattgtagaaacgctagtttgggcctgaaaaattccaggagcaagagtcaagatttgtcactccatgagaa

SEQ ID NO: 9052 - DNA, 450 bp, Homo sapiens
gggaaaatgagactctagcaatgagggcattgcggctcctgtgtgtggcgttggcggtcttggcatggggcttcctctgggtttgggactcctcagaacgaatgaagagtcgggagcagggaggacggctgggagccgaaagccggaccctgctggtcatagcgcaccctgacgatgaagccatgttttttgctcccacagtgctaggcttggcccgcctaaggcactgggtgtacctgctttgcttctctgcagttttccgtagggagctaagtgaatacaccgaaggtcttacctctgaacccctcacagcctagggacaggagcggccggcttacctggtgggttgggggacgtcggcagctcgcgtactacgccagcaggattgaggagcagagaaacagttgcagttggttgtattcagtacctgcatttccgttgggaactcca

SEQ ID NO: 9053 - DNA, 473 bp, Homo sapiens
  misc_feature (1)...(473): n = A,T,C or G
ggcgggggggccgcctgaatccancctacggngcccgcaatnccggnaaaattcttaaaaatagcctccatcatccccccaaatttactgatcaatttttatgatttatctgcaaacctgcagacactggggtgatttttggttatgattcctatgtgttcagatagtcatgtttttctgtactactttaaaaccactttgcatccccaaagccaaagttttaaaatttcaattacttatttaatttgaaaaaaaagactttgaaaagttttgaaaaaaatacatattagtgtttctttagaaaatgagttttaatttttaaatatttaaatatttgggttggttagattttgacacattaaactctgcaagaactcatttattgcataaaatgaaacacacatgcatacttgccatacaggattgaatttttatatgtacaactatctgtaatctagtaattatcgcatgtg

SEQ ID NO: 9054 - DNA, 453 bp, Homo sapiens
  misc_feature (1)...(453): n = A,T,C or G
gggnataaaactgatnaccctangactngacgncatctttntgactgttgcccccgaaagcagagaagaaacaatctattttcccatgccacaaaccagattcaagaaaatttaaaaatatgaaagaatcttcccctgtgagaactctgcactgaaccttttagcatatatatgtgtctattccatgtgctcttttctaaagagactctactgtagcttaaataagaatggaaagataccagtaattgttcatttctatattttttgtgcacaacatctaggccttctgtcatgtcttaggttgaataccaatcttctaaagccaaaaaagaaaatttccacattcatttctttaaagcattttgcttaagagccagcattctacagagaggatattataccagaaatatttgactcctaggtgatattccctggtggaggtgaccacatttc

SEQ ID NO: 9055 - DNA, 458 bp, Homo sapiens
  misc_feature (1)...(458): n = A,T,C or G
gagatttaaaatcgatnaccctnggaattgacgacattagtaagtgcggtggaattcaatgaggacagcttgagccgggcccctgggcttggcctgctgtgattccactacacctggctgaggttcctctgcctgccccgcccccagtccccacccctgcccccagccccggggtgagtccattctcccaggtaccagctgcgcttgcttttctgtattttatttagacaagagatgggaatgaggtgggaggtggaagaagggagaagaaaggtgagtttgagctgccttccctagctttagaccctgggtgggctctgtgcagtcactggaggttgaagccaagtggggtgctgggaggagggagagggaggtcactggaaaggggagagcctgctggcacccaccgtggaggaggaaggcaagagggggtggaggggtgtggcagtggttttggc

SEQ ID NO: 9056 - DNA, 451 bp, Homo sapiens
  misc_feature (1)...(451): n = A,T,C or G
aactggatgaaccctagnancttgacggaccatattgaagaacgaaggtgaggctcatacctgttatcctagcactctgggtgatggagaattgagaatcaattgattacaggaatttgagaccagcttgggcaatatagcaaaaccttgtttctacaaaaaaaatttttaaatagctggatgtagtggcatgtgcctttagtctcactcagctactcggaaggctgaggtgggaggttcacttgagcctggcagcttgaggctgcagtgagctataatggtgcactgcactccagcctgggtgacagagtgagaccctctctctaaataaataaataaaaataaataaaaaatataaatttatataaataaaaattgataaaatcaaaattaaaagtacatcaaggagaagaaagaaaacccccagtcattgtgagtgacattaatacat

SEQ ID NO: 9057 - DNA, 494 bp, Homo sapiens
  misc_feature (1)...(494): n = A,T,C or G
aggagagccnnnaggggngnnctccctttatcttctcccaacggcctcgnaanncnnnnnaattnnnnnaaggagtgacgggcttttcatatatttttgctgaatattataaggaacgttttgcatttgcgtcacgtggacgagggacagagcgtgaaatagcagtgctcagaaacaattataacatgttgaaacgacaatattctaaaatactgatgaatcttgcatcaatataattattgggttttttttctttttcctgctgtataactccttgccatgcaaactctcaagaggccaatatattcctggccatgtttgaatgagcctcttaaaataaacttagagccatgcaaatgccagcagcttaatggatttcatggaatgaaataccgcgattaactcatagctacatatcattgcataaatgggatttatcttttttctcacttattttttgctgtgaaagtcgagggcatgcaagagtttctctn

SEQ ID NO: 9058 - DNA, 444 bp, Homo sapiens
ataaaatttgatgaccattagtcttggacggcgtattcaattgagttaaatccaccagagaagatggctcttgatccttacactgaactccgaaaacagcctcttcgtaagtatgtcaccccatcagactttgatcaactcaagcaatttctcacctttgacaaacaggattcttgagtcactactttggattcttcaaaggtccttcgattctatgcaatctgggatgatacagacagcatgtatggtgaatgtcggacctacatcattcattactatcttatggatgatacggcggaaattcgagaggtccacgaacggaatgatgggagagatcctttcccactcctaatgaaccgccagcgtgtgcccaaagttttggtggaaaatgcaagagttgcctccttataacggctttggactagaggaagattctgctcagaa

SEQ ID NO: 9059 - DNA, 395 bp, Homo sapiens
ctatctcttaatattataaataattatatagtaaacatcttattagctatatctttataagtattcatagttgttttttagaagaaatttctagaagtggaatttttaggtccaaaggtatgcaacaatctaaagcttttgtgacaaattcacaaattgcatttcagaaagtttgtgccaatttattctcccacttacattattaagatatttgttttgtttaagataaggtctggttctatcactcagcctggagtacagtggcatgatcatagctcaccacagccttgaactcactcctgggctcaaaccatcttcctgctcagctctcaagtagttggtactaaaggcatgtgccatcatacctggctaatttcttatttttgtttgttttt

SEQ ID NO: 9060 - DNA, 477 bp, Homo sapiens
  misc_feature (1)...(477): n = A,T,C or G
cgggagtttgccgtcctgagtccctaccagtagngcccgcaatngcgganaantccccgagatgtttttgtatgcagctccgaggaggtaggcagtgtttagccggcgtttagtccggcccgtgccaacagtgggtcctctctgccccgtagttcgaggagaccacgcgctgcccctctggcacgatcgtggatgaaccccctggcaactgaaatgggaaaggcagcgcccccgactctggggactggaccgaagtccacggtagtgacagctgccagaccctgaggagaggacgagaagacccgaggcctctgctacgaacactggcagccgatggaaaattcagacggatttgggacagtatgcagagttctccaagcgacagattaacagaggctcttgaagaataactgcgtaatcacgtgttctgctcaaaagaaggcctgaatgcccagtgccttatttggctttcagggg

SEQ ID NO: 9061 - DNA, 481 bp, Homo sapiens
  misc_feature (1)...(481): n = A,T,C or G
cgcccccaatgaaaccntcgaaactgagacatagaaagngcggnggaattccaaagaatggtattttcacttttctttgtaacattgaatggtttgaagtactcaaaatctgttacgctaaacttttgattctttaacacaattatttttaaacactggcattttccaaaactgtggcagctaactttttaaaatctcaaatgacatgcagtgtgagtagaaggaagtcaacaatatgtggggagagcactcggttgtctttacttttaaaagtaatacttggtgctaagaatttcaggattattgtatttacgttcaaatgaagatggcttttgtacttcctgtggacatgtagtaatgtctatattggctcataaaactaacctgaaaaacaaataaatgctttggaaatgtttcagttgctttagaaacattagtgcctgcctggatccccttagttntgaaatatttgccattgttg

SEQ ID NO: 9062 - DNA, 492 bp, Homo sapiens
  misc_feature (1)...(492): n = A,T,C or G
ggagangccnnagtnnnnnnnattcgagacttctgatagagcgccgtaanncaggaaactctgatgaggaagaaagtgcttcagaatctgaactttggaagggtccactaccagagacagatgaaaaatcacagtaagtgctgatattaatagagaatatgtaccttttcaatcagtttaggaagctataaccacagctttattaatggaaaaatacaacatcatggtgatctatttaatgccaaggactgcctagcctggtaagattagagcttattcccagccattgtcataagcagccaacacatccagcttcctcctggtaaataaatctttcatcagttcactttaacagatgaacctctggtccttgcttggatttcttcagagatggctgtttcctaagcttccagagaagcctattccatcatactgtgattatcataaacctatgcaagggaatcccttgcatgggaagtacacttctatact

SEQ ID NO: 9063 - DNA, 490 bp, Homo sapiens
  misc_feature (1)...(490): n = A,T,C or G
tgctggtcgggggccaatgatacctacctgcgtgngcaggaancnctnanncagaaggaatcttagacagcaaactctttcgccaaacgactgctgggaattttatctgattaacattcctgacaccatctgtgggtcatcctttcgctggaccgttcagaggacagctttcaagcagagcttgttgtgaggtcccatctcggccaagaacttaccttcagaacatactctaataatgcagccaggagccgtcagccagatcccaaatgagtgccttccgaaattgacccacctgggagctatttacaaatgtccatgtgggagagagagagcatgagagcacagtagcccagcctgctggtcagcaggctcatctgtggttcacctgtagacagagagcagatcaatgtgtacttcagacaccagaaagtctggtggctttggtcccaagtgggaagagagaactgccccatgcccagcttgtgattat

SEQ ID NO: 9064 - DNA, 448 bp, Homo sapiens
  misc_feature (1)...(448): n = A,T,C or G
aaaattagagnaccctngnnttttgatgacccttagtccatgtggtggaattcatctaacctgggtattatgttggaaaaggggaaagggaaaagtcaccgaacttgataggtggcaaatggtgtccctggtgtgttttattccatgatagagtatttttccctcacattaagctgccatttgcagtgcatgggttatgtgactagtattctagacccagttcaaatgcccatcttggtagatggggggaaacctgttttcaccagttatatagattgagttcaccactcggaagggttctgctaataaggaaggggatgctgagcagtaaagaaaagaaagatgatccaccaggctgaaaaatgcatctttttccttttgatttatgtatttagaggatattaaccttttgttaagtatttctctccaaattaagttttttatttgt

SEQ ID NO: 9065 - DNA, 454 bp, Homo sapiens
  misc_feature (1)...(454): n = A,T,C or G
nttgacctcgagaccattagaccgngcggtggaattccccttcccttgtaagattgaagcactgaagtcattctcaaaatcagacctggtcaactggttcaaggcccatagagggccaggaagtaaaatgctcagcgttcatgttgttggatatgggaagtatgaactggaagaggatggtaccccttctagtgaggattcaaattcttcttgtgaagtgatgcagctgacctacctgccaacctctcctctgctggcagattgtatcatccccattactgatatcagggctttcacaacaacactcaaccttctcccctaccataaaatagtcaaataaataaactgcagtcacgttggcctgaagcaatgtgtattttanaatgannnanannaaaaaaaaaaaaaaaaaaaaaaaaaaaaaaannggggggcccctttttttttaggggcc

SEQ ID NO: 9066 - DNA, 442 bp, Homo sapiens
aaaaattcgagacattagtcttggaggtcgtattcgcaattagtaaatttttaaatgtacattttttaaatgagtgtaggaaacataaaactttagtaggtgcatgcttactgggaaagcacgcatgcatgctaaaatgtcattgtacagtacatattgtttaccacttgttttttagtttaatattacattatggatatcttttcaagttacatataatacctatatgttgctgacatacatttcactgcaagggtatcgaattattttgtaactggccttagagggtttttacattgctgcttttttctttttttaaatactaccaactaaaagccataaactcttttctttttatttttttcttcactctgtactatgaaaaaagtttaagcatatataaaagtacaattgtactacttctaataaatccccacaaacc

SEQ ID NO: 9067 - DNA, 502 bp, Homo sapiens
  misc_feature (1)...(502): n = A,T,C or G
agtaggttccnnnggggnggnncaactgagantcttcgnctacngngtcgtcgnananngcggaggaattnagnnantagattatttcagtcatttctactggaagaacttattttgcaaagtaatgataagaatgaagtgctgggagagacatgaatggatccgggaattactataaaaatatttaaacagaaagcaccacactggttaacagagactacatcacagatgaaatatgaagccatgtttacatctaacttcatttatgtttacaagataaaccttttgttaaatgttcattttgttaaaagataatcttacaaattgtcactgagattcctacctgcaggttttttaactttatctagttttttaggttctactttaggttcttcttcttcaggtctttttcttagaactttaaagacaaaaaggtttatatgtaaaccaagacaaactaatgaagatgttgaataagcttgacaaatgcaaataatgtacn

SEQ ID NO: 9068 - DNA, 457 bp, Homo sapiens
  misc_feature (1)...(457): n = A,T,C or G
nggggnattgtagacatctggccatgagggccatactacaggccgcttcgaggacgaggacgaggagttggaagaagaagaggagctggaggaggaagaagaggatgaggaggaggacatgagtcacttctcgctgaggctggagggaggccggcaggactcggaggacgaggaggagcgcctgattaatctctctgagctgaccccatacatcttgtgttccatttgcaaaggttacttaatagatgcaactaccatcacagaatgtcttcataccttttgtaaaagctgcatcgtaagacatttttactacagcaacagatgtccaaaatgcaatatagtagtacatcagacacaacctctttataacataaggttggaccgacagttacaagacatagtgtacaaattagtgatcaatctagaggaaagagaaaaaaagcaaatgcatgatttn

SEQ ID NO: 9069 - DNA, 482 bp, Homo sapiens
  misc_feature (1)...(482): n = A,T,C or G
agggagaactggagaccctaggccaattgcaggccntagcgcgagagcgggcccgcatgcgagtgctgagcaaggccttctccagactcaagaccaccctgccctgggtgccccccgacaccaagctctccaagctggacacgctcaggctggcgtccagctacatcgcccacttgaggcagatcctggctaacgacaaatacgagaacgggtacattcacccggtcaacctgacgtggccctttatggtggccgggaaacccgagagtgacctgaaagaagtggtgaccgcgagccgcttatgtggaaccaccgcgtcctgaccttggagtttggtacctggagcgagagcttctccgcccttccaccaaccccacaggccgcttcgcgggtggagccctctgcctggccatggaggaaggatcccgctaggctggtcccgactggagaagctgctctgccaggtgtgctctctgtcagca

SEQ ID NO: 9070 - DNA, 414 bp, Homo sapiens
  misc_feature (1)...(414): n = A,T,C or G
tttcatagcagtgtgtagagtgccacttatgttttctttcttgtgtacagtattttattgtatggatttaccatcccctgtgtatttaagttgttccattctttggccattataacttttttctgcaaatattctggtgacttatctttggccattataaactgttgataatagatcatcttgtatatacttctgcaattataagatgttttttgatgatgaaagctttcctaaggtaattctttcctgagtttggttcagatggtctgtcactaattataaggcagataggaacagacagaaaaatctatcatttcaagataggcttagcaggatgggcgcagtggctcacgccactaatcccaacattttaggaggcctaggcaggagcaatcacttgtgcctgggagttcn

SEQ ID NO: 9071 - DNA, 463 bp, Homo sapiens
  misc_feature (1)...(463): n = A,T,C or G
nattgagccccctcgagaccatctagaccangcggnggaattctagtcataaatggtgctatcatcatccatttttatagatgagaaatctgagacttttataagttaaacgttgctccagtgggtacagtgtttcaaaattgcacgatgaaaaattcctggagatctgtttcacaataatgtgaatatttttaaaattactctactgtacactttaaaatggctaagatggtaaattccatgttatatgttttttattacaatacattttaaaaaattgctaaaggtcacacaaatagtaagtcaggcttacagtggcaagcctgggcttttcaatactggatttactgcctttttcttaagtctgcacacaaccctttagactacagtgagaatttaaaagtcgaggacttatatgtttgaatgttataattagtgaattatcacaacattgttatccaag

SEQ ID NO: 9072 - DNA, 493 bp, Homo sapiens
  misc_feature (1)...(493): n = A,T,C or G
ggaggtnccnnaggtnnnnnnaattgaagaccttagatagatggccgtaagtccagcgagaaggggccatgatgatggaggtggttttgtcaaaacgaaaatggggatatgtagggaaaagaaagagagatcagactgttactgtgtctacatagaaagggaagacataagagactccattttgaaaaagacctgtactttaaacaattgctttgctgagatgttgttaatctgtagctttgccccagccactttgccccaaccactttgacccaatctggagctcataaaaacatgtgttgtatgaaatcaaggtttaaggcatgtagggctgtgcaggacgtgccttgttaaccaaatgtttgcaagcagtatacttggtaaaagtcatcaccattctctcgtctcaataaaccaggggcacaatgcactgtggaaagccgcagggacctctgcccttgaaagctgggtattgtccaaagtttctccccat

SEQ ID NO: 9073 - DNA, 444 bp, Homo sapiens
  misc_feature (1)...(444): n = A,T,C or G
aatagaagcccctngnncttgatgaccactatccatgtggtggaattcggcatgctctccagagtggccctcaggacaggggccctcagccaccaaatcctagacaggacttcctctgacagaggtgcaggctatgactacatggctccagggcatgccactcaccctgcagtccccgtggccttgggtggtggttatcacgcttctccatcagggggcggtaaagctctttccgaaagtgctgggattccaggcgtgagctatggtgaagctcttaaagaaggggtggcttggccaggcgtgctgactcatgcctgtaatcccagcactttgggaggctgaggtgggcggatcacgaggtcaggagatcgagaccatcctggctaacacagtgaaaccctatctctcctaaaatcacaaaaaattagctgggcatggtggcac

SEQ ID NO: 9074 - DNA, 452 bp, Homo sapiens
aacctatttgccttccctgtcataggagatggggagggtaagggaaggggagcagggagaggaatcccacccacactagtccctcttttccctgcgctcttttcttcagaacacatcattttctgatctcacactcccgttttttttttttttttttgttgggggattttttgggccccaccaaaatacaacctccggggggccggaaattgggcccaaaattttggcattaatcccttaaaggtaaaaagcgttgtcggaaccacccctgccaataaaaaggtaccccccttatgtaattaaaatttttttgggacccccttttttaaaaaagaaaaaaaaggccgggagggggggtttacccctataaccccacctttttggaagggcaaggcagggggactgtttgaggccaggatttccaaggctgccgggagctatgcttgccccat

SEQ ID NO: 9075 - DNA, 460 bp, Homo sapiens
  misc_feature (1)...(460): n = A,T,C or G
gctaatagggnnnttttgagttcattagcacgngcggnggaattcgggaaccgatcagtcagaagatattttgtgtgctgagtttcctgatgaacctaaatggatgggtggagctgagttatctgatgatggccgctatgtcttgttatcaataagggaaggatgtgatccagtaaaccgactctggtactgtgacctacagcaggaatccagtggcatcgcgggaatcctgaagtgggtaaaactgattgacaactttgaaggggaatatgactacgtgaccaatgaggggacggtgttcacattcaagacgaatcgccagtctcccaactatcgcgtgatcaacattgacttcagggatcctgaagagtctaagtggaaagtacttgttcctgagcatgagaaagatgtcttagaatggatagcttgtgtcaggtccaacttcttggtcttatgctan

SEQ ID NO: 9076 - DNA, 462 bp, Homo sapiens
  misc_feature (1)...(462): n = A,T,C or G
tgggtctcccgccccnattgaattgatnaccttagcccgngcggtggaattcgtgtcacaattgtcattcagttcgaagaaatttttaatttccatattgatattattgttgacccaatgatcactcagaaacagtttacttaatttgcatgtatttgcatggttttgaaggttccttttggagttgatttccagttttattccactgtggtctgagagagtgcttgatataatttcaattttcttaaatttattgaggcttgttctgtggcctctcatatggactatcttggagaaagtttcatgcactgaggaatagaatgaatattctgcagttgttggatagaatgttctgtaaatatctgttaagtccatttgctccagggtatagtttaaatccattgtttctttgttgactttctgtcgtgataacctgtctagtgctgtcagtggagtattgan

SEQ ID NO: 9077 - DNA, 498 bp, Homo sapiens
  misc_feature (1)...(498): n = A,T,C or G
ggtagccaggccaggcnncctagataactgagaggcntangcnagngngcnggaagtccacagaagggcaatttatttccttttttcatgccttgtctacaagaatcatttattatctactctcataactgaccccagagagtagcagattcaccaaataaagtagttttttggacatcattaattccatagcactgaacagctgcccttcaattctgaagtcattacctctgcaactaggacacaggtgcctccgagtctggtctcccataatttgtctgagagaatatgggtttgtgcccacaaaatagagtgcaaggaattgcaaaggatgggatttaattccactatttggagtgttttgagaagcccctaaacagcctgcagtagaatgattaattttccacccactctttctgctggggttccatgagatagacatgaaatctaggcagctacccctgcacctgtgtcctggggctttgagtcagctcatgg

SEQ ID NO: 9078 - DNA, 457 bp, Homo sapiens
  misc_feature (1)...(457): n = A,T,C or G
gatgagaccatcccgttcgtgtccgaganccacacannnngaccacttgtttcttttgaatatcttccacagagggaagcntaaaacccaaacttccaaaggtttaaactacctcaaaacactttcccatgagtgtgatccacattgttaggtgctgacctacacagagatgaactgaggtccttgttttgttttgttcataatacaaaggtgctaattaatagtatttcagatacttgaagaatgttgatggtgctagaagaatttgagaagaaatactcctgtattgagttgtatcgtgtggtgtattttttaaaaaatttgatttaccattcatattttccatcttattcccaattaaaagtatgcagattatttgcccatagttgccctcttcttcagattcagcatttgttcttctgcagactaattttatcttctttcttggttcccagag

SEQ ID NO: 9079 - DNA, 489 bp, Homo sapiens
aatcgagaccatagtccatgtggtggattgatgtacactgacctgactccattttgtttttaaatgtgtgggttatgttgcagctgttgcagtcccccagatacctattattttacacaatttgacctataggaggacactgagtaatttacaaacacaactgcattcataaatgggaatagaacgtgaaagccagctctttcagaatatcctctattaatactgaatttagatatctttattccatttattatggtacaaataactgatgttttaaccagagtaatgacctcagtggatttgctttaaccctcacatttttttttaatgtttcacatgttacattattagctgaatacgttagaaaatgacagatggtagagacttccatagaattaagagggttctcatggaggggataggaagtaggtttaaagcctaccagtgtaacctaccagtacaactgtgaatcctaggcgaggcaaaaat

SEQ ID NO: 9080 - DNA, 470 bp, Homo sapiens
  misc_feature (1)...(470): n = A,T,C or G
gaataaatttgatnccccttnnntttgattccctattcagtgtgctggaattctgagggccagtctaggctgacacatcctacccgaggacaagcctgttctccatttcttcactctcccctccccatatagcaactctcccaggtttagattaccgttttcgacgacagattaaccaaaaatgccccacacaggttttattactgttatatactatacttttaacagtacagaccctaaattttattatttgttgctcccccaatctgataccaaatgtttaaagttgtttgaaatccaaacatggtagtgttcatgggtaaatattttctaggctatgtaagagttagcagcccatagcatagaagtaatcaagtagcatctgagactgttggaggcactagggcctctctgggccctacagcctcacttccccagcctcaccttgctgtcctctgacactgccatcn

SEQ ID NO: 9081 - DNA, 465 bp, Homo sapiens
  misc_feature (1)...(465): n = A,T,C or G
ataacattgaaaccctattcagngtggaggaacttcatgaacgttcctttccaagccattcacttcatgacctatgaattcctgcaggagcactttaacccccagagacggtacaacccaagctcccacgtcctctctggagcttgcgcaggagctgtagctgccgcagccacaaccccactggacgtttgcaaaacactgctcaacacccaggagtccttggctttgaactcacacattacaggacatatcacaggcatggctagtgccttcaggacggtatatcaagtaggtggggtgaccgcctatttccgaggggtgcaggccagagtaatttaccagatcccctccacagccatcgcatggtctgtgtatgagttcttcaaatacctaatcactaaaaggcaagaagagtggagggctggcaagtgaagtagcactgaacgaagccaggggttcagatgn

SEQ ID NO: 9082 - DNA, 446 bp, Homo sapiens
  misc_feature (1)...(446): n = A,T,C or G
gtggccttaacctaggacccctgatntctggagaaancnngnntnagaangaattgagaagttttccatctatttctaggcccttgagcattaaaataacagaggagcaacctattccttgaatgatctctgcttgcacacatgaggaaggtagtcctttccaagctccttggattctgagcagcaccatctccctcccctttcactcccaagggcacatgcacatcttgggtagctgcacccaccctcagtggtccttgaggagggtagcagaagccggggcagggggagccttctttgctgctggttcctggctcctgttctcagaagtacccgtcaggctccagtgacaatttatgtggttgtattggagaaagtaccagaagggcaaggtgacaggatggtggatttgggctgccatcttttctcttgctgttatggacttc

SEQ ID NO: 9083 - DNA, 410 bp, Homo sapiens
atgcagacttttctaaactgactgctaggcaatcaaccatcacatcattgtaacattgaagacacttcaaaaagactcagatgtttaactcttgtgctagtgatcatacattcatattgggctgcaggccaaaagagagaagaaaaaaaatccagagacttgcggctgaaaagctataaagtggtgaattttaccttagagcaaaaccatcttcagtgacaaatttcaaaggccatatgtatgtgattttcatgaaaagcagacgaccctaaatttctttgtttaactggaagcgatcttccttacagaaccagcggattcttttttcgtaattccccttgtttattgtgctgttagaaaattcactttccttttagcgctacaatcaggattctagaaatgctatttaa

SEQ ID NO: 9084 - DNA, 455 bp, Homo sapiens
gtgctggcctggtcaatgttgagtctacccaggggcccaggattgcaggggccccagctctgttccagagtcgtattggtaagaacatgggggtttagtcagattcagatttccaaccctcctaccagctagactgctattccctgaggtcagggcacaggctgcaagtctggattgaagccactagagtgaagagctacattccttaggtcatcctcaaactccaactttcttttcccatgaccaagtctctttgcaaaagtcttcttagttatagaagcaaacatttttaaagccttaaggggcctcaaagagtgaatccagtatttccaaaagtgtgtcactggtagtatgggatgatcatcgacgttacatgaatgaactttaaattcttgtatttatatatttctcttaatttgtatgagtgcatcaacctgtgatttcacagataacaa

SEQ ID NO: 9085 - DNA, 503 bp, Homo sapiens
  misc_feature (1)...(503): n = A,T,C or G
agtgcccctaaagagaatagaggcatngtcgnggacnncgatttgctctcatacatcaaaaggcaaggtcaaacggcaaaacagtttaaaggaatggaggaatttgaaacagaagagagatgaaaactatcaaaaagtgatgtgctgcctagtgcatcgctacttgacttccatgagacagaagatgcaaagtacagatcaggcaactgtggaaaatctaaacgaactgcgccaagatctgtcaaaattccgaaatgaaataagggatttacttggctttcggacttctaaatatgctatgttttatccaagaaattaaccattttctaaatcatggagcgaataattttcaataacagatccaaaagactatattgcataacttgcaatgaaattaatgagatatatatttgaataaagaattatgtaaaagccattctttaaaatatttatagcataaatatatgttatggtaagtgtgtatatagaattagttttttaac

SEQ ID NO: 9086 - DNA, 454 bp, Homo sapiens
  misc_feature (1)...(454): n = A,T,C or G
nggggcgggntttcgtagaccactagtatagtgcggcggaattcttctacaagactttcaggattaagcgattcctggccaagaaacaaaagcaaaatcgtcccattccccagtggattcggatgaaaactggaaataaaatcaggtacaactccaaaaggagacattggagaagaaccaagctgggtctataaggaattgcacatgagatggcacacatatttatgctgtctgaaggtcacgatcatgttaccatatcaagctgaaaatgtcaccactatctggagatttcgacgtgttttcctctctgaatctgttatgaacacgttggttggctggattcagtaataaatatgtaaggcctttctttttacaanaaannnaaaaaaaaaaaaaaaaaaaaaaaaaannncccgggcccttttattttaaagggccctttaaacccccttta

SEQ ID NO: 9087 - DNA, 479 bp, Homo sapiens
  misc_feature (1)...(479): n = A,T,C or G
ggccgtccaattgagncccttaatgagancataggaagnngcgnggaanncggattttcacacttcggaaacataagaaaaaagaagttcgatgaatcgacggactacatttgcccaatggagcccagtgacggtgtcagtgatagtcacagggtctacagtggctaccggggcctcagcccccttgatgcccctgaactggatgggctggaccagatggcaccttcggaaggtaccgtgacgcagatagggctcctctcccaagacattcaccgccttacgacaatgctgagccaggaccagctgctgaatgactctcgcctgcctgcccccaactctgatgactggagatgactttcttcgtggctgagagcgtagggaggcatgtgtgggggccccggagcctttgcttctgtggggagcgggcacacagccccctctgcaagcccagtccgggctggcagggtgtctcagacagg

SEQ ID NO: 9088 - DNA, 495 bp, Homo sapiens
  misc_feature (1)...(495): n = A,T,C or G
gggatggaccgggntgnnnnnatttgtagaccatangaagtgcggtggaattcgtttaaattaattgaccaagggctgaatgcagactttaatccaggtctgactgttggaatccattaacttatattggcaaattggcaatcttatttcaatgatagtttgacatagtttttgctagatttggcagtttcaaagtgaaagtaataaaagatgagagagtctgctagggtagtcaataaggagtaacctccaaggccccataaatactgcatttacataaaacactcatttagataacatactgtaaactcatatatagtgactacgtttaccatcttcataattttggcatattttattatacacaatagactaaacaatagacaacatttcctgatagctttctgtgtgctaaacactcttccaagtgctttcatgtgtataacataatttaatctttatattctcatctctacttcacacatgaagaaattn

SEQ ID NO: 9089 - DNA, 470 bp, Homo sapiens
  misc_feature (1)...(470): n = A,T,C or G
attgagtttcattcccatttccagngngcnggaattccctcccggggcctcagtgccagcaccatggacctctcttcaagcagctgacattcaacccggcccccaggtctgctgggtccccccacccccacagccctcacagcattccccattgctcctggctcttccccacccctaggtgggacagtgaaggggagcagtttaaccagaagattgctgctgcccttagggtctcagctccctcctcaggaatccctcttaggaaggaccctcaggacaccctctctgcaccctgtggtcctctagagtagctagctctgaggccccaaggtgggtacaaagcaggtatggccctcagagatgcagcctgctgctggcttttcagtcagagggttgggggctggccagccaagctgccttgccctggccgctcttactcccttcctctgctggctcacttcaggtccatg

SEQ ID NO: 9090 - DNA, 451 bp, Homo sapiens
  misc_feature (1)...(451): n = A,T,C or G
atagaattagatgacccctcnnncnnnnnnnaattcgggaatatgtgctaacatcagttacaggcaagcctgtacttacacagagatctgacattttaaaataaattcttgagcactctttagacaaactgcaaagtttaggaaagtgtgcaatactccttggctcattggccccaggaattggagcctcacttcttattataccagaacctcctacccaccttttttgccctgtccttttcctgccttggatgatttcccagatgattaatttttttctctaatcttttatctaatgacttcttttttttttttttttttaaaagggagtcttgttttgccccccaggctggggggggggggggccttttgggttaattgccaatttaccctccaaaataaaggggatttcccacccccaccccccccagaaactggatatacggccccg

SEQ ID NO: 9091 - DNA, 463 bp, Homo sapiens
  misc_feature (1)...(463): n = A,T,C or G
catcgagaccattttgatgacatctgnccangcggnggaattcattggatcctagccataacataaatataagggtggaaccaaagttttattcaaagtatggtggtgttcagttgctgcttacgatagttgataccccacgatttggagatgcagtggataacagtaattgctggcagcctgttatcaattacattgatattaaatttgaggactacctaaatgcagaatcgcgagtgaacagatgtcagatgcctggtaacagggtgcagtgatgattatacttcattgctccttcaggacatggaccattacataactgaagactcccaccttcaggcaggattgggtagtacgtgtttgtaactacctggcattgccttttgttgaggaagggtagatgtctacccaaatggaatattgagtatcagagacttcaaatgataacttttgtttggttgga

SEQ ID NO: 9092 - DNA, 457 bp, Homo sapiens
  misc_feature (1)...(457): n = A,T,C or G
ngggccggnnattcgagaccattagnatcgtagaccctagtccatgtggtggaattcttctcacaagactttcaggattaagcgattcctggccaagaaacaaaagcaaaatcgtcccattccccagtggattcggatgaaaactggaaataaaatcaggtacaactccaaaaggagacattggagaagaaccaagctgggtctataaggaattgcacatgagatggcacacatatttatgctgtctgaaggtcacgatcatgttaccatatcaagctgaaaatgtcaccactatctggagatttcgacgtgttttcctctctgaatctgttatgaacacgttggttggctggattcagtaataaatatgtaaggcctttctttttaaaaaaaaaaaaaaaaaaaaaaaaaaaaaaaaaaaaaannngggggcccttttaattttaagggcccctta

SEQ ID NO: 9093 - DNA, 454 bp, Homo sapiens
  misc_feature (1)...(454): n = A,T,C or G
ngggggtcnntttcgtagaccactagtctagtgtggcggaattcccactgaaagtacttgaaaactggtggtcagtacttgaacctccactattcctcaagatagtagaactttttaaggaagttgtggtacatcttttgaaactctacaagatcggtattcccccttctgaaagaagaattttcaacagttttcttcatactgcattaaaggttttagaaatactacatagggtaaatgagaaaatgggacagattatacagtatgataaattttatatacatgaagtacaagaattgatagacataagaaatgattatatcaactgggtccaacagcaggcctatggaatgttggcagatatccctgttacaatctgtacatatccatttgtatttgatgcccaagcaaaaactactctgttacagaccgatgcagtcttacagatgcagat

SEQ ID NO: 9094 - DNA, 478 bp, Homo sapiens
  misc_feature (1)...(478): n = A,T,C or G
naaagcgcgccgtctgtnnnnnnaagcctttagnagagacnnncnnntnnnntnnannaaacgcacgaccatgaagatcaagatcatggctggctctgagcacttttatttcatgtggatcagcagctccatcctgggctgactgtccaccttccagccaatgtggatcaacaagcgggagtgccaccagtcaggcccctccactgttcaccgcaaatgcttctaaatggactgtgatgagatacgtagcctgtgctgcctgagtcaattcagaaatacaaatttgtccctggaaaatgtatacatctcatgctagccttaggaaactggaataagcctttgaaaagaaatttgtcaggctgggtgcagtggctcatgcctgtaatcccagcacttttggaggcccaggcgggcggatcacctgaagtcgggagtttgagaccagcctgaccaacatggagaaaccccgtctctactn

SEQ ID NO: 9095 - DNA, 498 bp, Homo sapiens
  misc_feature (1)...(498): n = A,T,C or G
ggggcgacncaggnnngnccnacctgagaccctcactgagacactaggacangcggnggaattcgtccgaatcagtggtgggaacgacaaacaaggtttccccatgaagcatggtgtcttgacccatggccgtgtccgcctgctactgagtaaggggcattcctgttacagaccaaggagaactggagaaagaaagagaaaatcacttcgtggttgcattgtggatgcaaatctgagcgttctcaacttggttattgtaaaaaaaggagagaaggatattcctggactgactgatactacagtgcctcgccgcctgggccccaaaagagctagcagaatccgcaaacttttcaatctctctaaagaagatgatgtccgccagtatgttgtaagaaagcccttaaataaagaaggtaagaaacctaggaccaaagcacccaagattcagcgtcttgttactccacgtgtcctgcagcacaaacggcggcgtattgctct

SEQ ID NO: 9096 - DNA, 463 bp, Homo sapiens
  misc_feature (1)...(463): n = A,T,C or G
ccccaactgatgactattcgacagcgcggcggaanncccaaacggtctcgactcagttcacttttgtctgagtacagagctcagcgatgattttctaggttactgaggcactcattaggccctgggcaaatctaaacatgcagttcttttccgtacactctacatctgcctgtgtcacccccggctcggagactgggaaggccacatgcagatatgcttcttagctttgtgggggggaactatggctgtagctacttctgctgaaactgcccttaggacatcatatgcatctttgaaagccaaatacataagtgaacacatctgcgtgtatgtgtatacaccatacatgcacacattcatacgcatgcgtatacgtgtgcatgttttagttaacagaagtccttgggggctggacaatattttggctccaagggatgtgagcaactataaagtcatgagactg

SEQ ID NO: 9097 - DNA, 475 bp, Homo sapiens
  misc_feature (1)...(475): n = A,T,C or G
gggttggggccggcggnnnntnnnaaggtagactatagtccgtgtggtggaattcatgtccctaatgactagtgatgttgagcattttctagcattgatttttaagatgttacccaaagaccccttgtatcaaaataagctggatttttttattgaaaattattaactctagaaattttagtttaaactagacttagggatatgtgtattttaccggtattccacgttttatgcatgggtttttaaaacttctcaagtattaaaactaaaagctttaggtgctttgcttatcaagaaatcctacactgtccactggagacatccatgtttttacttggctctgcccctttagtggtccctgtgaaccttacctcaaaccatgcatctggggcagagatccttacttgcttggtggttacaaatgcaaatacagtgaagaatgtcatctttgtgattgttcctgaaatagttcacg

SEQ ID NO: 9098 - DNA, 477 bp, Homo sapiens
  misc_feature (1)...(477): n = A,T,C or G
cactgatattcgtacgccgtgngccggaanccgncaggggcttcaggcccagaaattctaattcacttgatctggagatgagacctcctctcatggtattttataaaagatctcaggtatttataatacacaggtatggttgataatcactggcatagagtaattttattgatctgggatccattggcttctaaggggttcttacactctcacattgttatactgactttaatgtttgtgtgcacatgaaattttctggtcatacaatcccaagaatttatgagatgggaaaagaggatgtggccacacagttaaaaagcattcatgcagaaagagaaaaacagaaatcatagagctcttctacactacacagctttgagaatttgaggaggaaggggagcaatcagtgaaagcataaaaagagctagcaaaggcagaaagaagcagtggtgtgctggagctggcaccagcttgtgn

SEQ ID NO: 9099 - DNA, 415 bp, Homo sapiens
agaatcacttgaacccgggaggcagaggttgcagtaagccaagatggcagcattgcactccagactgggtgacagaacgagactccatccaaaaagaaaaaaacaattattgaggatcccttgtgcatgatgagtcagttttctctcactactttcacagtgctatctttgtttctgtctttcagcagtttgattataatgtaactcagcataggactcttttgagtttatcctacgtggagtttgttgacctttttatatatccatgtcttccctcaaagttggggagttttggccattatttcttcaaataagctctctgcctctttctttccggtataaagattagtgtgggggtgtctccattgttcttttttttcccctcaaacttagagctggaagaaaccttagacat

SEQ ID NO: 9100 - DNA, 459 bp, Homo sapiens
  misc_feature (1)...(459): n = A,T,C or G
ggggcgcnnaattcgagnaccattagnattgacgnacccctagtccagtgcggtggaattcgttcattcgttatgtatttaacaggaaccagacaaatgatgtcttcaaaacatggagttcgtattgatgtctgaggtacacggcagtcttagagaagcaaatggctcagatgatgataattaagagtagccaacattaaagttaatttttaaaaatacagttaggtgtttatattatttagttattataattctgcaatcctcttgctcaggaagtgtatacaacttttttaaaaattatacttgttattattctacttctctcttctatgacaactctagtgcaatattagagtttcatttattccacaatatatttttactgtttttttctatttatctggctttactagtagttcttttagattaacatccagttcattttctggaaatataccg

SEQ ID NO: 9101 - DNA, 471 bp, Homo sapiens
  misc_feature (1)...(471): n = A,T,C or G
nactgatgnacattagnacangccggggaanncngttagcccctctggggagcagctgacgggcaaggagcccagtgggcaccagcaacacctccctgcaactcgagtcctgtccctggggcaaccgtgctgccacctcctccccagccccgctgactccgccaggccaccccagatgctgccttcaccggcaacggcctcacctctcctgtcaccttggcgggtgggtaatggctgctgcaggctgggttgaggaggctctgaagccaaatccagactcagcaggaaacgagtgaggggaggggtgagtgatgccgccacaggtctctgctcctagaacttagcctggactcctccaatctgcccagccgcctaacaggcccgaggttctgtgtcgaggttccctgtgggcagggagcttgtgcagggagccctcacctgttgatgaggtggaagtacttctgcaggaag

SEQ ID NO: 9102 - DNA, 478 bp, Homo sapiens
  misc_feature (1)...(478): n = A,T,C or G
ggtgactccaaatggagaccatagatcggaggcgtaagacggcccnaggngngcagacccctccccgccacgatcgtcgctgtgcttggtgtgtaggaccctaggctccccgcccaccctctgcctggtcgcgctcttcagtcccacgaggagctgacacgtcctctctggccgccatccggctcgcacaggggcctcccagcgcctcaggccccgcgtttgtgtctggagtctccccccggggagaggacactggcccctcgcactccagaaaagccatgccagctgggctcgttgacaaagggtaaaacatgctcactcccacccggcaatcatttttttctttttttaaaaaaagtttttattttttccaaactagtgcatgtataaataatggcaggatggggggtactgtgtagatgattaactgactttttaatattttggaaataaatcggattccttgtgtcctttgtgc

SEQ ID NO: 9103 - DNA, 486 bp, Homo sapiens
  misc_feature (1)...(486): n = A,T,C or G
tggncggtnncacggcgnnnnnnnaactgagaccnactgatgacatctaggaagngcggaggaattcctcctgctcagcctcccgagtagctgggactacaggcgcctgccactcttgcccggctagttttttgtatttttagtagaggtggagttttcaccatgttagccaggatggtctcgatctcctgaccttgtgatccaccctcttcggcctcccaaagtgctgggattacaggcgtgagccaccgcgcccagccaagggtatctcattattttatgttttatttttgcttcgtctttgggcccatacaccatccctgccacagtgtgtgtgtaacatagtcattttgccttaaccatgaagcttggtttgttttgttttgttttggtttgtgttttgagacagggtctcactctgtcacccaggctggagtgtagtggcatgatcacagctcaccacagccttgacctcctgggctcagg

SEQ ID NO: 9104 - DNA, 457 bp, Homo sapiens
  misc_feature (1)...(457): n = A,T,C or G
ctgctccttccatctgcctgaccccttcactatgactacacagaatctcctgatagtaaagggggctggaggcaaggataagttatagagcagttggaggaagcatccaaagattgcaacccagggcaaatggaaaacaggagatcctaatatgaaaggaaaatggatcccaatctgagaaaaggcaaaagaatggctacttttttctatgctggagtattttctaataatcctgcttgacccttatctgacctctttggaaactataacatagctgtcacagtatagtcacaatccacaaatgatgcaggtgcaaatggtttatagccctgtgaagttcttaaagtttagaggctaacttacagaaatgaataagttggtttgttttatagcccggtagaggagttaacccccaaggtgatatggntttatttccttgtatgtttaacttgataat

SEQ ID NO: 9105 - DNA, 465 bp, Homo sapiens
  misc_feature (1)...(465): n = A,T,C or G
agttggagaacactcttgagngcggnggattccggaggctgaggcaggagaatggtgtgaacctgggaggcggagcttgcagtgagctgagatcacgccactgcactccagcctgggcaacagagcaagactccgtctcaaaaaaaaaaaaaaaccaaccggccttaaaaggttttgggggctcccttccccggtaaaaaaaaaagggatccccaaacgggggggaccccctttttgaccccttttcttgggagggttagggcacaaaattccttggccccgggggggggggggttgcagggacttaaaatattccccttgccctccacctgggggacaaaacaaaaccctgtttaaaaaaaaaaaaaaaaaaaaaaaaaaggggatttttttccctccccccaaaggttggttttaattgggaccttttttctcgccccggaggaaaccttaatagtcctttgg

SEQ ID NO: 9106 - DNA, 468 bp, Homo sapiens
  misc_feature (1)...(468): n = A,T,C or G
ggagaccccgagtgccaaataccgaaantccgtcgntgcantgnaaanccncgnaannnnncacttnagccagagcgcggggttagggcttcattgccttgtgtcctctgctccgggagacttcggtgattctgccactcactccgtcgctctgtgacctgctggcattgaatgatttatagctaagactccaggacacccctgaagccgagaaatggaactcttaacattcagggatgtggccatagaattctctccagaagagtggaaatgcctagaccctgcccaacagaatttatatagagatgtgatgttggagaactacagaaacctcgtctccctggctgtgtattcttattacaaccaaggcattttaccagagcaaggcatacaagattcattcaaaaaagcaacactgggaagatatgggagctgtggccttgaaaatatatgcttatggaaaaactg

SEQ ID NO: 9107 - DNA, 461 bp, Homo sapiens
  misc_feature (1)...(461): n = A,T,C or G
agggcngnnnnattcgtagaccccctngnattgtcgnacccctagtccgtgtggtggaattcatgggattagtggtgaaaacaacccaaaactgtggataaaatataagcagaagaaataggtaaatggttccatttgcttaagcagaaaaaagctgcttcacagttagtattttaagtaactcactaccatctacacacatgacagataagggtactctagtagaggcaaggggcacggaggggaaggaatcatcttgaaaaagaattctgaggttaaatggatatgatgtaatataaatgtaatagcatttagggaagaggaaaagggaagaatcatagttatatttaagttagggagactgcgcacagtgaagttaatagtccaaggaaatacagaaagaggaaaatgattgtgacaagattatagatgaggttttacttgtttaatatcactttatn

SEQ ID NO: 9108 - DNA, 449 bp, Homo sapiens
gggcgggaatcgtagatcactagtctagtgtggcgtaattcgcgcgtggatttcacctcaccctttgtaccagatgttgagtgaccagctctgtggccctgtgtcgtcagaggcttgtgattaactgtggcggcagacacagcttgtccacagcttgggccaggcttcccctgtcctcccaccggtcggctgcttggcaaggctgttcaggacgtgcacttccccaagtcggcactgagtggcccagcaccgcctagccctgccaccccactgccctcctgggccttctgctggatgggcacctggggggttctggtttttacttttttaatgtaagtctcagtctttgtaattaattattgaattgtgagaacatttttgaacaatttacctgtcaataaagcagaagacggcagttttaaagttaaaaaaaaaaaaaaaaaaaaaaa

SEQ ID NO: 9109 - DNA, 452 bp, Homo sapiens
attgtagacccttggtcagctgtgggaattcgcaggaaggaaggctgaaaaagcggacgaagattttgacttaagtgggactttgtgatttaattttttcttttttttaagtggggaggaaggggaagctagatggactaggagagacttgattttggtgctaaagttccccagttcatatgtgacatctttttaaaaaaaataacaacaaaaaaaaatgagagaaaagctaaaaaaaaaaaagtagggggggagcagttaagggtattcattccacatacaatatctgggtaaaacgatttcctgtaaaagtagctttaagggtttttgctctaaaataccgtaggtttatccttaaagcactcacgccatgctttcttccctgggttttaaacttcatataactttcaaaaattggaaagcaaaaattttgctgtgcactgcacatcaag

SEQ ID NO: 9110 - DNA, 415 bp, Homo sapiens
  misc_feature (1)...(415): n = A,T,C or G
ggagcctcagggaacccagccagcacagcagcagcagccttgcctctatgagatcaaacagtttctggagtgtgcccagaaccagggtgacatcaagctctgtgagggtttcaatgaggtgctgaaacagtgccgacttgcaaacggattggcctaatgaagaagttcaacctggagagatggaaaatcagctctcataactaagttaatttagtataaaaatagaattgatagtgagggtataaagtgtaaccatcagttaaacctctcctgtcattcctagcttccttgcttcagaattgaaatggaagtgggggtgtccctactctgtacaatctgggactgggcaaatgtttgtgtggcctccttaaactagctgntatgttatgattttattctttgtgagttaattaga

SEQ ID NO: 9111 - DNA, 420 bp, Homo sapiens
cttgggggacagctaaccctggcactgggtgttcttctgtgtctaaattactacagtatagctctgggagcaggatccttacttcttgtcatcacctacccactaatgaaaagaatttcatactggcctcaactagccttgggcttgacatttaattggggagcgttacttggatggtctgctatcaagggttcctgtgatccatctgtttgcctgcctctttatttttctggagttatgtggacactaatatatgatactatttatgcccatcaggacaaaagagatgatgttttgattggtcttaagtcaacggctctgcggttcggagaaaataccaagccgtggctcagtggcttcagtgttgcaatgctgggggcactgagcctagtgggtgtgaacagtggacagactgctccc

SEQ ID NO: 9112 - DNA, 486 bp, Homo sapiens
  misc_feature (1)...(486): n = A,T,C or G
gaccgtgannnagggggnnnnntttgagaccctactgatngccgtaggaagngcgnggaattccttgaacccaggacttgcaggctgcagtgagctatgatcgcaccatttcactccagcctgggcaacaagcaagaccctgtctgttaaaaaaacaaacaagaaaactaaagcacagatccccctcatgcacacacattcctagtctacacacacagactgttaatacgttatccattcgcgtgtgtagtcatatgcaggcaggaattgcagtctctctcagggacaccttcacaaacacacataccctacctgccataaaccccagtccctacatctcaccaagctcttcttgtagaacccctacatttcttgacaaggggactgagcacccactttgaggagagagagcacagcagtgacagagaatgcaggtgcccgtgagtgctgtgaggccactgtcgcccgtgtggtccacctcagtgg

SEQ ID NO: 9113 - DNA, 601 bp, Homo sapiens
  misc_feature (1)...(601): n = A,T,C or G
cgctccnnaaggggnncnnntttcgaaccccacnctgggatcactattccgagnngggcaatnccncgacaattnttactttatgctttcttacttttcaatcatccttagaagggtcttcctcactgcaatatattaaatatattaacattcacctatttttttttccatgcttatgaatgttcatttttacatgtttatgagccttccagaatgtattaggcctaagattatttccagatgactggagaagagttgtcacaattaatgaacagtttctctttctcacatagctataccaacacctttatcataaactatttcaggactatgcctgaatagataagcatatctattcctatggttataccatagggtttaagttctcttaactttatggtatgtacaacggtatattgtatatcatactaaaactgggaagtaaaaattctcaaaatatttttctaaaatttcccttagtattactaaatacttatccttttagattaactaggaactaattntaagacttaaaaaaatccttatgagattttgcatcggatggtaccactgactaacatatttagaaataaaagacatt

SEQ ID NO: 9114 - DNA, 475 bp, Homo sapiens
  misc_feature (1)...(475): n = A,T,C or G
naactgatgntccattaggccagngcggnggaannncgctaattccctctgcaaaagataaaaaaattagctgggcattgtggcacgcacctgtagtcccagctactcaggaggctgagttgggaagatcgcctggtgacagagctagatcctgtctccaaaaataatatatttttagtaaaggtggggtcttgctgtgtcgcccagactggtcttgaactcctgtcctcaagtaatcctcccaattgtgagccaccatgcttggcccgattccctccaattctgaagggcatgtgcttacccctggtgcttgcctatgccttctcagtatagcagacattgtagatgatctctctgtgcttcctttatatatcctgcgaatatgggttataggggattgaaataacccaaataaacccagaattatctctgggggcacaggatagagataggcaaatacagagtatatttttgg

SEQ ID NO: 9115 - DNA, 453 bp, Homo sapiens
  misc_feature (1)...(453): n = A,T,C or G
nactgactntcccttactccagngcggtggaattcgaagaatatagtctgtttcactatattcattgagtacaatcaacgggagaaaagacatctcttctgctataaactgagataatgaacaaagtatgggcacaaatacagattatattagaagttactgccaaggagttgagaaaattcccatctaattgcttctgtctttatgaggtttgatgctagggtacctgccctggataaaggaaagaagaggtggagttgaaggtttgaggacaacagagaaggttcagtgaacatttttgcagataaatctttgcatatttctgttcatttccataaaatactttttgctgactcaaaaatgtatacatttttaaggatatcagaagatactgtggccaggtgcagtggctcacgcctatgatcccagcaattttagaggctgaggcaggcg

SEQ ID NO: 9116 - DNA, 488 bp, Homo sapiens
  misc_feature (1)...(488): n = A,T,C or G
cggancggcnnnntnnnnanaaatgagactgaaggcatngcggnggaattcgttcttctgaattttgtatttgtttatatttatttattttaaacccctagtaaattcgcagtgaaatcatggggaatataataaattagtggtgacaagcatttgaaaaaggtacagttgacccttgaacaacatgagtccgaactctgtgtgggtctacttacaggcagattttttttttcaataagtatcttggaaaattttttggagatttttggcaatttgaaaaaacttgcaaactatagcttagaaatatcagaagttaagaaaaagttggtatgtcatagatgcataaaattgactatgtcaatactagtgcattttatcatttactaccataaaatatacacaagttttttttaattataatttatcaaaacaatttgcacacagactacgtgacgccattcacagtccagagaaatgtaaacagagat

SEQ ID NO: 9117 - DNA, 472 bp, Homo sapiens
  misc_feature (1)...(472): n = A,T,C or G
cgagtccnnnnntttgagaactgagactctcggaaggccgggaattcggcggggaaggtgcgggggctggccttcccgctctggatctggccaaagctcaaagggagcacggggggctgggaggtaaactgaggcaacgactggggctacagctgctagaactgccacctgaggaggcattgccgctgggaccgctgcttggcgacacggccgagatccaaggggacacggccctaatcacgcggccctggagccccgctcgtaggccagaggtcgatggagtccgcaaagccctgcaagacctggggctccgaattgtggaaataggagacgagaacgcgacgctggatggcactgacgttctcttcaccggccgggagtttttcgtaggcctctccaaatggaccaatcaccgaggagctgagatcgtggcggacacgttccgggacttcgccgtctacactgtgccagn

SEQ ID NO: 9118 - DNA, 472 bp, Homo sapiens
  misc_feature (1)...(472): n = A,T,C or G
cgggttcnnnnnnatgagaccctgagaccctcgaagaanccncangaaggtgaacataacatcatgtcccaccaagcttctgaaaggaaaacaagtcattctgtcctcttgatatcacaatgacaagaaagttctgatcttgaattccatatggctggaaatatttgacattgggtgaataggagatgtcattgtgggatgttcatcaagtctattttcttatctagatatttgaggatggaagctgagttttcatttaaatattcttcttttgcttctcttaagcagaagctggtctctgcttttcaccacctggaatcccagtcccaacagctgctcttctaacccttccggcctaattgtggaataatcgtttaaatcattaagagacagaatctgatgttggtagctctgacagacctctctagcttctttcataagccagggctcttgcccagctcctgcacacagc

SEQ ID NO: 9119 - DNA, 257 bp, Homo sapiens
ggcgcgtcccactgcctgagggagtggcaatccactatgctgttctttggtaatggaataaattgacccaaggaccgaatttcatttggatttcaaattgtccagagtggaaaagccttcaagatgacatgatgaattactcagttcatctgatttctggtccctcctttctcgacaactataatactaacccttttctcaggataattgtctacccctggcagttttctctgacgtgctgttcactcacatcccta

SEQ ID NO: 9120 - DNA, 488 bp, Homo sapiens
  misc_feature (1)...(488): n = A,T,C or G
gcgcgggattgagactttgatcaccgtggnggaanncgctgggctggatcattttcctggactggacctagtccacaagctgctggcatctgtttctcctcatggatctctctctgcccttgtatacacctgcattcaaaaatgatcacgggctgcctgtgctctggtcatcaataacgcagggagaggaattgctgaaagccgtttcccgtgtttggagggttcacacctgtccctttcaaatgctggcgctttcacacactccttctctcctgccagcaccttctggtctcaggagcattgcaggatgttgtgtgagtgagtgatgggagacactttagtatggcttttttcagcttagcctcctgttatcagagagcagtctctttcagtgtcaaggtttgagtactagatggtggagaaagcctgtgtgaattatttttaatgaataagtgtgatgatgggtggcatacagtcacttgcttaag

SEQ ID NO: 9121 - DNA, 419 bp, Homo sapiens
ttgaatggcactccagatggggaattgctgtaaccctcttactgtaacatgtcatctcctgcgtcgtgatggggagagggtaatgttacttcacaaaggacatgtcagatccttcttcatggacttttttagttactgttttttctctcaaacttgttttcgaatctcctgggagtgagggagaaacagggagctgaatcctcccccaagctgttccaggccagaggactctgcagtaccttctcctacatctagtaacaaagaatggtgataaccatgcactggttcaaggttctggagttctccatgaaacttgggttaattttgctcagagtatccagagttagccactaggctgcgggtgaaatgggatggagaaaaacaacagcaggctttctggaaccacatgggctgactag

SEQ ID NO: 9122 - DNA, 511 bp, Homo sapiens
  misc_feature (1)...(511): n = A,T,C or G
gtgcaggggtnnctcnnaatcgattccctattccantnggtggaattcgtaccaaggagtggagacatgctctcacttctgatttgtgagcttgacagggatgaatgtaaccacataagttaaatgtcatgttagacttgtagccccatatagacaaggattttaatgtccccaagctaagactctgggtgggtgcatgtccattggcccaggaatccagatggaaaccactttgtggaaatgaaatcttgtgcctaacatgctcactctcttttgccctctgtttctcttcttacttacagtgggaacgttatcatagaaacaaagttttttgacgacgatcttcttgtaagcacatccagagtgagacttttctatgtttgaaagaagaatgtgtgtacatttcaagaatttgggttttttggagggaggaggaaactgtttacttttttcctccacacgtttgatttttgacacatacacccctaattccctcaacagcagaacctac

SEQ ID NO: 9123 - DNA, 444 bp, Homo sapiens
  misc_feature (1)...(444): n = A,T,C or G
atgggggccccnnntttcgtcgaccatagtccgtgtggtggaattccaatttggccagaggaaaatgttcttcattggagagctgagaccaacatgagtgaaacaaacttttaataacacaagacactatatagacatgtactggattatacagaaattaacaatgagatttagagacaggaaagataagtgtaggtcagagtaaacagagaagaaggtggctttgatgaatagaattaaaaaatactttcgtaaaagccaataaatgttgaatcatgctaatttcataaaatttagaaagcacagataaaaagaaaatacttcgaatcccattacccagagaacttgaccttctaacagacagagctttgcagcaatgacacggatagccttgcacagcagcgagctctaaaatacaggagctggggctggtcagccctgcca

SEQ ID NO: 9124 - DNA, 477 bp, Homo sapiens
  misc_feature (1)...(477): n = A,T,C or G
cgggatccnnnnnccttgagaccatgagaccggtcgaagaanccgacaggcaatccgaagagcaaatgaagaattctgttcagactcccgttgaaaactccaccaacagtcagcaccaggtcaaagaagctttacctgtgtcactcccccagattccttgtctgtcttcctttaaaatccatcagccatacacgttgacttttgctgaattggtagaggattatgaacattatattaaagaggggttagagaaacctgtggaaatcatcaggcactacacaggccctggggatcagactgtgaatcctcaaaatggttttgtgagaaataaagttattgaacagagagtccctgtgttggcaagtagtagccaatctggagactctgagagtgacagtgattcttacagctcaagaacctcttcccagagcaaaggaaataagtcatacttggaaggctcttctgataatcagctgn

SEQ ID NO: 9125 - DNA, 486 bp, Homo sapiens
  misc_feature (1)...(486): n = A,T,C or G
gggcgggccnnnnnaganataacccagggaccttcagccagcncngcaacgnagagccngnaattccancaatcctcttgttctttctcttggccccatgaccactttggcctacgtttgctctccttcccaacctcctggtagggtcagcagctgcacggagcagagcagtgcctcccgcctccttaagcgccaccggcggcgaaggaagcagaggccaccccgcctggagagggtgaggggttcctacaggaaggctggtgctgggagaaggtggggcatgggctttggtttgggcggtgccaggacaccggcagcaccccagggttgaccctgggttattgaagggcactctggctccttttcccaccacagacgtcatccttcagcagcgtcacagattccacaatgtctctcaatatcatcacagtcacgctaaacatgggtatggggagagcctgtggctagggcgtggggagggcctgg

SEQ ID NO: 9126 - DNA, 352 bp, Homo sapiens
  misc_feature (1)...(352): n = A,T,C or G
ntttcgaacaccatttagagtggcggatcgcgactctacccaccactcagcaccatccgagacgtgtctttgagaattgccatcaaagttctcgactacgcgtacaaacacaatctggcttcctactacccagagcctaaggacaaggaggcttttgtaagatccctggtctacactccagactatgactcctttacactggacagctacacttggcccaaggaagccatgaatgttcagacggtctgaggcagtctcagaggctagtatggggctagatgaagcccagagtaacacccacaatataaatgggttccaaaatggcccaagtgaaaaaaaaaaaaaaaaaaaa

SEQ ID NO: 9127 - DNA, 473 bp, Homo sapiens
  misc_feature (1)...(473): n = A,T,C or G
cttgaccccatattgtagnaccactagtacagngcggtggaattcctttttccttcctttaatggtaaggtattgccttttatggctgccagtatgtgtgccagttgtatggtaatcaggttatgatgaagttagaggctcttcagaggtcagatgagctgccatcttggatctcccctgtttctgctggtctggtcaagagggggaacttctgactacaggtatcctgtttgctggagatgaagcacggttagggtgtcacagtgatgtaacccaaccttgcagccttacaagcactagagaaggtaacatcaccagtaaagacttaaagtattttccttagtcttttcatttctctaaatatttactgattttgttgaagatgctataaaggctggaattcaaagccacctctttgagaactactcatgctgtgggtatcacccgtgtagatatgaaatatacatgttaat

SEQ ID NO: 9128 - DNA, 490 bp, Homo sapiens
  misc_feature (1)...(490): n = A,T,C or G
ggtaagtcnagccggnnnnnnnnaaaatcgtagatcgtaggcattgcggnggaattctgtttttgtgaattctttttgattttagtacaaaccttaatttctcagaaacggaacagttttaagggtgatcgttgttggttaggccaaatgttgtgtaataattatggtggactgatgctggaattactcctgtaggtataaacctctgtatgaagagaagatttctcccaggaaatctttgtacagctttaagttgtgtcagattctctgaaaacattttttagaaagcaaaatttttatatttgttcaatttcagctatacccaagtagatttacatgtatatgaagcaaatatttttaaaaatttctgtttgtacatattctgcatgttttataatttcaaaatgcatcacttacataggtatttctcccacagaaatgatganagtgaccagaaaaaaacaaaaacaaaacccctttactctgtagg

SEQ ID NO: 9129 - DNA, 372 bp, Homo sapiens
  misc_feature (1)...(372): n = A,T,C or G
nattcgatcnacancttagagaggccgatcgcgacnctacccaccactcagcaccatgcgagacgtgtctttgagaattgccatcaaagttctcgactacgcgtacaaacacaactctggcttcctactacccagagcctaaggacaaggaggctgttgtaagatccctggtctacactccagactatgactcctttacactggacagctacacttggcccaaggaagccatgaatgttcagacggtctgaggcagtctcagaggctagtatggggctagatgaagcccagagtaacacccacaatataaatgggttccaaaatggcccaagtgaaaaaaaaaaaaaaaaaaaaccggcccgtcaagttaaa

SEQ ID NO: 9130 - DNA, 478 bp, Homo sapiens
  misc_feature (1)...(478): n = A,T,C or G
gggagggccannnagggattancctgggngcacgtttganactatcngnaaaaacnngnnntcctctaattagacagcaggtggtttgaaccaaagaaagcttcagggggactaagaatctcattcagttccaaggataccagaataatttgtctgggtctttgggagcccatgccaaggggtgtgtttttttgtaatgattcctgaggcctttatgctttctatgtgaaattttttgagacataggtgataatttttcacattctagaacagttcccatttttcttcctaaagctcaagagtgagaactgaacatgaaaggaactcatttaaaagttctttaatagcctggcgnttttctttcctctctctttggaaacctaataaaaatgggntagccttgcttttcttttgcctatatccttcattcccacttatttactattatgattattatttataaatcttcatgttgaat

SEQ ID NO: 9131 - DNA, 464 bp, Homo sapiens
  misc_feature (1)...(464): n = A,T,C or G
ggggacgttttngttgannccccttnactgagattcctagtcagtgtggtggaattcctgacactctgagactggaccccaaagggggacggcccagggatcctccagacctcaacttctccaaaggggacaccctaggcagagttctgaggtctagtattaagccctccttagaattttctctcgcagttgcaatactgtttggcccaatattgtttggaatctggagcttgctgttgaatgggaaagtgggatggagttgcatgtgtcaaactgctgtggaaactgctatatctgaaattttggttcacagccttcattggattatctgttggggcaaacaaaggaaaaccccccaagcttgtattgctatctcatgccttaagattcccagttaaaagcgattgaatcttcgtttgtgtgcgtctatacatgtctagatgtgtttatttgtatgcacactt

SEQ ID NO: 9132 - DNA, 444 bp, Homo sapiens
  misc_feature (1)...(444): n = A,T,C or G
nttgacttcgatgaccattacaccgtgcggtggaattcgcacaacatgttcttagcaattaaatgcttttatctgatctctggtccacacaactgtcaaggtctcaagattttatgatgtttccattgtgatggtaatttgttgagatggctttctgggtaatttcgtattgctcttgttattcagtttcaaggattataaaataataatagcagccctgtgtgctgacgaatgcattctccataactatggctgctccttgatgagaagctttacagtactatatataaatgccagctgagtatttgttattattgttggacatcttttttcaaagaagcccagagcctggtgctgatatcatcccattaatctccatagccctgggcaaggtaagaccatgacagcaattttttaaatcccatctcggtcttctctaggttg

SEQ ID NO: 9133 - DNA, 470 bp, Homo sapiens
  misc_feature (1)...(470): n = A,T,C or G
gaggggnnnaganaaatgagactttggaagatgatgactttcgaagatcgcaacagattttgactgcaaagcagattctacagttcgtttcatctaaccgttggaattaaaatggaaaacgttgccagtttgtaaacccaaatccagatgctgtgttaagcatggtgcccaggtggaagcactgcctcttgttcccacgtgctgccacagagatggccctggtggggtgaaatggacggagaacaccgttcacaaggataactcatggtgtgggctccagaagcacatttcactgaaatcctaagaggacccagtctcagttttcattaataaaaaatacatggggggattctagaacctaagagtgttttgcaggaatttaaagccgggagaggagggtggcttgtttcactggtcgcgtgagctctttttttatctgtctcctccagagttgtcagcggcaataaaan

SEQ ID NO: 9134 - DNA, 477 bp, Homo sapiens
  misc_feature (1)...(477): n = A,T,C or G
nnnaaattgtagatccctagtctagtgtggcggaattcgcataattgttgaaagtatttaagaaaggcaacctgttttacatgaattattaagtgcatttttgatgggaaaagtttaatttctcagagagccgcgtaatcatttcatttatgctacaactcactagtttttcatattctgattgcaaagcagtaatttactggttttcatattatgttttaatgcattgaattcctttagagtggggctaatgtttgggtattagaatggtacctttttgtttgaataaagattttcatcaaatttttatttgggagaataatttttgaaatacatatcaaatctcagaaaaacttaacatgtaggcatccttaaaggcttttaaaataggaatgaggatcatctacaggaaaccctagtgattagctgtttcatgttntgtgatgtcagatgtaagcagtgaaccangccagccta

SEQ ID NO: 9135 - DNA, 579 bp, Homo sapiens
  misc_feature (1)...(579): n = A,T,C or G
nttcgacnccccnttcgtatnactatcccgagtggngcaattcatagaatacaaaaatggcacaaagcaaggaagtaaggcaggaagggttttatgtaggttgtgactatatgatatgaatctcaaaagttatattttacagagtaaagaagtagggagctggaataattctaggcaggagggattcattttagcagtcagtgaattgtgatactatagttgggaagtacagtgatgtgctgaaatgtagggcatagtcagtggctagtatgagatgatgctgaaggagagatggacaggggtcactccttggccttctatgccaccccaaggatttgggccatggggaagaaaaagggatcacatcgacaccagcatcttagtaagcagcctttggctgctgtgtagaagattgcttggatcagtttaagcccatggaggcagagagctttcttattagattttgtcatgatcctctaaagtaccacggagttgaatgtcaagttatattaaggaagtgaaatcaatagaatttagtcatggagttgatattttgtgatgatagaggctaagaaagct

SEQ ID NO: 9136 - DNA, 470 bp, Homo sapiens
  misc_feature (1)...(470): n = A,T,C or G
gtgggctnnnattgatcgcgtccgttannccgngcggtggaattcggttgaagcgaattcatttgccacagcatttctcagtgacttgatatattatctgctacagagtcatctgggtgctcgttaaaatgaagttcctgggctccaaccaccacttactgcatcagaatctgtggtgagggggtggaggggatccaataatctgcattttgaacaggttcttcatttctgtgcacacttcagattaaggaccactgcagcaaactgggcaatggttgctgtttgatggaaacttctgtgcatagggccagggctgctaaaaagctgagaatgggagaatccagctgccaccattctcttaggatgaaagtcatagcaggtggcaagcagcagggccaggacccagtgtgtttcaggaggaggcaatattttattctattttgagctcagtgtattatcatttaaacact

SEQ ID NO: 9137 - DNA, 474 bp, Homo sapiens
  misc_feature (1)...(474): n = A,T,C or G
gggagcggggnnnnnaatcgagacctgatgccctcggggaaccgacaatgagctgaattagatggccttatgaaactctttctaacctcttacccaacctgtttctccttggttaaaattatacttgaaggcccagaacactcatggcacatttgtttaatattgcttatagttagtttaaggtaattttgcttctacagtattttggaaggtctgaaaacttgcacagggtcatctttgtaattatataaccccaaactaagatgcacaatgtctccttcaggtgatcacacacagtggacgagtatgtgcaaacatggacataatagttcacttacaaatgtgatttgatgttaacactagagaatgatgactgtagaacatttgagcaagtaaaatagtaaagcacatagtgagtgtatgtccatctaactggtacattgataatttagtttgggcacataaaaggaatat

SEQ ID NO: 9138 - DNA, 467 bp, Homo sapiens
  misc_feature (1)...(467): n = A,T,C or G
tgtgcannnnnagcaagactgagacctttcgaaactgangacctcgaaanncannnnanttgggaaaaggatcatgctaaacaaagctctgctgctggtgtccctcgctctgacctccgtgatgagcccctgtggaggtgaagacattgtggctgaccacgttgcctcttgtggtgtaaacttgtaccaggtttacggtccctctggccagtacacccatgaatttgatggatatgagcagctctacgtggacctggagaggaaggagactgcctggcggaggcctgagttcagcaaatttggaggttttgacccgcagggtgcactgataaacatggctgtggcaaaacacaacttgaacatcatgattaaacgctacaactctaccgctgctaccaatgatggtcctgaggtcacagtgatttccaagtcttccgtgacactgggtcaacccacaccctcatttg

SEQ ID NO: 9139 - DNA, 471 bp, Homo sapiens
  misc_feature (1)...(471): n = A,T,C or G
gagggcagggngngcccccactgaaaccccactgatgacatnagcacagngcggnggaattcatccagtaccagtgatggaaaggacagatggcaaggaaaccctttcggggggaaaaagaaagtcatattgtgttggacctacagattactagaaacatagctttagtaaaccaaggctttttttcttgaacacaatctgtgtagactgtgtagttcttgattggtggctttaatccattatcattaggtatctccttgaacgttctcaaacactgaaagtcttaagctttcattaaaaaaaaaagagtaaatgcagctttcaaaaaatccaggattctgtacagtcttcgagtgtttcacttcagcttccctgtcctgttattaccaacagcaggtacccgggtggtagacaagaagcctcatgggatagataaggaaatgaagataaacaaacatatcacactgtatc

SEQ ID NO: 9140 - DNA, 470 bp, Homo sapiens
  misc_feature (1)...(470): n = A,T,C or G
gaggggcccgnnnnncccccaatagatgaccctttgataaccgttggaanncccaaaataaaataaaaatcattaggaacaaaataattcagtcgatatctagtttaaaaatggacatataaaaatcaacaggtttgctatagacaaggggtctgaaaactatggcctgtggttcaaatccaaccccttgtctgtttctgcaaagatttactggaacacaacaacgctcattcatttatgtattgtctatggctgctttcatgctataacggtgaagttgagtagctgcgacagaagccataaagtccacaaaacctaaaatatttactatttgaccccttacagaaaaagtttgccaacccctgctatagattaaaaagaaaatcagttagaaaataaaatgaaaaaaataaaagccccaattttggtttttagagaaagggtctccctccgtaacccaggctggtgtg

SEQ ID NO: 9141 - DNA, 479 bp, Homo sapiens
  misc_feature (1)...(479): n = A,T,C or G
ggtttgaggccgggggnntnnnnatcgagacctgagtncacgtgcgggaagtctgatatttctcctactgacttttaacaatgttgatcattgaggctaaattaatatatatgaaatattcctttttgatgacaccacaaaattgttgaacagtttaagaatttcaaccttaatcttggatccctttacctcatatggaagaacttgagggacattattatacttttttttaagatggagtcttgctctgtcacccaggttggagtgccatggcatgatcttggctcactgtaacctccacctcctgggtcaagccattctgcttcagccccaagtaggtgggactccaggcatgcaccaccatgcctggctaatttttgcatttttagtagagacagggcttcaccatattggccaggctgggactcgaactcctgaccttgtgatctgcccgcctcagtctatcaaagtactgggaa

SEQ ID NO: 9142 - DNA, 479 bp, Homo sapiens
  misc_feature (1)...(479): n = A,T,C or G
cggtacgcanaatcgagatctctagncatcgaggtcgtattcggcggcagagcagacctggctttccaggtagccaaggggtcagggctggggcaaatcaaagcttccagtgctcccagcctcattcccatccagatatttggctgcaccagcactagttgtctcatcattttcccctctgaacctctggtttgttgtctgtctttgatatagtaagctgtgttttgttttgggtaaaaagggaagtaagaatgtgactgatagtatttaaagaacaaaagggagaaacgcttcatgaattcatttgatatggaacattgacctaacatccaaaaaaatacaactaaaaagtagatctttccctcatttgcatggcttatttccccagatatgtttttggtattgaaaatgaatggtattcccatacaacatgtgtctcaatttgtaatgatatcctccttgcagctggcttagttctg

SEQ ID NO: 9143 - DNA, 456 bp, Homo sapiens
  misc_feature (1)...(456): n = A,T,C or G
agttaagtccgagagccctgtgnantcccgggaatcctcggaagngncgnggaattcgccgatttttccatcccagcatttcacatctgcagatttcctctatttcacagagctttggcttttttccctccactttccagccgagatacagccagccaccctacaaccagggaggttacagccagggctacacagccccaccgcctccacctacaccaccacctgcctacaactatgggagctacggcggatacaacccggccccctataccccaccgccaccccccaccgcacagacctaccctcagcccagctataaccagtatcagcagtatgcccagcagtggaaccagtactatcagaaccagggccagtggccgccatactacgggaactacgactacgggagctactccgggaacacacagggtggcacaagtacacagtagccagtgg

SEQ ID NO: 9144 - DNA, 454 bp, Homo sapiens
ggcctttggtggacatttgatcgttccagaagtggccttgggctggggatcaccatagcttttctagctacgctgatcacgcagtttctcgtgtataatggtgtctatcagtatacatccccagatttcctctatattcgttcttggctcccttgtatatttttctcaggaggcgtcacggtggggaacataggacgacagttagctatgggtgttcctgaaaagccccatagtgattgagtcttcaaaaccaccgattctgagagcaaggaagattttggaagaaaatctgactgtggattatgacaaagattatcttttttcttaagtaatctatttagatcgggctgactgtacaaatgactcctggaaaaaactcttcacctagtctagaatagggaggtggagaatgatgacttaccctgaagtcttcccttgactgcccgcactggcg

SEQ ID NO: 9145 - DNA, 446 bp, Homo sapiens
cttagacaatagtagacattagcccagagcggtggaattcgcagaagctgagggtcctggaccgctgccagcaaagtacatatcacagtgctggcagtggtgcagaagctgagggtcctggaccggcagggctgtgatatgtactttgcagacaacatcctttacactattcatatgggatgtcatgggtatgaaaatccttttcagtgtaatatatgtggatgcaaatgtaaaaacaagtatgattttgcctgtcattttgcaagagggcaacataaccaacattgattgaaaatagtcatattttacttagttttgctgtttttgtggtttggttttttttgttttttgttttggtcatccctaataaagtgtctgctaattcaaggcttatacattatatttatagaatataaatttgtcagtggaataaaatttcccctttt

SEQ ID NO: 9146 - DNA, 251 bp, Homo sapiens
ggcgcatagcaccggaagaggggtggcgtcccacaaaacgggttccttttcctttggggggtcccccaccccccggaaaaaaaacgggggtgggggaacggggcttgggcaaaggaaggggggccccgggggccaccccccccagcctggataaaaaaaacctcccaagaaaaccccccaactttttttccccaattgggggaaaaaaggtggccccccaaaccaccctagaagctttttttaaaaacacg

SEQ ID NO: 9147 - DNA, 504 bp, Homo sapiens
  misc_feature (1)...(504): n = A,T,C or G
agacggcccgncaatgagacctgaggaactgtcgnggaantctttntttttgagatggagtcttgctctgttgcccaggctggagtgcaggggcgcgaacttggctcactgcaacctccgccttctgggttcaggcgattctgctgcctcagcctaccgagaggctgggactgcatgcgtgcgccaccatgcctggctagtttttttagtatttttagtgaagacggggtttcgccatgttggccgggctggtcttgaactcctgacctcgagatccacccgcctcggcctcccaaagtgctgggattacaggcgtgagccaccgtgcccagccgttaagcggtttctgtcaggctgttgactttgtgattgatgctggagtttgaagtccacagggcactcatttgaaaaaggaagatggatgtctagtggggaagaagaggacacaggaagccacaggcaagatctgtggctggacttgtacngcagcacgccccatagagn

SEQ ID NO: 9148 - DNA, 503 bp, Homo sapiens
  misc_feature (1)...(503): n = A,T,C or G
cgaggcccgnncatgagacctgaggcacngtcgnggaattcccagcttcagttcacatcggaaagtccacacaggggaaaggccttatgtgtgtggggaatgtgggaaatcctttagccatagctccaaccttaagaaccaccagagagttcacactggagaaagacctgttgagtgcagtgaatgtagcaaatcctttagctgtaaatctaacctcattaaacacctgagagttcacactggagaaaggccttatgagtgcagtgaatgtgggaaatcctttagccaaagttctagcctcattcaacaccgcagagttcacacgggaaaaaggccttatcagtgcagtcaatgtgggaaatcctttggctgccaatctgtcctcattcaacaccagagagttcacattggagaaaagccttagctgtactgagaatatgcaatttccttttagtgtaattatactgaaggagtacacctgtgagagagacaagtacctgatt

SEQ ID NO: 9149 - DNA, 459 bp, Homo sapiens
  misc_feature (1)...(459): n = A,T,C or G
natcgaagaccctagttcgtgcgcgtggaattcgacaaacgtggcatctgaatagaagcttagctagagaagtggagttagagtccctattttaatgaactacatatatttttcaatcaaaatgtgtaattatttaattatctagcctgctcagtaatcataactctccaacttcttcaaagggcctttattcaatatgttaccactcatatggtcattacttggtaagtgttttatattttgaatttcttagatgctttcagtgtatgtgctagtgttttattaatattaaaaatttttgtttacttatatatcaagctgctgcaaatggactaccttattttaaaagttagaataaaatgctattactctctaaacagaactttagcatatctgtttgataagaaatacacaaacaaaatatttttctatgctattgcaaattgtccgcaggaagca

SEQ ID NO: 9150 - DNA, 471 bp, Homo sapiens
  misc_feature (1)...(471): n = A,T,C or G
ccctgatncctgaangcgtggcaggaancnnanggagatgctggaggagcaccaggcccatgacatcctcacctatggccccctggttccccgtcttgtctcctttgactcacctgagagaggcgtttgcagccaatgaagctggctgctcagacggtcgacattgaatttgggtgggggttgggatcctgtctgaagtacagactgttcttgctctaaaaacaggactgtccctgatgggagccaggccacagggaggaggcttctttgtgggtctctcctgcagagggtgggggtctcagggtcttaggtgatacgggagagaaagaacgtgccaggcaggaggccccctgaagtctgtgtactccgaggtggatctccatccccatccacctgtacggacatcttttccgttgcggnttgagaatgttcctataataaacccctctgctttgttaaaaaaaaaaaaan

SEQ ID NO: 9151 - DNA, 490 bp, Homo sapiens
  misc_feature (1)...(490): n = A,T,C or G
nttcgataccccttnccattgttgaacaacactgncaagngacgngggatacggacatgaaaaccatgcaggatgaattgacagggctactcatgatgtccccacactgctgttatagaacaacttcccaaaacttctttacaaagccctaaaggaaagtttgcatctatgaaaagccaatacgctgagacatccaattgctgcatggaaattgatgtacattcaggggacggcaaaaatagctgtaaaatagtgaaaaagagcagtggttgtgctcttttctggccaatgatttacaaaagaatctacttgactctgtccctggagtgaaatccttagggttggaacttgtgcgaacattccaacttgctaagcagggtccactgggagggaagctctatctgggaactcacccccagcgcacacacatctcccccagggtcccaaggccccgcagcttcctcccccgaccaaaccccaagacctggag

SEQ ID NO: 9152 - DNA, 464 bp, Homo sapiens
  misc_feature (1)...(464): n = A,T,C or G
cgtgcgagggngnnacaattgaaacctccgacttgncacctgcgaacgnncngnnatcctcttgncctgtgtcttgtgctcatgcataggtaccctccgctgtctttacaggaggggccagtccatctttaatcagctctagaaattagtaggtgctactggagatccttggatagaatctggggcagggtgggcacccgaagtaagctggatcagccatttcacaggctagagatcacctggacgatttgagacattttactcaatgtgcccctgattggcaccagctgggagagcagccgacctgagccatgggaacctgtgaatctattacgaggcccttggctatcccagctgactgcaaagttcaggcttcagtgggacgttcggcatgtgtgggctcagtcaccagcatcaaacatgaaagcagacatttaattatctctgatcctcgagtggcttgg

SEQ ID NO: 9153 - DNA, 493 bp, Homo sapiens
  misc_feature (1)...(493): n = A,T,C or G
cggcgttttgagccatcttgagagcgtcggaaaccnccggctgnnctcccgttccgctgcccgccctgccaccatgacggaacaggccatctttttcgccaaatacttcttggccggaggcatcgccgccgccatctgcaagacggccgtggctccgatcgagcgggtcaagctgctgctgcaggtccagcacgccagcaagcagatcgccgccgacaagcagtacaagggcatcgtggactgcattgtccgcatccccaaggagcagggcgtgctgtccttctggaggggcaaccttgccaacgtcattcgctacttccccactcaagccctcaacttcgccttcaaggataagtacaagcagatcttcctggggggcgtggacaagcacacgcagttctggaggtactttgcgggcaacctggcctccggcggtgcggccggcgcgacctccctctgcttcgtgtacccgctggatttcgccagaacccgc

SEQ ID NO: 9154 - DNA, 480 bp, Homo sapiens
  misc_feature (1)...(480): n = A,T,C or G
cgcgcccccccctnnnnatcgtagtccctttgcagtgtggtggaattccacgatggctctaggagcgctgtcggtgttttcttctggaggtgatcctgaaattttctccccaaagcaagctctgttgcgaggagcaggctggggatatgtgcaagtgaatgtgtattccaagagggggatgatacgcagatcttttggtgtataggaattaatacttttagattatcagtaaaatgtatactttcactggactgagagagaacaaggcttacggttacatcaaccggatcaacaaatatttattgtacttgtaatgagtaatacttagtctattatataaacataaatggaaccatannaaaaaaaaaaaaaaaaaaaaaaaaaaaggggggcccttcaatttaaaaggcccctttaaaccccgttgaaaaccctgaagggggctttttattggccacccttttgtggttggcccctccc

SEQ ID NO: 9155 - DNA, 445 bp, Homo sapiens
ctcgacatcgatgaccttagtccaggcggtggaattcggaagaaactgacccgatcagtgccagaagtcattgtattcaaagaagaataagcaagaaagaaaagaaggaaggaagagaggtagacagatacaagatgaaatcctgtcaaaaaatggaaggaaaaccagaaaatgagagtgaaccaaagcatgaggaagagccaaagcctgaggaaaagccagaagaggaggagaagctagaggaggaggccaaagcaaaaggaacttttagagaaaggctgattcaatctctccaggagtttaaagaagatatacacaacaggcatttaagcaatgaagatatgtttagagaagtggatgaaatagatgagataaggagagtcagaaacaaacttatagtgatgcgttggaaggttaatcgaaaccatccttacccctatttaat

SEQ ID NO: 9156 - DNA, 468 bp, Homo sapiens
  misc_feature (1)...(468): n = A,T,C or G
natcgagacatctgnccangcgttggaattcgagacagagccagttccttcctctaaaaaaatactaaaaatgaaatggggagtcactatattgatagtatttgaagccacagaacggtatgcaacagctagggattttgcatgggattaagaatttctttggaggaaataattacgacaacatttctcttagtttgtcagttcaagattctgtatcattagttgtttttaaaagccatctgctttcgatagaggacttgtcttccaaaaacttttaagatactggaatcaaaccttgcgctgaatcttcatactacccacatcaaatttggttgtcatgctttccatgtcaaatttgcttgtgtatcttttttagtttgagtttttatatgataaatccaagttcattatggaatattcaagaagtactaaagattataaaagaacctacgaaaaaatgttcatacn

SEQ ID NO: 9157 - DNA, 475 bp, Homo sapiens
  misc_feature (1)...(475): n = A,T,C or G
ggcggngnccccaatgagaccttttgaaggccgtggaanncccttgctgaagngagaggaagagtctgagttgtctgtttctagaagaaacctcttagagaattcagtaccaaccaagcttcagcccactttcacacccactgggcaataaactttccatttccattctcctagctggggatggggcatggtcaaacttagccatcccctcctcagcaaggcatctaccggcccctcacagagacagtactttgaaactcatgttgagattttaccctctcctccaaccattttgggaaaattatggactgggactcttcagaaattctgtcttttcttctggaagaaaatgtccctcccttacccccatccttaactttgtatcctggcttataacaggccatccatttttgtagcacacttttcaaaaacaattatataccctggtcccatctttctagggcctggatctgct

SEQ ID NO: 9158 - DNA, 483 bp, Homo sapiens
  misc_feature (1)...(483): n = A,T,C or G
cccccgccccnnnnngatttgaaaccctattgtagacattagacagngcggnggaattcccatgtagcagcaacttgaacgaatgtcacaacttgtactttttttatatacttcaactttctgaaaaagtaaacttcgacaagttcccagcaactgcttgtttgtgcatgagtagggcttactaagtgcatagatgtttctacagtgaggtgtcctttttataaggtgcacttttggagtttttctgatgccaatctcaacattgtctttttaatactgtcaccagatattgccatttttctttttgttaaaagattatatgatcaagataaattggggtggtaaatcaggtgcctggtaatttatctctttgcacatgggcatcattttaaaaagcttgcttccactcttttctgtagaatttgacggaacacagctatttccctatgcaaggtacagccttacaaagatttctgcagtgat

SEQ ID NO: 9159 - DNA, 441 bp, Homo sapiens
  misc_feature (1)...(441): n = A,T,C or G
ntttgaagatcgttagaccttgcggnggaattctaactttgtaacctgtctaggacttagttttctaatctgtaagataatgggttggactaatctctctaagatttatctctgaaattctgtaattaagtgagggaatttctatgaaagtgcttggcaaaccattgggctattatgatagttctaagtggaaacattatgtttcctcaatacacagtgaattgagttctgactctctggggcagatagatttctgactttctgggccatgtgttgaaaatatgaagatggctgacgtggcccctgatattgaatacagtgtctagtgggagaaatagacatgcacataagctatgatgatacagtgtaataatgggttcttgggtggagggaaatatgaggtgaggcttgccttatgatgtcctttgtatcttaggaaga

SEQ ID NO: 9160 - DNA, 443 bp, Homo sapiens
  misc_feature (1)...(443): n = A,T,C or G
ntttcgagatcgatgacnattagncagngcggnggaattcggggtttacaggtccgtctccagaaaagttgttttaggtgatggtcaccattttaattaaagggatatcaaactatatgtttagagagataataacaagccacccaaacccagatgctagatgccacacatgttggagagggctgtaagaagggagaaagaaaccaacgacaaaaaacactctctcattctacaggctggatttaaagtaaaccaatggggcgaaagttacaaccattttcattttccatcccagagatcttcctccccagtgtcctcctcctttactccatatctaagtgttgagtatctccatttcttcctctccaattgctaactccatttctctttggtgggaatcagcatcttgcctttgtatgcaggaatttgtgcattctgagcat

SEQ ID NO: 9161 - DNA, 408 bp, Homo sapiens
cagctaggcaacagcagcagattgaaaatcagcagcagatgttggttgccaaggaacagcgtttacattttctaaagcaacaggagcgccgtcagcagcagtctatttctgaaaatgaaaagcttcagaaattgaaagaacgagttgaagcccaggagaacaagctgaagaaaattcgtgcaatgagaggacaagtcgactacagcaaaatcatgaacggcaatctgtctgctgaaatagaaaggttcagtgccatgttccaggaaaagaagcaggaagtacagactgcaattttaagggttgatcagcttagtcagcaattggaagatttaaagaaaggaaaactgaatgggttccagtcttacaatggcaaattgacgggaccagcggcggtggagttaaaaagaa

SEQ ID NO: 9162 - DNA, 442 bp, Homo sapiens
  misc_feature (1)...(442): n = A,T,C or G
ctcgacnatcgatgaacattagtncagngcggtggaattccagacttgcaagcagtgattttatctttccttcctgagaaggtgatctcacttttgatgtttgggtcacctgtggacacctgtgctcttttgagtctcaaggcttatagctttcacattggcttgggaacaacagacttgtgtgtggttctagagtgaaatgggcagtgttctgctggtcctcagtctttgagaggtcttaggcaacatccttagtatagtggaatttctgaggtcaaatttaacatttaatatattctccttttagttcattgaatctgaggttctaaatctgtagcttcattttgagcacaagtctgcattgtcattttttaagagattggcaggcatatccttttgtgatacttangaaaagactatggatggcagcaaatgaaagtaa

SEQ ID NO: 9163 - DNA, 449 bp, Homo sapiens
  misc_feature (1)...(449): n = A,T,C or G
ngggtttcccccctgatntcccgactgagangcgagcacagnccggnggaantcccaaaaacagcaaactcattttaaagactcattgctgaggtgatagagagaaaccttatcctctccaaccttcacattcacaaaaaccatccttgtgtacttgactgccctagacagtggtgactcttaggtttcattacgaatgtggaatatcagagtgtgggaaggcccaggcgagggccaatgttgtgtttcttaccccctctggaatgccaaaggcaaggtactaggtgacctcctggtccccaagaaaatgtgatttattctgagggcgaacagccaagggaggactagtctggagcacgctcggccgtcctggcaggagctgagcctcaggtgtctggcggtgccccagcagccctggattcacccaacaccagaatcccacttttcta

SEQ ID NO: 9164 - DNA, 445 bp, Homo sapiens
  misc_feature (1)...(445): n = A,T,C or G
ngggttttaccaactgagaccccctagagagcgtggaaancncaancncagatacttgggaggctgagacaggagaattgcttgaagccgggaggcagaggttgcagtgagccgagatgacgccactgcactccagcctggatgagagagggagactgtgtctcaaaaaaacaaaaacaaaaacaaaacaaaaaaaaaacctcaaatttcagggcctcaagcctacagtttttaggtcaaggggggataaaatttgtatgtctaacaagttcccaggggatgctaatgctgatcagggaccacactttgaggagcacttgcctaagggatggacatttgagccaagccaaactaattgtccttatctggtattgttcatactggaattaggaaaagcagcccttggcttcactggccatatgccataaggacatgagacctaaag

SEQ ID NO: 9165 - DNA, 458 bp, Homo sapiens
  misc_feature (1)...(458): n = A,T,C or G
ntcccaatcgaagaccactagtttagagcgctggaattcgtctgggcaacgacagccgagacatgtacatggagtctgagggcggcgacggctacctggctccggagaatgggtatttgatggaggctgcgccggagtgaagaggtcgtcctctccatctgctgtgtttggacgcgttcctgcccagccccttgctgtcatcccctcccccaaccttggccacttgagtttgtcctccaagggtaggtgtctcatttgttctggccccttggatttaaaaataaaattaatttcctgttgataaaaaaaaaaaaaaaaaaaaaaaaaaaaaaaaaaaaaaaaaaaaaaaaaaaaaaaaaaaaaaaaannnaaaaaaaaaaaaaaaaanannnnnnaaaaaanaaaaaaaaannnaaaaaaaaaaanaaaannnnnnnnnnnaannnnnaaaccccccc

SEQ ID NO: 9166 - DNA, 441 bp, Homo sapiens
  misc_feature (1)...(441): n = A,T,C or G
ntttcgagatcgttancnagtgcggnggaattcctgatggatactatgcacgatctgaagattatgtggatattgttcaagggaatagagtaggagtatggaatgtcccatatatggctaatgtgtacttaattaaaggaaagacactccgatcagagatgaatgaaaggaactattttgttcgtgataaactggatcctgatatggctctttgccgaaatgctagagaaatgactttacaaagggaaaaagactcccctactccggaaacattccaaatgctcagccccccaaagggtgtatttatgtacatttctaatagacatgaatttggaaggctattatccactgctaattacaatacttcccattataacaatgacctctggcagatttttgaaaatcctgtggactggaaggaaaagtatataaaccgtgatt

SEQ ID NO: 9167 - DNA, 496 bp, Homo sapiens
  misc_feature (1)...(496): n = A,T,C or G
ggtnnagcccnattgaaaacccttttttgagaccattagtccagngcggnggaattccagcaaagctgatcattctgggagcttggatcccactaataaaggagatgcaagggaaaagaagcctgcatctcctcaggtagtaaaagaaaaagagtctactggcactgatacctcggatgccaaaaccctactgctcaatcctaaatcccaagaaagtggaggcacagaatcagctgctaatcctacaccctccccaattaggaagaaccaggagagcaccttagaagaaaacagacagaccaagacagccaccagcctgagcctgccatctgatcccatgggtgactccagcccaggttctggcaagaagaccccatctcgctccgtcaaagccagcccacgcaggcccagccgcgtcagcgagttcctcaaggagcaaaagttaaatgtgacagcagctgctgctcaggtaggactcactccaggagataagaaa

SEQ ID NO: 9168 - DNA, 453 bp, Homo sapiens
  misc_feature (1)...(453): n = A,T,C or G
attgagaatagagnccatgcggnggaactcgccggacgagttcgagtccggcatctcccaagctcttctggagctggagatgaactcggacctcaaggctcagctcagggagctgaatattacggcagctaaggaaattgaagttggtggtggtcggaaagctatcataatctttgttcccgttcctcaactgaaatctttccagaaaatccaagtccggctagtacgcgaattggagaaaaagttcagtgggaagcatgtcgtctttatcgctcagaggagaattctgcctaagccaactcgaaaaagccgtacaaaaaataagcaaaagcgtcccaggagccgtactctgacagctgtgcacgatgccatccttgaggacttggtcttcccaagcgaaattgtgggcaagagaatccgcgtcaaactagatggcagccggctcataaaggt

SEQ ID NO: 9169 - DNA, 466 bp, Homo sapiens
  misc_feature (1)...(466): n = A,T,C or G
ngcggatttaaccgaaggctccgacaagnagcctncgnanangcggnggaantnccggggnncaagctgaatttaaacaaatatcctcaaataaacattggcagtctggcagggacctcgtctcgggggtccccgcaagctggctgggccgggccctttcgcgtctggagtgctcactctgttctgcttccgctgttgtggatgatccaagaactgaatattctcagtggcttcttagtcctaagtgaatttgtcacaggacattaatgcctaaagccagagaacctgccaggaggagagggcaggggacccgaggggctaggtcctacctcacagttctccagcccaggagctgtggcctgaggaccctggaggacccgcatacacgccctcctgtgccccgctaaggctgcacccagacaggaggccagaggcacagctgggacagcctagagactaccccaag

SEQ ID NO: 9170 - DNA, 485 bp, Homo sapiens
  misc_feature (1)...(485): n = A,T,C or G
tgaagggccccnnnaggggnncacattgagncccttgatcgatgaccatctagaccatgcggnggaattccaaggatgagcagatggggcctgcccgtctacgtgtgcaactggcagtccaggagctctgggtttctgataacaggatctcctttgggctcttgaggttggggagaagcattaggattacacagaggagctactgggacttagaaggaaccctggctgcctgaactgtggccgtgtctgggaggcgaggccacgacaggcctcaagcctcagatgctgctccacgagagccatcttccccagtggagtgcctgcctcccctgctaggcccgtttccctgaaggagctggccgtactggccgtgggcccagtcctgggaggagcagcacagccttgcccaggcccagtccacagagccagcagcttgggttgagatgaatgatgtgttcacaaatgaggggatttcccttctggac

SEQ ID NO: 9171 - DNA, 474 bp, Homo sapiens
  misc_feature (1)...(474): n = A,T,C or G
gagtnccccccaaggggnccaatgataccatcactgatgccntgaaanctttctctttcatagcagtttgcaaaggaagtgaatataggctaagcatccctatctgaaagtcccaaattcaaaatgctccaaaatccaaaatgagttccaacatgatgccgcaagtggaaaattccacacctgacctcacgtgatgggtcacaatcaaaatgcaggcacatgacacagtttattcagtgttcccaagggaaaaataaaattaccttcagactatgtgtataaggtgtatgtgaaacaaaaatgagttttgtgtttagacttgggtcccatctccaagatgtctcattacgcatatgtaaaattccaaaatctgaaaatcccaaatccaaagcagttctgatcccaggcatttcagataagggttactcaacctgtatcttgaactgaaaaaattacagacaccacagaatttga

SEQ ID NO: 9172 - DNA, 463 bp, Homo sapiens
  misc_feature (1)...(463): n = A,T,C or G
agagtgccatcgggcctttatgagaccatagacagngcggtggaattcggaaattccagcgctgcttcatcttccagtgctgataattatggcattagccatcctgagtttctgctatggtgctggaaaatcagttcatgtgctgagacatataggcggtcctgagagcgaacctccccaggcacttcggccacgggatagaagacggcaggaggaaattgattatagacctgatggtggagcaggtgatgccgatttccattataggggccaaatgggccccactgagcaaggcccttatgccaaaacgtatgagggtagaagagagattttgagagagagagatgttgacttgagatttcagactggcaacaagagccctgaagtgctccgggcatttgatgtaccagacgcagaggcacgagagcatcccacggtggtacccagtcataaatcacctgtt

SEQ ID NO: 9173 - DNA, 480 bp, Homo sapiens
  misc_feature (1)...(480): n = A,T,C or G
ccatcgatcaccntaggtcangcgccngtaattcctctaatgaaaacaggttctagaataaaggagttgattagtctgaacagtactaattaactacaaaataaacgttagtgatcagcctcttcctctataaacaatgaccaattagacgtttccgtaattccatgtattatgtatagtacactctataaatgtaaatgtaatgcttgtctaaaaagtgcaatttattgtacattgtcccaacaaatgtttacttttataatcgttatgaacttgaattggattagtatcttgtttttatgtgtgaatgaagccttgtgaaataaacaaatgcaactgagaaggtaacaaggtgactgtttttgtgagccagagatgttttcaatgctttgtgttgcccctttggccccattaagcagtaataaacatttgttctgaagtcccccnnnnnnnnnnnnnnnnnnnnnnnnnanaaaanaa

SEQ ID NO: 9174 - DNA, 463 bp, Homo sapiens
  misc_feature (1)...(463): n = A,T,C or G
gcgggtttaaattgaaaccttcgactgaggctgtagnannnngcacggncacctggcgctcatgagccagccccgagaggtgagggagttcaacgtcgaccacttccttttggagcgcgccatccgggcagacttcgccctggtgaaagggtggaaggccgaccgggcaggaaacgtggtcttcaggagaagcgcccgcaatttcaacgtgcccatgtgcaaagctgcagacgtcacggcggtggaggtgggggcttccccccagaagacatccacgttcctaacatttatgtaggtcgcgtgataaaggggcagaaatacgagaaacgaattgagcgcttaacgatccggaaagaggaagatggagacgctggaaaggaagaggacgccaggacgcgcatcatcagacacgcagctctggaatttgaggacggcatgtacgccaatctgggcataggcatcg

SEQ ID NO: 9175 - DNA, 440 bp, Homo sapiens
  misc_feature (1)...(440): n = A,T,C or G
ttttgaagactgaagacctcgcggnggaattcacgaagacctggagggacctccctcctacaagccaccgaccccaaaagcgaagctgtaggctcaggagatgccctcccagctcttcactctgggggcctcggagcacagcccactcaagaccccctactttgatgctggcgcctcatgcactgagcaggaaatgcctcgataccatgagctgcccaccttggaagaacggtcaggacccttgcaccctggagccacaagcctggggtcccccatcccggtgcctccagggccacctgctgtggaagacgtttccctggatctaaaggatgaggagggggaggaggaggaagagtatctggacaagatcaaccccatctatgatgctctgtcctatagcagcccctctgattcctaccagggcaaaggctttgtcatgt

SEQ ID NO: 9176 - DNA, 443 bp, Homo sapiens
  misc_feature (1)...(443): n = A,T,C or G
nttagacnatcgatgancatctgncagngcggnggaattctataaccttctcttagaacgtggtgccatgttctctacagtataatcccaaatgaaaagtgaaaattctcattacactccttgacctagttttaacaagatgctaaatactgagtctcaggcctttgctctttgatttaagataaaaaatcctaagtattttctctggatgttttggggggaaaaaatcctaagtaaaaccttttctgtgtcatttatttaaaaatcacaattggcaattatcctcgcctaatggtcttcttgagtcagagaagtctttttcctttgaccttttccatggtagcattttacgctgttctggttactaccagcaatacaggctaaacaacaacccaaagtttgaccatctggcctcgtccttagtcacctatttttgctgctgg

SEQ ID NO: 9177 - DNA, 444 bp, Homo sapiens
  misc_feature (1)...(444): n = A,T,C or G
natgacgncccaatgatgaccctcagacagngcggtggaattcctttctgctgctccccagctctcggatacagccgacaccatgggtttcggagactttaaaagccctgccggcctccaggtgctcaacgattacctggcggacaagagctacatcgaggggtatgtgccatcacaagcagatgtggcagtatttgaagccgtgtccagcccaccgcctgccgacttgtgtcatgccctacgttggtataatcacatcaagtcttacgaaaaggaaaaggccagcctgccaggagtgaagaaagctttgggcaaatatggtcctgccgatgtggaagacactacaggaagtggagctacagatagtaaagatgatgatgacattgacctctttggatctgatgatgaggaggaaagtgaagaagcaaagaggctaagggaaga

SEQ ID NO: 9178 - DNA, 440 bp, Homo sapiens
  misc_feature (1)...(440): n = A,T,C or G
nactgangacctatggacagtctgttggaattcctaaataaacccaatgctgcgtgtgaggccttttttatttttcttttcactctctttctaatgcttcccaccttaccttttagattcttttgctaggtgggagattgttataaggtctttaaaccatttccatttgtttctttaacattaccaaaagcagggaacaaagctcttattcaactgcgaattccatagtgggctctggcttttcttgaatagatatcacaaggttgcttattatcaaaagaataattaaaatcatgtaaccatttaaatgtcactgttaacacttttcactctttctgttgattcacctaactcattattttgctttattaaaagtcttccttcaccaccgagatatgctaatttaacttacaaatgattttaataaaatcttgagtttg

SEQ ID NO: 9179 - DNA, 481 bp, Homo sapiens
  misc_feature (1)...(481): n = A,T,C or G
cctcgacaccntnactgatgaccctaggacagngcggaggaattcctttgctccttaggaccaaggaggaatgcctcctcctatagccaaaggataggccaatttcacacctgtgtttcttgttccttgtctgacctctgatttttcttatttccttgactctgaggatgagacagtgccaggaagggaccttctcacaagacagactggaagtttgatttttctttcttttgggagaggaagccctttctctgtgagaatcctgtcctgactggtttcccagttcttagatgatgcgtttggaatagagcccagtctgaaattataagcactggggtactcctatgtgtctgggactctatgccacgtattctatagatgttttgctagattctgtgataaccatacaaggtatataatttgccataggttcggatgtgtacccagcacgctaggagtaaggctttgaatgtcacctatc

SEQ ID NO: 9180 - DNA, 494 bp, Homo sapiens
  misc_feature (1)...(494): n = A,T,C or G
catcgacnccntcggcanattgagaccataggcagngncgaggaattccaagatcttcccagctacagagaagcagatctttgaagaccacgtgttctgccactctctctgagtatcccaacctcttggatgtatacagagattttatagaatagaacctatagcttctaccatgagttatatgagtcaagatcctgcctaacctgaaattattagggatttactcagccctgctgccgctaacagtggagttatgtcactgatctgaaggtcactgttaagggcttctgctgccatccttgtgggttgctacctttaagtcgcataactctagctgtatcatcctctcacctgtcattcttctgagggtctcagtacaagggccctgggatggagccaacctgggtattcacaacaggcctgacttgatactaagtgattagttttccaagttgtcccactgccattcaaagtcagcccttgagtgtatttgn

SEQ ID NO: 9181 - DNA, 473 bp, Homo sapiens
  misc_feature (1)...(473): n = A,T,C or G
gaganccccccagtnnnnaaactgagaccatcgtagaggcccgtgaaanccagcattggaaagatatttaagaactttaaggaaaaaaaatcatttaaaccagattttggagcagaaagtatctacggcggcttcttattgggagtcagatctgtaaatggcttagccttctatgactgggacaatacagaactcatacgaagaattgaaattcagcccaaacatattttctggtctgactctggagagctagtctgtattgctactgaggaatcattttttatccttaagtatctgtcagaaaaagtcttggctgcacaggaaacacatgagggagttactgaagatggcattgaagatgcctttgaggttcttggtgagattcaggaaattgtgaaaacagggctttgggtaggcgattgcttcatttacacaagttctgtgaacagattaaattattatgttggaggaga

SEQ ID NO: 9182 - DNA, 449 bp, Homo sapiens
  misc_feature (1)...(449): n = A,T,C or G
nattgaagaccactagaacaccccggtggaattcgcccgatggagcgcgcgggcgctactagccgcgggggccaagcgcctggcttcttactgcggcttcatactgagggcccagccgaggcggcgcgggtgcaggagcaggacttacggcagtgggggctgacagggattcacctacgctcttaccagctggagggagcaaactggctcgcccagcgcttccattgtcagaatgggtgtatcctgagagatgagatgggcctggggaagacctgccagactattgctctcttcatttatttggcaggaagattaaatgatgaagggccatttctgattctttgtcccttgtctgttttgagcaactggaaagaagaaatgcagagatttgctccaggtctttcctgtgtaacatatgcaggcgacaaggaggaaagagcctgccttca

SEQ ID NO: 9183 - DNA, 475 bp, Homo sapiens
  misc_feature (1)...(475): n = A,T,C or G
tgaggggcccnnnagngnnnatactgagaccttcatagatgncgtggaanacggcaaatggggctcagggattgctaagcaaacgcatcactggtggtctccagcgcctgcggaggcagtgcctgatggctgagaagaatcgcagaggactagaaaaggtttgagtctgaaattatctggcacagaggattaaagctcagaaataagtgattgcgaaacagttcaacttccctgttaatgacaacaacaacagcaacacgcttattaattcctagctggagcatcaagcttatgaagatttccaagactttattgttgacccttgttgaagagaactctacttggcttctttcctggctttcctaaattgttcacatacaagataaactaccgtcattcagacttacagaagtgagaagacaagctgaaccaaatgtaaaatggtagcaatttacagatgtcagaactaacatgt

SEQ ID NO: 9184 - DNA, 481 bp, Homo sapiens
  misc_feature (1)...(481): n = A,T,C or G
tgaggggcncnnnnaggagnnccaattgagaccattaactgatgacatagtccagtgcggtggaattccttttttgtttagcttcatagaagaagctgcctttgacaaactgtgcttagtctctcacggacgatttccgttgacgaacctgaccgatatgctgctcggtgctgtgcagcaccgtgagaaagaggtgttggcctggatgattctgcacagcttataccaggcacggattgtgagccatgccaatacgggcgttttgaagagaatggagtggctcttggaactgatgggatatattagaaatgttgcttaccagtcaacatcctttcacaatacggctcttgacgaggctttggacttcttcttgctgatatttgcaaccgcagtggttgcatgggctgaccacactgcccctctcctcctcgggctcagtgccagttggttgccatggcatcaggagaatggaccggctggg

SEQ ID NO: 9185 - DNA, 477 bp, Homo sapiens
  misc_feature (1)...(477): n = A,T,C or G
catgagaccntgtttgaaggcggtaatncatgacgctcaccccaccttcttcacccctagagctcatgccacccggttcctgcatgcttgaggagcccaagccaaagaggggaagacgatcgtggccccggaaaaggaccgccacccacacttgtgattacgcgggctgcggcaaaacctacacaaagagttcccatctcaaggcacacctgcgaacccacacaggtgagaaaccttaccactgtgactgggacggctgtggatggaaattcgcccgctcagatgaactgaccaggcactaccgtaaacacacggggcaccgcccgttccagtgccaaaaatgcgaccgagcattttccaggtcggaccacctcgccttacacatgaagaggcatttttaaatcccagacagtggatatgacccacactgccagaagagaattcagtattttttacttttcacactgtcttcccgat

SEQ ID NO: 9186 - DNA, 462 bp, Homo sapiens
  misc_feature (1)...(462): n = A,T,C or G
gaggaanaaaattagagacctcgcgnatcactagtccatgtggtggaattcggngactcgccgcagatccgctgtacttgcgtccgctacagtatgtcaatcgcttgccccagcacagctgtcattcttctctacagaagagcttctcctcatcaactggggatgattacagttcttcctaaaaaaggatggctgctctttttctaaagaggttaacactacaaactgtaaagtctgaaaatagttgcattagatgttttggtaaacacatcctgcaaaagacagcaccagcacagttgtcccctattgcttctgccccaagactctccttcctaattcatgcaaaagcctttagtaccgctgaagacacccagaatgaaggaaaaaagacaaaaaagaataaaacagcttttagtaacgttggaagaaaaattagtcagcgagttattcacttatttgatg

SEQ ID NO: 9187 - DNA, 501 bp, Homo sapiens
  misc_feature (1)...(501): n = A,T,C or G
cgccccatcgananccnttnnnnnnatcgtagaccactatccatgtggtggaattcccgtgcctggcctgagttgtttaatatttaaactacatgtttttcttgtggtaaactcgtcagacttggtgaatgttataattgtgttcagagtccaaaagtcattccatagcatatatttcaagtataatgatggctcaatgtcctgaaccaagattatcttggtggctgaggctaatacctgatactgtgggtggcaggtcacactctctgcaggttcccatcgggtcgggtgatgcttttcagattaacggttaagtgcagctatcttagcgagggttcattattgaagtttctatttgtttctttatgctttttaaaataacttacctgcatctcttacattgattgcaaagggccaagtttgagacagtgacagacttgagagaagaccaaagctatccacagaaagctttgctagctaaatatttgtttgagattgtcg

SEQ ID NO: 9188 - DNA, 263 bp, Homo sapiens
  misc_feature (1)...(263): n = A,T,C or G
ctaggaaaaataacatagagtctgctacatcatgtacccagaaaaaaaaacttaattgttaaacgacgtttatggaaaagcaatagatgaacttaatcatttgatcactgcctataactacgcagatcatgacctgtgaataccaatccattgtagattttttacattttactcaanaacttatacatagagactctcaggtcaaattttacaagtattagacattagttaatcacaatcacttgcggcacacccataaagat

SEQ ID NO: 9189 - DNA, 563 bp, Homo sapiens
  misc_feature (1)...(563): n = A,T,C or G
nggctcgaagcactagtccagngtggnggtatgtcaaccagctagctcagggtaggtgctggccttctgattcccagtccagacctctgctagtcacagtgcccagccaggtatgctgtggggatgtcagtggcctcagaaagagtgacgacttgggactgatgtccccacatgctggggtcacaggacaaaggaaagggtttgtgactttgagctctcttcttaccctgggcaacctctctctctgtttaaaagcctggtgaccctgctgtgaacttcctcttttaaatgaacagctccctagagcatccttggctgagcttagcaacaaggggggagggagtgaggaggggtgggaggaaatgggctcccccgttatcatgtcagtgcaatcactgtgaattatggttgaggattaagagtcacttgnggataattcagccaggctggagagggaaacacacacaaatacacacacacttcacacatanacagattgctaaagctcatggcagaaaacaaacagcataggaaagaaaaaaaaaaaaaaaaaagcggccgtg

SEQ ID NO: 9190 - DNA, 433 bp, Homo sapiens
atgagataagaaaagcctgaactatttattaaaaacatgaccactcttggctattgaagatgctgcctgtatttgagagactgccatacataatatatgacttcctagggatctgaaatccataaactaagagaaactgtgtatagcttacctgaacaggaatccttactgatatttatagaacagttgatttcccccatccccagtttatggatatgctgctttaaacttggaagggggagacaggaagttttaattgttctgactaaacttaggagttgagctaggagtgcgttcatggtttcttcactaacagaggaattatgctttgcactacgtccctccaagtgaagacagactgttttagacagactttttaaaatggtgccctaccattgacacatgcagaaattggtgcgttttgttttttttt

SEQ ID NO: 9191 - DNA, 493 bp, Homo sapiens
  misc_feature (1)...(493): n = A,T,C or G
nggtcgaggcccctggnnnnnnnaattgtagaccctagtacagngcggnggaattccagattctttgattgtcaaaggatttaatgttgtctcagcttgggcacttcagttaggacctaaggatgccagccggcaggtttatatatgcagcaacaatattcaagcgcgacaacaggttattgaacttgcccgccagttgaatttcattcccattgacttgggatccttatcatcagccagagagattgaaaatttacccctacgactctttactctctggagagggccagtggtggtagctataagcttggccacattttttttcctttattcctttgtcagagatgtgattcatccatatgctagaaaccaacagagtgacttttacaaaattcctatagagattgtgaataaaaccttacctatagttgccattactttgctctccctagtatacctcgcaggtcttctggcagctgcttatcaactttat

SEQ ID NO: 9192 - DNA, 465 bp, Homo sapiens
  misc_feature (1)...(465): n = A,T,C or G
gttcgaagatccactattccagtgcggtggaattcggaaatgcgggaaaggttgctgtgtttggagggtccacatcttcaccctcctgtcccaggagctttcctacactcctccttctcaaagctgcacacacctggggcctccaggggattgggggctgccgtgtgtgttatatcatgattagagctttcacttcctgctccctgctgttgggaaccaggctgtgtgtgttgcttaaattccccttgatgaccagcagagtcactgccactcagccatggcacactgctgtaaacctggttttgatctcctttcaatcttttgctgattaactacacattgatcagtgttggccaccctcaccctgccatagaccatccgctgtcttcctctgtagagntaactattttctcttttatgaggaaatagtgtgtttgcttaggagtggttactgtctggntactt

SEQ ID NO: 9193 - DNA, 458 bp, Homo sapiens
  misc_feature (1)...(458): n = A,T,C or G
gaaggaaaaatttganntttgtagacattagtccatgtggtggaattcctgtcactttgttcttgaggtagtagtcaaggatcaggaggggcagatgtcttctctgggctgcgtggggccggagcagaggtgagcagcaatgcactggttcgggagcccccatcagcctccttgtgcaaactgggcccccatgccacagtctggctttccctccatctgccccaggacaagagcaagaaggacatcagttgcccagtcatgtgatcccctgccatcttgccttatgaacagccttcccccaccagcagccatggctggctggggcgttagccaagccacctactgccaggaattggagcctcagttccctcctgtgtcaagtagctaactgcagcagctggactgagggcagagtctgtgggtgcagagaccctgcatgtaggtcacaggttgaggcc

SEQ ID NO: 9194 - DNA, 576 bp, Homo sapiens
  misc_feature (1)...(576): n = A,T,C or G
cgggtgaccnnnnaattgagncctttcgatcactagtccgtgtggtggaattccttggaagttcaggctcggttgtcttttgggagccatggagagtgacttttatctgcgttactacgtggggcacaagggcaagttcggccacgagttcctggagtttgagtttcgaccggacgggaagttaagatatgccaacaacagcaattacaagaatgatgtcatgatcagaaaagaggtatgagccttctgccttctgagagtccttcatttgctacatttcagctttttgtcttgcattgtttttattgtttctagtagtattgaaagataaagaacagggagagagacacatgtctgtagacagcttctggattatttcccaaatcatcttttagttgggatttttttattttacattgtggaatcaattactggtaacctttgacataccttggtttgaaccctgagtctgctgcttactaccccatgtgaccttgngcaagttcctggcttgaacttgataatctctggttcttcnacctgtaaaacaggaataataanagctaccttccactn

SEQ ID NO: 9195 - DNA, 565 bp, Homo sapiens
  misc_feature (1)...(565): n = A,T,C or G
ngattcgatcacagtccgngnggttggattcgcctttggtcagncttcacatcttattgtacatgtgagaacacacagtgccgggagaccctatcaatgtaatcagtgtgagaaagccttcaggcacagctcctcactcactgtacacaaaagaacccatgtgggaagagagaccattatgaatggcagcctgcctttatccatgtctcatccatactgtgggccccttgctaattaacttccattttgtaaaaatataaacacatggggctatgactttccctcgtaatactcctttagctgcatcctgtgtttcaatgtataatattttcattntggtttaattggaagtattgtcttaacctccattatcgtttattctttgacccatctattatttggaattagatttttcaaaactaatatgtggatatattttcatagaggtataatgacttatagtgaaatgcatacatctgaagtgacagttggatgagtttgacagatgcatacatgcatgtaaccaccaccccattccagatatagaatgtttctatctctctgg

SEQ ID NO: 9196 - DNA, 469 bp, Homo sapiens
  misc_feature (1)...(469): n = A,T,C or G
cgacgggcaccggcgccccaaattgaaantcattgantngccagcacaagcggcgnaannatncattcctcctcctctgctttttactttttcggagaggggtcacaatttttcggttcttttgttatgtcactcttaaaatattattgaaacattaatgcagtctttatgacaaaattcccatgggtacattgtcatcctaatagatccagaaagtattaagtgtatgtcttttctagcttttgtctggtgatactaaacattattgtgtcttattcttgctgctacaagtggttctggggactaggagtgacagtgttgcctgagagcttcttggaaatgaagtgtctcccacacaggacacagagtcctgcaagtcaaaaagtccgttttaactgtgaagattaggtcctgtgtactaatgaagacgtttctttctaggatttgtgtgcacttggtttgagatgcn

SEQ ID NO: 9197 - DNA, 443 bp, Homo sapiens
attgaaaccctactgatgacccttagacagtgtggtggaattcgccgcgcgcatctctagaagatgaccgagttctttaaaacgcttcgaaatcactggaagaaaactacagctgggctctgcctgctgacctggggaggccattggctctatggaaaacactgtgataacctcctaaggagagcagcctgtcaagaagctcaggtgtttggcaatcaactcattcctcccaatgcacaagtgaagaaggccactgtttttctcaatcctgcagcttgcagaggaaaagccaggactctatttgaaaaaaatgctgccccgattttacatttatctggcatggatgagactattgttaagacagattatgagggacaagccaagaaactcctggaactgatggaaaacacggatgtgatcattgatgcaggaggagatgggac

SEQ ID NO: 9198 - DNA, 519 bp, Homo sapiens
  misc_feature (1)...(519): n = A,T,C or G
aattcttgtagaaggcagtttcctctacttgcccaagagcactgagtacttctctactatcctattattagcttctatctcttagcgtaacttcaaaacttttaagagcagtgaagctggtcagggacatgtggccacttattattacctaaagaaaacatttgttccctgttcattttattttaggggccagatctaacattgtagtgtctttcaccagatagacttctactgtttcatcaaactcccttcttaactagacctagactttctactccaatcaggctaatctacttactgaatgtgacatatttattcctagttccatacctttgcacatgccctactctccactaatatacttaaaagtccaaaaattttttctttagtaacagacttaggtactgctaagcagttattaacacaatattccttagttntcatatgttgggtattcatatgtctatntatatggatatttatttttatgtatggtactatgtanatatgggttggagg

SEQ ID NO: 9199 - DNA, 451 bp, Homo sapiens
  misc_feature (1)...(451): n = A,T,C or G
ggggggnatcgagacatagtagaccgtagggaaggccgcgccatttgcaggggcctttgctgcgggaacttagttttgaattttagttgggtctggctgttttgttatattgattttctgtactagcttcaaagctccaaattctggtaattatttcctttggaaaatcataaagatgtcattttataacaaccatatggtggaaaataagtgccatgtgcttttcaacaaatctatgtgaaacttttttttaaaatgaatatatttaaaaaatttttttaaagacaagaatattataaatatagtattcagtattttcataataaaaatatagtaattcatatcatacatggtttctggttggaacaacaaaatcgactttttctatttacaggtgtaataatgtcctttatatcagaggtgtggaagaagaggaagaagatggggaaat

SEQ ID NO: 9200 - DNA, 465 bp, Homo sapiens
catcgacacatttagacgaccattagaacacgcggaggaattccaactctgttctcctttttaaagatagttttgtctattgtggataccttgacattccacatacattttaggatgaaacgtgctattctgcagaacatgtctgggattttaaaaataggaattgcattaaagatatagatcactttgggtagttcagccatcttaacaatattagttgttctaatccaggaacacaggatagctttgtatcttaattaaaacaaaattttttttgagacagggtctcactctgtcagcctggctggagcgcagaggtgtgatcatggctcaacgtagtcttgacctcctgggcttgctcaaatgatactcccacctcagcctgccaagcagctaggttaacaggcatgtgccaccaagcccagctaattgttaaaaatctttattgtacctctttggttatgg

SEQ ID NO: 9201 - DNA, 453 bp, Homo sapiens
  misc_feature (1)...(453): n = A,T,C or G
ntttgaagttgcactagcccagtgcggtggaattcgggccgcaagtcccagacgctgcccatggaggcgtccagcgagccgccgctggatgctaagtccgatgtcaccaaccagcttgtagattttcagtggaaactgggtatggctgtgagctcagacacttgcagatctcttaagtatccttacgttgcagtgatgctaaaagtggcagatcattcaggccaagtaaagaccaagtgctttgaaatgacgattccacagtttcagaatttctacagacagttcaaggaaattgctgcagttattgaaacggtgtgaagacggattctttggttgataaattgctatcattctaaagtcatggacttcactttcggcaacaaaactaaataaggatggaacatttattgaatgaaaaatgcacttttgtttttccatttttttaaataatan

SEQ ID NO: 9202 - DNA, 450 bp, Homo sapiens
  misc_feature (1)...(450): n = A,T,C or G
nttcgaagttcactagcccgtgtggnggaattccaatgaatcctccccttccccacctccaggggtgggggcctttggcacctcaatccccgataccctactccttcccacccacatctccttgcacccatctggaacctcggttgatgtgagccggcaacagagaagcaccgtggcgcggcgagggaatgcagacggcacccagcggtggatggcggcagcggaggccgcggggaaacctgaccaggaagctgaggaccaaaccagcctctttttccgttcccggtttttttcctgaacccaacgcgtgccgtgccccgtttcccccaatatgtgttggggaggggtgtcctgaatggggtggtagattttttttcttaaaaaaatttttttgttttttttaatactcagaggagagggacataggaaagccaatggagatcttcgtgg

SEQ ID NO: 9203 - DNA, 502 bp, Homo sapiens
  misc_feature (1)...(502): n = A,T,C or G
cgcccctcgannnccnttnnnnnnatcgtagaccatagtccatgtggtggaattcccagaagagcccatcagttaagagtctatggtgaaagccctagggaatggtagaaatgaaagataattacgataaataggcttttacccctaaagtaacattgtaccaatgctagaatcagaaagctgccaaacaattgcagcgccattttttgccctagacgaggaaaaaacacatataaataaatggattttgaaggtggaatgtgtcaagtccaacccaggaaagaattcttcattgttaatcaaacctttgctacttttaacagagcctaagaaaagtttttatattgtgaagatatagcttaacttagtttatatgaatacctaagaacagccttgttaaactgctaaacaagatagatatttgtaaaggcatttgatatagaagagtgttgattaggctatgaatttgtcacatttatatgcacgcacacaaaattggatg

SEQ ID NO: 9204 - DNA, 455 bp, Homo sapiens
  misc_feature (1)...(455): n = A,T,C or G
ntttgagacctgaggccgtgcggnggagcgggggaagctaagctgatggcttaatgtcttacagatttacactgtctttaaaaggttttatattgctgggcgcagtggctcacacctgtaatcccagacattttgggagcccaaggcggccggaccacctgaggtcgggagttcaagaccagcctgaccaacatggagaaaccctgtctctactaaaaatacaaaaattagccccgagtgttggtgcatgactgtaatcccagctactcaggaggctgaggcaggagaatcgcttgaacctgggaggtaaaggttgcggtgagctgagatcgtgccattgcactccggcctgggcaataagagtgaaactctgtctcataaaataaaaaaaaaacgccactttttggtggttttccccggggtttaatagtttaaaaaaacctctctcctttttt

SEQ ID NO: 9205 - DNA, 457 bp, Homo sapiens
  misc_feature (1)...(457): n = A,T,C or G
attgacgacattagnccattgaggngcaattcatggcgcggtcattgggctggactctgctggaaagacctccctcctttaccgccttaagttcaaggagtttgtccagagtgtccccaccaaaggcttcaacaccgagaagatccgggtgcccctcgggggatcgcgtggcatcaccttccaagtgtgggacgtcggggggcaagagaagctgcgaccactgtggcgctcttatacccgccggacagacggtctagtgtttgtggtggacgctgcggaggctgagcggctggaggaagccaaggtggagttgcaccgaatcagccgggcctcggacaaccagggcgtgccagtgctggtgctggccaacaagcaggaccagcccggggcactgagcgctgctgaggtggagaagaggctggcagtccgagagctagcagccgccactctcactcat

SEQ ID NO: 9206 - DNA, 476 bp, Homo sapiens
  misc_feature (1)...(476): n = A,T,C or G
agtaaagcttcnaccctcganaccctatttagagtgcctgaatacatcgcggtgtgttcttgactccgctgctcgccatgtcttctcacaagactttcaggattaagcgattcctggccaagaaacaaaagcaaaatcgtcccattccccagtggattcggatgaaaactggaaataaaatcaggtacaactccaaaaggagacattggagaagaaccaagctgggtctataaggaattgcacatgagatggcacacatatttatgctgtctgaaggtcacgatcatgttaccatatcaagctgaaaatgtcaccactatctggagatttcgacgtgttttcctctctgaatctgttatgaacacgttggttggctggattcagtaataaatatgtaaggcctttctttttaaaaaaaaaaaaaaaaagaaaaaaaaaaataaaaaaaaaaaaanncggggggcccgttgagttaa

SEQ ID NO: 9207 - DNA, 565 bp, Homo sapiens
  misc_feature (1)...(565): n = A,T,C or G
nggatcgatcactgctcgngnggatcgattccccctctctctctctctctctctttntanaccaccatagactctcacttattttggaggagtgtatgtgcatgtgtacacatatgtacatatataaaaacagttgatgttttggtgtatggggtaaaagccccaggagcatacagaacttgagctgaacctggtcagtagaaagggaaaccccaaccctttcttgatttttggagacacccaggactaatggatactgtagtagacatgtagtactatagtaccgnaatattcatctctcctcattatagttgcctttcagattctanatgtttgggatcattcctatcatcttagtctcttcaggatctttagtattttcctggntctgaggaggcttgagacagggttatggatttccttgttctgtgtctttatccctactgatagttcctctttctcattntgcanactacccagagctccaaggacagcctgaagatctcagtgcctcaggctctgaggtactctgctcacaggccccagacagaatgctgtgggtaaa

SEQ ID NO: 9208 - DNA, 459 bp, Homo sapiens
  misc_feature (1)...(459): n = A,T,C or G
caacactgagaccctaggacagttgatggacttccattttgcgaacttttttgactcttgaaataacttacgctgaagcgaccctaaaatttactcctaaatttatgcagatattacatgccaatgatgtagaaattgtttaaactatttgtttaaactattgttgttcaaaacatctttggattgttataaaaatagaaaacaaacaaaaaatatgcagttggaacaatctgactcacatgatcgctgccctaggtttattctttcccttcttttgaatgtttccccttctggaaatttcatgaaaggaaaaacagtaccattgtcaggagaatgtggacttggaagtcagaatgctgtcattcatacctggtctccaggccttgggcaggttatgaacttctctgggcctcatttccaccatctgtaaaaaatgaagaagataatactactgacctn

SEQ ID NO: 9209 - DNA, 529 bp, Homo sapiens
  misc_feature (1)...(529): n = A,T,C or G
gcggtggaattctggaaatgatgcctatgttgaccttgatcgtcagctgaagaaaactacagaggaactaaatgaagctttgtcagcaaaggaagaaattgctcaaagatgccatgaactggatatgcaggttgcagcattgcaggaagagaaaagtagtttgttggcagagaatcaggtattaatggaaagactcaatcaatctgattctatagaagaccctaacagtccagcaggaagaaggcatttgcagctccagactcaattagaacagctccaagaagaaacattcagactagaagcagccaaagatgattatcgaatacgttgtgaagagttagaaaaggagatctctgaacttcggcaacagaatgatgaactgaccactttggcagatgaagctcagtctctgaaagatgagatcgacgtgctgagacattcttctgataaagtatctaaactagaaggtcaagtagaatcttataaaaagaagctagaagaccttggtgattntaggcggcaggttaan

SEQ ID NO: 9210 - DNA, 457 bp, Homo sapiens
  misc_feature (1)...(457): n = A,T,C or G
atcganncctgagaaccctacccgtgtggtggaattccttgaacctgagtcagcctcagtattgcttgcaaggaagagggaaggggctcattaaaggcctggctcaaaccttagtcttccagactgactagggacgtaagaagacccagggacccaccatgttctcaaaccatctattcagtccaggcctttcagcatagacataaagagcccacccgttactcagtcatgttgccaagtgcaaactgatttatccccagatgaatccctttactgtagcagatccctaatccctaaattttagccaatttggtagttaattataggagtttattagctaaatgtatgttctgagtaaaagttttgactctttggggaaaatttattttgctgctagcatacaacatttgctatgtatataaacttaagtcaatgccagaaattttaaaaccagctc

SEQ ID NO: 9211 - DNA, 466 bp, Homo sapiens
  misc_feature (1)...(466): n = A,T,C or G
attgatgagtgcctcggacangncgcggaanncgtttttatacctctcagtttcagttagaggcatattttgtgtaatatttatggcttaaaatggactaaaggtcctgttcttgccttttctgaacttgccgcttttgcattctttgagttcagtttaaagacacttactttaactccattttaaaccctcgggctagaaatcgtaccactgttaattagccacgttatttggtctaacagtttttgtttatcattctgaaactgagcttatctaatacattgataaattatttcaaaggtatttttatagttcaaatcgcttcacttttaccctgacacgtataaatgactaggaatgaccttcagatagcgtttagcaactgtaaccaatctgacaataatgtgttcatcaggtacctgtggattaaatcacatactggcatatttaagatgaatgtcagtct

SEQ ID NO: 9212 - DNA, 529 bp, Homo sapiens
  misc_feature (1)...(529): n = A,T,C or G
gcggtggaattcttcttgcccaactaaacccagaactcaaacttaacattagaaaataaggtccagggccggacacagtggcccatgcctgtaatcccagcactttggggggccaaggcaggctggatcacctgaggacaggagttcgagaccagtctggccaacatggggaaaccccgtctctactaaaaatacaaaaattagccgggcatggtggtgggcgcctgtaatcccagctactcagaaggctgaggcaggagaatcacttgaacctatgaggcggaggttgcagtgagccaagatggcgccattgcactccagcctgggtgacaagagtgaaactccatctcaaaaaaaaagaaaagaaggtccagcttttggattcaatgagtgggaaatacattgtgcctttctctagatgtgatacgttataccaaaatctttgtagtgtgcagagcggtggtttgagactaaatacaggcttagaacttgcagagtgtgtattcttggatggctgatgcatcgactn

SEQ ID NO: 9213 - DNA, 457 bp, Homo sapiens
  misc_feature (1)...(457): n = A,T,C or G
nttcgagactctagtccatgtggtggaattcgagacagcccagagaaggctttggagacccttgagtcggccagcgagcagggtttcttacttgagcgcctccacaaataaacgctccttcgctcctccgtcgcgtgcgtttccctgggataataagtgggaaagtggtggcttttatttttttgagacagggtctcaccgccgtcgcccaggccggatggagtgcagtggcgcgatcacggctcactgcagcctcgacttcccaggctcagagatgggtttcaccatgtttcccagccttgtctcaaactcctgacctcaagtgatccgccgtcttgggtcttcgaaagtgctgggacagcaggagtgagccaccgcatctggcccggaaagtgttttggagcgtaaaacaatgcaaattatanggctgccttcaaggatcccgaaggaccacaat

SEQ ID NO: 9214 - DNA, 472 bp, Homo sapiens
  misc_feature (1)...(472): n = A,T,C or G
ctttgaatgaatccctcaggacgngncgcggaannttacganggaccttggaggaaagagaaaccaaagtgcgtggaaatttcatgcaaattctttgatgttataaatggatctcctatatctcagaagattatttataaggagaatgaacgatttctatatacatgtaacatgggttatgaatacagcgaaagaggagatgctgtatgcactgaatctggatggcgtccgttgccttcatgtgaagaaaaatcatgtgataatccttatattccaaatggtgactactcacctttaaggattaaacacacaactggagatgaaatcacgtaccactgtagaaatggcttttatcctgcaacccggggaaatacgagccaaatgcacaagtactggctggatacctgctccgagatgtaccttgaaaccttgtgactatccagacattaaacatggaggtctatatcatgag

SEQ ID NO: 9215 - DNA, 468 bp, Homo sapiens
  misc_feature (1)...(468): n = A,T,C or G
aatggagnccccattgaagaccataggacagngcggnggaattcaaatgaaggacattgaaaaaatgtacaaaagtggatacaatacaatggaaaaatgcatagaaaaacaggaaagattttgtcaactaaaaaaacaaaatatgttgcttcaacagcaactggatgatgctcgcaacaaagctgacaatcaagaaaaagcaatacttaatattcaagccagatgtgatgctagagtacaaaaccttcaagctgagtgcagaaagcaccgtcttttactagaagaagacaataaaatgttggtcaatgaactgaatcattcgaaagaaaaagaatgccaatatgaaaaagagaaagcagaaagagaagtagctgtgagacagcttcaacaaaaacgagatgatgtcttaaacaaaggatcagcaacaaaagctctgctggatgcttcatcgcgtcactgcacctattn

SEQ ID NO: 9216 - DNA, 471 bp, Homo sapiens
  misc_feature (1)...(471): n = A,T,C or G
catcgatagacntacgctagngacgngccannntcgacgccgcagagccatggagatcggcaccgagatcagccgcaagatccggagtgccattaatgggaaattacaagaattaggagcttatgttgatgaagaacttcctgattacattatggtgatggtggccaacaagaaaagtcaggaccaaatgacagaggatctgtccctgtttctagggaacaacacaattcgattcaccgtatggcttcatggtgtattagataaacttcgctctgttacaactgaaccctctagtctgaagtcttctgataccaacatctttgatagtaacgtgccttcaaacaagagcaatttcagtcggggagatgagaggaggcatgaagctgcagtgccaccacttgtcattcctagcgcgagacctgaaaaaagagattacagagtttctacaagttcgcaggagtcaaaaaccct

SEQ ID NO: 9217 - DNA, 464 bp, Homo sapiens
  misc_feature (1)...(464): n = A,T,C or G
gggggtttggagacatctgnnattgacagacactagtcagtgcggtggaattcctaagagtcaagaagcaattatttaaagaaagtgaaaaatgtaaaacacatacaaaagaattaaacccacaagctgcctctgacagcagcctgtgagggagtgcagaacacctggccgggtcaccctgtgaccctctcactttggttggaactttagggggtgggagggggcgttggatttaaaaatgccaaaacttacctataaattaagaagagtttttattacaaattttcactgctgctcctctttcccctcctttgtcttttttttcatccttttttctcttctgtccatcagtgcatgacgtttaaggccacgtatagtcctagctgacgccaataataaaaaacaagaaaccaagtgggctggtattctctctatgcaaaatgtctgttttagttggaatgact

SEQ ID NO: 9218 - DNA, 461 bp, Homo sapiens
  misc_feature (1)...(461): n = A,T,C or G
natcgaggcttcgtagaccatagtccatgtggaggaattcgggattataggtgtgagccatcgtgctctgcctgttttaaattttaaaatgcatctgtaattgttttttaaactgcaaaaatgaattaattaaatcataatggaaataagagtattgtaattttcctacccattacagtgtacataagcatcactataactagtgctatctacataaaatattcaaatcagtatacatattacagtattacagtggtaccatagaaaatattcaaattgaggctgggcgcggggctcacacctgtaatcccagcactttgtgagtccgaggtgggcagatcaggagttcaggagttggagaccagcctgaccagcatggtgaagccctgtctctactaagaatacgaaattagccgggcatcttgtaatcccacctactcaggagcctgaggcaggagaat

SEQ ID NO: 9219 - DNA, 526 bp, Homo sapiens
  misc_feature (1)...(526): n = A,T,C or G
gcggtggaattcatattaaggatctgtggagaaatgcttgctgtttggactgtgaattcttaccctggtattttactgaagaaaccttgagtatttggtggctggaatgggggaaacagtggagagaacaggctctgttttccagtcccagccagtaatgatgctaagagaggcagaatgtcttgaactggacaaggtcactcagtttaagatatttttttctaggactttccattgggtcatcatggataactgcccggttcagatttgcttaacaagattaaattccatgggccattttaagatcaagtatttcttacactcacgttagatttcgggtctgactttggcttggacacatgtagcatgcttaaaacttttcccccaagtggctgcttgccagcttgtttagctgaaccgaccttgtctgctgacacagcctgaagagtgtcacacatacggaatttatattanagcatctagtagtccttggaatgtcatttcacattcagaacatttttttaaa

SEQ ID NO: 9220 - DNA, 471 bp, Homo sapiens
  misc_feature (1)...(471): n = A,T,C or G
nttcgactgaatccctcacgacacngccgcggaantttctgcctcaggaataccagcccaagaggagcttcagtccttcactgcatgaggtgttgtgttttccctgaaagaagaaataagtctgcaaaattccacagtccgtagttctatcctgtggcctctgcgaaaaggaaccttggttctaaatgcctttgtttaacattatttcctagttgccatgtggaacttcctgtgcatttgggtgagaacagctgcaaatcctgaagagccttgtggaggaatcttttcctcttatgtgaagaaaaataaacaatatttttttttggtttggtttggttttgctttgtttttcagacaggatttctgtctcccaggctggaatatagtggtaccatcaccgctcactgcaacctcaacctcttggactgaagcagatcctcccaccctagcctcctaagtggctgggatcag

SEQ ID NO: 9221 - DNA, 520 bp, Homo sapiens
  misc_feature (1)...(520): n = A,T,C or G
gctattaagctgtctttagtccacaatttactaccatcacttcaacttttctttagaactgaaaacagtatatgactgaatgccaccttcttgaattatttggctagaggatggtattaaacagaagggcaatatctccaagtgagttcttatggaggaaaactgccccagagccatggtgtctccctgttcaagatggcagatggttcagggcagactgagaggtgcccctcaagtgtcctgcctctatggctttatctttgcatatgtggcactgtcagctcaatggcacgacagggctgctctgctgctcttcgatgtaaaggcttgccaggggaaataggcacacagatgcagcctccttcctaaccctcaactgcaatctattttgtatcccttgagctctcagcttctgctgtttttgtcagatagcagacttccttactgtgagatacactcattccatgggcccaggcctgacccacancgaactgggtgcacagtggggctgaaacatgan

SEQ ID NO: 9222 - DNA, 476 bp, Homo sapiens
  misc_feature (1)...(476): n = A,T,C or G
cgggnntnnnnnncctgagaaactgataacctcgaggaannccttcaccatatgaggacacagcaacaggccccgtcctagaagctgagactgggccctcaatagatgataccagtctgccagcacgctgatcgtgggcttgtcagtcttcacaactatgagaaataaattcgtacttttaaattacccagtctcaggtattctgttacggttaacacaaatgactaagacaacaggataattctgtttaactttttgagaactgccaaacttttccaccgcagctgcaccatttgacattccttccagcaatgcacaaatgttccagtttctccacatccttgccagcactcattttctgggttgtttataatagccctccaaatgggtgtgacgcattttgattctatgtccctaatgactagtgatgttgagcattttctagcattgatatataagatgttacccaaagaccc

SEQ ID NO: 9223 - DNA, 523 bp, Homo sapiens
  misc_feature (1)...(523): n = A,T,C or G
cggtggcaggtctttcccatgctgttcttgtgatggtgagtgggtcttatgagatctgatggttttataagggggagcttccctgaacaagctctctctttttgcctgctgccatccatgtaagacatgacttggtcctccaccttctgccatgattgtgaggcctccccagccatgtggaactgtaagtccattaaacctatttcttttgtaaattgcccagtctcaggtgtgtctttagcagcagcatgaaaatggactaatacagggagattattgtggtttatccaagatgtgtccaaaataaccacaaggcccctttcttataagtaacagagggaggcaggtgtgggtggagatgtggagacagaagcagaggacagagtggtttcaagatgctgcactgctgtctctgaagatggagaaaaaggacacaaccaaagatgtaggcaccctctaggaggtggaaaaggagaagaagcggactctgacctggagcttncagaaagcacacaggcatgag

SEQ ID NO: 9224 - DNA, 476 bp, Homo sapiens
  misc_feature (1)...(476): n = A,T,C or G
ntttgatagacntcnactacggacgngccgnggaattctgtgtgtgttgtgttgtgttttgttttttaagggagggaatttattatttaccgttgcttgaaattactgtgtaaatatatgtctgataatgatttgctctttgacaactaaaattaggactgtataagtactagatgcatcactgggtgttgatcttacaagatattgatgataacacttaaaattgtaacctgcatttttcactttgctctcaattaaagtctattcagaaggaaaaaaaaaaaaaaaaaaaaaaaaaaaaaaaaaaaaaaaaaaaaaaaaaaaaaaaaaaannnactataaaaaaaaaaagagagagaaaaaaccccgggngaaaaaaacaaaagaggcttttgggggcccccttcctagatatatggcccccccccccctctttttccacccctgggggggtttataaaactcaccttttattt

SEQ ID NO: 9225 - DNA, 466 bp, Homo sapiens
  misc_feature (1)...(466): n = A,T,C or G
catcgtagacgtcgtagngagnngcanncgnnttctagcattttcccctaaatagcaaagccataatactcttagataatcttcaggggagaacaaaaatacctcttagttctcttagcagaaaagtatgatagataatttaaaaaagaaaaactttttcaaataagtatacatctcaccagtcccctcccaaaaattttaataaactaaggatttaaatttaccttttcagacaaagttttctaaattgaataaacaggataatgtactggatagatcaatatttttattgtctttagactttacaattcttttactctagataatgtccactaacctagcaatgctagtttaactctcaatggcttatgaactatttattcagtcatttgttcatttagtcactatatgctcctactgcttatggtgcctattctgtgcctttgaaggatgctgtgcaagagtn

SEQ ID NO: 9226 - DNA, 480 bp, Homo sapiens
  misc_feature (1)...(480): n = A,T,C or G
gatggtnnnnncctgataccttantcagtngcgcggaattcgtgatcctcccacttcagcctcccaaagtgctgggattacagatgtgagccaccatgcccagctggtaaatttaaaatgattgaaatttatatatgttctgtcaccacaatggaagtaaaattaaaatagaaattattaaaatatctaggaatgatccaaatatttggaaattagacaacacaagtttaaatgatcatgagtcaaagggaaatcacaattagaagacatttttaatcgaatggtaatgataatataatgtcaaaattcatggaatgtagctaaagcagtgcttggagggcaaattatagtttaaatgcttttattataaaggaagaaaagtctaaatgtcagtaaccaaagtttctaccttaggaagctagaacaagaacagcaaagtaaacctggagtaagtacaagtaaggaaacaatagagtagga

SEQ ID NO: 9227 - DNA, 456 bp, Homo sapiens
  misc_feature (1)...(456): n = A,T,C or G
tttgaaccctgagaaccataccagagtgcnggaattcgcaatccaccctccttggcctcccaaaatgctgggattacaggtatgagcctttgcgcctagcctcacatcttttttttcaaactccgattctcccgcctctcttttatacagacacacaatattatattgaaggccaatcttgacaacccaggctaatctcttcatcccaagattcttaatttactggcattttcaaagtctctcttgtgtttttgttacccttgtatacatagccttccaggcattaggttttagagacttggaggtggttatctttgatggacattatcgagccaactgccctgccaaagttaaatagaatccgtctccaatcacttctgatctggtccatttgggtaactttagtaatgaggaactcactacttgcttaaggaaaattcccagttttggcccctc

SEQ ID NO: 9228 - DNA, 471 bp, Homo sapiens
  misc_feature (1)...(471): n = A,T,C or G
ctcgaccccccnnnnattgttgaccactatccatgtggtggaattccttgccttcatgcgcctgctggccaactatgcctctcagaacatcacctaccactgcaagaacagcattgcatacatggatgaggagactggcaacctgaaaaaggctgtcattctacagggctctaatgatgttgaacttgttgctgagggcaacagcaggttcacttacactgttcttgtagatggctgctctaaaaagacaaatgaatggggaaagacaatcattgaatacaaaacaaataagccatcacgcctgcccttccttgatattgcacctttggacatcggtggtgctgaccaggaattctttgtggacattggcccagtctgtttcaaataaatgaactcaatctaaattaaaaaagaaagaaatttgaaaaaactttctctttgccatttcttcttcttcttttttaactgagn

SEQ ID NO: 9229 - DNA, 485 bp, Homo sapiens
  misc_feature (1)...(485): n = A,T,C or G
tgagagtncnnnncctgataccantanttttgatcgccctagtccacagcggcggaattcctatactatctttgggagtgttgttttgatttttttgcctgcttgtattagaaggaatttcactcttgtcgcccaggctggagtgtagtggcgcattctcagctcactgcaacctccacctcccgggttcaagtgattctcctgtctcagctgcctgagtaactggaattacaggtgcacgccaccacgcccggctaatttttgtgtttttagcagagacagggtttcaccacgttggccagggtggtcttggactcctgacctcaggtcatcctcctgcctcggcctcccaaagtgctgaaactacaggtgtgagccaccgtgctcagccactagctttggttttttaaacatagattatattcctcaagatgaagggcttaacatatccacagcttcctcagtttgctaactccccatgcatc

SEQ ID NO: 9230 - DNA, 483 bp, Homo sapiens
  misc_feature (1)...(483): n = A,T,C or G
gggttagtacccaggcnnnnnnnntttcgaagacctcttgaagngcggtggaantcgagggacaagactccgactccagctctgacttttttcgcggctctcggcttccactgcagccatgtcactcctcttgctggtggtctcagcccttcacatcctcattcttatactgcttttcgtggccactttggacaagtcctggtggactctccctgggaaagagtccctgaatctctggtacgactgcacgtggaacaacgacaccaaaacatgggcctgcagtaatgtcagcgagaatggctggctgaaggcggtgcaggtcctcatggtgctctccctcattctctgctgtctctccttcatcctgttcatgttccagctctacaccatgcgacgaggaggtctcttctatgccaccggcctctgccagctttgcaccagcgtggcggtgtttactggcgccttgatctatgccattcacgg

SEQ ID NO: 9231 - DNA, 460 bp, Homo sapiens
  misc_feature (1)...(460): n = A,T,C or G
natgagaccctgagaacntacgcagngngcnggaantcggacaaagccagtaagctacctcttttgtgtcggatgaggaggaccaaccatgtatccattatcccgggtgcaggctcaccgccgccgctgccaccgcggtcagctccagttcctgccaggagttgtcggtgcgaggaattttgtgacaggctctgttagtctgttcctcccttatttgaaggacaggccaaagatccagcttggaaatgagagaggactagcatgacacattggctccaccattgatatctcccagaggtacagaaacaggattcatgaagatgttgacaagactgcaagttcttaccttagctttgttttcaaagggatttttactctctttaggggaccataactttctaaggagagagattaaaatagaaggtgaccttgttttagggggcctgttttctattaacgg

SEQ ID NO: 9232 - DNA, 565 bp, Homo sapiens
  misc_feature (1)...(565): n = A,T,C or G
aacgtggttttcgtcgtctaccactgatagttctgtgtactgttacatatatcaacaccatcttctgctctctctccacncagcataggcccggccggcccnnttttgattacgtagcatacgcangngcnggaanncctccctgataactttatttccctccctccctcccacccatctagtacagtgcctgacttatagtaaagcactctaggaacaaatggttgaaggaagaaaccccaagtgggaaattagtaggggaacaattccctagcctgaaagtgtatccaagaagaatgatgtttttctggtgcttatatttattgcctaggatggacagctttctgcttcagaggattgggagtgttcatccaagcaagattgacatagacatttgatgctgtgtccccagcattttgctaggcgctccgggtgtagcacgaggaagcatggttgcaacgccctccggtttttgtctggaagacagatgtgtaaacagaattgcactgtgccttctgtaccagaggcccaaccaaggcatagaagagccacgtgggagacatag

SEQ ID NO: 9233 - DNA, 485 bp, Homo sapiens
  misc_feature (1)...(485): n = A,T,C or G
tgagccgtnnnnnanttcgatgaccntagnnctggatgacgctagtccacagcgcacagaatcatatacgccagcgaagagtgtgaaatgaaaatattgccttgccatttctgaacaaatgaaaactgaattgtcaagataaatcccttttgaagaatgacttgacacttgcactctaggtagatcctcaaatgagtagagttgaagtcaaaggacctttctgacataatcaagcaatttagacttaagtggtgctttgtggtatctgaacaattcataacatgtaaataatgtgggaaaatagtattgtttagctcccagagaaacatttgttccacagctaacacactcgtagtattactgtatttatgcactttttcatctaaaacattgttctgggttttcccaatgtaccttaccataattcctttgggagttcttggtttttgtcacactactttatataacaatactaagtcaactaa

SEQ ID NO: 9234 - DNA, 456 bp, Homo sapiens
  misc_feature (1)...(456): n = A,T,C or G
ntttagaccctgaggaccgtcgggaantcctgaccagcaccatggcggttggcaagaacaagcgccttacgaaaggcggcaaaaagggttccaagtagaaagtggttgatccattttctaagaaagattggcatgatgtgaaagcacctgctatgttcaatataagaaatattggaaagacgctcgtcaccaggacccaaggaaccaaaattgcatctgatggtctcaagggtcgtgtgtttgaagtgagtcttgctgatttgcagaatgatgaagctgcatttagaaaattcaagctgattactgaagatgttcagggtaaaaactgcctgactaacttccatggcatggatcttacccgggacaaaatgtgttccatggtcaaaaaatggcagacaatgattgaagctcacgttgatgtcaagactaccgatggttacttgcttcgtctgtttg

SEQ ID NO: 9235 - DNA, 424 bp, Homo sapiens
catttgccaagcttcgtggaggaatgtaggtgacatcaatgtgataaagtctgtgttctgagttgtcagatctcttgaagacaatatttttcatcacttattgtttactaaagctacagccaaaaatatttttttttcttattctaaactgagccctatagcaagtgaagggaccagatttcctaattaaaggaagttaggtacttttcttgtattttttaccatatcactgtaaagaagaggggaaacccagccagctactttttttcatcactttttattcataacttcagatttgtaaaactaatttccaaaatataagctgttttcattagccagttctataatatcttcctgtgatttatgtagaaaatgaacacaccccttttccatttaagaccctgctactgtgtgaagagatgat

SEQ ID NO: 9236 - DNA, 466 bp, Homo sapiens
  misc_feature (1)...(466): n = A,T,C or G
gcgcggcnnttttnccatggattcatatccattgtgctggaattcctcatctcagctgtatgtgactctcaacttacaagaagctagaccaggcttccccacatggtggtctcaggataacattccaagaacgtgagagttgaagctcccaacatctcatttgtgaaagaatgtcacaatgtcagcccagattcaagattgaggaaatagattacacctctacatggaagaagatacaaggccacattgcaaaggaatggaaggaattaactgcagccatctttgaaaaagttcaccacacccacagattcagatttctgtgaaaatctaataaaagtctagtttaaaagaggagcgaaatatatttggttctttacttcttttcatttcctggaagtacataggggttggtttttgtttttttcattttacatgatgaattcctatgttttcctcttgcccacat

SEQ ID NO: 9237 - DNA, 479 bp, Homo sapiens
  misc_feature (1)...(479): n = A,T,C or G
cccccccccagcaaaggagcccctnggaattgtagacattagtccangcggtggaattcctcgaggggacagtgtgtttgagctggagtgctgcgggcagcctttctcatggaatgacatgaatcaacttttttctttgtttcatcttttaagtgtacgtgcttgcctgttcgtgcatgtgttcataaactcaacactttaatcatggtttcatgagcattaaaaagcaaagggaaaaaggatgtgtaatggtgtacacagtctgtatattttaataatgcagagctatagtctcaattgttactttataaggtggttttattaacaaacccaaatcctggattttcctgtctttgctgtattttgaaaaacacgtgttgactccattgttttacatgtagcaaagtctgccatctgtgtctgctgtattataaacagataagcagcctacaagataactgtatttataaaccactctt

SEQ ID NO: 9238 - DNA, 505 bp, Homo sapiens
  misc_feature (1)...(505): n = A,T,C or G
caggttacaatgagactgatnactctagcccagngncgnggaattccgcanagctcgggtgctctatgactacgaggcagccgacagcagtgagctggccctgctggctgatgagctcatcactgtctacagcctgcctggcatggaccctgactggctcattggcgagagaggcaacaagaagggcaaggtccctgtcacctacttggaactgctcagctaggcaggtgcccccatcccccccgcattctggcctaggcaggagaggatgggcgcagccctgccacttaacttgtttgttggtgacacagttgttcagagtggggagaattcaccccattctgtccctgcccctagtcacctagctgtgagggtgcctgaggctgaatggctccacccctcccccagccctgcttctgacctgtggctctggagcccctgcccctgcctgcatccccgagcaccccaccctccaggctccactaaagagggaggggctgtctgc

SEQ ID NO: 9239 - DNA, 507 bp, Homo sapiens
  misc_feature (1)...(507): n = A,T,C or G
ggaggccnnnnngnccnnnctctgatatcactactccgtgcggtggaattcgaagatagttgcagttaaattttgaaaatggttgtaatgagccatgaagttcaatctttataatataggtactgctctttcagacaaatagtccattttcgatgacttattattttgttgaaattgctttaactgctaatcactgtggttgccaaatatttacttcaggagcaaagattttcaaacaagcatacacgatgcaaaataccaatctggcttctagtctctttactgttttcgtttcactcagattagctcagttttctcatcaaagcagaatgctatcttgtatgtatttttttcattacaagccccatgagctgcttttatgctgaaaatggtcatttccctgttcacttactgacatgtgaagaagggtttcttgctttcttaaacatttccgtaaggcaggctagaaatgtaatacttcaaatgtttgatgattatggtcttttg

SEQ ID NO: 9240 - DNA, 464 bp, Homo sapiens
tttgagaccatagattgagcgcgttagcgggccgatcatgagggcaggagattgagaccctcctggccaacatggtgaaaccctgtctctactaaattacaaaaaattaactgggcatggtggcgcacgcctgtagtcccagctactctggaggctgaggcaggggaatcgcttaaacccaggaggcggagattgcagtgagccaaggttccaccactgcactccagcctggcgacagagcaaggctccactcaaaaaaaaaatttaaaggggaaaaaattgaaattttctttgtatctaggggtatccgtcactgaacagaaattcttaattttggctaggcgtgatggctcacgtctgtaatcccaacactttcggtggccggggtgggtggatcacttgaagccaggagttcaagaccaccctgaccaacttggtgaaatcccatctctactaagaatacg

SEQ ID NO: 9241 - DNA, 492 bp, Homo sapiens
  misc_feature (1)...(492): n = A,T,C or G
catcgatagcactacgccagngcggnggaattcacctttctgaatattctgtggtgccaagtagaaagtttaactgaaattaataagccaatggaaagaaagaaatattaataactgctggtggaaagactagctagatgtcagtgtggaaagattagatccactttacatgtgatattccaaatgaattaaaatgttaagtataaaaagaaaaatactacaagtctcacaccaatagtggtataaaggaacttcatggcaattggcaaggtagatcaactaagagaaaaagttttaaatgtgtagtaaataggaaaaagacaaaacaagatggaatttaaaagaagctatttgcattacacatggatgcactcagtttttgtaaaactatatgcatatccataagggtttgtactcttaggcaaatttataaagcgatcgtgtataaatgatataaaaaatcaatttgaatggtattcaaatttcctaata

SEQ ID NO: 9242 - DNA, 490 bp, Homo sapiens
  misc_feature (1)...(490): n = A,T,C or G
ntttgactgacgacactagnccagngcggnggaattctgacgacctgctgccactcttctacaccctgcggcagtttcccggcctggcccacgaggcacggctcttcttcatggagggctggggcgagggtgcacacttcgacctctacaagctgctcagccccaagcagcctctcctgcgggcacagctgaagaccctgggccggctgctgtgcttctcccatgcttttgtgggcctctccaagatcactacctggtaccagtatggctttgtgcagccccagggcccgaaggccaacatcctcgtctcaggcaatgagatccggcagtttgcacggttcatgacagaaaagctgaacgtgagccacacaggagtccccctaggcgaggagtacattctggtctttagccgaacccagaacagactcattctgaatgaggcagagctgctgctggcactggcccaggagttccagatgaagacagtgac

SEQ ID NO: 9243 - DNA, 495 bp, Homo sapiens
  misc_feature (1)...(495): n = A,T,C or G
ggtaatgggaggcgggccnnnnaaaaattgagactgagnagcactcgcacagngcggnggaattccacgcctgaaatcccagcactttgggaggccgaggcgggcagatcacaaggtcagaagatcgagaccatcctggctaacacggtgaagccccatctctactaaagatacaaaaaaattagccgggcatggtggcgggcgcctgtagtcccagctactcgggaggctgaggtaggagaatggcgtgaacccgggagacggagcttgcagtgagctgagatcgcgccactgcactccagcctgggcgacagagcgagactccatctcaaaaaaaaaaaaaaaaggtttttttcaaaacccaaagggaaagaggaacctttttttcctaacgcgtgaacaaacaaaaaggttttttttgcctggggcaggggtttgcgccttaacccccagctcccagggaggctgaggcaggaggatcatttgaggttaaag

SEQ ID NO: 9244 - DNA, 480 bp, Homo sapiens
  misc_feature (1)...(480): n = A,T,C or G
agcccccccngnattgagccgtaggacnngccnatgatgaccattagaccangcggaggaattcgaagaataaaaacaatttctcatattaaatacagtcgctcctcaacttatgatgtgggtaggtcccagtgaacccattataatgcgaaaatatcacattgaaaatgcatttaatatctcttacctgaaatcataacttagccaagcctaccttaaatagttctcagaacatttagtctgcagatgggcaaaaccatttaacacaaagcctattttataatgaagtgttgaatagctcatgttatttactgaatactggtgtgaaagtgaaaaacaatgattggatgggtactcaaagaataatttctactgaatgcatatcacttgtgcactgttgtaaagctgaaaaaccgctaagcctctacgatttttaagtaagttggggaccatcagtttaaaataaatgcgatactattg

SEQ ID NO: 9245 - DNA, 454 bp, Homo sapiens
ccaacttgcactccacattaattaacatgtctaggagtgggagcctgacagacaccactattaaaaaaaaaaaaatccccaaaatgattccaatagacaacaaagttgaggaaccactggcacatcccaagctaaaatacaaggttaaatggcctttttaagtatgtcatactggatctttaaataaagcaaggcttttgttacactttgtcatgttattaaaagcaaacctttgggctgtttaaccgtgtaacaaaaatgccacgtgaaaaataaaaatttttattgtatagcaattctctataaatagtaaataatctaagtccttattttctgatggctcttgttccactattaaaattgtttttaatttttaaaatcctatcagcagcctcctaattagcagggttaggaatttgccttatgttttccatctcatctcctgaacctgtta

SEQ ID NO: 9246 - DNA, 472 bp, Homo sapiens
  misc_feature (1)...(472): n = A,T,C or G
ggagatcccccnncctgagaaactgagaacctcgaggaagccgcagaatgtggaactaaggctcagtgactaataaatatatggaaaattaaataatgcaaatccatatggaaatgcctatcctccctctttgtttctgtactctgaaaatagagagtttgtttatccagacagaaattttatactgacgagaatcggaagcgactgtggttctcaaacttgaccacgtggccaccaaccagaagttacccggagggattctatacagtaaccaaataaggcaaatggaagaagtaaagatctcaaaaaagagtaaagttggaattcttccatttgttgctgaatttgaagaatttgctggacttgcagaatcaatcttcaaaaatgctgagcgtcgtggagacctggataaagcatacaccaaacttatcagaggagtatttgttaatgtggagaaagtagcaaatgaaag

SEQ ID NO: 9247 - DNA, 450 bp, Homo sapiens
  misc_feature (1)...(450): n = A,T,C or G
attgaggacatctgtgatagccctgaattcggcgnggaggcgcagacatatgagagagaggtgtgttacctactgtgacaacagatggaagactgttggcgacaggtgagggctctctgaaggcttcactgaaggagtgacagagccagacacaggagtgacatgctcagttctctgggttgaggcatcatcaccctggtggccatgtggaggatggactggaaaaggcattcagttagaagacctctgcaggagtccaaggaagaaacaggcaaatctgcaggaggcagattgcagccttcttcgctgagtctctgcccagtgtgggagggcagatcattccccctgctggctacttctcccaagtggcagagcacatccgcaaggccggaggggtctttgttgcagatgagatccaggttggctttggccgggtaggcaagcacttct

SEQ ID NO: 9248 - DNA, 457 bp, Homo sapiens
  misc_feature (1)...(457): n = A,T,C or G
aatagaaganactgaggacacttaggacagagtggnggaattcgcttataatcccagctactctgggggccaaggcaggagaattgcttgtgcctggtagatggaggttgcagtgagctgagatcatgccactgcactccagcctgggcaacagagcaagactctgcctcaaaaaaaaattaaaataaatttaaatacaaaaaaaaatagccaggtgtggggtgcatgcctggaatcccagctacttgagaggctgaggcacgagaattgcttgaacccaggaggtggaggttgcagtgagccaagatcacaggagccactgcactccagcctgggtgacagagtgagactctgtctcaaaaaaaaattaaataaattattataacctttcagaaatgctgggtgcattttcatgttcttttttttagcattacttgcactctccctaatgaaatga

SEQ ID NO: 9249 - DNA, 457 bp, Homo sapiens
  misc_feature (1)...(457): n = A,T,C or G
cggcttcaaatgagcctttgatgagaccatagtccangcggtggaattcagcaaatcatgaagagcggattggtctttgttcaacaagagctggcagagtagttaagacaaggagttcaaaaattccatgaatcttggccaggcatggtggctcatgcctgtaatcccaccactttgggagggtgatgcaggaggatcacttgaggccaggagttggagaccagcctggccaacatggtgaaaccctgtctctactaaaaatacaaaaaaaaattagctggacctggtggcgcatgcctgtaatcctagctactcaggaggctgaggcatgagaatcgcttgaactcagcaagtggaggttgctatgagctgagattgtgccagttcattccaccctgggcaacagggtgagactctgtctcaaaaaaaaaaaaaaaaaaaaaaaaattcctttttt

SEQ ID NO: 9250 - DNA, 480 bp, Homo sapiens
  misc_feature (1)...(480): n = A,T,C or G
ccccgccccgnccgattgagnccntattgtagacattagnacangcggnggaattcgtggtggcagcaggcgcagcccagcctcgaaatgcagaacgacgccggcgagttcgtggacctgtacgtgccgcggaaatgctccgctagcaatcgcatcatcggtgccaaggaccacgcatccatccagatgaacgtggccgaggttgacaaggtcacaggcaggtttaatggccagtttaaaacttatgctatctgcggggccattcgtaggatgggtgagtcagatgattccattctccgattggccaaggccgatggcatcgtctcaaagaacttttgactggagagaatcacagatgtggaatatttgtcataaataaataatgannacctannnnaaaaaaaaaaaaaaaaaaaaaaaaaaaaaaaaaaaaaaaaaaaaaaaaaaaaaaaaaaannnnnnnnnnattaaataattcca

SEQ ID NO: 9251 - DNA, 466 bp, Homo sapiens
  misc_feature (1)...(466): n = A,T,C or G
agagacttnnnggggnnnaattgtagtacattagcccgngcggnggaattcttttggtttgggatataatggatgatctcaaatatggattactctgatttatgtctccttagcaccttgttaacaattttttttaaaatagaaggctgtttgcattttgggccagactgccagtaagccaggcctggactcaattacaattcttaacttgtctgtcatgcacctcttttcacctcaactatacagcctctgaactctcaaattacacagtaaattcaaaaaaatatataggaatttggaagaagaaaaggttgtctacagaggagagttattaaagaaaggcttcttggccgggcacggtggctcacgtatgtaatcgcttgaacctgggaggcggaggttgcggtgagccaagatcacaccgttgtactacagcctgggcaacagagcaagactccatctcaaa

SEQ ID NO: 9252 - DNA, 498 bp, Homo sapiens
  misc_feature (1)...(498): n = A,T,C or G
gaggttnnnnattggtgacatcgtccaggcngcaannngnaattgaataaataaggaaaggaactgctatttggtgtgttcctctgtggacccagtttatttattccttaaaataatatttttgggaagacattgattttgtccatttatgtggatgggaaaactgagactcattaatttgtccaatgtcgaacagctggtgttagtagagcctatactcaaacccagcttttaaagcccttgttctttactccactaaactgtaacctgtaatcctgtatgcactaacaggagttttcggtgaccttgaaaacacagattactataattactataataaatcccttacattcctgtctctagcatggtttagggagtgccaaggctcaatgtagatggggtcaccttgtcagagcatctgttcatacagaaactgggtttcctgcagaccccaggtgctgcataggattcctcanaccctacaggatatatctcccn

SEQ ID NO: 9253 - DNA, 473 bp, Homo sapiens
  misc_feature (1)...(473): n = A,T,C or G
gcaggccnnnnnttcgagaaactgagaccctcgggagagcgcggaattccattctactctcgggcctggtgtcttgtttatgacctcgccacaatttcctagataaaatttgcatgtctctaacttctgaaacacactatttactgctctcatggacattcattattccattgagacatgtttggctagagtttgaaagactcttatgataagtggagaaggaacacctgacctttataatgtgaggcctcacttaatgacatgaatctgagacacatgactaagctagaaaataaaatattgacgtcttggttttaaatattgggcaacaccatctcatgtttatcctttttctcatcaaaccgcatgtccaattttggattaggaagacattcttactgtacttatggtacgcctgcaatcatggtgcctcctctgtctatttttgggttgaccaaataacaacgcanagn

SEQ ID NO: 9254 - DNA, 461 bp, Homo sapiens
catcgcgcaccactggccagcgggtggaattccacatttcaattttcattcttatttttgaccttttataaaatattttcatgttgctataagtaaatgatgatgccaccccatgttgactatggtttttctagaaagcaactatgctgctaaccatagaggaacatagaagggttccagaatctttagtgctggttttaacaaccgatgcaacattaaaaatgtgttagtgtgctgtgcaattggttttcaattcatattaatcttaatgacagagaacaatgtgttactaattattttggttgtatgccattagtaaattgatagaaaaattaaggggattaacataacttcatttcattgccttatattaacatcttataatacaatagtttaagactaagggaaacagatggagctgtttattgagacaactggtgaggaattatcatgtgttcatt

SEQ ID NO: 9255 - DNA, 476 bp, Homo sapiens
  misc_feature (1)...(476): n = A,T,C or G
ggccccccccccntttcgagaccatattcagtgcggtggaattcagtcagcctagacacgtctttctgtcatgtacactgttgtcacataggtggatgtacagtttgttcggatgatgaaacgtttcattcccctggctgagctcaaatcctatcatcaagctcacaaagctactggtggccccttaaaaaatatggttctcttcactcgccagagattatcaatccagcccctgacccagggtaagagtgggccctctcctttattgtccatataccagaatgacctcatgaattcccacttactagctgattaaacttgggcatggtacttcacctttctcagtcagcatcctcacctgtaacacccatgagggagggaatgtggccagagttacctgttactattacccagtactctatagtgcttggcacctggtaaatagttttgaacgaatgactgctcgccttagtacn

SEQ ID NO: 9256 - DNA, 494 bp, Homo sapiens
  misc_feature (1)...(494): n = A,T,C or G
ggccttagagaccctagtccagngtggaggaactctgctattggaatgaaaaatggagaatttatcattttactagagagttctctaaaaatatggggaaagaagagagacaggagatgtgcaatccatgatatcagatttaggccggattcccggtatctggcagtatgttctagtgagaactcagtggatttttatgacctaacgctgggccccactcttaacagaatcagctactgcagagacattccaagctctgtcattcagatggacttctctgcagatagcagttatctccaggtctctagtggctgctataaacggcatgtctatgaagtgccttcaggaaaacatcttatggatcatgccgctattgacagaattacttgggctacatggactantattctaggagatgaggttttgggaatctggtccagacatgctgagaaagctgatgtccactgtgcctgtgtatctcattcaagaatcag

SEQ ID NO: 9257 - DNA, 478 bp, Homo sapiens
  misc_feature (1)...(478): n = A,T,C or G
tggcgggnnngnnccaaactgagaccactangaagngcggtggaanncggccatccggacctgtttgatctgcgagcggcagcgcggcagtgacccgccctgttagctgcccccagcggtaaggggtgggagaggggccgcgcccacaaacgtcgctctgcatctggggaaactgaggtccagcttggccatgataggggccgggatcgaagcctgtgagggacccttacggtaggggtgatgcagggtgaggagatgagggctttaaggagcgggcttgggagtggggaaggagctggaacgtgggtgggttcgattacaggtcacctcggggactctggggggatctgcctgtaaacctcgacgtagcctctcgggtctggcgctgggagcttcacgggcctgcagggagatgacacggaaagggtcgatcgagggtgctgaataccagtccaacggtgcctgaaggccgtggact

SEQ ID NO: 9258 - DNA, 415 bp, Homo sapiens
  misc_feature (1)...(415): n = A,T,C or G
cttgaatagcactccatcgngcggngcaattcgcggcacttacctcattcagtctgttccagctgagctcaatatggatcacaccgtggtgctgtagctggcagagaagaatggctacgtgactgtcagtgagatcaaagccagtcttaaatgggagaccgagcgagcgcggcaagtgctggaacacctgctgaaggaagggttggcgtggctggacttacaggccccaggggaggcccactactggctgccagctctcttcactgacctctactcccaggagattacagctgaggaggccagagaagccctcccctgactgcatgtggaagggcacacagcancaggcagggaggaggcggaggtggcaaataaacctgggcaattttgtttatacaaaaaaaaaaaaaaaaaa

SEQ ID NO: 9259 - DNA, 492 bp, Homo sapiens
  misc_feature (1)...(492): n = A,T,C or G
tatcgaaacctctcgcannnncntaccgataccctccgcaagngccgnggaannccatccatgccattctcaaaatttttgacaacatattcttcctaatgctgaggataaaattcccttttgtgttggtatttttctttatcacgctttttgtactacattcagaatctttatctcttaacatgttttggcctgcgtgtgtttcttccacttggtggtaacatcaattagcatagagtttagaaaaatgcttccccaatttaaaaaatcacttgtactacatcttctttcttagttctgatttgtattaacttataattatattttttgcttttgctgtactaatgctgtgttaattacctaagttttttttgttttgaattgtttttgcatttgagacggagtctcgctctttcgcccaggccggagtgcagtgtcactatctcggctcactgcaagctccacctccctggatcatgccattctccggcc

SEQ ID NO: 9260 - DNA, 485 bp, Homo sapiens
  misc_feature (1)...(485): n = A,T,C or G
gcnagtacgccggaaannnnaaaactgagattaaaggcatngcgnggaattaaacagtctttgtttcttggcctcccaaaatgctgggattacaagtgtgagccaccatgcctgactagaatcttatttttatatgatatagaaaagctaaatatatttagatctgtaagttagcagaaagtttgaaaaaaatattttattaaaaatataaaatggttttacctccagcttaactttgtaacaattccaaccaaacgtgaagttttcttgccagaactcagaggagggcgtgaatccaatgtgcagacttgacaggtggaaaggtgtaaaagtcctgcttgctctctttgccaggaggctggtagcctggggcaagttctcagccctgctcacccactccctgaaaactaacctggtgctgtcggngggagaggcatcatgggagctagactggccttttgggttgtgtgggagttgggtgaggg

SEQ ID NO: 9261 - DNA, 560 bp, Homo sapiens
  misc_feature (1)...(560): n = A,T,C or G
ctgggaanccccnnnnnnnnnnnaaattcgtctagtagaggtttgatgttttagccatccttattacaagtagctgaaactcggaactgattttgctataggaagtattagctaatcagaaccaaggtgccaggctgactcaccaagggctaagattgctttacttagtagcctcaagcccaaggaactgattgtgaaaaccacctgaataaacaggagggaggaagaggtaatactgttcatctataaatcatataagcctctgttagggtctgcgcaatctatcaaccccagccctgccttcccataggaaattcctttattttcaattgccacatacatagatattccacggtttaatatacaagcaaatgtgtatattttttcaaggaacagaaaaaaacagtccatcttggctggtccctatggcccccagcccccactccttcttcaacaaagtccctgattttctcaaagttcgaaccanaagctggaagcgctaattatagtaacgcaaaacaaatggaaatccttggaatgtttgcatttgtatttggatn

SEQ ID NO: 9262 - DNA, 501 bp, Homo sapiens
  misc_feature (1)...(501): n = A,T,C or G
tatcgatnaccattcngaannnnncctatctgagacccttacggaagngccgnggaattctttggaaatagagtctttatggagcaaacaaacaaaactaattaaaatgaagtcattagagtgggtcttaatccaatattatggtgtcctgatgaaaaggggaactttggacacagagaccaacatgccaaaggagagaccatgtgaaaaggcagggagaagacagccattcacaagccctggacagaggcctggaacagattctccctcacaccctcacaaggaaccagccctgcccaccttggtcttggacttccaacctccagaactgtgaggcaatacatttcgctgtttaagccactcggtttgtggtagtttgttacggcagccctaacaaactaaaacaatgttttcttgccataatagtgaaaagctggaatcagtgtaatgcccatcaataatggaatgtgtgtaagtagagactgccatttctctaccttg

SEQ ID NO: 9263 - DNA, 480 bp, Homo sapiens
  misc_feature (1)...(480): n = A,T,C or G
tatgaaacctcgaggncggatgacgccgtaaggagtaacataaaaatgtgctcgtgtgtttagcctacgtttttctcatgcctccattaccagttgcaattgtgtatctaagacctccaagcttgtttttaaaacaaaacaaaaaacctttctctattatctcagaaatataaatactgttatttttaatattaagaaattcaatataacttttaacacacactgtggaacattaaaccgtataaaaatgtagttataactatttttaattccaaggtgttgtttgcttttttcttttaaatattttcttaatattttgtcagattaactagatgaataaataaatctagtattaaccgcattatgaattaaataattttgatttaatgaaagggataatatgatttccagtgtttactgtagtgtatcttgtacagataacatgtatttttaaaggaaaaaaaacggaattgaagcttn

SEQ ID NO: 9264 - DNA, 492 bp, Homo sapiens
  misc_feature (1)...(492): n = A,T,C or G
ggttcgaaagggcgggcccccnnaaattgagaactgagatctatagtccagngcggtggaattccagggttgggccccgctcaagccacttccaccctcagccaaggatcctgcacaggccccccaggcctaggttcccttggaggctgtggcaagtcctcaatcctgtgtcccagaggtccctctgggccacaacccaacccttctcactctcctcagtgctagcactttgtattttttgatacttttatacttgtttctgcttttgctgctcttgatcccacctttgctcctgacaaccctcattcaataaagaccagtgaagaccannnnaaaaaaaaaaaaaaaaaaaaaaaaaaaaaaaaaaaaaaaaaaaaaaaaaaaaaaaaaaaaaaaaannnaaaanannnnnannnnnnnnnnnnnnnnnnnnnnnnnnnnnnnnnnnnnnnaaaaaannnnaaaaaaaannnnnnnnnaaaaaannnnnaa

SEQ ID NO: 9265 - DNA, 464 bp, Homo sapiens
  misc_feature (1)...(464): n = A,T,C or G
atcgacccctattgtagacatctagaccgngcggnggaattcggcagattcaagagctgagctgtccagtaagatggtcactaacgactggataagtttctcagttgtactagccacatttcaggagctcagtgacctctttattggacagtgcagattatatatagcccattcccagcatcgcagaaagttatattggacagtgctgatttagatagtggggaattgttttatactggtcatccaggcctttgtaagtgctgctaggtcgtggttaatcacgttagtcctctagacacaggtaattctaatgtattactgggtatgggtgtacttgttagtagtcagctttaccaacaagtaatatgcctacaccatgtaaggcttttgttttggggacagagtgaaagcaatagttaacaattaccaagtaattaggagccgggcccgtttatatgcatcct

SEQ ID NO: 9266 - DNA, 423 bp, Homo sapiens
gatagttaacagtaagggattgtatattataaaataccttgaagagaggttttggaatgttcttattacaaagaaatgaaaaatgcacaaggtgatgaatacgccagccaccctaatttgattattatacaacatatacatgtatcaaaacatcaaattgtatcccataaatatgtacaatacaatgtgtcaattaaaaaatagaaaacaatataattatgtggtctacaaagagaacataatggactaaatgttgattgggattcacagaatattgccaaaatattcgtgactttgctaaccatatgaaacaaaatgttcacatttaaatatataagttgatcttagttgtatttatgtaataattattatgatccataataaaccatacatattttgctaaaaaaaaaaaaaaaaaaaaaa

SEQ ID NO: 9267 - DNA, 471 bp, Homo sapiens
  misc_feature (1)...(471): n = A,T,C or G
gtggaaccaaaatcggaaacctcctataccctggaaannacngnngcaggacgaagcttccggagccatgttgttcgggaagatctcaatccccgctggaatgaggtttttgaggtgatcgccacatcagttccaggccgagagctagagggtgaattctttgacaaggactcggacaaggatgattttctgggcaggagtatagtgcgtctcaccacagtcttaaacagtggcttccttgatgagtggctgaccctggaggatgtcccatctggccgcctgcacttgcgcctggagcgtctcaccccccgtcccactgctgctgagttagaggaggtgctgcacgtgaatagtttgatccacactcataagagtgcggagctggctgcggccctgctatccatctatatggagcgggcagaggacctcccgctgcgaaaaggcaccaagcacctcatcccttatgctact

SEQ ID NO: 9268 - DNA, 460 bp, Homo sapiens
  misc_feature (1)...(460): n = A,T,C or G
agggaccnnntttgagcccctgagatcctggcaggcggggaatcgcaaattccgtattctaaataataaatctttgtcaggcagataatctcatcagaccctattagagcttcttgaatgaggctattacggaagtggggaatttcttccaggtagcatccatattttattaaattaggatttccagatcatgatagatcagatgatttttttttaatttcccggttttattggtttatcatcagcattcactgctatgcaatgatggtcataagtccattccaaatttaaatttgtttctgttatgtagcctacattaggctgtggaatttacatttaggtaactaaacacagctcataattaaaatcttttctttaaggtcagctaaaaaaaatgtttcctgtatttcttgatactaaaaatgtaatgatttttattttagttcattctaaaagtatg

SEQ ID NO: 9269 - DNA, 531 bp, Homo sapiens
atttgagcaccgtctggaggggcaattcctcttagcagcttgcgtgaggaggagattgacgacattggctatgcgctatacagtggcctacaggagcccgaggggctgctctatgtgggtggaaacgggtggttgccatgttttctaatgctggggagctgcacccacctcccttccagggatttgaatagtggtttttctctagctttttgccagaacaaaggagggtacattacttaaacccagggcatcaggatgtgcttgggctatggtggccataaaccctgagcccagagagcttgggtcactgtcacctgagtgcagctgggctgcctcaggcagcttggagtgccagccattcctgcaagcaccgtttcagctcttggggccaaccccaggacctttggctctgtccatcaccagcaaccaatccaccaacagaatgtggtttctgccatcctgggcagaagctgaaggccagcttcacatttctgctgagagaaggtgacttaacgccttttccggccctag

SEQ ID NO: 9270 - DNA, 487 bp, Homo sapiens
  misc_feature (1)...(487): n = A,T,C or G
ttaatgaanctcttcgaagngccngtactgacgccagtcgtagnngcatagaagtgcaactttgtaacttcatcttagcctctgattggttgctttctgcaaccaatcagatgtttgcataggcgtgtgacctttgtaacttcacttcagcttctgattggttgctttccacaaccaatcagactgattgtgggccaccacttcctttacgtgaggtgaacaccaagtggccaatggaaaacctcaagagggtatttggacctgagaagattctgtatctggggcccttgagctgctgctctgcccactctcacatggtggagtgtaatttcactttgaataaatctctgcttttgttgcttcattctttccttgctttgctgtgtattttgtccaattctttgttcaaaacgccaagaacctggacaacttgcagtcaagaccctctaccagtaacactagttgtatccctgtaaatgaatgggcg

SEQ ID NO: 9271 - DNA, 546 bp, Homo sapiens
  misc_feature (1)...(546): n = A,T,C or G
gggtaacannttttgatnccccnttcgaaccacagttcgngnggngcaattcgactccatattggagagtcgctgctggcacagggctttgaatcagggtagtatcctgccttccctaccctgaccccacatggtctcagggcccccttatggccccctaccccactgatagcttcctccttctctggcacaaggggagccccagggcttgtgggagggcgtaaggtggggggaaatgccactgcttttagcaaaagcctccctcccagaattagccagcttgcctactgcaccccacccccaccaaccaggggagccactaagctgactaacaactgtcccctcacccaccagctatttccccagggtagagtgggcaattctcaccttcaaagagtccccgcctgcccaggcctttggcacagaggctgagcggacagtcacgagagaggcgagaggcaaggcgaaacctgcgtccctgattcagttgcactggggatggagcccatggtatgggtttccagcttccccaggctccggccttgn

SEQ ID NO: 9272 - DNA, 540 bp, Homo sapiens
  misc_feature (1)...(540): n = A,T,C or G
gaaaacaaacttgaaacccctttgaagaccgttcgtgagggcaatcgcaaaggaaacaataggaaggaaaacatttactagggatgagtcacagatttgcttctgagcttcctatgagccagctaaagagggaacgtcaaatcacttggagaatttacaaagtctaagacagaaaaaaacaattgtgtaaggaaaacaattattccacatattaaggccagaaagaaatttctcctgtaggtcttcttaaagagtgtgttgtataatatcatgaacaattcaaaaccattccagcataaaaataacagaaatgttgtggcgtgtttctcttgatattccttagtgtcagcctgtggcatggacccctacctactttgattggaagccctgcgaccaggggaacaaagccacaaggcccactgctctggtgatctggcctaataccggggaactgttagaacagagctttcaaagtctctgtggggaaggactgngttggtttattttatttacatgaattttcaatgtgtcataagtcan

SEQ ID NO: 9273 - DNA, 494 bp, Homo sapiens
  misc_feature (1)...(494): n = A,T,C or G
cgtnntgtaaggccggnataaananaaaacttgtnattaacggcatnngcgnggaanncggagccggagcctgagccgcgcgctgtgtctccgctgcgtccgccgaggcccccgagtgtcagggacaaaagcctccgcctgctcccgcagccggggctcatctgccgccgccgccgcgctgaggagagttcgccgccgtcgccgcccgtgaggatctgagagccatgtcggccagcagcctcttggagcagagaccaaaaggtcaaggaaacaaagtacaaaatggatctgtacatcaaaaggatggattaaacgatgatgattttgaaccttacttgagtccacaggcaaggcccgaacgtcaaggtcgtgggaaataaaaggcagttctacacagactgcagcaacggttgcatctgcatatcctaagaggaaaaaatgaccttcaagagaattaggactnttttcttaatttcactgacttcagagacgat

SEQ ID NO: 9274 - DNA, 537 bp, Homo sapiens
acggatgacattagtccagtgcggtggaattcctggtgctccttgtcactcacgtaattttcacatcaggaaaactctgggctgggtgcagtggctcacacctgtaatcctagcactttgggaaaccaaggtgggtggattgcctagctcagtgacaccagcctgggccacatggcaaaaccccgtctgtaccaaaaatgcaaaaaattagctgggtgtggtgttgacgtttgcggtcccagctactctggaggctgaggtgggaggattgcttgagtctgggaggcagaagttgcagtaagccgagatcatgccactgcacaagctaggtgacagaatgagactctgtctcaaaaataattaaaaagcctctgccccaaactcgttaaaagattttataaccacaactgctgtttctgtgtagatgcatctgcatgcccaggagcagtaaatgcaataaaatcatttggttatactttgaacacaaaataaacgggtgaggcttttactttctaaaaaaaaaaaaaaaaaaagcgg

SEQ ID NO: 9275 - DNA, 471 bp, Homo sapiens
  misc_feature (1)...(471): n = A,T,C or G
ntggtccnnaaactgagacaactgagagcgtgtggaanncgccaaactacataaatacttcttggaattcctgatttatgctcaactttgatccctggaccctagggccattagtttccttgaagcagtcctgctggtggatgagcagggaaacttgtagaccctgggaagccaattggtagagggtgcctgcccgccccatcagactgtcccaactggggtgggggtgaggatcatagtgatttctttttaaaagctagtatgactagtgagaatggatgtccaagggcttttctcttcctcccccgagtccacgattcttcatttgtgatcagggttggggtaacttcaccttggtgatcatatattctttttacaaaccaatccagccaagatatatgtgcttttctaaacagcttgtaaaagcaaaaacacagtgtatacacatataaaactgattgtttttttttt

SEQ ID NO: 9276 - DNA, 544 bp, Homo sapiens
  misc_feature (1)...(544): n = A,T,C or G
agaaaaaaanccttgaaccccannctgagagggcgcttctttaatgacctcttacggttagaaaacacaataaaaacaaactgttcggctactggacaggttgtatattaccagatcatcactatcagatgtcagttgcacattgagtcctttatgaaattcataaataaagaattgttctttctttgtggttttaataagagttcaagaattgttcagagtcttgtaaatgttattttaataatccctttaaattttatctgttgctgctacctcttgaaatatgatttatttagattgctaatcccactcattcaggaaatgccaagaggtattccttggggaaatggtgcctcttacagtgtaaatttttcctcctttacctttgctaatatcatggcagaatttttcttatcccttgtgaggcagttgttgactgagtttttcatccttacaatcctgtcccatggtatttaacataaaaaaaaataaaactgttacccgaananaaaanaaaaaaaaaaaaaaaaaaacggcgcccgct

SEQ ID NO: 9277 - DNA, 483 bp, Homo sapiens
  misc_feature (1)...(483): n = A,T,C or G
aatcgataccctcgcangcccgactgaatatgtcgtcactncgcaatttattttcaaaaagcatagtttcttgtacattttagaagattagtttttcttattttgggacacctacaccaatgttttaaatgtggataaattttaatgtggaatttcttttaaaaataatcctcttcatagagcaatacaacaaaaatgtgttgtatcttggagatttacattataaatgtagtaacatttatgagcttaaatttaatgaaacctttttttttttttaaaacagttttgccctgccccccaggttaaagggcggggcttgatttaagttaattgaaccctccgtttccgggttaaaagcatttctcggccctaaccctcctaagaaccgtgatttatagggggccccccccaccccgggctaaattttgatttttcaataaaaacgggggtttaaccatgtggcccaggttgttctaaaattct

SEQ ID NO: 9278 - DNA, 470 bp, Homo sapiens
  misc_feature (1)...(470): n = A,T,C or G
cggcgcggnngnttgaaatgagaccttgagcacgtgcgggaattcgaacctcctggactccatggtgctcatcaccgacaagttctggggtacatcgggtgtggagagtgtcatcggcagcgtgcacacgtggctggcggaggccatcaacgccctccaggacaacagggacacgctcacggccaaggtcatccagggctgcgggaaccccaaggtcaacccccagggccctgggcctgaggagaagcggcgccggggcaagctggccccgcgggagaggccaccttcaggcacgctggagaagctggtctccgaagccaaggcccagctccgcgacgtccaggacttctggatcagcctcccagggacactgtgcagtgagaagatggccctgagcactgccagtgatgaccgctgctggaacgggatggccagaggccggtacctccccgaggtcatgggtgacggcn

SEQ ID NO: 9279 - DNA, 476 bp, Homo sapiens
  misc_feature (1)...(476): n = A,T,C or G
ggggtccnnnttttgagcccactgatgaccatagtcagngcggnggaattcctggaaatggctacaagttcctgtctccaggaagatttttcccttcttccaaatgctaaagcatcttttatacccactgactctgagcagcctgcagatgggggcctggcgtttgcttcagcccttccctgagtgcagtccccccacagccaccagcaccctcatgatgctgtgctctgcaggcgaggggcaccaccacgtccaaaggctgccacacacactggtggcttttctgggccacattcaccaaaagccaggacttctgtggggctggtacaggaggctcatggaatttcctacacacttcaccaaatgtttgtttacctttgaactccctgcttctcatctttgatatgattcttcaccaggattttgtacaaaaatgatcatggttctggggtggggagaggaaagggagcacatat

SEQ ID NO: 9280 - DNA, 447 bp, Homo sapiens
  misc_feature (1)...(447): n = A,T,C or G
nttgatggccattgatgaccatctggccgngcggnggaattctttggatctaatttgcctctgatgtttcctttggaaacatttaggaatatttttcttcccctaccccataaattgtgtagcactttttattccatttgctttcaaatgactacactaagcctaataatacaagctccagtgttatacaataacccatcagtgattggggaatcaaacattttggtttaaaaaacatgattatttaaaactggaaactaaaaagaatcaaattgaattaaagctatataaacacagttaacccttgtaaatgagtaaacaaatttttacatgtaagattctctaattgtcatattttactttttaggattccctaatagtggactgtttatttgcagtgtatttgcttctcatgaactatttctcgtacaaatcattaaatagttc

SEQ ID NO: 9281 - DNA, 442 bp, Homo sapiens
  misc_feature (1)...(442): n = A,T,C or G
aatgagaccatgataaccgcggnggaanncaacgagggcttgactgcgctgatagcagcaggtaatttaagtcactggtcagttttttcaaggaataattcaaaatactcttctggtagtcagaaaacagctcatcagccagtattttaaactttccattaaggttggtaaacatgacattaaaatatgtggtgatgatggtattatcttactaagagcgntgccctccccgtttcctgctggtatgctgtcactttcgtattaataactggcaacatctttcgaagagaatgagccacttacttcccagatacacagggtgataattgctggaaaaataatattgtcacattaattntgttcatatgattgcctttgggagaatttataaatagaagcgactatatccagatgcatcnttagggtgtgtgtatataaccan

SEQ ID NO: 9282 - DNA, 416 bp, Homo sapiens
  misc_feature (1)...(416): n = A,T,C or G
ggtgcaggtcctggtgcttgatggtcgaggccatctcctgggccgcctggcggccatcgtggctaaacaggtactgctgggccggaaggtggtggtcgtacgctgtgaaggcatcaacatttctggcaatttctacagaaacaagttgaagtacctggctttcctccgcaagcggatgaacaccaacccttcccgaggcccctaccacttccgggcccccagccgcatcttctggcggaccgtgcgaggtatgctgccccacaaaaccaagcgaggccaggccgctctggaccgtctcaaggtgtttgacggcatcccaccgccctacgacaagaaaaagcggatggtggttcctgctgccctcaaggtcgtgcgtctgaagcctacaagaaagtttgcctatctggngcgcctgn

SEQ ID NO: 9283 - DNA, 446 bp, Homo sapiens
  misc_feature (1)...(446): n = A,T,C or G
nttgtagacattttgaagnccgtcggaantccccagtggggcaacaagcctgtatgctgagcaggaggcagacttgcagagcttgttttgtttcatcctgtccgtaaggggtcagcgctcttgctttgctcttttcaatgaatagcacttatgttactggtgtccagctgagtttctcttgggtataaaggctaaaagggaaaaaggatatgtggagaatcatcaagatatgaattgaatcgctgcgatactggcatttccctactccccaactgagttcaagggctgtaggttcatgcccaagccctgagagtgggtactagaaaaaacgagattgcacagttggagagagcaggtgtgttaaatgggactggagtccctgtgaagactgggtgaggataacacaagtaaaactgtgggactgatggacttaacccgagttncga

SEQ ID NO: 9284 - DNA, 550 bp, Homo sapiens
  misc_feature (1)...(550): n = A,T,C or G
agaanccannccttgatnnccncatcgaaccacagttcgtgtggtggaattcagccaaggtgagcggttcctggtagtaagcttgggaggtaggagttggcgagtagtagcgaggagacgaagtggaggaagaagcgaatgcgcaggctgaagcgcaaaagaagaaagatgaggcagaggtccaagtaaaccgctagcttgttgcaccgtggaggccacaggagcagaaacatggaatgccagacgctggggatgctggtacaagttgtgggactgcatgctactgtctagagcttgtctcaatggatctagaacttcatcgccctctgatcgccgatcacctctgagacccaccttgctcataaacaaaatgcccatgttggtcctctgccctggacctgtgacattctggactatttctgtgtttatttgtggccgagtgtaacaaccatataataaatcacctcttccgctgttttagctgaaanananaaannnnnaaaaaaanaaaaaaaaaaaaaaaaaaaaaaaaaaaaaaaaagggcgcccn

SEQ ID NO: 9285 - DNA, 472 bp, Homo sapiens
  misc_feature (1)...(472): n = A,T,C or G
agggtccnnanactgagacctttgacagcgctgtggaattcgagccactcacctctgaggctggcttgccaataggaaccaggttgttgtctttctccgcgatgctttggagctgtgggcaaaggcacagaggaacaaggccagagcccaagtagggcaggtcaggggcatgggactggcccattctgcccagaagacaacccacacgtgttggggagaagcttcctcccagttctcagggagatacaatccctttcttgtcatctgccatttatgaacttgatccaaatacttaaactctctgagccttcttttttttgtataattatggtgaggatgaagtgagagacttatcagcctagaaagcatcatctgctagatcctcaattaatagtcaaaattatttcctgtgctttagggaaaagagcttgggctgagtgtcagcagcctgggctctaatctggcccagaag

SEQ ID NO: 9286 - DNA, 462 bp, Homo sapiens
  misc_feature (1)...(462): n = A,T,C or G
natggagaactgaaggcagtgcggnggaactcagatcttattagttattataatagttttaaatgcactttattattcaaagtatttttgactctcataaaatttgctaatataagacaaagcagcatgacattgcatttacattggagattttacttagaactacccagctgtattaattatgagatctttggcaattggtatactcatccaattttcagttttctcctttataaaatgacaataaaatgacagttcatcaggttgtttaagaattgaaacatagtgttcatctagttcacatataaagtacttaaactttatttatttatttatttatttatctaaaggtattggtgagtgatccatgccagcatctaagacccctcagctcccagcccagcatcacccaccactgccaacaaagtacttgacatttaaaacgcacttaggcaatgatgt

SEQ ID NO: 9287 - DNA, 450 bp, Homo sapiens
  misc_feature (1)...(450): n = A,T,C or G
gatggaagccccaactgagatcctcgnacagngcggnggaannccttctcttttcttgatgccttccggctgaaaccctctctgctccatatgccctaaacttatctgggaaggctggggaagtaggctctgggtccatgcctaactctgtaccgttttattcctcaaggcctatagcctgtcactccttgaagccttctctgcctgtccctccgatccttgtccaccgtctatttattgcccaatttattgtttatacggatgactgggaggcactgcaccacaacgtaggaccctggctcccctttccttgggtccttgtgttccttgcccctgtccaaccctggacagttggctctacctcagtaacactttatagcaaaatcagtgcaaataaaaatccctcagtgacctcaaaaaanaaaaaaaaaaaaaaaaaaaaaaaaaacg

SEQ ID NO: 9288 - DNA, 476 bp, Homo sapiens
  misc_feature (1)...(476): n = A,T,C or G
cgggttccnnnntttgaaaccaactgagtatcatagtaagngcggtggaattcccaaacaacatccctgccataaagatactatttttacattttaaaggtagtcagcaattcctatgtttaaactcaagttgagataatcccttgaggcagtagtttccatgcttctgtatgttgtaagattcatttgtaaagtttgttaatgcagattcttaagcattcctcatcctcttgcctcctttctgattcagtaagtctttggtggaggccaggaatcttcatgcagatcatcccaggtgattctgaaacactgcccaaagaatatttcctttttatttacaaatataaatgtcccgctgaaagctcctgagagccaaacctttcctacttagaactgcttacaatctatggaaaagtacatctattgataaactagtcctaggttggattcttcctactgataaggggctgagtggn

SEQ ID NO: 9289 - DNA, 551 bp, Homo sapiens
  misc_feature (1)...(551): n = A,T,C or G
nggggaannnncttgatnnccccnctcgaaccactattcgtgtggtggaattcctgccacagtcccctgagaacaccgacctgcaggttattccaggcagccagaccaggctccttggtgagaagaccaccacagcggcagggtccagccacagcaggcccggcgtcccggtggaaggcagccctgggcggaacccaggcgtttaacggctcactaggcagccccagatctggggaacagatgagcacgtggggagctggagtgagctgagcagaagttttgtgcccgcctgcccccatcccctccaggccacgttttagatggcccttgtagttgcgggtcctgggtgtcctcagaactagacatcaatgcctggatccttcagccggccctgccctcctttaggagacaggagtcaccagggcacagccctccaggcccgcctcaggaaggaatgaaaggaatgccatcatctctagttcccagggcccagccttccccttctcccccggggcagggacagtgcggcatattcagattcagacctcttt

SEQ ID NO: 9290 - DNA, 504 bp, Homo sapiens
  misc_feature (1)...(504): n = A,T,C or G
aggcggccgggnngnnaattgactggatcattagtccagngcggtggaattcctgcgctcttccctcaaaactctttttgtgaaatgctgctaccagtttactaacaaaattgcgaagaaggaccgcgtggaaggaaggacggcaaagtgagttcagaactctatagcaaaccagctataaaaagcgttagtccctcacccccaaagaggtgcggacactttccagcacctgaaagctggggcctcagttgcaggcaggcacagaaaacctgtgggagaggtcacctttaacacagcaacagaagcacgcatctcatctctcttgcattttctgttctttaatttggccctgagtgtcttgagacagtgggccatgccactgcctctgtttgctccctacccagccactgtcaggccagtgttgtctgtcatgtgccagaagcttctcagctgtggtgagccactggcattgggcaggcgggccagctggccagccagtgtgac

SEQ ID NO: 9291 - DNA, 491 bp, Homo sapiens
  misc_feature (1)...(491): n = A,T,C or G
nttcgacactgatnacactagtccagngcggtggaattcttctgtgggaccattccattcaggagcaaagagcaccatgattccaatcttgtgtgtgtttactaacccttccctgaggtttgtgtatgttggatattgtggtgttttagatcactgagtgtacagaagagagaaattcaaacaaaatattgctgttcttcagttttgtttgtggaatttgaaattactcaaatttaaaataaattactggactgtggaaataacatagaattgaagttttaattaaataccactcaaacgaaaagaacagtagtttttgtagttttatattggatactgaggcattagggaggcatgaaaggaagaggaatgaggattgagacatgtgaagacattgtgcattatatcaatgtgcattcctgtagttcattaacaaggtacatgcaatagtctaaagaaccagagtcactactatagtggcttaacattta

SEQ ID NO: 9292 - DNA, 463 bp, Homo sapiens
  misc_feature (1)...(463): n = A,T,C or G
aatgaaagacattaggccagngcggnggaattcattgcagttgttcagggctagggccaggcaggacaagtgaatgggtgggacaggtggctcctgcctaaggaccacctcaggccactaaccccttgtggacaactgtgagtagctgggttttcccccacctgctgtgcaacttcctgtgctttgaggttggactaacttgtcttcaggagctaattaactgtacagccctccccacgccccacccatacggtcactgcatttggtcagcctgcttcttcaggtcgatgccctccttctgatactccatctccttcaggggaggttggggccccactggactgggtgtcaagatgtgaaagcttatgggagctttaaggagacttcatggtggttccatgcaggtggttctgccatccctgctgatttagcctggtgcctgtgtgtgtccactcacgtacag

SEQ ID NO: 9293 - DNA, 456 bp, Homo sapiens
  misc_feature (1)...(456): n = A,T,C or G
cttgacattcgagacatagcccangcggnggaattccatcacccataggggcaccataggacaactatagtaccgtgtttatttcctattaattcaggttccgtttagagtctaaaactaaaacctaatcatttagtcacagtgtaaaaacaaatggaaataacagctcaaatcttcaaaatattactatagcattatgtttaaaataatctacaacaaaaatgtaccattttcaagcagtactacattaggagcccttttatagaaaataatttcttctttacccccgttccagtgtgaatctagtattctgttaacatttgtgtggcatttggagtttgtcatccccattgaagggagagccttctcagacatgaagcaagggaaacatactgaatagttttacacaaatttgatctggcttccatttgtccccctcatttcccaaatgtttan

SEQ ID NO: 9294 - DNA, 472 bp, Homo sapiens
gggtaacaaaaactgagacctttgacagcgcggtggaattccagaaatcttctgaaaacaaacatgttgttgcagcttgatggttcaactccaatttgtgaagatattggtaggcaaatgttatgctataatagaaggattcccatccctgagcttgaagcaagaattgatgctgtgaatgctgagacaattcgagaagtatgtaccaaatacatttataataggagtccagctattgctgctgttggatataatcacagaagtgaacttcatgaatggaaatggaacaagttattttccaaaaggcaaactatttcatactcctacgtgaacatccttttaccacagcctcagccacagtacgtctaattatttaaaatttgtgattatcgctggtggtcaacaatttttttggttttcatcctttaactggaaaaaggaggggctgtctcagtttttcttctgactctgt

SEQ ID NO: 9295 - DNA, 454 bp, Homo sapiens
  misc_feature (1)...(454): n = A,T,C or G
nattgagnactgacgaccgtgccggggaacgctgcaggaatagcgcctgtgaactggggctgtctacagcacattacgatatacggtttctgtgttcattgcgaacagcagctcgttcgaggctttaagaaaattctggtataaacctgccttactctgcatctagtaaacagcctggcatgtaattgaagttccttaaatatttatcgaattaacccagaattttctaaactaaatttagcatgcaccactatttgttattcttgccaccaccccccattcccctagctcctcacactacctgccaatgtcatcctaaggtacatgtggatacctaggttgtacaaatgctggactacacaattgctgagttactctctggctgcagattatatgaagagggattttacaatcagctgtcgaaggtcaacattgaataatgctcttttaaaaa

SEQ ID NO: 9296 - DNA, 418 bp, Homo sapiens
  misc_feature (1)...(418): n = A,T,C or G
ncggcaggaagaggagcaggacttggatggtgagaaggggccatcatcggaagggcctgaggaggaggacggagaaggcttcggcttcaaatacagccccgggaagctgaggggaaaccagtacaagaagatgatgaccaaagaggagctggaggaggagcagagaactgaagaataacgaagttatccttagcgtcctcctaaaggcttttccttttggcatcttaaaagcttgagagataaaacggaaaccccagagaggagtctgggcaggctcccagggtgcatgctgcctccataaatctgctgagctctagaccctcaatcaggacttgtcccttggctagcaggatcctgggaacacctttggccctgccctgtgtagagatgttcatgtctgttcctgtgggtcactttg

SEQ ID NO: 9297 - DNA, 414 bp, Homo sapiens
taaacttttttattttctagtccccctcccccacactggatagaatttagcctagaattttccctttggataaaagaacaagaattgaacatgttatttgtaaattgatgtttagtaattagtgataaacttgaaatactagcatatattataagccttaatcttaggtagtcttatgaaaatgaatctcttaactatcttttgaacctgtattcacattggttttcaagatattttaagttatattttttcctcttttcagagctgcttcttattctggggctactttttttttagttgtgtaattcacaaagggctgcatttttttttttttttaatagggcttataactagggcgggatctttggctctagtcttcaaagaggggccattttattttttagagtcacttct

SEQ ID NO: 9298 - DNA, 487 bp, Homo sapiens
  misc_feature (1)...(487): n = A,T,C or G
aatcgagaccctatccgtgcggggattgaccgcatctgcgccgcggagctgccgctggtgccgtgcaaccaggccaaggcgtcggacgtgcaggacctcctgaaggatctgaaggctcagtcgcaggtgttgggctggatcttgatagcagttgttatcatcattcttctgatttttacatctgtcacccgatgcctatctccagttagttttctgcagctgaaattctggaaaatctatttggaacaggagcagcagatccttaaaagtaaagccacagagcatgcaactgaattggcaaaagagaatattaaatgtttctttgagggctcgcatccaaaagaatataacactccaagcatgaaagagtggcagcaaatttcatcactgtatactttcaatccgaagggccagtactacagcatgttgcacaaatatgtcaacagaaaagagaagactcacagtatcaggtctactgaaggagatn

SEQ ID NO: 9299 - DNA, 451 bp, Homo sapiens
  misc_feature (1)...(451): n = A,T,C or G
nattgacgaccactagaccacgcggnggaattcaaatctcttgagaagggaagtttcagagcatgggcgtcatttacagcagtatttcaacctgtttgtaatgtatgccaatttaggtgtggcagagaagacacagcttctgaaattgagtgtacctgctacttttatgcttgtgtctttagatgaaggtccaggtcctccaatcaaataccagtatgctgaattaggcaaattatactcagtagtgtcacagctgatccgctgttgcaatgtctcttcaagaatgcagtcttcaatcaatggtaatcctcctcttcccaatccttttggtgatcctaatttatcacaacctataatgccaattcagcagaatgtggcagacattttatttgtgagaacaagttatgtgaagaaaatcattgaagactgcagtaattcagaggaaaccgcg

SEQ ID NO: 9300 - DNA, 450 bp, Homo sapiens
  misc_feature (1)...(450): n = A,T,C or G
ntcggaggccccttcgatggcccctcgaaagngcggnggaaanccattaatttctatttctcctttagcttaacactggactttagttttaatcttaattgagagtggtcctgctagtttctttgctttacctgtttttaaaacactttgagctaagaatttttcacccaattatcacacatgattagaaaacaagatgcttaaagtgaaaaaagacacccccacctttaccctacttgatatccaggtccttttcctccaagaatatttctagctgcttctggttttgctagtttatttcaaaaattacaattgtttgagtcaaatctatacttgatattcattgttgggtttctttaggtcattctgctgttctctcagtttcccaggtgttttgtgtgtcttccttgtgctattaattttcctgtggccttgttggtcagatccacg

SEQ ID NO: 9301 - DNA, 487 bp, Homo sapiens
  misc_feature (1)...(487): n = A,T,C or G
tgggccnnnnnanaganagactgagnaccctaggaaaaattgangatcctcgaaagngcggnggaantaggntgttctccaaagaaaatgtgtgttctataagagaagaataaaaatgaattattgcaagattaaaacaaacatttacttcaattatactgctaggaagattcctaattaatggaatgatcttcagacatcaagattagcagatatttatattgttagacaatcattttagatgaattgcaaacaaaattcaatgactttctgcctgaaagaaacttaaatttaagtatggaaagacttttgtttctgataattaccagaagttttttttaaaaaaaaaaaaactatgctaacttatgttttaataaataaatgactaacttaaaatatctatggagaataggaaactaggaaaaagatatcataaaagaaggaggaaagacccaaatagaacttctaaagaagaaaaatacactac

SEQ ID NO: 9302 - DNA, 557 bp, Homo sapiens
  misc_feature (1)...(557): n = A,T,C or G
atttcatttaatttatctatgcagtgtgtcgaacggtaactatcgttttgactgtatcaatacacggccaccannnnttttgagacactcgccangccgtttgagcgcgatttaaancaccagaggaagcnnaaancnggcggaggaagggaggaccacctcgggtcacaaggggccgnagaggattaaagggngaccttcatcttaaacagattgcatattacaaacgaactggtgaatatcattcaactacactgccaagtgagagaagtggcataagaagagcagcaaaaaaatttgtcttcaaagaaaaaaagctgttttatgttggaaaagacagaaaacaaaatcgtttggtaattgtttcagaagaggaaaaaaagaaagtcttaagagaatgccatgaaaatgacagtggagctcatcatggtatatccaggaccctcactctggtagaatccaattattattggacatctgtgaccaatgatgtcaaacagtatatgcttgtcagcattgcccagtggcaaaaaatacagtaattgtagcaccgaaan

SEQ ID NO: 9303 - DNA, 456 bp, Homo sapiens
  misc_feature (1)...(456): n = A,T,C or G
cctgacactacgggcctcgcccgngcggnggaattcgntgggaggatcacttgagcctaggagtttgagaccagcctgggcaacacagtgagacctcatctctataaaaaaattgtaaaattaggcaggtgtggtgcgtgcctcctgtactcccagctactggggaggctgaggtaggaggactggatcgtttgagcccgggaggtcaaggttacagtgagccataatcgtgtcactgcactacagcctgggtgacagagcaagatcttgtttaaaaaaaaacaaaaaaagaatctgctgtgatatgtggatcagatatttaattaggctggtgttcttgtgtagcccgagacaaagaggtctggacaaaattatcttaagtctgatcataggctttattttttatcattaagattggatttatgtagaaataatcatatttatctgttgtgctgg

SEQ ID NO: 9304 - DNA, 459 bp, Homo sapiens
  misc_feature (1)...(459): n = A,T,C or G
natggagaacttgagaccattcgcgcagagtggnggaattctcaatttcaaggtacaaggaaaaccatgagaatataaagtcataatgctttttccactcagatgaaaagatttatctatctttagatactcaaaattattcttggcattttagcacttttggtacacatttcctgatgtaggaaatagtaaaatttcagagcctatggcattggctttcaccacctatgcaattttctacacatctgaaaattaccagtttatctaactccttaaatgttcctctcttcaacaacaaaaaacacaaacaaaaattgctggaagaaacaggaagcatccaggtccaaatgacagcataacagactatgaagaaacagggcttaagtgcccatctagaacaagatggtctagattacaataaggaccccatgggacagaacatcaaaacattcaactttc

SEQ ID NO: 9305 - DNA, 474 bp, Homo sapiens
  misc_feature (1)...(474): n = A,T,C or G
natgagaccctanccagggggttgatctcgtttggatggaaggatgcaaagtattgttcctgggtgtgtctatgagggtgttgccaaaggagattaacatttgggtcagtggactgggaaaggtagacccagcctcaatctgggagggcaccataaaagcaggtatgtaaagagcagactggctgagtcttccagcctccatctttctgctgtgctggatgtttcctgccctcaaacattgaactccaagttcttcagcttttggttcttggacctgcaccagtagtttgccaggggctgttgggcctttggccacagactgaaggctgcactgtcagcttccctgcttttgaggttttggaacttggactggcttcctggcgcctgtgcttgcagatggcctgttgtgggacctcaccttgtgatcgcgtgagtcaatactccttaataaactctcctttataaaaaaaaaag

SEQ ID NO: 9306 - DNA, 566 bp, Homo sapiens
  misc_feature (1)...(566): n = A,T,C or G
actactcagtaagatttctagtctcaggaggatatcatgtttggattatagataggttagctcttgtaccgcacacncgnnntttagaaaccttcgnananncnttttgaggacatnggacangcggnggaannncggaanncnccataaggggggcgcgaaggagaacaaacggaggacccaacggcacggcattaccaacgggaatactggattacacagattaaaatcaggtcctaagtcaacttggaagagctaagagcatgttttaatattaaaagtcttgcatacctagtgcacagtttggagacgcaaggatagatctgtttactctagttgaacattttctatacaattgaaagcaacctataatagataaatccatcattgcatttaaacaatgaatttccttattctcaaaggacaaatacgtctggattatgtggtaaattgctactcagctatggtgaaatatttatactattctaggcacaacactaggaactaggtgattctgaaacaaaaggaatattttctgttgttgctttaattaccaaggttatttg

SEQ ID NO: 9307 - DNA, 448 bp, Homo sapiens
  misc_feature (1)...(448): n = A,T,C or G
tattgaagccctatctanggcctcggaaanncnggaggaannatgggatgctcaaggtgcctttcatctatgtcaatgactccgtctccaagagcatttttgacaacctctatggctgcggggagttcctcatagatggcatcaagcgggccacagatgtgatgattgccggcacggtagcggtggtagcaggctatggtgatgtgggcaagggctgtgcccaggccctgcggggtttcggagcccgcgtcatcatcaccgagattgaccccatcaacgcactgcaggctgccatggagggctatgaggcgaccaccatggatgaggcctgtcaggagggcaacatctttgttaccaccacaggctgtattgacatcatccttggccgtcactttgagcagatgaaggatgatgccattgtgtgtaacattggacactttgtcgtggg

SEQ ID NO: 9308 - DNA, 508 bp, Homo sapiens
  misc_feature (1)...(508): n = A,T,C or G
gagggnnnnnnnaacggtaggacgatcgtaggccacngcgnggaattcctctaatgaaaacaggttctagaataaaggagttgattagtctgaacagtactaattatctacaaaataaacgttagtgatcagcctcttcctctataaacaatgaccaattagacgtttccgtaattccatgtattatgtatagtacactctataaatgtaaatgtaatgcttgtctaaaaagtgcaatttattgtacattgtcccaacaaatgtttacttttataatcgttatgaacttgaattggattagtatcttgtttttatgtgtgaatgaagccttgtgaaataaacaaatgcaactgagaaggtaacaaggtgactgtttttgtgagccagtgatgttttcaatgctttgtgttgcccctttggccccattaagcagtaataaacatttgttctgaagtccccaanngnncngaacaaantcccccaaaaattatgactaataacccaaggg

SEQ ID NO: 9309 - DNA, 506 bp, Homo sapiens
  misc_feature (1)...(506): n = A,T,C or G
aagttnnnnnnaacctangacctcngtagngacgngcaattcgnttaacatcttcggccctgcattcctacatcttgtgtctgtacacgttcttaagcagcgtgtcaggagagcaccctgttgtcttctggtaaatgtgtgcagggtcatcctgtctcctgtacctcctgggaagggggccgctgctgtctggtgccctgtgagctgtgattgattgcctttggtcagtaatgcgttcaggagtccacaccaggcacagatggggccttgaaacgctttgtcatgcttcttcagtaccatggatttgaaatgaactcatccttgctgtgagcatccaggagcccttgagaagtttatctatgactatgaaactggcaacgtcaccccagaattacggtcagccttattccccttcacctcccagtgaacgctaagaagtttcagacaagcagagagctctatttttagaagaaatatgttacactcagaaatgatgaaaccaaatc

SEQ ID NO: 9310 - DNA, 448 bp, Homo sapiens
atagaaacttgattgtccttagaccgtgcggtggaattcctgaaatcttgaacctgtagaacattacttatcactgtgttcctttctaatgggaaaataataataaacacttgcagagtattttttaaaagtttttagctttaaaaaaaaaaaaaaccctgggccttacacaaggggtatatggagtggatactgattatgataattagagggtattatacaatctttctttcagcaaacattcacttactgagcacctactaatgttccaggtactgattgttaaaaggggattgaaacacagcctctgtcctgagcttagtctagtaggaggggacagatttgtaaataatagatttgaagtggctgagcaaaaaaaaaaacaaaaaaaaaaactggggtccctcccccccacagaaatgggtgcaatttggcccagggcccacct

SEQ ID NO: 9311 - DNA, 490 bp, Homo sapiens
  misc_feature (1)...(490): n = A,T,C or G
cccccgccccnnnnattcgaagacattagtcagngcgttggtagtccttctcccgggcagaagcacttccaaacaattttcatgggaccttaatattagttgcaaatctgatggtactttcttctgtgagtggtgaattcacattcaagaattcatgttcacatggtaggaaaagttaaagtcaatacatgaagtttatgagataagctgtttctattattggtcttcctcctctgtaaagccaactgttctgccagtaataacagctgtcatttgtagatagcgcctttattctctgcctggccctggttgtaattgcattacctgattagtcctcatagcatcctgttgaggtagatgccattgttatccctactttaaagatggggatcacacatccaacagagtctgggaagttagggagacttccctgagttatgcctcaatgctgaggagtcaggagcatgtgcatttggtgtctgaggactgn

SEQ ID NO: 9312 - DNA, 466 bp, Homo sapiens
  misc_feature (1)...(466): n = A,T,C or G
atagggccccttngnnnntttagagaccatctgnncgnccggnggaattcgtgagaatgggcatatggagaaggggaggtggaggcacattggacattgagtctctcaagtctgaggcatatctttctaaatcaaggtttttttgacctccaaagagacagcagttctcagtcaaaaacagtggtcgcagaattagcttgggcgcactccttgaatggacgccattatcatcttgttcccttgattgcaccgcaaaccaagaaggttacatttcctgattcggaggttacaaactaaaagtcctgtgtgtgaaccaaaggacgagggactttcagtaacagatgcattgcccctttacagtagtgctgaccctgtctgatccttccagcattcgtgcttccgagtgcgtcaagggctgcctgaagtcatggctacaggtttccgctagctcttaggtatgttgatt

SEQ ID NO: 9313 - DNA, 450 bp, Homo sapiens
  misc_feature (1)...(450): n = A,T,C or G
nttgtagaccattgtccagcgggtggaattcccgttttaccacccgtggcaacctcaaagtgcatttccaccggcatcgtgagaagtacccacatgtgcagatgaacccacacccagtaccagagcacctagactatgtcattaccagcagtggcttgccttatggtatgtccgtgccaccagagaaggccgaggaggaggcagccactccaggtggaggggttgagcgcaagcctctggtggcctccacaacagcactcagtgccacagagagcctgactctgctctccaccagtgcaggcacagccacggctccaggactccctgctttcaataagtttgtgctcatgaaagcagtggaacccaagaataaagctgatgaaaacacccccccagggagtgagggctcagccatcagtggagtggcagaaagtagcacggcaactcgca

SEQ ID NO: 9314 - DNA, 452 bp, Homo sapiens
  misc_feature (1)...(452): n = A,T,C or G
atagagattgtagncagtgcggnggaattcccaggtccattctgtttaaatccctaagaatgtcagaattaaaataacagggctattccgtaattggaaatatttcttttttcaggatgctatagtcaatttagtaagtgaccaccaaattgttatttgcactaacaaagctcaaaacacgataagtttactcctccatctcagtaataaaaattaagctgtaatcaaccttctaggtttctcttgtcttaaaatgggtattcaaaaatggggatctgtggtgtatgtatggaaacacatactccttaatttacctgttgttggaaactggagaaatgattgtcgggcaaccgtttattttttattgtattttatttggttgagggatttttttataaacagttttacttgtgtcatattttaaaattactaactgccatcacctgctgggg

SEQ ID NO: 9315 - DNA, 507 bp, Homo sapiens
  misc_feature (1)...(507): n = A,T,C or G
cagtggnnnnnnccagtagacgatcgtacgaacngncgaggaanncaagtgattccttcaagctaatttaaaatttcattgaacacatggtgaccaggaattttttttttcaagcactgttggaaagcaccacaaagccctttagaattaatctggatttgtttctcaagttctgctgaagtttaaaaaaaaactttattatacaaataactcaaaattttcctgtgtaaaactaaacctgtagttttaaaacataatcctgtttgcattagagctcactgtctttttgtgatggaaactgtgttcgtatggaatgactaaaaatcttttatttggttcgtttcaaattacaattgctgatggacaatttgtattgcagcgagaacaacagaatgaaagaaatgtatctctgtgcggctatacatatacatacataaaattgatttttaaatttaaaacatatggaaaacaaaacattgaacagtttgaattttgccaagttggaca

SEQ ID NO: 9316 - DNA, 468 bp, Homo sapiens
  misc_feature (1)...(468): n = A,T,C or G
tggtatnaanaactgagacctttgatagcgctgtggaattcgcagcattttgagggatgttgtgggatctttaaggaattagagcgactgatggggttcaggaggatatgatatttattaattatttaactgcacagtcggattaacatctaaaggactgagccctgaacaaagagttaaattaccttttaggcatttcgtcgggtgggggtaggcgggggaggggggagatctatgcagggggaagcatactacagaagcgagaaacaaaggcacttattcaagtgagacatgcattacatcatttcttacttttcaaggaaaaacatgttttgcgacttgagtttatctgtctagtgaccttgcagctgcacagctagggaaaccgggtcttcacaatgcctgggaaagggagagataaagctcactatccacagaaaaacaggcagttaattntttaaaggactc

SEQ ID NO: 9317 - DNA, 465 bp, Homo sapiens
  misc_feature (1)...(465): n = A,T,C or G
aactgagaacctcgggttttgacaccataggacagngcggnggaattcatttgatggcgtgatgtctcacagaaagttctccgctcccagacttgggtccctcggtttcctgcctcggaagcgcagcagcaggcatcgtgggaaggtgaagagcttccctaaggatgacccgtccaagccggtccacctcacagccttcctgggatacaaggctggcatgactcacatcgtgcgggaagtcgacaggccgggatccaaggtgaacaagaaggaggtggtggaggctgtgaccattgtagagacaccacccatggtggttgtgggcattgtgggctacgtggaaacccctcgaggcctccggaccttcaagactgtctttgctgagcacatcagtgatgaatgcaagaggcgtttctataagaattggcatatatctaagaagaaggcctttaccaagtactgcan

SEQ ID NO: 9318 - DNA, 562 bp, Homo sapiens
  misc_feature (1)...(562): n = A,T,C or G
naatcgaagcactattgcagngncgnggaattctttntttttgagacagggtctcgctctgctgctcaggctggagtgcagtggtgcaatcacagctcgcagcgggctccgcctttcgggctcgggcgatcctcccatctcagcctccctggctggatggagtgcagtggcgtgatctcggctcgctgcaacctccaccttccgggttcaagtgattctcctatctcagcctcctgagtagctgggattacagtcttgctctatcacccaggttggagtgcagcagtggcgtgatcttggctccctgcaacctcctcttcctgggttcaagcggntctcctgcctcagcctccccagtaactgagactataggcgcctgccaccacgcccagactccagcataaccttctccaggaagctnttccagagcccccaggctaggaacctccccccaacccctgaactcaagccccagcagcccgtgcctgcgccatctccatcagagctgcatctctcttggtcttctggtaacaagtgccatttcttgtggtttctgtgtccc

SEQ ID NO: 9319 - DNA, 460 bp, Homo sapiens
  misc_feature (1)...(460): n = A,T,C or G
ccctgatnactgngagcactagcccgngcggnggaattcggaggcagattaaggaaccagtgaaatttgttccacaggatgtgccaccagaacccatgaagattccgataagaaacacgagaaccagaggacgaaaacgaagcttcgttcctgaggaagaaaaacatgaggaaagagttcctagagagagaagacaaagacagtctgtgttgcaaaagaagcccaaggctgaagatttaagaactgaatgtgcaacttgcaagggaactggagacaatgaaaatcttgtcaggtgtgatgaatgcagactctgctaccattttggctgtttggatcctcctttgaaaaagtctcctaaacagacaggctacggatggatatgtcaggaatgtgattcttcatcttccaaggaagatgaaaatgaagctgaaagaaaaaatatatctcaggagctcaacat

SEQ ID NO: 9320 - DNA, 468 bp, Homo sapiens
  misc_feature (1)...(468): n = A,T,C or G
aggggcgcggntnntatcggtagcgtagcncangnggnggaattccaggacccttcagaggagagtggcaatgcttctgctgtgctgtgttcattgtttgtgcctggatctcccattgggctgacagctgctggggttcgaggcatgtgggtctcatggattaacacagtgtccgactcaataaatattaaatggtagttccttctgcaagagcaccaacatcaaattatgttccagggagccctgggcttccgaggaggtaccccagggactgggcaggtaggggaaggcaggaagctcatgtctcanggaaactcttctactcattggagaaccgtgaaggggttcagttcttctgtgaagagggtgagctcactactgtttgcccagcacttggtatctgataaactcactgagactcagtttcccttctgtgtagcatgaggaatatctttttcactgtatctc

SEQ ID NO: 9321 - DNA, 446 bp, Homo sapiens
  misc_feature (1)...(446): n = A,T,C or G
nttgangactctagtccatgcggtggaattcaacaattcccactttggcattttcctaactattcgtgtggctagaattggttggttggtcacttgacaagaaaaaccatacttacctgggccaaggctctgttcctgccttcgcaaattctcaaaagagtaaagtttatgaaaagaaagtggcaggcaaacacaactcttgactgccctcccaccctcctacctgttcagtactcatctgattcagaagcatcacttcttggataactagcactggaaaaatgaaatcatctgtgtaagtgaagggactcatttttctttgctttcagcccatgtaaataaataatacagtattaacattttcgtgctgcttcccattagcttgtagattgagccatactctggctgcccctttgccttcctaggggcattttctttaacttccn

SEQ ID NO: 9322 - DNA, 485 bp, Homo sapiens
  misc_feature (1)...(485): n = A,T,C or G
nctcgattgcactcggtcgngcgggcaattccccttctccatctcggcactagaattcgccactctcccaccccccagcccccacctctgtcttcaggtctcatcttccaccccaaaaatgtctgtctctctctttttgttttgtttgttgttggttttttatttctttttggtttgctttctgtttttgttttgtttttcttttttttctttctttttttttttttttacaattttggggccttcgggtccaaggaaaacctttttttttttgttaaaaagggggggaaaaaaaaacccaaaggcccccgtccttttttaaaaaaccaaaaaaaagtttgtccttttttttttaaaaaaaaaaaaaaaaaccccccccttttttttaaggggcccctttaaccccccgtgacccccccgggtgggccttttttttgcccccccttttgtttttgccccccccccgggcttttttttgccctgga

SEQ ID NO: 9323 - DNA, 483 bp, Homo sapiens
  misc_feature (1)...(483): n = A,T,C or G
tgggaccaannnnaannnngcctgatnactctaggacagactgatggccttcctcccttctccacactcgtttccctttgctcatgactcctgtagggaagtttcttcaaacaaaacccagctcctgagtctccagatgttgttctgtcagttgccaaaggactttgctgaccactgcatggggatccaaccaattcaattaatgtcttcatattgaagaagagatgtaccttcaattgaaaacctcgtttttcttttgtttgcattttctgcaaaaaggaaaaagaaaccacaaattggggaaaaaaaaagaagaaaaacctgtttccgtgtgcaaaagcacacatatgtatgtctgtgttataaaatgactgtgcttgttcgtaacagatgcaaacaagaaagaagaactgggaagtctttgtccctaggaaatccaaaggggctggaatatggtgttggtttggctttcttgttggccca

SEQ ID NO: 9324 - DNA, 489 bp, Homo sapiens
  misc_feature (1)...(489): n = A,T,C or G
tggtnccaannnaagganaacctgattaccntntgaannactgangattatcgtcaagtgcggnggaattcttttttttaggagaatagaacatattttatttaacagttgttagcttgattgataacttttaaatatttaaacatatggtatgaggcccctgtgtgtactcttgccctggccctgttggcaatggggtgggcttgggtcagcctcacccatcagaccacaagctccaccagggcaggcagcccatgcagtgcccctgcccagagcacagcacctggcacagaggagcagacaataaataccggctgtgagaaacaaatgggataatccaagccgaatgcttggcatggtgcaaatgtccaataaatatcagctgtcattgtctgttgaataaatgaacaggtgggttggtggggctgggggccaagagccacaagctgaggtggcttgtgtctgaggagggaagggacccgctgttcn

SEQ ID NO: 9325 - DNA, 458 bp, Homo sapiens
  misc_feature (1)...(458): n = A,T,C or G
nattgaagacctcgagaccgttcggccgagcggnggaattcgattgaagacagatgcggaacatgtgaacgagtggactgtggggatctgtttagacaatgttgagaggaaatgggaggtcccactacttcctcagaatggcttctggaccttgcagatgcataaacggaaatactgggctctgacctcccttaagtggattctctctctggaggagcccctttgccaggtgggcatcttcctggactatgaagctggagacgtctccttctacaacatgagggacagatcacacatctacacatttccccattcagccttttctgtgcctgtgaggcccttcttcagcttagggtcttatgacagccaaatcttaatctgctctgcattcacaggagccagaggggtcacggtgcctgaagagggctggacacttcacagagcagggacccaccact

SEQ ID NO: 9326 - DNA, 449 bp, Homo sapiens
  misc_feature (1)...(449): n = A,T,C or G
atagaaaatttgatgacccttagncagtgcggnggaattcgcactgtcaagaatgagttctccctcaagaccttcaagaggaagtccgaggtggatcgtgctgtcaagaggatgcggcatctgtccacgggcaccatgaccgggctggccatccagtatgccctgaacatcgcattctcagaagcagagggggcccggcccctgaggcagaatgtgccacgggtcataatgatcgtgacagatgggagacctcaggactccgtggccgaggtggctgctaaggcacgggacacgggcatcctaatctttgccattggtgtgggccaggtagacttcaacaccttgaagtccattgggagtgagccccatgaggaccatgtcttccttgtggccaatttcagccagattgagacgctgacctccgtgttccagaagaagttgtgcacggn

SEQ ID NO: 9327 - DNA, 456 bp, Homo sapiens
  misc_feature (1)...(456): n = A,T,C or G
nttcgagattagagnccgtgcggnggaattcgcaaaaaggaagaagacgttagctacctttctggacaacttagtgagaaagaagcagctctcactaaaatacagacagagataatagaacaagaagatttaattaaggctctgcatacacagctagaaatgcaagccaaagagcatgatgagaggataaagcagctacaggtggaactttgtgaaatgaagcaaaaaccagaagagattggagaagaaagtagagcaaagcaacaaatacaaaggaaactgcaagctgcccttatttcccgaaaagaagcactaaaagaaaacaaaagtctccaagaggaattgtctttggccagaggtaccattgaacgtctcaccaagtctctggcagatgtggaaagccaagtttctgctcaaaataaagaaaaagatacggtcttaggaaggttagctctt

SEQ ID NO: 9328 - DNA, 446 bp, Homo sapiens
  misc_feature (1)...(446): n = A,T,C or G
gttgaaaccctactgatgactcttagtcagngtggtggaattcctagcatgctgaatgcacgtgacaccgactgacttcagggatctgggccaggagtgtggtggacattggacaaagaggccattttggctgcgggaggacactctgatctcgaagcctgccataaaggtagcaaatagactcttgggattcccctcttctgtgcacatcgttgaatgaagagagtctttttgcacaaacttcacttgaaattgtgccactgatgataaacggaatgagagccaaaaaagtttagttggagacagttgtaaattcaatttggagtttatttaattgacttttctatcacgttggggcacatgccaactccctggtttcttcctggcatggtgtttgggcagcaggcatcattttccttttctagcttcataggaatattgtgagg

SEQ ID NO: 9329 - DNA, 454 bp, Homo sapiens
  misc_feature (1)...(454): n = A,T,C or G
gttgtagaccttttgtggacccctagtccatgtggtggaattcaaagggaaaagctaccctcacaaggagttgtccagttgacactatctgaaccaaaattattaaacatagcatcagcaatcgtgggacaaacagacgcaaacatctcctggtgtgaggcgaggaaagaagacgactttaccatgtgaacccctgtggcttcctcagagactgtctgctctggcacatgctcctccaggtcttccaggtcacctaggaaacagagtcgctataagcacatgagctccactgagtgaatccctcaggtggtcttggagctgtggacacggggctggcgtgtgtggaaaggtgtgttcacagcacagactcagctgctgccggtccatcctccgtggtggagagggaaggcaaatggtgaaggaaggcaccaggaaggcctcanaagacagagcc

SEQ ID NO: 9330 - DNA, 458 bp, Homo sapiens
  misc_feature (1)...(458): n = A,T,C or G
nnnnaattgaagatcccttgtacagcgtggtggaattcatttcagcacttgacactgtaaaaggattcctctttaccttgcttcctactacctgcacaaaacagaagccaccttttcctaaactgcataatgtcctcaagcaagctaaattcttcaaaagccagctccaagattggtaagaccagttccagctttcttctaaattccagtttccaggctctgtatctgcctcctccctagatggtgggccctaagcttttcggccctcttctaggaagacggcattgctgagctctaaggttctagttttaccctgttgctgggagatggntatctatggttctctgtgtccctgcttgtctggccttagaatgtcaagaatgcaagccctgactccttttattatctattactgcataacaaattaccctaaaacataggggcttaaaacaacattt

SEQ ID NO: 9331 - DNA, 450 bp, Homo sapiens
  misc_feature (1)...(450): n = A,T,C or G
nattgaagaccactagtccagcgcggtggaattcagaatgaagctaactaaaagtttggtttttggaagctggcatggactagatttaacaaatcagctatgtggttccaaagttttacagacatggagaacatcacctgttactagttcagtaatataaatattttgtatattaataatgctgtttgttcagcatttttcggtcatttgattttgcattttgcacttcctcccaggatatttttttggtcaaaatatgaagtattggtgcagtttgagggtgttttggtttttgattcctggtttttttgttttttgtttggggtatttttggtgtatgtatgtttatgtatgtgtgtgggtatgtgngcatacagcggagagcanattggaaaacagttctatttatcctcctccctccccaggagaaataaaaaaaattcttacatt

SEQ ID NO: 9332 - DNA, 446 bp, Homo sapiens
  misc_feature (1)...(446): n = A,T,C or G
nttgtagactctagtccatgcggtggaattcccagaccttgtctctcctaaaaataaaattaaaaaaagaaaagaaaagaaatgattttatatatcatggcccagaatgggtcccagcagcctccccttccttgtcacccctcaggccctcaggcctgtctcctctctctgctctgtgctggccgtggtgacactgggctcttgtaggcttgtctcacgtgctggggccctgagcatgcacagcctaagccatcctctccttggtgactcaaggtggggctgctacgctccagcctcacaccacactgtgcagaagccagggctaatttcagcccccgtgggatttcatccagagtggatggcttatctgatttgactgcagcactggcaaattttccaggtacccctgggagtcggggggcttctcccacctgtcttttggggac

SEQ ID NO: 9333 - DNA, 504 bp, Homo sapiens
  misc_feature (1)...(504): n = A,T,C or G
gaggnnnnnnccttaagacatcgtaggcacngncgnggaantcgagagaagcttctttggcttggtactggacttgggatgacagctctgcttctctgtgggccgtcctgaccagggcaaacagggtggcattgaacatgactgtcccgtcgctgttcagaggcatgttcatggagaccaggcgctgcaggcgaagagaagcaaagctggtgatgatggcaggcggtgcttaggggaccgcagaacaccgtggcagagtgatatggtttggctctgtgtcctcgcccaaatctcatgttgaattgtaatccccagaattggaggtggggcctgatggaaggtgattgcatcatggggtggatttctcataaatggtttggtaccatccccttggtgagtgagtactcatgagatctgcttgtttaagtaagtgtgtggtccctcccccttctctcttgctccctgtctgtccatgtgacgtacctgcctcccctttgccttccn

SEQ ID NO: 9334 - DNA, 450 bp, Homo sapiens
  misc_feature (1)...(450): n = A,T,C or G
attgacnacctcgatagaccttagtcagtgcggtggaattcgattaattagaaacctgaaggttataggtttgggatgttctgtttaagaaggatttaaataaatttggagtaaacaaataataggtaaaaattaaggattagtaagaaaaaattttttaatttaaaaaatttaatttttaaaataggaaaaaatccctgtttgatgtaacaaacttaattctggaaaagttttagtatatacaaagtaaacagactatataatgaacttccatcactcagctttaacagatatcagcattcttccattcttgttttatttatacctctgtggatttgctacctctcctatttgattgttatttttacatttttaagaaagtttaaatacattgaaatgttcacctctgaactgtgcaaccttcctaaataacagactttttatacttan

SEQ ID NO: 9335 - DNA, 412 bp, Homo sapiens
atctgattcatgagcacatggttattactgatcgcattgaaaacattgatcacctgggtttctttatttatcgactgtgtcatgacaaggaaacttacaaactgcaacgcagagaaactattaaaggtattcagaaacgtgaagccagcaattgtttcgcaattcggcattttgaaaacaaatttgccgtggaaactttaatttgttcttgaacagtcaagaaaaacattattgaggaaaattaatatcacagcataaccccaccctttacattttgtgcagtgattattttttaaagtcttctttcatgtaagtagcaaacagggctttactatcttttcatctcattaattctattaaaaccattaccttaaaatttttttctttcgaagtgtggtgtcttttatatttg

SEQ ID NO: 9336 - DNA, 460 bp, Homo sapiens
  misc_feature (1)...(460): n = A,T,C or G
nnngggtttcgangaccacttgtatcagctggtggaattcgttattttgtaaatgaaacaattccataatttttagaaacacattttcccatagcacagtcttttctgaattggaaatgacccagacatctgtgggcagcaagccatccaggtgccgagacaagagaccaagggcacgagctattccagtataataaaatatataaaacaacaagagttatactagatctagatcacagacatgattatatatgaatatcattaatcattagtttgtagcaattgctctttattccaatattataataatccttgctctataatcataacctaggaaaaaccaggccatacagagatgggggctgaggggacatggtgagaagtgaccaaaagacgatagtgcgagccttctgttatgcccggacagggtcaccagagggctccttggtctagcggaaac

SEQ ID NO: 9337 - DNA, 506 bp, Homo sapiens
  misc_feature (1)...(506): n = A,T,C or G
gaggccnnnaacctaagacctccgtagngacgngcaannnccagaaattcggaacgttccctggaaattacgttgccccggtgtgagtggtctccatggtaacttggagccagccaggatggggtggggagcggtggcactcgtgggagggagaggacccccgcccacatcctccttccccaggacctgagctcccagcatctgcagacgacccccgcagcctttccctcggacccccctcgaagccccctggactgattcccacccacgactcacaggcattcctcccacagccctttcatttcctccccaccccactccccaaatacagaggtctgctttgaagcggagaccatttccaggccttattgagaccagaccccaagtcccccacccccatcctgctccagcgtttcctctaacagggaccagctctccgctntgcccccacggngttcctctaaccagaaccagcttcctagcctcgtagagaccaaaggccgccc

SEQ ID NO: 9338 - DNA, 508 bp, Homo sapiens
  misc_feature (1)...(508): n = A,T,C or G
agaggggnnnnncccgttagcgatcgtacggacggncanggaannnaacgagatccatttgcttcaactctgaaccagatttacactcagaatttgcaagagaaaggaaccaagtcactcaagattcttccttccgcttaaactgttactgagggacagagcagcctattgatcaggagtggtgatgcttcaatcagacttcaactccagtgctgccaatttcttgtttgtgcccttggcaaagctatagaatttctagacatcagaatctcaaaattgaggctgctgatagtaccccccatagggggtcatggtgagaaaaaacatgaagagcactaagagcaggaaccagccctactgacattcagaggttggcaatcatcacttcctctctgccactcattttacgggaaagctctctattgcctttgaccacacatttttgagtccatccctacctggctggcttgacctttaccaaggggttacctgagcagtctaggtaggg

SEQ ID NO: 9339 - DNA, 479 bp, Homo sapiens
  misc_feature (1)...(479): n = A,T,C or G
aggggtccnnnnnaactgagaaactgaggcacagtcgnggaancccaaattccagagggccattactggtgcatctcttgctgatataatggccaagaggaatcagaaacctgaagttagaaaggctcaacgagaacaagctatcagggctgctaaggaagcaaaaaaggctaagcaagcatctaaaaagactgcaatggctgctgctaaggcacctacaaaggcagcacctaagcaaaagattgtgaagcctgtgaaagtttcagctccccgagttggtggaaaacgctaaactggcagattagatttttaaataaagattggattataaaaaaaaaaaaaaaaaaaaaaaaaaaaaaaaaaaaaaaaaaaaaaaaaaaaaaaaaaaaaaaaaaaaaaaaaatggaaagaaaattaaaaaaaaaaaaaaaaaattgatttcctgttaatttnanntttaccagccgctcggcccgaag

SEQ ID NO: 9340 - DNA, 475 bp, Homo sapiens
  misc_feature (1)...(475): n = A,T,C or G
ggagtgccnnnnntttgannaattgtagaccttagtccagtgcggtggaattcccaaaacactgctcttaactccaccgcctatcccaaaacctataagaaccagtgataatcacaccaccctttgctgactccttttttggactcagcccgcctgtacccaggtgaaataaacagccatgttgctcacacaaagcatgtttggtggtctcttcacacagacacgtgagacgggagttcgagaccggcctggccaatctggtgaaactctatgtctctactaaaaatacaaaaattagctgggcatggtggcgggcacctgtaatcccagctactcgggaagctgaggcacaaaaattgcttgaacccaggaggcagagtttgcagtgagccaagatcacactgtcaggcctctgagcccaagccaagccattgcatcccctgtgacttgcacgtatacatccagatggcctgaa

SEQ ID NO: 9341 - DNA, 457 bp, Homo sapiens
  misc_feature (1)...(457): n = A,T,C or G
gttcgcgtacccattgtacgacgcttagacagnccggtggaattcgctaaagaccagacgaagattcccatcaagcgctcggacatgctgaaggacatcattaaagaatacactgatgtgtaccccgaaatcattgaacgagcaggctattccttggagaaggtatttgggattcaattgaaggaaattgataagaatgaccacttgtacattcttctcagcaccttagagcccactgatgcaggcatactgggaacgactaaggactcacccaagctgggtctgctcatggtgcttcttagcatcatcttcatgaatggaaatcggtccagtgaggctgtcatctgggaggtgctgcgcaagttggggctgcgccctgggatacatcattcactctttggggacgtgaagaagctcatcactgatgagtttgtgaagcagaagtacctggactatg

SEQ ID NO: 9342 - DNA, 482 bp, Homo sapiens
  misc_feature (1)...(482): n = A,T,C or G
tggtccannnnnnannnnaaactgatgaccctaggaagactgatgtccnctcgaagagtcataccctgattctgtaaaaaaagaaagaaagaaaagtgcttgaaaaccattgcagtaaatgatccattctaaactatttttggccatgactcccactgtttacccatcccacgaagtgttcatttcctacttctattagaacatgtcacattcattcacaaaatatgtactgatcattaactatttgcctgccactgttaagcactgggaataagacagtgaactgaacacgttaccctaataattatacactttattgcaggaaaagatggacactaaaatatatgtgtcaaggccgggcgtggtggctcatgcctgtaaccctatcactttgggaggccgaggtcaggagttcgagaccagcctgggtagcatggcgaggccccatctctactanaaatacaaaaattagccagaaatcg

SEQ ID NO: 9343 - DNA, 447 bp, Homo sapiens
  misc_feature (1)...(447): n = A,T,C or G
nttgacgaccatagtccaccgtggtggaattccgggatctgggttggggcagtagtctctggtcttcttggtttcttttggaatctcttctcaatgacctaggtgggcattgtactccgctattctcagactgccatgactgggctggatattttaattggggtggtggaggaagctggctcaaggccttttggcagttcttttctagaatttgaagctgtaggggttgaggagcactggtggcttgcaggagatagatgcacacagagagaggtctggagatctgtaaaggggcctccatgaatgttcagcgaagtactaatcggctcatgtatatgaggaaatgagtgaaataacttttgaaaagaatcaaagggaacagtacacaatactcacatagggcctggaaaaggactgatcctgccagccagagtggaaaaactcgta

SEQ ID NO: 9344 - DNA, 518 bp, Homo sapiens
  misc_feature (1)...(518): n = A,T,C or G
gaggccnnnnnnnagggaaattgatagtcttcggannnnaactgattnctancgcangngncgngnaannnnaagnnttcactccttcctgcgagccctgaggaagccttctttccccagacatggccaacaagggtccttcctatggcatgagccgcgaagtgcagtccaaaatcgagaagaagtatgacgaggagctggaggagcggctggtggagtggatcatagtgcagtgtggccctgatgtgggccgcccagaccgtgggcgcttgggcttccaggtctggctgaagaatggcgtgattctgagcaagctggtgaacagcctgtaccctgatggctccaagccggtgaaggtgcccgagaacccaccctccatggtcttcaagcagatggagcaggtggctcagttcctgaaggcggctgaggactatggggtcatcaagactgacatgttccagactgttgacctctttgaaggcaaagacatggcagcagtgcagaggaccctgatggtt

SEQ ID NO: 9345 - DNA, 490 bp, Homo sapiens
  misc_feature (1)...(490): n = A,T,C or G
agggcgcnnnnnnnnaatcgatagcatacttagtgtcgngcaattcgttaacttctggaattatgactccttcatgaagttgaaacttttacgtctttttatttttactttttaaaaaactttctatctagcgatcctatataaataagtctttgctaattaggatatgtttaactttccttctttattcattttgtcaaaggtaaacaaagctgcatactagctaaagttctaaggacaggatttagtcagtaatacacttttgcaatagggaagagagtccagtatgaaatgaagccaatgttgatttgcagacatgactgcgagttttaaagggagaatggcgggggacttggcagggtggataaacggaatctgtagactcaaagaagtgaagaatttaaaaaggattggtaaaatatggggattaggccagctgtgcctgttagctgacactgtgactgaggaatagataccctatttttcctgg

SEQ ID NO: 9346 - DNA, 478 bp, Homo sapiens
  misc_feature (1)...(478): n = A,T,C or G
nttcgatcgcgatcactaggccanngcgtggaattctgaagatgttcaagttgaggtggctgagaaagtgcagaaatcgtctgcccccagggagatgcagaaggctgaagaaaaggaagtccctgaggactcactggaggaatgtgccatcacttgttcaaatagccatggcccttatgactccaaccagccacataagaaaaccaaaatcacatttgaggaagacaaagtcgactcaactctcattggctcatcctctcatgttgaatgggaggatgctgtacacattattccagaaaatgaaagtgatgatgaggaagaggaagaaaaagggccagtgtctcccaggaatctgcaggagtctgaagaggaggaagtcccccaggagtcctgggatgaaggttattcgactctctcaattcctcctgaaatgttggcctcgtaccagtcttacagcagcacatttcactcattagag

SEQ ID NO: 9347 - DNA, 460 bp, Homo sapiens
  misc_feature (1)...(460): n = A,T,C or G
nnnnntttgaangtccattggacagtcctgtggaattccccagacatgtcttggagacctccagggccactactggggacccccaatggtcctagagatccccataccagcaccccaatggattcccacatcttcccatctagaaaaccccctcaagtcccacagaaagcactctgaggtccccgtgcccctcgctcttggtgacccatctgaactctccctgacagctggtttgacaaatccttcaccctaatcgtcttctctaacgggaagctgggcctcagcgtggagcactcctgggccgactgccccatctcaggacacatgtgggaggtagggcggccagccctccctggttctggggacccctgccccatctccaaagaccgtcctctccagcgccttagtgtcagaagaaaaactgaggcttggccgggcacggtggttcatgcctgtaatc

SEQ ID NO: 9348 - DNA, 451 bp, Homo sapiens
  misc_feature (1)...(451): n = A,T,C or G
ctttgaaactgcagacactangccangcggtggaattcggcttacgaaaattatatgaaacgaaaagaattgcagaatactgtttcccagcttttagaaagtgaaggatggaacagaagaaatgttgatcctttccatatttatttctgcaatctaaaaatagatggtgctttgcacagagagttagttaaacggtatcaagaaaaatgggacaaattgcttttaacatcaacagaaaagtctcatgtagatttatttccaaaggacagtattatctatttaactgcagattctcccaatgttatgactactttcaggcatgacaaagtttatgtaattgggtcttttgttgataagagtatgcagccaggcacatccctagccaaggcaaaacggctgaacctggcaactgaatgccttccattagataaatatttacaatgggaaattg

SEQ ID NO: 9349 - DNA, 416 bp, Homo sapiens
gctctgtttcctacatgtgtgcccatccccacctccttcaagtccctataaagctcatggccatgtccattctcctccagacttctcccctagtaatcttaaacacaacaataactaacacttattaagcacatattacatcccaagtcctgttactcgtttcatttaattcttataactacccatgaggtagacttattattaaccccatttgagagaggaaaaaaattaaggatcgaaaaggtgaagaaacctactcaaggtcaaacaatttctaagtggcaaagccaggcttcgcattcaagtctgtcgtatgtatttcatgccccttatccctatctgatattatactacatatttattcatgtattcatttggttgttattatctagaatgtaggcttcctaagggcagag

SEQ ID NO: 9350 - DNA, 560 bp, Homo sapiens
  misc_feature (1)...(560): n = A,T,C or G
gtttgaattcggaccacctatccgtgtggtggaattcgaatggcaacatggtgtcttgaagtcacagtgaaatatgaagaattacatccaggtccatctgagaaaaaaggtgatcacagtgtgagagaacatgatagaatgtactagaaaggagggaagtgaaggagaagtgaaagccaaagacacttcatcagctttacaattgcacttaataatgctgccacacctcttcagagacgtttcatttcctatggcatgtcctatctaatcccctagctgaactacaggggacagggaagtagtgaagggaaagatggagtactaaggcgtgcagaggttggaatcacgctggggataccaggaagggctcggtgatcaccattagacggttcacgtcggaattttccagaaccctatggtgtgttccagtgtggactgacgcangacaagcaaagggtgttggtacatgatgtgtttgagcaaggatgtgccaaggaagaatggagttaggggctgaaacatactcagctatcctgtttctaaaatgcgtgaaatcaaca

SEQ ID NO: 9351 - DNA, 477 bp, Homo sapiens
  misc_feature (1)...(477): n = A,T,C or G
catcgatagacgtacgctcagngcgnngcanncgatgaagctgatgcgttcctcagaggcgcttggtctgccgtgggaagctgcacctctgcagtttccaaaaccaaaatcaaaccttaaaacatccagactgacgtaaggcggaccgccttgctctgatttgagtattgggagacaaacagcactatcaatcgatactaaaaaaatccagaaaggctgcaacttcatggcacatcaaaacaaccatatccctggctctctggctctttttttttctctattattcggagttgccctctcagaccggcctggaggacttgaacaactcaaacaccttctgtgtgtctgggatccctccacagaagccaagcaccacgtacgacatctggaccaccttcagactcgcatgctgtgaggaagcccatgcttactatgtgctgaggatacatggagaaggaaagagatgcctggccagcn

SEQ ID NO: 9352 - DNA, 456 bp, Homo sapiens
  misc_feature (1)...(456): n = A,T,C or G
nttgtagaccctagngcangccgtggaattcccttggcatgtgccccttcacctgcgggcatcggggtgcttgagaaaggagcctgcgtgatcaggttcttccagtgtcttcacactcatcagattcttggattcggcttgaaaatgattttgaaaatcatggtcaggtaagcatacttacctctttcttccttaattgtaaatgaataacggtagtcgtgtttatggagtgcttgctgtgtgtcaggcatgatgcggactggactgtgcgttgtgtggtcagagattgaatcctcagcctcaaagtaggtaccgtgcatctccgccctgccgccgagagagaagcaggcctgcaggagcttggggacttacctggacccactcagatgcggttctgcaggcttcctacacccaaacagtgggctgccttacttcccaaagtggcaagtgtttcca

SEQ ID NO: 9353 - DNA, 442 bp, Homo sapiens
taaaattagtagatccctagtccgtgtggtcgaattcgaaaaagaagcaatatataaagaacgttggccagattatgtaagggaactgcgaagaaggtattctgcaagtactgtagatgttatagaaatgatggaggatgataaagttgatctgaatttgattgttgccctcatccgatacattgttttggaagaagaggatggtgcgatactggtctttctgccaggctgggacaatatcagcactttacatgatctcttgatgtcacaagtaatgtttaaatcagataaatttttaattatacctttacattcactgatgcctacagttaaccagacacaggtgtttaaaagaacccctcctggtgttcggaaaatagtaattgctaccaacattgcggagactagcattaccatagatgatgtcgtttatgtgatagat

SEQ ID NO: 9354 - DNA, 480 bp, Homo sapiens
  misc_feature (1)...(480): n = A,T,C or G
aatcgatagcgatgcgtagngacgcggcacanttctaacagtgtctaacgaagcgcaaacagcaaaagaatttataaagattgtagaagctgttgaaaatgaataccagactgccatcagtgagaattatcagacaatgtcggacactactttcaaagccttacgtcgacagttgccagttacacgcactaagattgattggaacaagatccttagctacaagattggcaaagagatgcagaatgcataagatgaacattgcatgaccggatcattttagtgtctttgcgttaaaaaatcattgcaaaagtattctgaactgtcaagctgcccagtcagatgggctgttgccatttaaaatcactgtaattaattagtttgattagagcacaaagcttagctaatcaaccattatttttcattntgtttgttctaagaggattgaaaatcagtttagtttaaatgtctttctgttaggcg

SEQ ID NO: 9355 - DNA, 494 bp, Homo sapiens
  misc_feature (1)...(494): n = A,T,C or G
ggcccccgccccccattgagaccntaatgatgatctaggaagngcggnggaattcgagaacgatgcctgcgagtctccaaagccttccctcggaacggttccattaaatctctcctgctcagaaccacccaatccaattcatggagcgccacgtggtctacagcacagctggttagggccagcggaggtttatttatagctgggctcctggctgcctggtaaccggccattgccacctttaaagagtcttgggatattatctacctctattcagcttgaaatcgggcatgcagtgccttgggctggggctggcgataattaaatttctatcatgcacaattatggatgcaaagaatgaatgacatcccactggcatgtgaggattcgggcagcttctggactgaaatacagacttcataattgctccatccagattgggacaaagactgtggttgggagaacatgcctgaacaaagaagaatgactctgcaggg

SEQ ID NO: 9356 - DNA, 477 bp, Homo sapiens
  misc_feature (1)...(477): n = A,T,C or G
nttgatatgcgtncgtaggacacgccnngtannttacccactaaccctctatttttccatctttgattgaaacttaaatctttccctattcttagaaaactagcagtccaaatccaattactgtatcagttcataagtgctacatggctcctgctgggaagtcaggtgggagtggcaaggactggggcaaactggagagcaaattcttctgctgaagaggacagccattcttcaactccagttgttcagaagctccaaatcttgcaatttctcagaaaaagcaagcaagcaacctgaattttgatacatgagtcaaatttttaaacagtgccttaatggaaaaaaaaaaattctgcaaaacaaacagatggaacataccctcatgctaagccttattcatggaccatgcttgcaagctttcatttacaggctctcgagattccaagagcattgtcaggatccttcaccaaatcgttg

SEQ ID NO: 9357 - DNA, 446 bp, Homo sapiens
actgtagactttagtccatgcggaggaattcctattaatgggcattagtcaagaatacagtaaaagaatttgaacacaatacttgttggttaaatgaagtcgtattgaagcggcatcattgtctgggtaaatatctgaggttcgttatctcacaccaagaagattaaggacgtggacacacacaaggagtgagtttaggagcacaggtttaacaggcaaaagaaagagaaaggagaacagcttcctctcttgtgagagagagcggcacctgaaagtgaatccctgcccctggtggagtgcactggattttataaacggtcttgaggaagcagtgtctgatttacatagggcccaaagattggttaaactaggtgtgacatttacataatatgccaggaagctggccgccccaccctaatcttattaatcaaatgggatctttgcct

SEQ ID NO: 9358 - DNA, 490 bp, Homo sapiens
  misc_feature (1)...(490): n = A,T,C or G
gagatggnnccccattgagaccttttgaagccgtcggaanncactagaaagagtgaccttgagcactgtccttttgggaaattaagctaaactcaagtataactagaaggtcatgccgtttgttgtacaggaacttctcaaaaaatatcaaaatttgtttcctgaaattcaactaagtacaacataatcattttcgttaaatataatttgaaggaacccttaaagtgtcaggttattgagaatctgaggataaggaaattggcatgatccaatacagctttaacagtggtactacaaaagatcatctcttttacttttaagaattctagagtaggccgggcacagtggctcacgcctgtaatcccagcactttgggaggccgaggcgggcggatcacgaggtcatgagattgagaccatcctggctaacacggtgaaaccctgtctctactaaaaatacaaaanaaattagccgtgcgtggtggtggatg

SEQ ID NO: 9359 - DNA, 494 bp, Homo sapiens
  misc_feature (1)...(494): n = A,T,C or G
agcggttgcccaattgagccccttatggagacctaggacangcggnggaattccccagtgctctgtgaatggtgttcagatcgtggaggccacacatctaaatcaaggtgctgtgattctcttgggaagaaccaatatgtttcgctttaaccatccaaaggaagccgccaagctcagggagaagaggaagagtggccttctgtcctccttcagcttgtccatgaccgacctctcgaagtcccgtgagaacctgtctgcagtcatgttgtataaccccggacttgaatttgagaggcaacagcgtgaagaacttgaaaaattagaaagtaaaaggaaactcatagaagaaatggaggaaaagcagaaatcagacaaggctgaactggagcggatgcagcaggaggtggagacccagcgcaaggagacagaaatcgtgcagctccagattcgcaagcaggaggagagcctcaaacgccgcagcttccacatcgaag

SEQ ID NO: 9360 - DNA, 498 bp, Homo sapiens
  misc_feature (1)...(498): n = A,T,C or G
ggggaggggcgggcgggcccccnnaanaattgaaaattgagtaccattagtccagngcggtggaattcattaaacaaggattgcccttaccttttcatactttgtaagaaaccataaatacttatgcaccatgatttttttaaagaaacactttttattttgaagtaattatagtctcataggaagttgcaaaagtagtacatagagtccctgagtactcttcccccagtggtgacaactgtagtataatatcaattctgggaaattgacattggtacaataccaaatatactatgcctttttctctaaggcatgatgttgcagtagcattccttgtacatgtagctaggagaacttgtactaagcccagataaatagttgaagtacaagggcgaggagtgtgtctttgatattttaatagaaatcacctattgccctctagaaaagctgtacccttttccagtggcagagaaccttcctgaaaggcagtcctgtgtn

SEQ ID NO: 9361 - DNA, 489 bp, Homo sapiens
  misc_feature (1)...(489): n = A,T,C or G
gggcgccgnnnnnccacctagagcgtacgtagngacgcgcannctctgtttgctgtccatcctgtgcacaccgagtgtgttgctggtgttgtcggccgtgcatacctcctgtgtgccctgttcttcttgttatctttccttggctactgtaaagcatttagagaaagtaacaaggagggagcgcattcttccaccttctgggtgctgctgagtatctttctgggagcagtggccatgctgtgcaaagagcaagggatcactgtgctggtgagagccgcaacatggctggggcctgctttttctgtgtgtccttttccctcctataaagacatctggggctggccctgcctctgtggcgttctccacgcctacatcccattgctggtctgaggtgatagacctttctggacaaatggctttcgctgtcacaattctggcattgcagatggagaattgactgacttccttgacagtcatgtgcaactgggg

SEQ ID NO: 9362 - DNA, 569 bp, Homo sapiens
  misc_feature (1)...(569): n = A,T,C or G
ataganaacttatgatnaccantnnannnnncaattccatggagaaatgccatctctactaaaaatacaaaaattagccgggcatggtggcacgtgcctgtaatcccagctactcaggaggctgaggcaggagaatcgcttgaacctgggaggtggaagttgcagtgagctgagatcacgccattgcactccagcctgggcaacaagcgaaactctgtctcaaaaaaaaagaaaagacagtagcatatgttcatgtcaagcacctctcatcacagtcgagttccaaggaaaaattccagcgttttctgcattgggtgctgtgtcatctgaaatcggcacattccatggaggaaggagtcctgctttgttgcatgtatcctagggtttaatgttggtaaatgagtcactctagcatttgtagaaggctccctgagactcctgcagcagtcgaccaagcccaaggacataattgaatctggagagtcctggggccttgttttgaaaaagacttgaaatacacataggaagaaaggcataaaaataaatgttcacttgtctctgcaaaaaan

SEQ ID NO: 9363 - DNA, 494 bp, Homo sapiens
  misc_feature (1)...(494): n = A,T,C or G
agagggggnnccccccattcgagacantttgaagtcgtcggaannctcatattttagtcattctgcttctcatctaaatatttccatattctgtattaagagaaaattaccctcccagcaccagcccccctctcaaacccccaacccaaaaccaagcattttggaatgagtctcctttagtttcagagtgtggattgtataacccatatactcttcgatgtacttgtttggtttggtattaatttgactgtgcatgacagcggcaatcttttctttggtcaaagttttctgtttattttgcttgtcatattcgatgtactttaaggtgtctttatgaagtttgctattctggcaataaacttttagacttttgaaaaaaaaaaaaaaaaaaaaaaaaaaaaaaaaaaaaaaaaaaaaaaaaaaaaaaaaaaaannnnnannnnnnnannnnnnnannnnannnnnnnnnnnnnaannaaaaaaaaatggggttt

SEQ ID NO: 9364 - DNA, 494 bp, Homo sapiens
  misc_feature (1)...(494): n = A,T,C or G
ccgccccccccccccttgagnccntnagaggaccctaggacaggcgnggaattctgggtaccctcctcatcagcaagatccgggaggagtacccagacaggatcatgaacacgtttagtgtggtgccttcgcccaaagtgtcagacacagtggtggagccctacaacgccaccctctcagtccaccagctcgtagaaaacacagacgagacctactgcattgataacgaagctctctacgacatttgcttcagaaccctaaagctgaccacgcccacctatggtgacctgaaccacctggtgtctgctaccatgagtggggtcaccacctgcctgcgcttcccaggccagctcaatgctgacctgcggaagctggctgtgaacatggtcccgtttccccggctgcacttcttcatgcccggctttgccccactgaccagccggggcagccagcagtaccgggcgctgaccgtgcccgagctcacccagcagatg

SEQ ID NO: 9365 - DNA, 498 bp, Homo sapiens
  misc_feature (1)...(498): n = A,T,C or G
agggcnnnagcgccccattgagaccccaaaagagaccctcggaagngcggggaaancggacagtctctttaataagtagtgttgggaaaactgtatatccatatgcagaagaatgaaatttcacccttatttcacaccatatataaaatctaattcaaataaaaacacctaagacataagctgtaaaactttcagcagaaaacataggggaaaggcttcttgatactggttttggcaacttttttggggggaggagggatttgaacccaaaagcacaggcaacataaataaaaatagacacataagattatatcaactacacagcttctgcaaagcaaaggcaacaaccaactgagtggacagaaaaccaacagaatgggagaaaatatctgcaaacaatgtatctgataaggggctaatattccatatttataaggaagtgaaacagctcaatagtaagaaatcaactgaattttaaaaagacgcaaagcacctgan

SEQ ID NO: 9366 - DNA, 442 bp, Homo sapiens
  misc_feature (1)...(442): n = A,T,C or G
taaantttgatgaccattagtcctgtgcggtcgaattcccagcttcctgttcttcataccctcaaaacctttatgctctgagaaaagtgacatgtgaaagttacatcaaaaatgactaataataactaaatagataacaatagaggtgactgtagttgaaggagtaccttaaaagactgagcgttgactacatttttggggtgatctagcctcatctgctaccagtataggaattatttctgtaacatctctttgataattttttttcttttcttttctttttttgaaacggagtttcgctcttgttgcccaggctggagtgcggtggtgcgatcttggctcaccgcaacctctgcctcccgggttcgagcgattctcctgcctcagcctcttgagtagctgggattacaggcatgagccaccacactcggataattttgta

SEQ ID NO: 9367 - DNA, 491 bp, Homo sapiens
  misc_feature (1)...(491): n = A,T,C or G
tgagaggcccccccatgagaccnattgaaggcgtcggaanncctctcgccggccgcgcgaacccgtttgagctcggtatcctagtgcacacgccttgcaagcgacggcgtcatgagtctgacttccagttccagcgtacgagttgaatggatcgcagcagttaccattgctgctgggacagctgcaattggttatctagcttacaaaagattttatgttaaagatcatcgaaataaagctatgataaaccttcacatccagaaagacaaccccaagatagtacatgcttttgacatggaggatttgggagataaagctgtgtactgccgttgttggaggtccaaaaagttcccattctgtgatggggctcacacaaaacataacgaagagactggagacaatgtgggccctctgatcatcaagaaaaaagaaacttaaatggacacttttgatgctgcaaatcagcttgtcgtgaagttacctgattggtt

SEQ ID NO: 9368 - DNA, 492 bp, Homo sapiens
  misc_feature (1)...(492): n = A,T,C or G
ngataagggcgggcgggccnnnnnaaaactgagactggggcatccgcaagngcggnggaantcccggaccgtgcagttctctgcaggaccaggccatggagctcgaagtccggcgggtccgacaggcgttcctgtccggccggtcgcgacctctgcggtttcggctgcagcagctggaggccctgcggaggatggtgcaggagcgcgagaaggatatcctgacggccatcgccgccgacctgtgcaagagtgaattcaatgtgtacagtcaggaagtcattactgtccttggggaaattgattttatgcttgagaatcttcctgaatgggttactgctaaaccagctaagaagaacgtgctcaccatgctggatgaggcctatattcagccacagcctctgggagtggtgctgataatcggagcttggaattaccccttcgttctcaccattcagccactgataggagccatcgctgcagggaatgctgtgn

SEQ ID NO: 9369 - DNA, 487 bp, Homo sapiens
  misc_feature (1)...(487): n = A,T,C or G
gggacgggcgccggnaannnnaatttgagatcgtaggcattgcggnggaattcgctaattttttgtattttttgtagagatggggtttcaccatgttggccaggctggtctcaaacttctgggctcaagcgattgtccgccttggcctcctccacaacatcttgacttatgaaataaaaaataaaacttatttatgattcttttacatcattggtgttttaagggcttctggtgtaagtttgaaaacactgactttttttttctctttccattgtaggacagtcattttgtttactcattcagccctgttgcaggtcccaataaactcttcataaggttgacagaagcaccctctgccaaggttaagttgctaataggtgcatacagagtgcagctgcagtgaccaaacagaagggactgggcggagttctcttcagaccgattcctatactctctttgacagcagtttggaattcttctagcacat

SEQ ID NO: 9370 - DNA, 461 bp, Homo sapiens
  misc_feature (1)...(461): n = A,T,C or G
nttcgagtagcctcacncangncgnggaattcgacgagacagtgcccgaacacattcaacagctgcagcaccagggcatcgagtacgacgtcatcaccctggccgatgactgagccccgagggcccaacacagatcatggatttgcggccagctctcctgggggtagggggccaccaagactcacctccctcttcatttaggatctccagatactggatagccagcatcctctcattcccagggagccagacctgtgctgttggggttaggggcagccatgggccccagccaggacatgctgggtgccccagcctgcaggcaggctttgggagagaaatttatttttgtttgggtggacccactggcctgtcagtctcaataaagggaccggagtccagtcctgaacccctnntnntnnnnnnnnnnnnnntnnnnntttntttnntnntttttttttttt

SEQ ID NO: 9371 - DNA, 494 bp, Homo sapiens
  misc_feature (1)...(494): n = A,T,C or G
gagagggnnnnnncctttgagnccctaggatgatcctaggaagngcgnggaantctttagcaccaactgctgtaaagcaatgctgcaaataatgcttgaattcaagtggctattccaacaacagaataaatacttttatagtagttttataatcctgaaattcgaaagctttcccaattgcacttgcatctaaacaaaactgttgcagtttttactctatttattttgttccccatgtttatgaaagtcctgcacagtttcaaaggcatggtaaataatatatcaatgtttatgtagtctgttacagaaacagctatagataacattatccagtgaagagcaaaattcaagctttagaaaatattcatgcatgcaattttgacatatctaaaaataggtttttgtatatttatggtgggaggtggttgggaacttttaacacaatggggtgttaatttttgtacagtctgtgggcatttacacatttttaatgg

SEQ ID NO: 9372 - DNA, 493 bp, Homo sapiens
  misc_feature (1)...(493): n = A,T,C or G
agagagggnnnnnttaggagnacatantganggcgtcggaancncggaagcttacaaacatggcagaaggcaaagggaagccaacatatcacacgtaagcttaggaagcttacaaacatggcagaaggcaaagggaagccaacatatcacgtggcgagaaagacagagaagcggtaggtcccagactcttttaaacaacaagacctcatgtgaactgaggggaaactcactttcaccaaggagatggtgctaaaccactaatgagggatctgtcccatgagccaatcacctcccaccaagacctacctccaattttggaaattatatttcaacatgagatttggaggggacaaacatccaaaccatatcccagcctgagcagactaacagagtctctgaataaatctatgaaaatgactagagtattattttgttgagtgatttcttcttgtattaggattgggctccttgaacatatttttctcatatctgn

SEQ ID NO: 9373 - DNA, 469 bp, Homo sapiens
  misc_feature (1)...(469): n = A,T,C or G
aaaataaaactgatnccntctaanactgaganccntggccatgtgccggaattcgagctgcctgcaggctcagccatcacctgggctggttactgggcagcctctcccacctgccccaactatgctcagtgacctccttcctgtccgctctcctgccatccctatcaccatggcatgagtaatgcacacgtgtattagtccattttcacactgctgataaagacatacccaagactgggcaatttacaaaagaaagaggtttgattggactcacagttccacatggctgaggaagccccacaatcatggtggaaggcaaggaggagcaagtcacgtcttacatggatggcagcaggcaaagagagaggacgtatgcagggaaactcctgtttttaaaaccatcagatctgccaggtgtggtggctcacacctgtaatcccagcactttgggaggctgaggcacgtggaa

SEQ ID NO: 9374 - DNA, 557 bp, Homo sapiens
  misc_feature (1)...(557): n = A,T,C or G
ctggaaagccgnnnngnnnnaaattcctatataagcatgaaagacaagggtgctgcaagttaacccctaaatatcagagtattagttcattcttttatgggttctgactaaattatcctctcctgtggagtggagttaaatggaaaaacacaagaagttccttaataagctgtaattttttagtttggtatttctcagtgatagagcataaaacttaacagtagagtttattatcagtcatgacttagttatatgctttgtcatttattaaatggatttaaatctattagtgttgcatagtttttctgtgctttgccctaggttgattccatttgttggatgctcttaatttgtccaatgtaaatataaaaagagagggcattaaaccgttttgccctataatgggggaaagatgctggttagatgtttattttagtgagcttgcattatcttacacgtgcaaagcagttcatagaattcatagntntacacttactatgtctttcctacagacacccaggatgctgtatttttaactcttgagccactagtgactn

SEQ ID NO: 9375 - DNA, 520 bp, Homo sapiens
  misc_feature (1)...(520): n = A,T,C or G
ggcttgtcaaaccagtccagctacggnggcccagccagccagcagctgagtgggggttacggaggcggctacggtggccagagcagcatgagtggatacgaccaagttttacaggaaaactccagtgattttcaatcaaacattgcataggtaaccaaggagcagtgaacagcagctactacagtagtggaagccgtgcatctatgggcgtgaacggaatgggagggttgtctagcatgtccagtatgagtggtggatggggaatgtaattgatcgatcctgatcactgactcttggtcaaccttttttttttttttttttttttttaaaaaactttaatttaaacagttttggcaataacagttggggatttatgcttactttaagggaaaatcaggatggttttgaaaactaaggcgcccattttttggattccaatcctcatttaggagtgaacggggaggctgggaaccttatacgtggaaactaaagtcccagctttttctaagtaagtaataga

SEQ ID NO: 9376 - DNA, 483 bp, Homo sapiens
  misc_feature (1)...(483): n = A,T,C or G
aaatgagcctntatggaagntcgtcgcgaangccgnggaantcggctgctgccaagtgggcccctgccaggagtcctcacccctgtccattttgagcctgtttgtccctgcacccagatacagcaacatggtctgtacccagcagagtggtggcaccaccatggttacagcggatgccccgagactctgcttggtaaacgtggcatagcagaatgggaggctggaccctgaggaagggcccctctcctggcatctgtctcttgctacctaagcctgtgcctctccctaaagagctgcctccctgctgccgagccctggtctggccacgagccactactgccttccacaggcaccactgccttccgctgctgcccacaggtggtgccgccaatgggcagtgccctcaagccgaagcctcaatcccccatttgagccaggcctaatcctctaatagtgatgggtgggttgtcctcccataattgg

SEQ ID NO: 9377 - DNA, 541 bp, Homo sapiens
  misc_feature (1)...(541): n = A,T,C or G
gatcagattactagtccgcgtggtggaattcgggccaccttgtaagagacatcattactaccagaactgtggtgccaaattgctggtgtctctctttggagaaaccaaccagatacatctgctggagagcccaggtgggcacagagaagggtggagagagaatctgggaagagaaatggagaataagcagcacagtggtattcatttctgtaaattcctatgtagaaggctcagtgctagaaataaagttattctactagctgcaagttaagggcttctgttcgttctgctttcctgttagcataagtaaactccctttggaactacacaggtatgtctctccttcaacatgtgtgaagcagacattatattaaattacattattcatacctccctgtggtgttcttattgatgtggcgtaagtagcagctctgattcttccaataaatagtcagttgccctgcagtngnatggggngaccatgagaagatgacaacagcttaagatcatannnatgcctctgaccgcccctgttagatcg

SEQ ID NO: 9378 - DNA, 556 bp, Homo sapiens
  misc_feature (1)...(556): n = A,T,C or G
gtcgaaatcgaatnactactccagcgtggtggaattccgagcggccacgggtaggatagtataggaagtagaacgggaaggagggttagatagagaatgctgaatatgcagtacttgggagagagcctcaatattgggggaggggagagtgtacggaaaaggatccactgggtgaatcctccctctcagaaccaataaaatagaattgaccttttaaaaaaaaaaaaaaaaaaaaaaaaaaaaagggggcccgttaaaatcaaagggcccctttaaaccccgttattaaccctcaaggggccttttaattgccccccctttgggggttgccccccccccggggctttttttaccctggggggggcccccccccattgctttttttaaaaaaaagggaaaaattgctcccctttttcttaggggggggtttttcttatttggggnaaaaccacacccccccccncccacccacacccccaccccnctataacacaccctaatcattcctacctgttcaatttttctctaagccctagattgcggctctcccgcaccg

SEQ ID NO: 9379 - DNA, 471 bp, Homo sapiens
  misc_feature (1)...(471): n = A,T,C or G
aggcggtnnnnnnnnaatcgaacaacatcgatactgtgngantaacggaaaaatcctattgtttgtttttcctatatactcacttatagaaaagaatttacaatccataagcagaggatctggcttcccgtttttagaatgagagaatgaaaaaaacgcaccttggagaaaaattttaacgtttgagcaagctgttgcaagaggattttttaactatattgaaaaactgaagtatgaacaccacctgaaagaatcattgaagcaaatgaatgttggtgaagatttagaaaatgaagattttgacagtcgtaaatacaaatttttggatgatgatggatccatttctcctattgaggagtcaacagcagaggatgaggatgcaacacattttgaagataacgaatgtgatatcaaattggcaggggatagtttcatagttagttctgaattccctgtaagactgagtgttta

SEQ ID NO: 9380 - DNA, 478 bp, Homo sapiens
  misc_feature (1)...(478): n = A,T,C or G
agctccggngaagggnncctgagnnactgagaacntacgcagngncgnggaattctgccgcactgaggccagggacgagtgttcagtgggccacagtgaaccaaccaaaccaaccccgaatcatcgctctcgccatgtgcgtttctcttgttttttttgccagcccaatggtagtttctgaacctattgacattgttcaaaatggatcatgtgccatattttgttagatgacatctgagttttcagtaaaatgattatggaattaatcagcaaatgtagaagaatatattcaaagttaaaattcagtggcagcacagattatttttatcagagctgtaaagaaaacaactgtccttttctccccaccacccctcctgccccactttggcccagaaaccaaatgtgaacttcctgtctcccacctcagcactagtccatgccaggacaccagctgacaatttcttggttttactgtcan

SEQ ID NO: 9381 - DNA, 492 bp, Homo sapiens
  misc_feature (1)...(492): n = A,T,C or G
tctgagaccctgnnagnnggggactgagacattagtccagngcggnggaattctggacgccgggtgagtgagagagttggttggtgttgggccggaggaaagcgggaagactcatcggagcgtgtggatttgagccgccgcattttttaaccctagatctcgaaatgcatcgtgattcctgtccattggactgtaaggtttatgtaggcaatcttggaaacaatggcaacaagacggaattggaacgggcttttggctactatggaccactccgaagtgtgtgggttgctagaaacccacccggctttgcttttgttgaatttgaagatccccgagatgcagctgatgcagtccgagagctagatggaagaacactatgtggctgccgtgtaagagtggaactgtcgaatggtgaaaaaagaagtagaaatcgtggcccacctccctcttggggtcgtcgccctcgagatgattatcgtaggaggagtcctn

SEQ ID NO: 9382 - DNA, 495 bp, Homo sapiens
  misc_feature (1)...(495): n = A,T,C or G
cgccccccccccgnngnnnnnaatcgagacccctagatcgatgagcagtagaccagngngggggaagtcaactttggtacagcaggaagagccttgtgaggaagaagctgaaaaagcaacatgtgattctgactttgctgttgaaactttggagcttgaaactcaaggagaggaggtcaaagaagaaattcctcttgtagcatccgcttcagtcagtattgaacaattcactgaaaatgccgaggagtgtgctttaaatcagcagatgtttaacagtgacttggagaagaaaggggcagaaattattaaccctaaaacagcattgttaccatctgacagtgtgtttgcagaagaaaggaacctcaaaggaattctagaagaatctccatctgaagcagaagatttcatttctggaattacacagactatggtagaagctgtagctgaagtagaaaaaaatgaaactgtttcggaaatattgccatcaacttgtat

SEQ ID NO: 9383 - DNA, 494 bp, Homo sapiens
  misc_feature (1)...(494): n = A,T,C or G
gatgggaggggnnccatcgaaaccntnatgagatcataggaagngcggnggaattctaggaataagcaataatgtagactgataaacccttattttagtactaaagagggagccttgctatttcagtgggtataatttaaactttttaaagaaaatctgtacttttataaagatgtattttgtataacttaaataataatgctaaagtatactagggttttttttttcttgagaatgttactgcaatcatgttgtagtttgcacagacttttatgcataattcactttaaaaacataaaatatatggtctaatagttttttaaagcttttggactaaagtattccacaaatcttacctctttaggtcactgatggtcactccgattctgagtgccacattggtagactcctaaaatacagttgacaacttagccaattgcaactccagtgttgataattaaaatgaaatggtaaagcaccagactgtaaggttt

SEQ ID NO: 9384 - DNA, 483 bp, Homo sapiens
  misc_feature (1)...(483): n = A,T,C or G
ggggcaacncgccccccaaatgagaccctagttgatgagcagtaagccgngacaagagcgtttaaaaagttcgttgctttaattgcactggaggtgaagctagntacatactttccttaacttcccttctgcttttgctgctgaagaggccaaatactttcttggcatgaaaaagtattataaggcccctaatccttaggagttattagtaagagctgtctttaaagcactggcagcttttaaggtttttttttcttttgtcctacatagagcaccagaataatttcacatattactatatttttgcgtctgagatgtcagtagaaccttctgtccaccaaagaggaacatcttgaaggagttgggctgctttatttactctgcggagggagctgtactctctggctttactttgcctaatcactacccctttgctgtcgagccccgatatttaatgagtaaacaaactcatataaaaccagn

SEQ ID NO: 9385 - DNA, 485 bp, Homo sapiens
  misc_feature (1)...(485): n = A,T,C or G
cgccccccccgngannnaattgagaccataatcgtgagcgtagaccgngacgcggaactcgggtgaggcaggagactcaggcagggaggttgcagtgagccgacatggtatcaggacattccaacttcggctccgcatgagagggagaccgtggaaagagagggaaaccgtggggagagggagagggagagggagaggggagcgattctggtgtatcttagcttggatttctatcctgtttgggtttgctcagctgaatctataggtttgtgtataataccaaagtattttgtattagtggttacaacgcaaagttggatcgtgaagtcaattttgtggcttatgactagtattatgattggtttttaatagaatagaaaatgaaaatatatcccagaataacaaggataataattaattttttattttcataacatatatgtaggtgttttctgggatccaggatagtggtttgcagtcagaan

SEQ ID NO: 9386 - DNA, 487 bp, Homo sapiens
  misc_feature (1)...(487): n = A,T,C or G
gaactgatacccctcgaannnncaactgagattctctccagngcgnggaattctgtttataaaacacttgagaacttttttccttaatatcagaaagcaaaaaaataaaaccacaattgagatttgcctttcaaaccctcaggtttgcctctaaccaggtgtccctggtcaccatcagagtactggaatacgggaaccgaggagaccttggtccttttgtttttgttctggactcttgggagtggaaatgagaatgagtttattcctactggagcttagttccaatgcatttggctccagaaagaccccagtgccttttgacaatggccagggttttacctacttcctgccagtctttcccaaaggaaactcattccaaatacttcttttttcccctggagtccgagaaggaaaatggaattctggttcatactgtggtcccttgtaacctcaggtctttaatgtgatcactttcaaatttaaaagg

SEQ ID NO: 9387 - DNA, 486 bp, Homo sapiens
  misc_feature (1)...(486): n = A,T,C or G
gggatcgatgaaccctgcgcagngncaactgattatcctgtggaaaggcaannatagtcacatggtttaaaattcaaaagttacaaggggatataaatgtctccctcccaccttgtccccagaggtggctgtttcgatcagagccttgtttctagacgtgtgtgtgtgtatgtgtacgcatgtgtgtgtatgcacaagtagttttgggttctcttttcttggtggtgtacagaagggtagtcaaagcccgactcatgatccctaactcgagtcttttaatgggattgtgtcctaactgcaaaacccgcctcaccaactttgttataaactccccgggtttatagggacagtcatctactgtcccttcctaacagcatggtgcagaaacactccataaatgagtcttgtgttgaatcagattgaattaagtgagaaaggaatggcggtgaaaaatgtggctctagtcatcacatgggcctacgggtt

SEQ ID NO: 9388 - DNA, 498 bp, Homo sapiens
  misc_feature (1)...(498): n = A,T,C or G
naatcgtagaccantagtccagngnggngatagagctgcgtctccagcctcaagacagagccttcgacccttgatcatatctggagcccaagagacggngcccgctgctcgcacttctgtttggatctcagaagacgttcctctgcctacaattaagtctgaagcccacgagatcgagtctcctgtcccccggttctgccgggaaccctgaaaacgaagccccctgcccacaattaaatccagaagctacaagtttaaaaaaaaaaaaaaaaaaaaaaaaaaaaaaaaaaaaaaaaaaaaaaaaaaaaaaaaaaaaaaaaaaaaaaaaaaaaannngggggggcccctttataaaaggggccccttaaaaccccgggaaaaccccctggggggtttttttttggcccccccttttgggggggcccccccccccggtttttttttgggggggggggggcccccccccttttttttttttaaaaaaaggggggaagggcc

SEQ ID NO: 9389 - DNA, 481 bp, Homo sapiens
  misc_feature (1)...(481): n = A,T,C or G
tggcgcacncggcccccaatgagaccctagatggaggctgtaattcgncacacgtcctaaaggccaagcaaacccaccgggatggtggggggtcttggagccaagctcttaggttcctcttatttggggcagtaccagtccataccagctgcgatttgtgagtggacctgtggtaagaagaatagaaaaggctctcagagataaggttttttacatgtgtaacaatcccaagatttcctagattaaaatcttaattgattttgaaattggatttttatttagaatcaaaattaggacaagaacagataacttcttcagatacatttgtgtaactttacagaatgtcatcaagctttggggctctgtggggcacatgatttatccataaaggagatgcagtatgcttacttaaattaataaatttaaaatcttttaagtgtgtaaatagtagtgttggtcttacgtatttcaagtaaaaagt

SEQ ID NO: 9390 - DNA, 487 bp, Homo sapiens
  misc_feature (1)...(487): n = A,T,C or G
catcgattgcactacgccagngcggngcaattccagaaagtataatgcaaatattcacaaatccaaaatctagaacacttgtgatcccaagtattttggaaaagggatacttaatatgtatataagacatgtggattgttagtacatatgttaaaccaatgtgtaacttaacaagtattttgaataattagtgttgagggggatgcggaatccaccataatcagtgtttttaggatgtatggaggcttccagctcttctgattaatacagaattccttcatggactacacttgattttagttaaaaggctgagcagcgatagactcttcatggaaatagattttttacgagacatttaatggtgggaaagaaattttccaaaaggctacagaaaatagagagcctttgagtctagttttaaggtcctgttttactcagtccctgtttttcttgatcctagtcttagacccagaaagacatttctaga

SEQ ID NO: 9391 - DNA, 464 bp, Homo sapiens
  misc_feature (1)...(464): n = A,T,C or G
gcgtgcaaaaaaattaaaatgagaccntggtannactgagaccctagtccatgtggtggaattcagaccacacccaaggtgggggctgtggccatgtgtggccgtgatgtcgatgatactcgttttccctgatccgtggtgttgcagtccgttgtcaccagccttgtttctagtgtgtatatatgtcgcccccgtgatgcatatatacacaggtattaaatatatcgctctatataatattatatatgtgtgtggtatccaaggaatcacttttatgagggctaaagataaagaatttggccagaaaatgcagccatccttgtgtgattaggagggtttcaggggccactggactatttgcaaggtgacagggactggagccatggctcagaggtgattcgggcagccagggacaggagccaccctccccaggcccaactctgctagcttcccagaccaccccn

SEQ ID NO: 9392 - DNA, 469 bp, Homo sapiens
  misc_feature (1)...(469): n = A,T,C or G
cgagggggannnanaagtaagttgaaacccctnntannnattgtagaccatagtccatgtggtggaattcgacaatagaggaaaagtttatttttttctacacatacgctatggcttcccttctattattccatatctttcaactcctgccatactatttctttctctccaagtttttgttcttcctcagagttcccataaatggaaaggatacgcacttcattgaaataagaatttcatgttagccaagttttcaggatagccatgagtttcacttaattatctgagaacttagagcttactgtcctctacttactatccactgagacttaatgtgttcttggccatcacagaaactttactagctacttatgccattgtcaatggataactctctgaatccacattaataactttgtaattagcttagtcctcagctgtttttcagagataatccccagtcttcatg

SEQ ID NO: 9393 - DNA, 472 bp, Homo sapiens
  misc_feature (1)...(472): n = A,T,C or G
aaaaaagtagattnccntntcnannctggagatacctcttggagtgtgctggaattccccaacaggaggacaattcatgaacttcgcatcaaaagacaattctttatacaacagtgctaaaaatgggacttcttttcacattcttataaatatgaagctcacctgttgcttacaatttttttaattttgtattttccaagtgtgcatattgtacacttttttggggatatgcttagtaatgctacgtgtgatttttctggaggttgataactttgcttgcagtagattttctttaaaagaatgggcagttacatgcatacttcaaaagtattttcctgtaaaaaaaaaaaaaaaagttatatagggtttgttggctatcttaatttgggtggaattctttgaggtaaacacattttgaataatggtatcggacagctgctttgaatcttgtcccatcaaatattagatgtgg

SEQ ID NO: 9394 - DNA, 502 bp, Homo sapiens
  misc_feature (1)...(502): n = A,T,C or G
ngaggtctncaatgagaactgaggacgntncgnggaanccaatccattagaatgttgagaagtagacctttgacatttcagaaaaatgtatatctcagacacagccatatgtattgttatccctgagttggaagagcatcacagggcatagtttcacaaaagcttcaaaaaatatactaattgctggtaatatgtgaactaacagaaaaaaatagccatgttaaaataggagtgcctgacaattagctctattcatcttgtctcctagctgtaagcaccctagattcaaattatgcacctagaaaactaaattactatgtatgttataggcctttgaaatggatacatgaaaattagtgaaatcagaatgaacgtttcgcctgccaaagatatgtatttttataagtgatacaagggccccatgagctgcatggccacatctgtacaaaacaggccctcctttcatgaactggtctcgagagagcaaaggggccaactccct

SEQ ID NO: 9395 - DNA, 457 bp, Homo sapiens
  misc_feature (1)...(457): n = A,T,C or G
gcgcgcnnnnnnaattaaactgaacctattagngctggagaccctccaaaacaaacgccacaaacagttcatcatttggtgcttagtctttgtaagggctctctgtggtttgacttactccagctaccgttaaatgagggcaaatcaccttaaaacatgttcatttgattcataacaaggaaaattgggtctatgattttttgccaatcttagcctaaaagaaattgctttagcttctggtcagcactgattaaaatgtgaatagtgaagtggctatcctaaactggtttatctccacccacactatcatagatttcttaggtaaatacaattcttatctagtggtattctacttgtattcagaatactgtattaaaattttactatttcatttttgtattctgtgcttattttttttgctcacgcatgtatgcttagtataaatgtgtcacttcta

SEQ ID NO: 9396 - DNA, 480 bp, Homo sapiens
  misc_feature (1)...(480): n = A,T,C or G
gaaaacgaaanannnnnanagtnnggttcganacccctanntannaaattgagtaactctagtccagngtcgtggaattcactgtatcttcctggactacataagctgcaaagttaaaaactgcatttctcagattcccttgagctaggttccagacgtgatttattatcagtcaatcaaacacattcgcatgagttttgtatagggaacaatgttaagtcggaagaaaggcagaatgcaagacacggttctggagccagcagctttattggtagcatcctgactcaataggcagctttcctgataatagcaggaacatcagcctccttggtggcccactcattgtgtggctctggaaatcattcctggatattccacctagtctgtttctttagctttcccaacaactctgtgagccatgtaacattctgtaataaatttctttctgcttaaattagttaaaagcctcttttgttttct

SEQ ID NO: 9397 - DNA, 453 bp, Homo sapiens
  misc_feature (1)...(453): n = A,T,C or G
cggccttanccaggtaaactgctatctgtggaaanccaaggagccaagaaaataggttcaagatggaatatagtacatgcatataaggcagatgcacacatgctggttactttaagattgtgtgtgttgattagtcacaatgatagactataacatgagacaatacaaagttacatttttggaccatattaaaactgcaagaagacaggggtcttactgaagatcttttagaaaacttaaatcctgtcacaggatatttagacatgtgtagaatgtagctcaatttttaaaaagtaactgacctagagggtgaaagttgaaactgacacattttcaaattaagattatgcttattttgtacagaaaacaatgtttaaacacaagcagatctgttgtatgtaataagtaacacagagttttaaaacaaattaattatttagctttattgaagtg

SEQ ID NO: 9398 - DNA, 483 bp, Homo sapiens
  misc_feature (1)...(483): n = A,T,C or G
gctgacnacncgcgccccaatcgagaccctagatcgagagctgtaagcccacagaactagggagccttaggaagtgccaggttttcactgtcagatttgccaagtcacagaggcgcagccagccctgaagtgcctgtctggctgctgtggcattgtgtgggcatgtggccaggcagatggcatctcattactgtgctctcgccatggcccagtcttttcattctctggcagtgagggtttctgtgctgtcagacttcattgttattctgtgacttgctggaggttggcagtggcctttgtcaaacacactgagaagatggaagggccagcacttaagagcagaactgtacccttagagaaacggacagaggcgagtggcaaacttcagacggttccaatggtcttgcagtttgaaatgtgatgttctaccattggttttgagtacgtgaatacnttctgtcctactggttcccctaccctatt

SEQ ID NO: 9399 - DNA, 458 bp, Homo sapiens
  misc_feature (1)...(458): n = A,T,C or G
ntggcncttaaccctgaaanncctgcngngccatgacaaccggnggaantngntagtttaggttttccatgaatgtcttttaccaggtttaggaagttcagattgctgagattggatgttgaatgttgtcacttgctttttctatatctataaagctaaaaagatttgtagccttttggctgtatctttttgtttatttttgtttttagtagttactgaagggatccctactaggttactagtagggttaataatatgcatgcctgaccatttatagtccagagttaatattttaccagttggtgtatataagtctctttaccttctttttgtgttatggttgtatttataacatataatctacatacattgaaacatataatctgcatactattagtagtgtttttacattgactttctgtattcttacatattttaaagaacttaagagaacaaan

SEQ ID NO: 9400 - DNA, 458 bp, Homo sapiens
  misc_feature (1)...(458): n = A,T,C or G
cggactcaaatgagnccctgactgagaccattagaaagngcggnggaattccaaaactccgtctctaaataaataaataaatatatatatatatatttaagggctcccttctcaaatttaggatgtcacattgtggtgagcaagtttataccattcctggtttttgaacttttggatctcttagccttttatttctaactagaataggtgtttattttttctatccttattcctttacaaaatataagtatccaggaagattacatttctaattttaactgtttaactctttgtagctcatcaaacaacacaatgaagatattttagagtacaaaagaagaaatgggctggaataaacttttgaaacactaatgtagtatgctccgtatagtgattgtagctgttcctctggattcaccatctgttgagttgtaaatgtgagagaaaaagttatatgt

SEQ ID NO: 9401 - DNA, 452 bp, Homo sapiens
  misc_feature (1)...(452): n = A,T,C or G
ntttgaagtccactagcccagngcggnggaattccggtgctgggccacatgtcaagaggggcagcaacaccaccagccatctgcaccaggctgttgccaaggcaactcagcagccatttgatgtttctgcatttaatgccagttactcagattctggactctttgggatttatactatctcccaggccacagctgctggagatgttatcaaggctgcctataatcaagtaaaaacaatagctcaaggaaacctttccaacacagatgtccaagctgccaagtaagtctcagtattaactgtgttttatgtttttgttatttgaaagttgtattcttttcagattataacaatattacaatctatgctcataaggactgagaagtacagaaaagcgtaaaaagggaaacatacccatatcctaccacctaaagatataattgttaacattttg

SEQ ID NO: 9402 - DNA, 513 bp, Homo sapiens
  misc_feature (1)...(513): n = A,T,C or G
gtcgcttcagcgttctcgggtgctacgctgctgcagctgtcgcctcttgcaggcgcaccaggtaaaaaagagtgtcaagtggacatgcaaagcttgtggagagaagcagtcctttttgcgggtgagtcctacaaaacagaaagcaagtggggcgcaggcctgcagcgagcccttccagggagtcccagcatgccacagctgggatcatcctctctcaaacagagttccccagacacggagctcctgcttccgagcttcctgttccttcaggaagtgaaatggatggagcagaatctggaaagactgttcagtcagattctctgctccaagtccatagaatctcattccaagccaactggaagagctgagtctcaattataaattcctaggagaagcaacctggntgcccaggctgactcggatgcccacctctgtccagtcaactgggatgggtctcagaaggaggggcttgctaccangcttatggtgaaaggtttgtgcttgatgaaaccn

SEQ ID NO: 9403 - DNA, 463 bp, Homo sapiens
  misc_feature (1)...(463): n = A,T,C or G
gagctctcnagggnncnattgaattcatnaccctagtccgngcggtggaattcgttgcagtgagccagatcgtgcattgcactccagcctggccgacggggtgagactccatctcaaaaaagagaaagtaccagattgtacttttaaatctgtctagcgtattgagaattttagtgggagctgttgatttatttctcagggcatacatgtgccaatctgtctcattgttggctctctctttttttttttttttttgaaacagtttccttgggccccccaggagggcaggggcacaatttttgttcgttggggcctttgcctccaaaattaaagcaatttgggggccttaccctccggggggggggggattaaagggcccgtcccactatcccctgttaaaatttgttttttaagaaaaaacagggttttgccttattgcccaggcgtggcgaaaggttttttt

SEQ ID NO: 9404 - DNA, 471 bp, Homo sapiens
ccccatgagaccatatccatttgagggcattccattctcactgcaactttggacaacactcttaaactatgggattatagcagaggcaggtgcctgaaaacatacactggtcataagaatgagaaatattgcatatttgccaatttttcagttactggtggaaagtggattgtgtctggttccgaggataacctggtttacatttggaaccttcagactaaagagattgtgcagaaattacaaggccatacagatgttgtgatctcagcagcttgtcatcctacagaaaacctcatcgcatcagcagcattagaaaatgacaaaacaattaaactgtggatgagtaaccactaatccctttgaaaatcaagtagtagagccaagttggccaaaaaacttggatatttaaaaagacggtttcttttaattttggcagtttggtattttaaaaattgtctattgctaaatttt

SEQ ID NO: 9405 - DNA, 481 bp, Homo sapiens
  misc_feature (1)...(481): n = A,T,C or G
gggggggngnnnnnnnnncctgtagaccctagtcactgtggtggaattcccggtttagtcatccaacaagaagaaatatgaaattccagcaataagaaatgaacaaaagattggagctgaagacctaaagtgcttgctttttgcccgttgaccagataaatagaactatctgcattatctatgcagcatggggtttttattatttttacctaaagacgtctctttttggtaataacaaacgtgttttttaaaaaagcctggtttttctcaatacgcctttaaaggtttttaaattgtttcatatctggtcaagttgagatttttaagaacttcatttttaatttgtaataaaagtttacaacttgattttttcaaaaaagtcaacaaactgcaagcacctgttaataaaggtcttaaatantnnnanaaaaaaaaaaaaaaaaaaaaaaaaaaaaaaaaaaaaaaaaggggccccccggaa

SEQ ID NO: 9406 - DNA, 486 bp, Homo sapiens
  misc_feature (1)...(486): n = A,T,C or G
tgcgtcgcccagccgcccaatcgagaccctattcgagagcactaggccgngncgnggaattcgaagtactgttgtactggaagtttagcagcataatgtttttaacaactttaaatctagattattaaggattatggtttagagtccgatcttcaggcctcttttgaaatgacctcttcgtggttggtcttttaggccagtttattgtaatgtaaactcttgaaacaaagatctgggtttttattaatcatcacaaaccccatccccacaaacacagttgtgtacagcacctagcacagaatcctacataagaaagtgcccctacctaagtgcccctcttaccttgtgcttccatagcatgattgtgcctacctttatggtatttataacttaccagttcatttgtctgttttatctactaaacttagtttcttgagtaaaactctgccttttatctctgtagccttagtacatagcaccaggcct

SEQ ID NO: 9407 - DNA, 481 bp, Homo sapiens
  misc_feature (1)...(481): n = A,T,C or G
gcctcgggattgagncccttnnnnatcgagatcactagtcagtgtggtggaattccatgagactgtgcatttctaataagctcctgggtgacctgtatggtgatgatcctcggacactccgagcgacaagagcttagatggcattctttgcctctgctgtgcttagtctatggcacactaatctgtacacacacatctctgtcccctcaatcctccccatgagcctgcattcccctggcagccctggcaaggtacacgtctgtacaatgctatctatgacccccgtgttctcttaaaggcagagggagaaacactccatcttggagccacagccttgcactttgtgcttcacgagggctgcggcacattggccctgggtccatcaggaaaacaaaaggagctctcttcagagaccacccaactaccatgcagccgagccttcctgctgaagcaaccagactgccttatggtacagggcaag

SEQ ID NO: 9408 - DNA, 478 bp, Homo sapiens
  misc_feature (1)...(478): n = A,T,C or G
ggagtgccggnntgnnagccaactgatgatagcacgnctgaggacntcggcgccgccgccttccgcaggccgtttccaccgaggaaaaggaatcgtatcgtatgtccgctatccagaacctccactctttcgacccctttgctgatgcaagtaagggtgatgacctgcttcctgctggcactgaggattatatccatataagaattcaacagagaaacggcaggaagacccttactactgtccaagggatcgctgatgattacgataaaaagaaactagtgaaggcgtttaagaaaaagtttgcctgcaatggtactgtaattgagcatccggaatatggagaagtaattcagctacagggtgaccaacgcaagaacatatgccagttcttcgtagagattggactggctaaggacgatcagctgaaggttcatgggttttaagtgcttgtggctcactgaagcttaagtgaggattt

SEQ ID NO: 9409 - DNA, 492 bp, Homo sapiens
  misc_feature (1)...(492): n = A,T,C or G
tatgagaccctgnnanngggnaatcgagacattagtccangcggnggaattctcaatttgtgacccaggaaataaccaaccttatgtatgttatgacaccaagttttcacctggtaaatggtttgaaatccatgcagggtcaaaggactgttccctcttaaaccaaaccaaggtccctcccttttacctagggcctatttctctatattttgatgcttgtcaggtagcatacctagactcacccgtctgtcgtaacctacctttaaaaagagactataaaaatgactacaaatatgtatgcaagtcaccttgtccccctgggaccccagaaaaagattgtcagtattgcatatcgtggcaccctagcacacaacaaaggccaattatgcttaccaaaatgatggtaaaaccagattgtaaaacaaaaacctgtgatcctataaatttcaccattctaaggccaaacctacccatgtggactgcaggttaccc

SEQ ID NO: 9410 - DNA, 486 bp, Homo sapiens
  misc_feature (1)...(486): n = A,T,C or G
aatgacgaccgcttgannnnncattgatgaccatcgcccangcggnggaattcgatcaattttcctcatgactagaactaaaacagtaaatttggacaatattaagcctcaaataatcatctccaaactccttctaacactttttaaatcagattggaagacatggacaaatcaggttcatgtgttgcatctttatgtcctttgccaatatccaagatcatcacatatggtagatattcacatggagtttcaaattcagaatagattaccattaccttcctgcccttacacatcctactccttatttaaaagttctatttgtgacttttcatttcctgaaagtttaaaaatacaatttgagaatgtttataatacattctctcctgtcttttcacggntacgtctgttattgctgaaatacaccacattttctttgttctggtcaaggttaactcaatatctgtgtgaaagagaactactaacacg

SEQ ID NO: 9411 - DNA, 484 bp, Homo sapiens
  misc_feature (1)...(484): n = A,T,C or G
attgataacccttnnaanttttgagaccatgtccatgtggtggaattcggataaggaagatgggtgtgtgtctgaaaaggactgtttgcaaggagaataaaggggagaaaatagattcctcacagggtgaaagtctttcccatctgcaaaaataacggaaaagtcacccctgacctttcttttatcacattcacaactctacttcttaataagttcctccagataggggtctcaatcaagttcattgcctttattcagtcttcatcagtctgcaccccaatctcacattgaaactgtttttaatcattttaccagcaatttccatgtcccccaatttagggccaatttacagaccttagtttgcctaaaattgcagtaacaggcccaccattcatcctgatggcaaaagcagaatccttagtatcatcttttccttctctctttttccaattcccacattcaataagttcagaaatcctagtaa

SEQ ID NO: 9412 - DNA, 536 bp, Homo sapiens
  misc_feature (1)...(536): n = A,T,C or G
gttcgattacagtccgagtggngcaattcggagaaatgcctgcagctnttctgagtgtctttcctctttccccatctctcagccacttttgtgctagctctaagcacataagtgctttcttgggagaaacagtgctctcccttaatctgggttgcacagatccccagtggaaaggtgagtcgcagagggagactggatgctcttctctcgtactggagtttcattcccttttatgaaccaaatgctatcacagaggctgctttcccacctccccctccacagggtctggagtgttcttctctattcctgtgaattcctatttttcttcttgaattgaagctcacaaagnttatctttatgcttatttttctacttccaagtggctgaggcacactganagcccctaatccatcattctangaaaaaaaggatggtttnataaaagaatgtcatatanatatatataattaaccaaacatatttgttgacatgagtaggtgatctttgatcatattaatttaaattgtaataaatan

SEQ ID NO: 9413 - DNA, 466 bp, Homo sapiens
  misc_feature (1)...(466): n = A,T,C or G
catcgacatcgatggcatacccagngngcnggaantcagctccttgggttgcacagggttgaagaccagacccaagaaatggggccttgaccagctcatcaaactgagaatggcctagatttcagcacactttcaccaggatttgtcaaatgaaggaagattccaagcgcaaaataccctagatttcaaccagtaaaagcttgtctgaaaacttccaagatcgggttgtacaacttgacatttgaggaaacgctacttcagtagatggtgctgtggcattgttttctgaacaactgaaggaggagactccagagaagggtacctgctggagacctgtgtggtttgtggggtgggtttcttatatcactgaatctaaagtgggtgcctttcagaatgtgctttactaataatgcgctactctgcttttaattatacttctaataatttttcccacgagcctaattaa

SEQ ID NO: 9414 - DNA, 481 bp, Homo sapiens
  misc_feature (1)...(481): n = A,T,C or G
gaggagggnnnnnnnnnnatcgtagacctgagtcactgtggtggaattcccggaagctccagcctgaaccatgtttttcacttgtggcccaaatgaggccatggtggtctccggtaagtactgttgttcccttcccagccagtgaccccagaacccctgtgagtctggcctctgccccttctccctctccctaccaacttcccagcgccagacttctgccccttgatggccacgaactgcccagtttgattcccaccattccaaggcccagactgcttcccctccagctcccagattctctcctgtgggttgctgtcccctcacccccgccagttcctcagtcttccacattcaagctctgccaccgttcctcactgccccacaccttgcagggttctgccgaagccccccagtcatggtggctggagggcgtgtctttgtcctgccctgcatccaacagatccagaggatctctctcaac

SEQ ID NO: 9415 - DNA, 470 bp, Homo sapiens
  misc_feature (1)...(470): n = A,T,C or G
gggtgccnnncctgagnnacctgagatcctaggacangcggnggaattcctcacaaattgggttctagccaaggctgcctctccacccgtctcaaacactccaaaacacgtgtcccctcggggccttcgccctactggtccttctctggggtcacatcccccaggcaacctcagatctgttaaatgtgtccgccactccggaggccggcatttgggacccaaatccaaaggcacccagcagcaggctgcggccattgactgagcatgtactgactaagcaggcatttgccgattgcctgctgggtaccaggcactgttctaagcactggattttaaacagcgcggtcagcgacggcctcacctaggaagtggtatctgagcggagaagcgaggtatagaagcgagggggtgagccctgtgggtgtctggggaaaggtgggcctggcagaagacatgcctcatgccaaggc

SEQ ID NO: 9416 - DNA, 412 bp, Homo sapiens
acagacctgagcaaagccttcctcagcagagattccagctctcctctgcctttcaacagcagcagcaacagatacaacagttgcgattcttgcagcatcaaatggctatggcagcagcagcagcacaaacagctcagctacatcatcatcggcatacaggcagccagtcaaaaagtaaaatgaagagaggcatgccaaccactccaaaattttgagtcttgcattactttttgttccttttttaaaaacacaagagcactgaatcaaaagaattgagtttctactttttgttttttttaatgtgtcagtattttacattgctagatgtacaaactttatacagaagcacaaccttatcatttttaaataaaaacagggaaatggtttaacaaactagggttggtttgcctaa

SEQ ID NO: 9417 - DNA, 450 bp, Homo sapiens
  misc_feature (1)...(450): n = A,T,C or G
nctggaagacctctggacagcccgttgaattccctgacccttcccatctaccttacaaagaccatcgttttctctgcttccaaagttccccctcactctccccactcctaacagtcttggttgaaaaggctcccccaccaccaccgagaggaatggggaggagccctgtttgacccagttcatcttctagcttggaagcccttgggcaagacagctccccttctctgggcgtcactttcctcatctgtacagtaagtgtccatgtatgcaaaaggggtaattcggtttgaatttccccgttttagtttagaagcctagtctgtttgttcccctccaccgctctccctctcattcctgatgagccctctcattactcctttgcttgcccagctatggccccctctcattcacaaagtgccccctccatgtgcctggacccttaagatatcc

SEQ ID NO: 9418 - DNA, 470 bp, Homo sapiens
cattgagacccctggccagttgagggcattctgcccattccccagcctctcttcctatcccatcccatcccatcccatcccatcccatcccgctcttttcctacttttccttccctcaaagcttccattccacatccggaggagaagaaggaaatgaatttctctacagatgtcccattttcagactgctttaaaaaaaatccttctaatctgctatgcttgaatgccacgcggtacaaaggaaaaagtatcatggaaatattatgcaaattcccagatttgaagacaaaaatactctaattctaaccagagcaagcttttttattttttatacaggggaatattttattcaaggtaaaattctaaataaaatataattgttttttatcttttctacagcaaatttataattttaagattccttttcttgtttatcagcagttgttattacatccttgtggcacattttt

SEQ ID NO: 9419 - DNA, 498 bp, Homo sapiens
  misc_feature (1)...(498): n = A,T,C or G
nttcgagatccctagtccagtgtggaggaactccttgcctgggagaggggaagcagatctgaggacatctctgtgccaggccagaaaccgcccacctgcagttccttctccgggatggacgtggggcccagctccctgccccaccttgggctgaagctgctgctgctcctgctgctgctgcccctcaggggccaagccaacacaggctgctacgggatcccagggatgcccggcctgcccggggcaccagggaaggatgggtacgacggactgccggggcccaagggggagccaggaatcccagccattcccgggatccgaggacccaaagggcagaagggagaacccggcttacccggccatcctgggaaaaatggccccatgggaccccctgggatgccaggggtgcccggccccatgggcatccctggagagccaggtgaggagggcagatacaagcagaaattccagtcagtgttcacgggtcactcgcagacn

SEQ ID NO: 9420 - DNA, 476 bp, Homo sapiens
  misc_feature (1)...(476): n = A,T,C or G
cgcggcgcnnnnntttgannaatcgagatcactaggccgtgcggtggaattcctatgcattaccattgttaatactgctatgatatactcatagaaatcaaagccatcagatcacattgaattagtgatatctgacactttagctcctcagaatcctacaatttctaaatttctgctgttcctagcaggagagcatcatactccttcagtttttgataaacagctcaatcatacctgtcttgcataaaaactgtttaactggcctaatttaattaccaaacaggttgcaactggtctatcttggccttttaagttaaaaaacgtcattattaggggataatatagtactgcctttaatttttaatgcatatatgttacagatttggttctccaagaaacactgaggtgcagtttagcagggggtctatgaaggcacacccttcgatcaacacctgagaaaggaaacaggactgagn

SEQ ID NO: 9421 - DNA, 444 bp, Homo sapiens
  misc_feature (1)...(444): n = A,T,C or G
gtggtttttaaccctcgaccattcagatagcctggaaatcacncagagggcccctccggcctcgccatgaggctcttcctgtcgctcccggtcctggtggtggttctgtcgatcgtcttggaaggcccagccccagcccaggggaccccagacgtctccagtgccttggataagctgaaggagtttggaaacacactggaggacaaggctcgggaactcatcagccgcatcaaacagagtgaactttctgccaagatgcgggagtggttttcagagacatttcagaaagtgaaggagaaactcaagattgactcatgaggacctgaagggtgacatcccaggaggggcctctgaaatttcccacaccccagcgcctgtgctgaggactccctccatgtggccccaggtgccaccaataaaaatcctacagaaaattcaaaaaaa

SEQ ID NO: 9422 - DNA, 462 bp, Homo sapiens
  misc_feature (1)...(462): n = A,T,C or G
cattgacgccccctttgaagnacccttagtccagngcggnggaattccaggcacacaccaccacgcccagctaatttttgtatttttagtattggcggggtttcaccatgctggtcaggatgttctccaactcctgacttcatgatccacccacctcggcctcccaaagtgctgagattacagacgtgagccactgcgtcctgcctaaaatgaattttctagatgattgaataacagtagtcctttgatagaagataatgacttggtttatggccttaatatactacttaattacttaagatgtttattaatagaatgataaatgtacagagtaacctataagcatgacatacttttgctttcagtagtttcatgtaaagaaaaaaacttgaaaatagtaatacctgagtacccatgggaataatagacactggggaggtagggtggggagcgggagcaaga

SEQ ID NO: 9423 - DNA, 451 bp, Homo sapiens
  misc_feature (1)...(451): n = A,T,C or G
ntggccttaacctagtaccctgatntctgggaaancngaagngcagaacaatcaccaatctggaaggtagcccttccagatcccctcgtttgccaaggtctcctcgtttgggccaccgaagaacaagtagtgggggaggtggaggaacaggcaagactctgtctatggagaatatccagtccctcaatgcagcctatgctacgtctggacccatgtatctgagtgatcatgaaggggtggcttcaacaacctacccaaagggcactatgactctgggaagggctacaaatcgagctgtatatggaggccgtgtcacagccatggggagtagtcccaatattgcttctgctggactttcccacacagatgtcctttcatacacagatcaacatggtgggctgactggctcatcccatcatcaccaccaccaggtcccctccatgttgaggcn

SEQ ID NO: 9424 - DNA, 456 bp, Homo sapiens
attgtagaccatttgtccagcgcggtggaattctaggaaatgagagttggcacacaacttctcattttgaatagagtttgtgtgtacctctccatatttaatttatatgataaaataggtggggagagtctgaaccttaactgtcatgttttgttgttcatctgtggccacaataaagtttacttgtaaaattttagaggccattactccaattatgttgcacgtacactcattgtacaggcgtggagactcattgtatgtataagaatattctgacagtgagtgacccggagtctctggtgtaccctcttaccagtcagctgcctgcgagcagtcattttttcctaaaggtttacaagtatttagaactcttcagttcacggcaaaatgttcatgaagttattcctcttaaacatggttacgaagctgatgacgttattgattttgtctggatta

SEQ ID NO: 9425 - DNA, 470 bp, Homo sapiens
  misc_feature (1)...(470): n = A,T,C or G
ccccactgatagccgtcgnnnnaactgatgacactagtccgngcggtggaattcagtgaagaaggcattgaagatgactattttttggagaggcctgatgcccgaatttcagtttggcacttacagcgaatctgagaggaaaaccgaggagtacgatactcaggccatgaagtacttgtcatacctgctgtaccctctctgtgtcgggggtgctgtctattcactcctgaatatcaaatataagagctggtactcctggttaatcaacagcttcgtcaacggggtctatgcctttggtttcctcttcatgctgccccagctctttgtgaactacaagttgaagtcagtggcacatctgccctggaaggccttcacctacaaggctttcaacaccttcattgatgacgtctttgccttcatcatcaccatgcccacgtctcaccggctggcctgcttccgggacgacgtgg

SEQ ID NO: 9426 - DNA, 473 bp, Homo sapiens
  misc_feature (1)...(473): n = A,T,C or G
gaagtccnnnnaatcgagacctcgataaccgtcgaggaanccgngggtagaagagaatgttccttcttctgtgacagatgtgtaagtttttgaatgattaccacaagaatcctatttcaaagttagtactactttgttattattttaaatgagcaagttatactcatgaaaatacaagatactgaaaaataattaaaagaataggaataatccgcaaacaaaattaattgggtttattcattcagatgacatttctgcttagaaagatttagctatgtagtatatcttaaaatgaatgggatactccttttgaaatttttagttcctttccagggctataattttaatgaaacattggtcctgttgcattgcaaaatacgttttttttctatacaatttctgtaactgttgcttattggatttgctgtttatttttcctaaaagggccattaataaaatgcaaatcttagata

SEQ ID NO: 9427 - DNA, 495 bp, Homo sapiens
  misc_feature (1)...(495): n = A,T,C or G
nattgagactcgatagcactagtccagngcggtggaattcgctcttaacacagactgagcctcacaaaggtttcagatggaaaagcatggcactgactcatctcatgcttaacaagaaataatgcacagaccacagcacaaaagccctttatgttgtgtgaaagtctatgccggagcaactgctggcacctcatgtactgtgatagagagtgcatgtgtgtgtgtgagcatgagtgtgagcacgcacacaaatgtgagctgggagggggaggagctcacaccttccacagtcgccacctcagtcttagctagcaacatggagaaatgccataagtcaagaggaagctgcaccaaaacaactgtgatcaccacatcgagctgcgctctctggttagtaaagctactgggactgaaaaacacacacgatcgcgcccttcttgtattttaatcagagcagaatatttatataataattgtgtcatatgaataaataat

SEQ ID NO: 9428 - DNA, 446 bp, Homo sapiens
  misc_feature (1)...(446): n = A,T,C or G
ggacacnaatcgtagacactgtctgtgtggcggaattcgntttgaggcggatgcaggcgaggcccttaggtccgtatttaatgtttgctttgtagaaaaagtcgctggagtcgatcaactctaggctccaactcgttatgaaaagtgggaagtacgtcctggggtacaagcagactctgaagatgatcagacaaggcaaagcgaaattggtcattctcgctaacaactgcccagctttgaggtaatcgaagagactgaacgggcttcgcctaccgcgaattcatcgtgaacgaatatacaggagtgtaaacttgtaatctgagtaccatgaactcgaacacttgcaggataattacggtagcgattgtggtgtttggcccttcattcccgtctccccgacccacccccaaatcgtgtgctccccttctgtgagcttattattggag

SEQ ID NO: 9429 - DNA, 461 bp, Homo sapiens
  misc_feature (1)...(461): n = A,T,C or G
cttcgagnaccaattgaagacccttagtccagtgcggtggaattccaaggagcaagacctctgtccgccctttggcccggcctctgctctgactcctttttttacataagaaccaatctgtgtttcacattgggctaagtggattccttatccctttgttatatatattttttgcaacttggatttccagtttgtttacagagtagtcttaggtagtagcaaaagagccaaagaagagatttgtattgctgagctcaaagccaagcagaggccggcagtggaggctgagcagggactctccaggcttctctgcccataaacacccgggtcccaggccctccttcctttccctttggtgctccctcctccccacgtaccattgcgcgtgcagctggagcagaataccctcatttttaggaatctagtgatgcctcttgcctcagggaaacgtttctttgatg

SEQ ID NO: 9430 - DNA, 458 bp, Homo sapiens
  misc_feature (1)...(458): n = A,T,C or G
ngtcgtgcttaanccagcganccatgnaggtccggcagaanccnnaanngtgantattataaaactgctgatgaaaaaaatgcatgtctttgaatcaataaacttgggtgaatatttgtatcttttagtggaaaaacatggccagcttctacctcagtaactgtgaactgaaatttcagtaaattatctaaagtatttctgttgttaggtacctctttggcaggagttaatattacatcatcaaagaattatagcaaagagatagaatctgaattttttaaaactgtgagtaggaatgaagatgtttttatttgcagaataccacaaataaccaactcttccggcttttaagtccaatcttttaaaaaatctaccacttcgaaacaaacatagatgtatcattttttaaaatagcaaaatatagcaagcattatgtcacataatattccctgctattn

SEQ ID NO: 9431 - DNA, 448 bp, Homo sapiens
  misc_feature (1)...(448): n = A,T,C or G
ggggggtttgagaccttnnnancgtagaccctagtccgtgtggtggaattcgttttgaggcggttgcaggcgaggcccttaggtccgtatttaatgtttgctttgtagaaaaagtcgctggagtcgatcaactctaggctccaactcgttatgaaaagtgggaagtacgtcctggggtacaagcagactctgaagatgatcagacaaggcaaagcgaaattggtcattctcgctaacaactgcccagctttgaggtaatcgaagagactgaacgggcttcgcctaccgcgaattcatcgtgaacgaatatacaggagtgtaaacttgtaatctgagtaccatgaactcgaacacttgcaggataattacggtagcgattgtggtgtttggcccttcatttccgtctccccgacccacccccaaatcgtgtgctccccttctgtgagcn

SEQ ID NO: 9432 - DNA, 445 bp, Homo sapiens
  misc_feature (1)...(445): n = A,T,C or G
ggccngntttggtagacactagnatgtgtggcggaattcggacatttagggtcccccctgtgaattagaaagttgcttggctggagaactgacaacactacttactgatagaccaaaaaactacaccagtaggttgattcaatcaagatgtatgtagacctaaaactacaccaataggctgattcaatcaagatctgtgctcgcagtgggctgattcaatcaagatgtatgtttgctatgttctaagtccaccttctatcccattcatgttagatcgttgaaaccctgtatccctctgaaacactggaagagctagtaaattgtaaatgaagtaatactgtgttcctcttgactgttatttttcttagtagggggcctttggaaggcactgtgaatttgctattttgatgtagtgttacaagatggaaaattgattcctctgact

SEQ ID NO: 9433 - DNA, 416 bp, Homo sapiens
agataaatgagatgaaaatactttgaaatcagatttatatataattaaaatatttatgttgaaaaatcataatgcttaagacagtaacattttcacttatggctcaactcatacgatccacttaaagtagaaatacaggaacaagttagcataattttcaaaccatttatctcattttaaaatcaacaacaaatataccaagattgaaccaagcttattcaaaagcaaccactgctactccgattctgagacttagcatctggaatgttaaaagatagacagcaccacaccctaagggctttctccgcaatcccccaagataaatccaatcatctcaattttgctttccttcacggaaagatctggatttgtggtcatcctccagcagctgcaggaggttgctgtttgagttactc

SEQ ID NO: 9434 - DNA, 548 bp, Homo sapiens
  misc_feature (1)...(548): n = A,T,C or G
gttgaattcgacactatccgcgggtggaatccgacccccccacagacggattgctgtacttgtgttccagtgagatgctatttccacggccggtggtacgcagacggggctgtgttcagtgggggtggtgacgagtgtaccacctgtgtttgccagaatggggaggtggagtgctccttcatgccctgccctgagctggcctgcccccgagaagagtggcggctgggccctgggcagtgttgcttcacctgccaggagcccacaccctcgacaggctgctctcttgacgacaacggggttgagtttccgattggacagatctggtcgcctggtgacccctgtgagttatgcatctgccaggtgaatgacaacctgctcgccttcagctgctntacctggctgccccgcctcacccagaggagaacagcgtnctggcccctccagaggctggcctcangctggccgcagtcttccctcgggtgttgtcaagntccactttcacaaaaaagggtggacccgagttattctgctctcaatagatgtggaag

SEQ ID NO: 9435 - DNA, 454 bp, Homo sapiens
  misc_feature (1)...(454): n = A,T,C or G
ccgagtctgcagctccacactttaaatcatactcgaatgcaggacaagtcctaaatatttgccccttcccttgcagtaatttattttctgtatggactgtccctcccccagaggcttccccaccctccattgcctggcccaggtgagcagcttggcaggtctccaagtggaacccggtccagacagggctgcctcgacttcacctttccccctaacttcctccaagggatgctgccccttctcagccccctgcgtgtgtatactggtgggaggcatagaggatggatgttctagaaatgagtaagacacagtgcccacccccaagttaggatgaaaaatgttccagaggtttttaagaaattggattaagctgggtccctaacttcaagaaattcccattatgctccttctcacctttcttttttgctaattatggaaaatagggcccatttcn

SEQ ID NO: 9436 - DNA, 457 bp, Homo sapiens
  misc_feature (1)...(457): n = A,T,C or G
nttgagctcgacgaccctagtccatgcggtggaattcagcaaaaccgcacctcactctgcacctttggatccctctcagcctgaggttagcacagccaatgtcctcaccagcgtctgccaaagcccatggagaaggccagcaggagcatatcactgtgacttacaacccttctctagtctgctacaatggaatcttaaacaagaaaattttatattttgacttgcatcattgagaaaaacactgccaacctgatcgtggttcctttgaagaatcactgcagcaggtgcgagagaggactcatggagcttgcagatgagctagcccagacagggtctcaccatgttgcccaggctggagtgcagtggcacaatcacagctcactgcagcctcgacctcctgggcttgagcgatcttgctgcctcagcctcctgagtaactgggactacatgagtagct

SEQ ID NO: 9437 - DNA, 395 bp, Homo sapiens
ggcccgaggtcatgcttgcttccacctgcaggtgcatttggtcctttccatggccaggaagccctgtgggctgcactttttatgcttgcagtaacaagagactccagagtcctcaccggtgcagagttggcacatattaattaactaaaattctaatgatcttgctaccagcaataaatcaagtaggccaagtgaaactgggctttaaaaaggatggatttcaaatacactgtgcccactagaagcttcgaagggcctcgtccctctgctacagccctgggaggagccaggatccttgttggtctagctaaatactgttaggggagtgtgccccatctcatcatttcgaagatagcagagtcatagttgggcacccagtgattgggttcaaaaat

SEQ ID NO: 9438 - DNA, 462 bp, Homo sapiens
  misc_feature (1)...(462): n = A,T,C or G
natagatagcgctcgttagnccgngcggnggaattcttagggcgattctgtacattaataagatagataaaagttaaaaactaagagataattaattataggacatcaaaacaggacatgtgtatgtgtgtgggtgtgtacatatctaaaattccagactggacatattccaagtgttcaaaagatgcatgtggctgagtggtgactcactcctgtaatctctgtgctttgggaagccaatgggagaagtgcttgaggcaagaagttcaagatcagcctggacaacatagtgagaccccatctttacaaaaaatttaaaaagttagctgggcatggtggtgtgcacatgtaataccagctacttgggaggctgacgcaggaggagtgcttgagcccagaaatttgaggttatagtgagctatgatcacaccactgccctccagcctgggtgacagagtgagn

SEQ ID NO: 9439 - DNA, 460 bp, Homo sapiens
  misc_feature (1)...(460): n = A,T,C or G
cactgatgcatacgtagngcggngcaanncctggggaacacagccagacatcctgatggggaggcagagccaggaagctaagccatgtcctagctgcgtccaacccagccccccacctcgggtccctgaccccagctcgatgccccatcaccgcctctccctggctcccaagggtgcaggtgggcgcaaggcccggcccccatcacatgttcccttggcctcagagctgcccctgctctcccaccacagccacccagaggcaccccatgaagcttttttctcgttcactcccaaacccaagtgtccaaggctccagtcctaggagaacagtccctgggtcagcagccaggaggcggtccataagaatggggacagtgggctctgccagggctgccgcacctgtccagacacacatgttctgttcctcctcctcatgcatttccagcctttcaaccctccc

SEQ ID NO: 9440 - DNA, 460 bp, Homo sapiens
catcgacgacccattgaagatcctctagtccatgcggtggaattctttagattttcccagattattactaatgactttgttcactattttattttgcattgtcaatcttggttatggattcagttttcttcataacacacatttttttcataattatttgtcagaattattagtgggacactctttgttggaaaatgcctttttttaccctcattcttgagttataatttagctgtttctctcaacattttggatagattgggcttctgttttctgtcttttaaaaagacttctctttgatgttttgcaatttcttatgatgtgttgaaatgtggatttatttttatttaccctacttagggcatgtgcttcctgaaggcgagttctatgtgtttcatctattctagaaaatttatagctattatcttttctaatgttgccttctcacttttctctctgt

SEQ ID NO: 9441 - DNA, 453 bp, Homo sapiens
attgtagaccattgagagcgcgtggaattccaagagccgggccggattttttcagcttgtcctatggtagtcacttgtcagccttagtttactggcctggtccttttgtctccactgtaagtactgaagccttctggtgtagttgtatcaccttaatgtccagcatttaactaggaaaggagactacaatgaagagttggtggccaattaagaaaaataatagactacatcataaatcatttcaggacttgagtggccgcagatcactgtccctgatagcatgtttcaaccttggtatacattttttttaagatgcatatttactgtgtgtgcttttgctttctaatccatctattgactattggccacaatttatataatgcacatgcaattaattgaaacctgtgtcatggcattggatatctctgattcatttcttattataatagtctg

SEQ ID NO: 9442 - DNA, 486 bp, Homo sapiens
  misc_feature (1)...(486): n = A,T,C or G
nactgagaccatggcagnngcgnggattgacttgcatcaagtaaaacgctgaacaaactgaaaaatcaataattcttctcagatccataagagaagtgagattacagggcaaactactaccttcagcatcaccccgcacccccaaccccactaaatagaaagacaggagaatacagagaatcataacacagacgcagaaacctccttgagagagccagggtagataaacatgaactgtaattgatgaattcctggaggatcactgtggatgacctgaaggattaaaaactctagagggactcactcaaaggagggcccaagcttttgtgaatnttttttttttttttttttttttggccccccggagccttaaaggggtccaagggggaaatttaaggaaaatccctttttttttgggccccaagggggaaaaggaacctttttgaaaatggccaaaaatttgtttttaaaaagggggggccccgg

SEQ ID NO: 9443 - DNA, 485 bp, Homo sapiens
  misc_feature (1)...(485): n = A,T,C or G
cccccccccccccgccgcccaattgagnccctaatcgagatctctaggccangnggnggaattcccacaatggcagaagaaactggacagagtaaattagctgcagccaagaaaaagttcaaagaatattggcagagaaaccgccctggtgttccagcagcagcgaagaggaacacgaaagcaaatggcagtagccctgagacggccgcttctggtggttgccactcatctgaggctgtgagtcttgcctggacaggcttttggggacagggggcccaaggagcagtagagggcaatcgttaagattgtggatggattgttgggtactggtgaaggattctggatttggccgggcacagtggctcacgcctgtaatccccacacttcgggagaccgaggcaggtggatcacaaggtcaggagatcgagaccatccaggcaaacacggtgaaatactaaaaaaaaaaaaaaaaaagcggccgctcg

SEQ ID NO: 9444 - DNA, 468 bp, Homo sapiens
  misc_feature (1)...(468): n = A,T,C or G
ggcggcccccnnnngnnagggaaacttganaccaatcgaaactgacancttcgtagaagcgcnggaattnngggtatgngagcgccaggaatacagaggtaatttctctctatggtcaaggaacttaatttggtggagccggtatacagataatttcagtatacttcaagtacagcaatagaggcatgtacaggaagagtacttaacagtttacctctattacataaaaaatagtgatctccaggaagaagcgtggtacaacagaaagtgtgcattccggagtgagatcagcctggatttgaatcctgtctaccacactcacccattatgcaactttgggggcagccaatctctcgtagccttagtttccccatttctaaaatggggtgtagtttctgacttctcactgttggaagtgcaactgtttgggtgccctgcgatgtacagtgctactaagaaaaaaagcaa

SEQ ID NO: 9445 - DNA, 460 bp, Homo sapiens
  misc_feature (1)...(460): n = A,T,C or G
nttgattgccctacgatangcggnggaattccgctggtgaacaggacccgtcgccatgggccgtgtgatccgtggacagaggaagggtgccgggtctgtgttccgcgcgcacgtgaagcaccgtaaaggcgctgcgcgcctgcgcgccgtggatttcgctgagcggcacggctacatcaagggcatcgtcaaggacatcatccacgacccgggccgcggcgcgcccctcgccaaggtggtcttccgggatccgtatcggtttaagaagcggacggagctgttcattgccgccgagggcattcacacgggccagtttgtgtattgcggcaagaaggcccagctcaacattggcaatgtgctccctgtgggcaccatgcctgagggtacaatcgtgtgctgcctggaggagaagcctggagaccgtggcaagctggcccgggcatcagggaactatgccacc

SEQ ID NO: 9446 - DNA, 479 bp, Homo sapiens
  misc_feature (1)...(479): n = A,T,C or G
tggcccagtcntcccactgatactcttntaagagccgcggaattcgcccaaattattacattcgtaagacagacacctcttagaatctatatatatgaggttttactcccttttctacactcagtatgttttaattgatgcaaagcaattaattggcctaaaatgtttcaaatattatagtctatacattcagaaagtaaggtttaagaatgaattattggtgcttcttggtgggtgtatatagcagtttttagaagtttaaatttcacctctactcagaaagataagcttttgattcagtggtttcaaattttcagatcaatccatttaagaattgttttttcaaatgtatatacacgtataacataaaaatttttgtaatttcaaatgtctttttttcagttttttggatgaattattatatttggttttagttacatttaaaagcttgaaaattacctttctaacaatcatttgan

SEQ ID NO: 9447 - DNA, 469 bp, Homo sapiens
  misc_feature (1)...(469): n = A,T,C or G
tggggctcngggtggccnaaactgatangcattgananctaccgaagngcgnggnaataaggaggtggtcgtacgctgtgaaggcatcaacatttctggcaatttctacagaaacaaggagaagtacctggctttcctccgcaagcggatgaacaccaacccttcccgaggcccctaccacttccgggcccccaaccgcatcttctggcggaccgtgcgaggtatgctgccccacaaaaccaagcgaggccaggccgctctggaccgtcacaaggtgtttgacggcatcccaccgccctacgacaagaaaaagcggatgggggttcctgctgccctcaaggacgtgcgtctgaagcctacaagagagcttgcctatctggggcgcctggctcacgaggatggctggaagtaccaagcagggacagccaacctggaggagaagaggaaagagaaagccccgatccactac

SEQ ID NO: 9448 - DNA, 459 bp, Homo sapiens
  misc_feature (1)...(459): n = A,T,C or G
cggggggattgcgttccactacccagtgtggtggaattcgaatattgctgtacaagcctctgtttgagttcttgctttcagttttttgggagtgtatacctagaagtggaattgctggatcatatggtacagagaaagttttaagacttggagtcttataggggccaggtaaaaaagaattgagtgaatctagctcggtaaagaaacgcatcctgtgagtggtgggcctcgataacaggaaatggaagaatccctcttccagagtggcagccacctctcagcattgccaggtcttctggttttgttttgttttggtgtgtctttttcaaaagaagacagaatttggattcataagtgaaattgctgactcaaattttttttaatgccctgtaggctgagtacatctgagggccagattcagcctaaagatcatttatttgcagcctctgctttacaatn

SEQ ID NO: 9449 - DNA, 451 bp, Homo sapiens
  misc_feature (1)...(451): n = A,T,C or G
ggggcccccnnnattcaactgaaaccacgnactgcgtcctcgaaanccacngcntgtngggggacagcaagaagcccttcatacgggcagcaggctgtgagccagggaggaggaaagatcacgatccactccctggtacatggcccttctgcaccccgcagtctccttccaggtgccacaacgagaaggcacacatccttggcacagcacttgaggcttttcaccactggctgcactcacccctccagactcactgccttgcaccaacccttttccgcccaccccactctatgctgtccacagtctccaccccagccacctgattctgcaggccaatgtcacattcttccagtccaggttctattctggcatttcttgtcattattttgctgagaatgtgtctctcttgactttgaacttattgagagcaggaatcatgactcagccatan

SEQ ID NO: 9450 - DNA, 467 bp, Homo sapiens
  misc_feature (1)...(467): n = A,T,C or G
tgggtccccgggtggccaaaactgatangactttgagagctacggaaannccgaaaagtcatttatgttatttaaatgatgtactgtactgctgtttacatggacgttttgtgcgggtgctttgaagtgccttgcatcagggattaggagcaattaaattattttttcacgggactgtgtaaagcatgtaactaggtattgctttggtatataactattgtagctttacaagagattgttttatttgaatggggaaaataccctttaaattatgacggacatccactagagatgggtttgaggattttccaagcgtgtaataatgatgtttttcctaacatgacagatgagtagtaaatgttgatatatcctatgggacttctaaaaggaactatgtctggaaggctgtggtccaaggccatttttgctggctataagcggggtctccggaaccaaagggagcacan

SEQ ID NO: 9451 - DNA, 472 bp, Homo sapiens
  misc_feature (1)...(472): n = A,T,C or G
gggtgccagannnagaaaacctgagancctaggacagctgatggcctctcggaagagcaaaagaatggcagaaaagtttagcccctgaaagccatggagattctcataacttgagacctaatctctgtaaagctaaaataaagaaatagaacaaggctgaggatacgacagtacactgtcagcagggactgtaaacacagacagggtcaaagtgttttctctgaacacattgagttggaatcactgtttagaacacacacacttactttttctggtctctaccactgctgatattttctctaggaaatatacttttacaagtaacaaaaataaaaactcttataaatttctatttttatctgagttacagaaatgattactaaggaagattactcagtaatttgtttaaaaagtaataaaattcaacaaacatttgctgaatagctactatatgtcaagtgctgtgcaaggg

SEQ ID NO: 9452 - DNA, 445 bp, Homo sapiens
  misc_feature (1)...(445): n = A,T,C or G
gggcggnattgtagacactagnatgtgtggcgtaattccaccgccccaccacctcctgggaccacaccaccaccgcccccaaccacagcagagactagcagcggggccacctccacaaccaccaccacaagtgcacttgcccccgtggccgccatcatccccccgccccccgacgtccagcccgtgattgacaagctggccgagtatgtcgccaggaacggcctgaagttcgagaccagtgttcgtgccaagaatgatcaaagatttgagttcctgcagccgtggcaccagtataatgcttattatgagtttaagaagcagttcttcctccagaaagaagggggcgatagcatgcaggctgtgtctgcaccagaagaggctcccacagactctgctcccgagaagccaagtgatgctggggaggatggcgcgcctgaagacgcan

SEQ ID NO: 9453 - DNA, 454 bp, Homo sapiens
  misc_feature (1)...(454): n = A,T,C or G
gggccgggccncaactgagaccnagatagatgccntcaaaacggcgggctatccctttacttaccttcctactcacgtttccctgcttgtgggccctctttcctgaaggttaagcagcccggatggttatataaacacttaagctgaagcactaaatgaatggtcagactagattaaaattcttaacttggacttcaggaggttgataaaaccttggattttgcgtggaaaatatttgcatacacgcctttctgaagagagtccatgtctttcagcacatttgcaaagacttacaagagtttaagaaccggccgggcacggcggctcacgcctgtaatcccagcactttgggaggcgaaggcgggtggatcatgagatcaggagatcgagatcatcctggctaacatggtgaaaccctgtctctactaaaaatacaaaaaattagccgggtgtg

SEQ ID NO: 9454 - DNA, 457 bp, Homo sapiens
  misc_feature (1)...(457): n = A,T,C or G
ggggnntttgtttcatgaccctagtccatgtggtggaattccccctttcttcccttgatctaagaaggttgctccggatctcgccatctggtctgcgttcaatcagcagaagcttcctggaagagcaggaggaggcactgtgctcgcatcacataccagtggccagaaggtggcttcagggaagctcatgaaataggatgcgagaagccatgagacctccccaaactctgcagtatcagagtcgacaatacgatggcttaaagatggagagaccaggtgatcggacacacgagctgttccacgataattcttgtgtcagaaggggaggctgactaccaggaccactggccccacttccagcccctccattctgagtacacttcaaagggctctggcngggtgagggggtcttggtggtgccacagagagtaaaggtctagcacacccattgtggagn

SEQ ID NO: 9455 - DNA, 449 bp, Homo sapiens
  misc_feature (1)...(449): n = A,T,C or G
gggggggattgagacccttnnattgagnacccctagtccagngcggtggaattcgcaggttttgacaagcccatattacatggattatgtacatttggattttctgccaggcgtgtgttacagcagtttgcagataatgatgtgtcaagattcaaggcaattaaggctcgttttgcaaaaccagtatatccaggacaaactctacaaactgagatgtggaaggaaggaaacagaattcattttcaaaccaaggtccaagaaactggagacattgtcatttcaaatgcatatgtggatcttgcaccaacatctggtacttcagctaagacaccctctgagggcgggaagcttcagagtacctttgtatttgaggaaataggacgccgcctaaaggatattgggcctgaggtggtgaagaaagtaaatgctgtatttgagtggcatataan

SEQ ID NO: 9456 - DNA, 474 bp, Homo sapiens
  misc_feature (1)...(474): n = A,T,C or G
ggggnagccggntttnnnnaaattgatgagtttagcatagngcggnggaattcgcaccgacttctcctctgccccagatggtgtaacctgggctggccagacaggcacctccccagtgggcgtgtcttcagacaaaggtggctttgctttgttgaagttactgatataaagatcagcgcctgaaacagattctccgggatattaccggagacggagtgttttattattagcctttcttaggtggacatttccatttgaattacaagtcctttaggctgggcgtggtgcatggctgtaatctcagcaccttgggaggctgaggcaggaagatcacttgaggccaggcgttggagagcagcctgggcaaggtggcaagaaccttgtctctacaaaaaaaaaagcgtaagagtccttcagcatttgaggggaaaacgtgtgctgacggtagaatagtctaggatggggttgggggag

SEQ ID NO: 9457 - DNA, 458 bp, Homo sapiens
  misc_feature (1)...(458): n = A,T,C or G
ntttgaatagantaccattagaccangcggtggaattcatttactttaaggacatgagaaattcaaatgagagaagttgctgatattcatcagtgtgtttggacagttcatagggtccacaaatcaaatgaggttgtttcctgaagtagaagaaaacagaactttgcaattgatactgaagtactttgccatggagttagtaactcctgagcagaccattttagatggctcagcatttggcaggaagacttctccattccctgcttatatctatggaaggatcagctgttggatgtctagaacttctctatttaaaaaaaaagagtaggtctaaaattaaattattataagcaagcatagacatgggtcttccagttgaattgtccattaccgtaaaacttaatggtggacaagttagctgtggttgattcctgtgtggcagtaaattgtcttctgtg

SEQ ID NO: 9458 - DNA, 460 bp, Homo sapiens
  misc_feature (1)...(460): n = A,T,C or G
ttttaagcctcctgggacccctcgnacagngcggnggaattcagtcagnctcctccctgtctccactctttccctctatttatttcactctcttgtttggttctaccctgcaccctcggtccccttccaggttcctgtttataagccccaacccctctgtccccatcttgtatgtgaaaacttgtctcaataaaccctttggagtaaaaaaaaaaaaaaaaaaaaaaaaaaaaaaaaaaaaaaaaaaaaaaaaaaaaaaaaaaaaaaaaaaaaaaaaacgggcgccccctaaaataaaggggccctttaaacccccgttaaactccccggggggctcttttaaggcccccccttttgggtgtccccccccccccggtctttttttggtagggggggggccccctcccttttttttttataaaaaaaagaagaaaattttctcctcttggcgaaaaggtcg

SEQ ID NO: 9459 - DNA, 447 bp, Homo sapiens
  misc_feature (1)...(447): n = A,T,C or G
taganattgatgnaccattagtccttnggcggacgatattctaaagccccaacccagctggactgttactgttataagaaacactagcattttgcaatcctaagtcatatttttcttgttacttgatcatgttatatagattagtttgaaaatggtcaggcccttttgcaaattcactttatttcataatatcattcattcgttcatttattaactaccagctatatgctgggcactgatccttatatatgaaaatgtttatttcctttgattaccaaaaggcagatatgctgttttgccattttctagaatctaaaggctcagatgctttagtcaaagcattcatatatttattctgtaatttttatagtctgtaatttttatagtgattgaatcgaaaatagttgaccagtacaatagtagctgcattttgcatgtgctctccct

SEQ ID NO: 9460 - DNA, 481 bp, Homo sapiens
  misc_feature (1)...(481): n = A,T,C or G
agggagtnccaactgaaaccnttgctgangatcatcgnanagngcggnggaattccatcatcagggcagagtgcttcttacaagaggggttttattcctgtgaagcattcctgtataagagccttcctctctgggatggcctttgttgtcggtcacagttccttcagcttgtgagctggattccttttagtagcttctctgaggtgaaaccacttctttttgaccatctagcgcagctcttctttacatcaaccatttatttcaagtgtagtgtgcttcagagtctgaaagagctattgcagaattggctgttgtggctttctatggacattcacatgaaacctgttacaaacagtcctctagagacaactttgggtggatccatgaactctgtgtctaaactgatccactatgtagggtggctatccactactgcaatgcgcttggagagcaacaatactttcttgctgcactttatttt

SEQ ID NO: 9461 - DNA, 473 bp, Homo sapiens
  misc_feature (1)...(473): n = A,T,C or G
ggtaaancnccnccgcccgnaattcaaggttcctagtnaggccagtagaagctgcggaantccacctcccaaaagaccacgccctttaacctaagacctgcctgtgacttgagggttaataagaaagaggaatgaggaaaaaacgctgttgcccatttttgtagccagagaaattgaaaaacgactgtggcttgatgttgatacacatttgaattttttttaaaaaaagaaagttatcgtagccagcctgtaaatacttgatgcattcgtttcctcagtgctgcaatacatcatggacttaaacatcttatttatctgataaactcagccttaccttgtggaatctgaagattgaaatatccaaaggtttaaacaagatggaaatcaatgaaaaagaggccttgtttatatatgggtagcttcacatttaatttataaagttaacaatctggaaactgtgagcccataaaacg

SEQ ID NO: 9462 - DNA, 478 bp, Homo sapiens
  misc_feature (1)...(478): n = A,T,C or G
tgggcatgtgncccgattgagaccccatagatggccctgaacccngagcagccagcctgcatccagaatgcaccggacactgtcggctggcctggggcactgtgtacggggttactcacgagatgcgtcgaatgctgggccacagaccagggagcacggggaaggactccacactggtgtgagcccagggatgaggaatagagacctggtgtaagaaaaggataccatagagataggttcgggttcagctgcagtagcagtaggacttggtttttctctcattttattgcatccttggcttttgtcctcaaggttgcctcgtggcacaaaataattgccagagctccagccttcacctcctcattctgagggaaagtcagaggccagcgctggctaggtgtctcctggaagtcttcccaggaagcctcgaaacccttctttttatatcccactggccagaacagagcgaaatggccat

SEQ ID NO: 9463 - DNA, 541 bp, Homo sapiens
  misc_feature (1)...(541): n = A,T,C or G
aattggatcacactcagaggggttagtcctccattaaacagcctctaccttgcgagccgtcttccccaggcctgcgtccgagtctccgccgctgcgggcccgctccgacgcggaagatctgactgcagccatgagcagcaatgagtgcttcaagtgtggacgatctggccactgggcccgggaatgtcctactggtggaggccgtggtcgtggaatgagaagccgtggcagaggtttccagtttgtttcctcgtctcttccagatatttgttatcgctgtggtgagtctggtcatcttgccaaggattgtgatcttcaggaggatggtaagtatttaacacttccttttcatacccctctagagcttggagaggtgagcacatgcaactgtgtatagcatttccacctttgagggtntgtattgtataatttaaaacgtaacacttttgtaaggttttatagtctttgcctggttcttttccttattnngtgagcctgctatactgcggtagaggtggccacatttgcaaggactgcaagn

SEQ ID NO: 9464 - DNA, 409 bp, Homo sapiens
gcttctttggatcccagatacatttagagctttttgcattaagtgtgaggaaaataacttctctttgatgatgttgatacaccatgtgggcaccctggggcacagcggtttagctggggagattccatgagaatgaacccaaactactcttctttgctagggtcctttacccacacagaggtgagcctttcaggttcttcattttgcttagtttcttcccttgtccttggcatttaagaggcatccatgtgttagccagccaaagccccctgaaggagctggctgctttaaaggatttacttgggaggatgtcaaatggctttgccttctgcagacttcatttattttaatctttttatggctcctttctcttgctttaaaacaggattataagcacacagcaggtacg

SEQ ID NO: 9465 - DNA, 204 bp, Homo sapiens
ctccgcccgcggccacaccgcagggaccctcgccaataaacagccctcccaccaaaaaaaaagcaaaaaacaaaaacagaactaaaaaaacaaaaaaaaaaaaaaaaccgcccccctcaaaaaaaaaaggcccccaaaaaacccctaaaaaaaccatgggggggcctttaaagaccaccacataggtggggcgccccccccccg

SEQ ID NO: 9466 - DNA, 459 bp, Homo sapiens
  misc_feature (1)...(459): n = A,T,C or G
nnnaaattgaatgcttctcatcgngcggngcaattccaagctaggacgcggaacctgtattctgcaccctgagaatcagaggtggggagagtggtggaagggcctgtggacttacggatgctgctgcgacactctatgacctcagactgcaagtaagagccaatcccgaagcggtttgttgcagccacacggaacacatactcatttccttcggtggctgccatgagatagtcatgtgttcaggagtaacatccagaatattaataggacctgttggtggcccaggaacatcaagaacagtaagatgtacggctactgttttgctaccggctgcattggaaactgtgatttgatattccccagtgtctctccttaagcagttcttaatgagaatagacgccttgatggctcctctggcagttcttgatgaccatggatgagctaatggctgtggtctca

SEQ ID NO: 9467 - DNA, 523 bp, Homo sapiens
attgccctgatacagcttactgcagactccaactcctggattcaggcgatcctcccacctcggcttctcgagtagctgggactacagactggagccaccacactcagtatgtgtgtgtgtgtgtgtgtgtttgtgtatatatatacttttttttttttttggaaaaaacgggtttttgtttttaaccccaggcgggtttaaaatttggggttaaaacaatttttaatccctaaccctcccggggggttaaaataacgggaataaccaaaacccccggccccttgggggtggccataaaaagaaaaggggctaacccggcccccaagaaaaggcccccccttaggctttgtttgaaaaagcggttttttggcccccctgtcttttttttgggggggggggaacggtttttttcttaaaaacagccgggggaagagccctcccccccaaaaggttaaaaaaacctctttttttggaggaaagggatatggggggacccctttccttcaattttcgtgtctttcag

SEQ ID NO: 9468 - DNA, 500 bp, Homo sapiens
  misc_feature (1)...(500): n = A,T,C or G
tgctcacagctgtaataacaacaccttcagaggctgaggtgagaggatcagttgaggccaggagtttaagaccagcctgggcaacatagtgagacccctgtctcccaaaaattttttttaattagctgtgcgcaattgctcatgcatagtcccagctacccaggaggctgaggtgggaggatcacttgagcccaggaatttgaagctgcagtgagctgtgttcttgccactgcactccaatctgggtgactgagcaagaccctgtctcttaaaaaaataaaaaagatctccaagcatagagaagagtctggagggaaacaccaaactcataacagtcttactgcaggcaagtgggataaaggcccagactccatggtggaagttaaagggcatttccaagttaaggctaagacttgcttttctaactaagagaatgtgctcatgcattgcntgtgtagtagaaactagtttttagaanagatagcanacttaagatacat

SEQ ID NO: 9469 - DNA, 331 bp, Homo sapiens
ggaaatggtatttattgcatcagctgctgctggtttagtcaggagcaccatcatctttcaccttttacttcacacccatccagtgttctctgtcacgtctctgaaaggccatttcaaaccggattgcattaagaaaaatcagtagtttcttttttttttaattgggtggaagcgccataggaggccagatttgcttttcctggacaatgtctggcctcttctgtgggggccaaaaatgaaagaggagcagccacacccttttagattctggccatgtcacagcacacttacagccagcttcagaggccagtgcagcagggagaaaagctct

SEQ ID NO: 9470 - DNA, 484 bp, Homo sapiens
  misc_feature (1)...(484): n = A,T,C or G
aactgaaccctngcaggcggatgaccccntngtacaaaacaaacaaaaaattagccaggctggtagtggaagcctgtagtcccagctacttgggaggctgaggaaggagaatggcgtgaacctggaaccagtgagcccagatctcaccactgcactccagcctgggcgacagagcgagactccgtctcaaaaaaaaaagggggaatataggaaaaaagaccctgtaaaataatatacctgataagggtctagtatccagaacatataaagaactcttacaacccaccaacaaaaagacaacccaatatcaaaatgggcagaggacttgaagagacttttctgtaaagaagatatgcaaatagcatatgaaacgatactcaacatcactagccatcatggaaatataaatcaaaaatacaatgagataccactccatacccatcagaatgtcttattattttaaaaacaaaccagaaccaagttt

SEQ ID NO: 9471 - DNA, 460 bp, Homo sapiens
  misc_feature (1)...(460): n = A,T,C or G
nactgagtacgatagcccagngcggnggaattcgtgatcaccattatgcagaatccacgccagtacaagatcccagactggttcttgaacagacagaaggatgtaaaggatggaaaatacagccaggtcctagccaatggtctggacaacaagctccgtgaagacctggagcgactgaagaagattcgggcccatagagggctgcgtcacttctggggccttcgtgtccgaggccagcacaccaagaccactggccgccgtggccgcaccgtgggtgtgtccaagaagaaataagtctgtaggccttgtctgttaataaatagtttatatacccnccaaaaaaaaaaaaaaaaaaacgaaagaaaagaacaaaaaagaaaagaaaaaaccgaaaagaagctatctgagataagtaaaanactggggcgccccccgctttaaagggggctccaaaaaccct

SEQ ID NO: 9472 - DNA, 407 bp, Homo sapiens
gtattcatttgtgaaatgggaatactactacctaacaggatgtggatagaattaagaaatataatagatactcagtaaatggcaaatattattacttattttactaaatgtctctaaaataaaaaacattcattttacataagacataaggaaaataagtatgaagggaatattacctagtgatatagcagatagatcttcctctaggaatatctgaaactaacattttgttttttccctattatagatggcgctggatatttacagttatcagaagagtatctacttctatcttaactatagttgatggtagttttataattttgcatactttgtgcatgttccagtgaaaactccaaaaaaccataaagaatgtatctagaccatgggctttagtcatactttaa

SEQ ID NO: 9473 - DNA, 548 bp, Homo sapiens
  misc_feature (1)...(548): n = A,T,C or G
agctcgaancacagtccagtgtggtgtagtaccacattcccttccagcgctggtcatctacttaatctcaggtaaatagcagggaagtgttcttctcccacagcgccctcattcatacagttttgatccttgcatttgccacggtggctctgtaagggttaaagggagactgctcaggcactgggttcctaggagaaatggaagagttttctgagaagaaacagatgctccagtgtatttcgttttatctgggtggatactttgtacaagcagccagccaggttggaggtgatggcctgctgcttctatgatagactgctatgtcacggagagagcttccagtcccgggctgaaagaggatgctaactgtctctcaattcaagttctcatatttctccagaatagccgaagatagcanaggccagtcaatatagtcacgatttcaagtccttgtctgactctctttactgttggacgctaccagcanggcagctattatgcaagatacaanngcaccccagaagtggcatgggaagaattaagaacgg

SEQ ID NO: 9474 - DNA, 336 bp, Homo sapiens
  misc_feature (1)...(336): n = A,T,C or G
ttcattctgaaggctcctgtgtcaatgcaaagctatactccaataaatttgtcatgcttttttttgttaacctgccttttgttacagaggtgttcgccgtgaccgttacaatgaagaggaaagagatcatcccctttctactcctacatccccaagtgaagaggacatggagtacagccacagccacacttaaagggcatgtaacatgaacaaaaataaatgtttgttgtangcnnaaaaaaaaaaaaaaaaaaaaaaaaaaaaaaaaaaaaaaaaaaaaaaaaannngggcccccctttaaataaaggggccccttaaaaccccgttaaaccccn

SEQ ID NO: 9475 - DNA, 194 bp, Homo sapiens
aaccaaaagaagtttttccaaagatgttatgaagggctctaatccaaaagtaccacagcaaaacaacttcagtgactgtggtgtatatgtattgcagtatgtagagagcttttttgagaatccaattctcagttttgaactacctatgaatttggcaaactggtttcctccaccaagaatgagaacaaaaagaa

SEQ ID NO: 9476 - DNA, 553 bp, Homo sapiens
  misc_feature (1)...(553): n = A,T,C or G
ctttccctcgnnncnnnnnnnattgagacttaccctcagcggtgtacaatgtgtatcacacaatgtgctagctcgtttctgtggcttaagagaattcaccatttctatctactacccaagaggtgaattagataactcttccatttgtatattctattctgtgagaaaaattcacattgctcttatttgtcatactattagctaatgtataagcgctagccctcattctaagaagggttaaggatttatagaattcctatattctctggaagcatcagtaacctaaaggctagagcatggtatgggcatgtgcatgatgaatatttttgatgtatagttcatatatttgtttcagtggtttggtgttagaactgctagaagggaatctcactatcttttcttcctttttgagatagncttgctctgtcatcaggctggagttcagtggcgcaatctcgactcacttgaacgtccgcctcctgggttcaagccattcctcctactcacctcccaagagctgggactacgggcatggccactatgccaagctgan

SEQ ID NO: 9477 - DNA, 418 bp, Homo sapiens
gtttaagattatttctgcctgctattcaaatttcaaagaattgtaatttaagcctctgtgctacattttatttaattactatttagtatgagcttcttttgagttcctgcaaagtagacatgtatcaagacatccaattactattggactggaaaatgctgtgacttcctctagttattagaatgcatttaaaacaagaaggttgacttctgaagtcacatttctctttcagttcttctctggaaaagaagttcctgtttggtctttacaacaaccctacgaggtcgacactcttatctccattttcttactagtgaggaagttgatgcacagataggttaagtaataccaaaagtcacatggctggtaaatgacaagaccgggatgccaacccaagcagtttggttgcagaacccat

SEQ ID NO: 9478 - DNA, 553 bp, Homo sapiens
  misc_feature (1)...(553): n = A,T,C or G
agtttgatnnacantnannannnnactggatcnactactccgagtggtgcaattcanaaataaaatggcggactacctcaacatggaggtgccagctgtccaattacagctgtcactctgtgtctgggaatttctcccgattcttagccggagctgcggcccgcaactccctcagcctggcaggtcccaggatgcttcggggcaaccccacgcatgcgcgctctggcgtagttccctgaagcactcgctcgcagagaatcctggaatcttcgcttgtggagctgaggaggcaacggagtttttccgcgctttttctttcagcctcagattaagtatcattcgatactattattttctctactgagcgcggaaagctggctgaaaattccagagtgcaatttctgtgggtctgtttctgtaaaacttgcccctcacgcagcttgtacagaagttagattggcgcttactcccagctggtggaagattcggaattagctgcgcctctgctgcgtgagagagggctcagctttatagcttaccagctcctctgctt

SEQ ID NO: 9479 - DNA, 396 bp, Homo sapiens
ctgaacctttattgaatccttattagcttgaatccttattagcttgaatcctccatgcaaatcatggagtctgtgtcccacctgatgtggttgaggagaagccaggtcttcaaagaggggtcagcctggggcaaagcaggactggggggaggtgggcagcagggcctattctgagaatcacatattgttacaggccttgcaccccctttgctgcttccctcctgctcatttggggctgccaccagctctccaccctcctggttccgctggccgggccaagagaggatggagggatgggagtcccaggagatccttgtaaatagtggggtgggactgttctgagtgatcacccgagcacttaaagctccagagtcccattcttcctggatggagcag

SEQ ID NO: 9480 - DNA, 442 bp, Homo sapiens
  misc_feature (1)...(442): n = A,T,C or G
nttcgtcgatccctagttcagtgtgctggaattctgtgtcagaggctggagtgaaaggccatcatgcagcccaatcccaacactaaaatcagagtagggtgacaggcttaccacccagaatcacctcctaataatcaggaagttatttatgattagagaaactccaaccacatcaattctgtctgggaaggaggtgtgaatcagttaatttaacacatagcaaataaaaatctatggtccacaatatcatgttgtctagctcctggggacaggcaggctccataggccactaataacagagtgagaattactgactgtggggggcggacacaaggggtcagctgaggagcgcagtttgtgactttccctataggcagtgacctcggggtagttgtggggctctttcttcctggaagcataaatgttggtctcttatggcttc

SEQ ID NO: 9481 - DNA, 463 bp, Homo sapiens
  misc_feature (1)...(463): n = A,T,C or G
naaaaatagactagagtaccctagnacagngcggnggaattcgcacatgtattccctgaatctaaaagttaaaattagaaagcagcagatcccggtacaagaacacatggaacaagtggagtgaatgtatgctgtttgcttaacattcagtgatattgcaatcttcccatttcctagaagagaagaaacatgcatgcaggcagtcctcactttataaaagtctttggtaactaaatttggtgttggttacccctgagtcatgcatatcaagaacatgattttatctcagttaccacagtgagaactaccctgcttctggttatacagacacgatcctgaatacagataatattgattcccttagctccctccacaaatgttctagggcagtgaactttacttacaataccatctaaaaattgttgatccttgttgatgagtgactcatacatataatcccaan

SEQ ID NO: 9482 - DNA, 457 bp, Homo sapiens
  misc_feature (1)...(457): n = A,T,C or G
ntttgaagtaccactagcccagtgtggnggaattcctgccgccaggtgctcggtccttccgaggaagctaaggctgcgttggggtgaggccctcacttcatccggcgactagcaccgcgtccggcagcgccagccctacactcgcccgcgccatggcctctgtctccgagctcgcctgcatctactcggccctcattctgcacgacgatgaggtgacagtcacggaggataagatcaatgccctcattaaagcagccggtgtaaatgttgagcctttttggcctggcttgtttgcaaaggccctggccaacgtcaacattgggagcctcatctgcaatgtaggggccggtggacctgctccagcagctggtgctgcaccagcaggaggtcctgccccctccactgctgctgctccagctgaggagaagaaagtggaagcaaagaaagaagaatccga

SEQ ID NO: 9483 - DNA, 417 bp, Homo sapiens
ctctcctagggtgtgacagcccactccctggacactgccctgaggaaagcgccagctcttgctggagtcacaacactgccagagctcccttctcacctcctgcaggaagccctccctgacctcctgccaggccggggcagggtttccctgagcgtcccccaaccatcacagctcaggccacctggagagactccctttttagacagaagccctggtgcagagctgcctttgagagtaagctgaggcctgtcaggtttctaccagcccagttacagatgggctgctcagctcagagagaggggtggtgactcccctaggaacacacagctaagaagtggtcccttaaaagacagacccaggtctgcactctgacctggaagcagctccgggtaggtgatgggtaacattccttaaatg

SEQ ID NO: 9484 - DNA, 469 bp, Homo sapiens
  misc_feature (1)...(469): n = A,T,C or G
aagctgaagaccatagaacanngcgggggggtagaacttctatcaccggagcttnctcacagacagagtcacccaggggagcttcctcacagacagagtcacccaggggagcttcctcacggacagagtcaccccggggagcttcctcacggacagagtcacccaggggagcttcctcacagacagtcacccaggggagcttcctcacagacagagtcacccaggggagcttcctcacagacagagtcacccaggggagcttcctcacagacagtcacccaggggagcttcctcacagacagtcaccccggggagcttcctcacagacagagtcacccaggggagcttcctcacagacagagtcacccaggggagcttcctcacagacagagtcacccaggggagcttcctcacagacagtcacccaggggagcttcctcacagacagagtcaccccggggagcttcct

SEQ ID NO: 9485 - DNA, 551 bp, Homo sapiens
  misc_feature (1)...(551): n = A,T,C or G
aactagaacacagntcgngnntttcgaaccactatcagtgtggtggaattcctgctgccaggaccctcgtctacaccttataccaccagccccagctgttctctgtcagcacacccacctccatcccctctcccaaccatgacttccaagcggggccacagggtggggtcatagggtcacttcacctgacccaggcctctccccaggtcaggaggcagctgtctggtcagaggggttctctttgtggcatctggctttctcctcagcaggtcccaccaccctctcagcagcacttccccatggccaaggctggccgtgtcctctgtgcctctttccttgtctgaggtggctgccagcccagggggtggtgtgtaaatcttcaggctggtggaggtaggttggccttttatccacaggatacagaaactgaaagctggggaatccccaaacagcagccatagactcactggctctcattanacgggagaggaatcacagaaactggggaagggaaaacaaacctttcaaggagaaatttcgctttaatgaca

SEQ ID NO: 9486 - DNA, 449 bp, Homo sapiens
  misc_feature (1)...(449): n = A,T,C or G
actgagaccctggaagctgaggcctccgannacacctttaagatatcttcaaagtttctgatagttaaaaaaatcattttacaaaggctgcttctttaatgaaatgtgtttgcaaaacagttacctctgagcctttccaaaaggtgctcaaggctcagtgccatcctcagagacgcagagagaggccaaggtgagatgaggctggggtgaggtcttttaggaaagtgtgtgtgaaggaagaggggtaggagcaggagtaggcagggagagccttcagtcttggtagaggtgcacctgtgacgaggttggggaaggaggagggctgggtttcagtgcaggtctgagaaatggagtgggcctgaactagccccagagcattagttccgtgctctgccattccctggaaaaagcctcatgccacacactggtggacccagaggcagcagcac

SEQ ID NO: 9487 - DNA, 544 bp, Homo sapiens
  misc_feature (1)...(544): n = A,T,C or G
attaganncccctnnnnnngtcgatcnactgtccgtgcggaggaattccagtttttgaagggtccatgcacatccctgacacctcacaccttatctaagtctgaagctggggagaaaggagttcatttagacttcatacatttccagtacgactttagtatctctccagagccatattttctcagtccgaattaattccccctccctaggtgcctgtaggctatggtacttcttcctcattgttttctaggtaaacttcactactggtaattaaggggaaggatatgaggaagcagtttaaatagccctgttctcattactctgaccacatacatcatagggtgctaaagttgatgaacacattaatccgttaagtaaaatggactttgtaattgtacagcatacctaagaaactcagaaggtgcatttaagagagagacctgaaagaaatagaatggattttaaaattcttgctctactatataaccaaaaaataattctttgatgtcccataaaaataattgtgtaattctatgaaaccagg

SEQ ID NO: 9488 - DNA, 506 bp, Homo sapiens
  misc_feature (1)...(506): n = A,T,C or G
gaggnccggnnnnngnnaaactgatacctacgaanggactgatatcctcgtaangcaaananggntnnggngnggntgtntctgatggtgtcatcaaggtgttcaacgacatgaaggtgcgtaagtcttcaacgccagaggaggtgaagaagcgcaagaaggcggtgctcttctgcctgagtgaggacaagaagaacatcatcctggaggagggcaaggagatcctggtgggcgatgtgggccagactgtcgacgacccctacgccacctttgtcaagatgctgccagataaggactgccgctatgccctctatgatgcaacctatgagaccaaggagagcaagaaggaggatctggtgtttatcttctgggcccccgagtctgcgccccttaagagcaaaatgatttatgccagctccaaggacgccatcaagaagaagctgacagggatcaagcatgaattgcaagcaaaactgtacgaggaggtcaaggaccgctcaccctgg

SEQ ID NO: 9489 - DNA, 554 bp, Homo sapiens
  misc_feature (1)...(554): n = A,T,C or G
ctctgtccccnnnnnnnnaaattccccgctcagcgggcaatgtcctggcaccctggtgctcggtcacagtgacaagtacaagtaactatcacacatgccctttgtcatattggtgatttccactgtttttctcccaaactgcagcttatatttgttctcttaatactgttgagcaaaaacttttaatttttataaagtcgaatttatcaatgttttctttaatggtttgtgtttattgataataaagaacactttgcctannaaaaaaaaaaaaaaaaaaaaaaaaaaaaaaaaaaaaaaaaaaaaaaaaaaaannnggggcccccttaaaaataaagggccccttaaaaccccgtaaaaacccccggggggtctttttaaagccccccctttttgggggtccccccccccccgttttttttttgacggggggggggcccccccccctttttttttttaaaaaaaaaaaaaaatttcctcctttttgccgggggggggctcttccttctttttggccnnnnncnnncnccncnccaccacatcatctcattttt

SEQ ID NO: 9490 - DNA, 492 bp, Homo sapiens
  misc_feature (1)...(492): n = A,T,C or G
cggcgttgagcccatcgagaccctacgaagngncgnggaattccctcatctgaggggctgtcctgccacccagccccagccagggctcaatctctgggggctgaggagcagcaggaggggggagggaagggagccaagggatggacatcttgtcattttttttctttgaataaatgtcactttttgaggcaaaagaaggaaccgcgaacattttagacacccttttctttggggtaggctcttgccccaggcgccggctcttctcccaaaaaaaaaaaaaaaaacactaatccttttccttaacctagaaccctccaaatcccagaggctttcctcacctaagttgacctcttttgaaagggattcaggggactgggcccctcaccctctttggctgaaccaaatggggagggaaaccccctaaaacccttagggggggttgcccagggggttgcccccaggggggggaaaccagggaagagaaaagggtcn

SEQ ID NO: 9491 - DNA, 579 bp, Homo sapiens
  misc_feature (1)...(579): n = A,T,C or G
aattcgaatccccacttcagaaggcccaattctggagacagacacattcaaattgcactgctaccagacactgacagggatcaagtttgtggttctagcagattctatgcaagctggaatagattctcttctccgaaagatttatgagatttactcagactttgccctcaagaatccattctattccttagaaatgcctatcaggtgtgagctctttgaccagaacctgaagctagctctggaggtggcagagaaggctggaacttttggacctgggtcataggctgaacctgttatggacccccaaattctgagagttcctgcaacaagaatactgctgttgacactccagtggaaatcccagcagccttgttagtgcacttgaaagtgggagaatgctgaccctgatgacttgtactgattcctgagccttaacactgtgctctttccttctgtatataccatggncttactttccaactctgtacagatttatttatggaggagctaggtccataaatggttgaataaatattcctttgatcttggggtttgaaaaaaaaaaaaaaaaaaaaaaan

SEQ ID NO: 9492 - DNA, 492 bp, Homo sapiens
  misc_feature (1)...(492): n = A,T,C or G
nttcgatatccctttccagtttgagggacttcgaatgagcagatgcagatcaccagcaaagtgcactgatgtgtgagctcttaagaccactcagcatgacgactgagtagacttgtttacatctgatcaaagcactgggcttgtccaggctcataataaatgctccattgaatctactattcttgttttccactgctgtggaaacctccttgctactatagcgtcttatgtatggtttaaaggaaatttatcaggtgagagagatgagcaacgttgtcttttctctcaaagctgtaatgtgggttttgttttactgtttatttgtttgttgttgtatccttttctccttgttatttgcccttcagaatgcacttgggaaaggctggttccttagcctcctgggttgtgtctttttttttttttttttaaaacacaaaatcactctggcaattgtctgcacctgccactggggcaaggccttaccagccctag

SEQ ID NO: 9493 - DNA, 472 bp, Homo sapiens
  misc_feature (1)...(472): n = A,T,C or G
aggcaggggncccccctgagaccntagtttgatcgccgtatncgnnncaccgagtttggtcttgatctcttgaccttgtgatccgcccaccttggcctctcaaactgctgggattacaggcatgagccaccgtgcctggccccagataaccctttttatgtgagagtgtagagaatgttgctgcagctggtgtgggatgggggatggctgggttgagactgtgttgtcacctgcagtgtacacctgaggtgacatggttctgaacatcactttccccattgaaggcccgagtgacctatcacttgcttctcaaaattcaggaactaggtgactctaggagagtgcacaggaagctttctgcatattctttcaagagatttcgaggtcactgactcttttttcaagacttaaacacaaaatccacatccatcattcttgcgtaaagagaccattcttttttttttgagatgga

SEQ ID NO: 9494 - DNA, 460 bp, Homo sapiens
  misc_feature (1)...(460): n = A,T,C or G
nttttaattgangacctctagtccatgcggtggaattcgtggattaggctgtgttgacaaatagtgtggtctgtcagatattccacaaaacactgccacctgtagaaaataaacccctcagtggctgtgtctcagctcctggcatacgtgggactgtctcatatcactttccatcacttctcatatgtatcagaggccttacatatcacttttcaagtcgtttccttatttacatatcaccgtggtcaaaaattcccaggacaacataatcagctatcttaaccaagccaataaacaagtccagtaaataaataaataatccctctctatattccctcctcaaggtctttctcccagaactgtcttctcttcacaagcaaactctaaggctgaagatattatttgtacacactctggttcattggcagtatatattttcaatctgccaaaaaatgtgaaa

SEQ ID NO: 9495 - DNA, 453 bp, Homo sapiens
  misc_feature (1)...(453): n = A,T,C or G
aatcgaaacctgatggacccttagaccagacnggnggaattcgtcacagacaatggcagaccacaggaggactgcctttcaactatgctttacaacttgcaagagtggcaaatctttgcaaaagcactttcactcaacccaaatattgcttatttagaatccaacatcatgatctacccaaacaagtggcccgttctccctttcttggttaaacagatgaagaaataaaagtgccattttcatttgtaaacttggatttttgcatttatatctatgagcataaaatgcacttatatttaggactacaaaaatgtacctgggaaggtgacgggacctctatactcaggttaagtctcgactgcacactgacaggactatgtacaccattccatttccctgaagactcagccttgttagtatcaagactggtcggcagatgtgcaggaaaaggtg

SEQ ID NO: 9496 - DNA, 489 bp, Homo sapiens
  misc_feature (1)...(489): n = A,T,C or G
aggaggggcgggnntnncncccaactgagacattagtcctagtgcggcgaattcaaccctgttagctgagcaaaggacagacttacagcgacaatgtcaccttcaccagcaatattcagcctaaaagcagcaaggccgcggtgcatggcatcctgatgggcgacccagctccctttcccattcctgagcctgatggttgtaagagtggaattaactgccctatccaaaaagacaagacctatagctacctgaataaactaccagtgaaaagcgaatatccctctataaaactggtggtggagtggcaacttcaggatgacaaaaaccaaagtctcttctgctgggaaatcccagtacagatcgtttctcatctctaagtgcctcattgagttcggtgcatctggccaatgagtctgctgagactcttgacagcacctccagctctgctgcttcaacaacagtgacttgctctttcatggtatccagtgn

SEQ ID NO: 9497 - DNA, 599 bp, Homo sapiens
  misc_feature (1)...(599): n = A,T,C or G
aggtgccnnnaggggnnnnnnntttcgaatcactatttcgagtggcgcaattcgcgagacacgttnttgtcttccctacaggatggatgtggagaaaggcaagattgaagacacaggaggcagtggcggctcctattccatcaaaacccagtttaactctgaggagcagtggacaaaagctctcaagttcatgctgacgaatcttaagtggggtcttgcttgggtgtcctcacaattttataacaaatgacttttttccttagggggaggtttgccttaaaggcttttaattttgttttgtttgcaaacatgttttaaattaaattcgggtaatattaaacagtacatgtttacaataccaaaaaagaaaaaatccacaaaagccactttattttaaaatatcatgtgacagatactttccagagctacaacatgccatctatagttgccagcccttgtcagttttgattcttaaccccatggactcctttccctttcttctctgaaaaaaactaatttaaatttgcttttcttttttttaactgagttgaattgagaatgatgtgtttcactggatnttatctctctaacttcctgcn

SEQ ID NO: 9498 - DNA, 461 bp, Homo sapiens
tccccattggagaccatagtgcacgcggggaattccaagcgttaggagaagaagagaggcagggaagacaagccaggcacgatggccaccttcccaccagcaaccagcgccccccagcagcccccaggcccggaggacgaggactccagcctggatgaatctgacctctatagcctggcccattcctacctcggaggtggaggccggaaaggtcgcaccaagagagaagctgctgccaacaccaaccgccccagccctggcgggcacgagaggaaactggtgaccaagctgcagaattcagagaggaagaagcgaggggcacggcgctgagacagagctggagatgaggccagaccatggacactacacccagcaatagagacgggactgcggaggaaggaggacccaggacaggatccaggccggcttgccacaccccccacccctaggacttattcccg

SEQ ID NO: 9499 - DNA, 409 bp, Homo sapiens
gatacttgggacacccgaaaagtaatcagctctcagagctattagagctgagacaaaggacagggtacatgaaatgaaaggtgaaaagttgagagaagcaaacctaaatactcttctcttggtattcagaaatacttatgagtatgggtgtctataaccccaaagttttttggttttgtcttttgattgtttgtttgtttgttctgttaagtacctaagtaatgtgtttttaggaaaagaaacctagcaagaacattgtagacaaggctaggcaaagatgatctatccttcaggtgatgtgtctgtcctcaagatcacttacaaagaagaggattggactggaagttactacttcacaattttagttttgttttcacatctgttacttcaatcctgatgacaattctga

SEQ ID NO: 9500 - DNA, 530 bp, Homo sapiens
gcggtggaattcgaattccactacaacacaaacctgctcacagaagagaccgactcctttgtgaataagctagatcccagcaaagtgtttaagagcaagaacaagatcgtaatcccaaaaaagaaagggcctgtgcagcctgcaggtggccagaaagggccctcaggaccctccggtccctccacttcctccacttctaaatcctcctctggctctggaaaccccacccggaagtgagcacccctccctccaactccctaccagctccagagtggtggtttccatgcacagatggccctaggggtgacctccagttttgcgtgtggaccgtaggcctctttctagttgaatgaccaaaattgtaaggcttttagtcccaccgacattagccaggctcgtagtgaggcctccagagcaggttgtgctgtcccctgcctctggaagcaatggggaatttggaatcttgtgtaagtgcccaaataagtctgagtgctttcctcttctttcacactcaaccctcaatcccttag

SEQ ID NO: 9501 - DNA, 419 bp, Homo sapiens
  misc_feature (1)...(419): n = A,T,C or G
ggacactgaaaaaaaatcctagaatttagaaaaagagaattatttgatttcttatttcctctttctgttcaggccttctgaaagtaaaggttcttcctttaactgttccctgttctttcttctattccttctttgtcctactcaaagggataagtttgttgaaattgacctaaagccagtctgcaaacactgttatgagaaaatgccagaagaatttaagaggcgacttgccaaacgggagagagaagcaaaggataaggacaagcagaaaaagaaaaagccagtctgtttgtaaacttttctatccctgtgtcatcattttcactactttctcctttggttagtcctttggaatatgnttttggtctggttctgtcttttgctttcttccccccctgcaacttttgggcgtgtatttg

SEQ ID NO: 9502 - DNA, 489 bp, Homo sapiens
  misc_feature (1)...(489): n = A,T,C or G
agagggccnnnnnaggggnccctgagacctctggccngatgaccattagtccagngcggtggaattcatggtccctcttggttcaggacaaaggcaagagggccctggaattggccctcctccagggcctgctgggggagaaccgcctgctcacccccgcggcctccatgcctcgcttcttccaggttctgccgcctttctctgacctgtccacgttcgtctgcatccacatgtcgggctactgcttctaccgtgaggatgagtggtgtgctggctttggtctctatgttctatcgcccaccagcccccctgtctccctttccttctcctgctccccttacacgccaacctatgcccacctggcagccgtggcctgcggcctggagcgctttggccagtccccactcccagtggttttcctcactcactgcaactggatcttcagcctcctgtgggagctcctgcccctctggagggctcggagcttcc

SEQ ID NO: 9503 - DNA, 578 bp, Homo sapiens
  misc_feature (1)...(578): n = A,T,C or G
aatcgaatcactatttcgagaggcccaattcctcttgtcttgctgttatttttgtaccttttatccctanaggacccttcttgggttttgaatggaagcctttattccggttaagatgttttcttctattttaccacttccatctttttttgtggccctcgatcctatttttccctgactccatgcttggttggcccttataaaacttgtgcccaaaagattgaggattagactttccgaggacttacctgtcctaggggagtaggcaagcacttccactagggagggggtgggggaaaggaatgacacatgacatacatggcatacacattaagcagttgatcatatgtctgactgggttccagtttcttgggaatgttggtccccttgttcaggcttgcatattttaaactaaaaatttcagtctattgtttttagtaacttcatttatagtcctccataacaagttagaaggatgtatctgctaccatttattcctataattntagaaagntggggcttgacattatactcatttagtgagagtagatgcanaaaagtggaggcgcaggagaact

SEQ ID NO: 9504 - DNA, 459 bp, Homo sapiens
  misc_feature (1)...(459): n = A,T,C or G
attgtagaccctagaccaccgtggnggaattcatgatataaaaatatatgctgaattacttgtgaagaatgcatttaaagctattttatatgtgtttttatttgtaagacattacttattaagaaattggttattatgcttactgttctaatctggtggtaaaggtattcttaagaatttgcaggtactacagattttcaaaactgaatgagagaaaattgtataaccatcctgctgttcctttagtgcaatacaataaaactctgaaattaagactcactttcagtgcattgtttgagattaaaaatagtatttcttaaacttgcttaatccatgataaagacatgttgctgtcatttttaaaaagtgacgtactacattatgggttttctgaaaaataccatgcctagatctaaaaaggaaaatttttaaatgccgagcacattaacctcttttgtc

SEQ ID NO: 9505 - DNA, 332 bp, Homo sapiens
tgttgaagtatgttatgacctccacatgcgccaggttcgtgagcgggagaggcctgaagctttggagtttaacctttctgccaatccagaggcaagcacaatattccagaggaactctcaaacagatgctttggagtttaacccttctgccaatccagaggcaagcacaatattccagaggaactctcaaacagatgttgtagaaataagaagaagcaactgtacaaaccattgtgaccttggagatacctcatcatatcacacaaagagatgcagatagatctttgagcatacctgatgaacagttacactcatttgcggattccaccgtg

SEQ ID NO: 9506 - DNA, 334 bp, Homo sapiens
gtatgagagatgtttttggatttgagagcagacctttcatagcgatggcttatcacgttgaggggaggggatgactgcaaatatattgatttattttaaatcccagtttggctttagtaaaatcggaatatgtgggcatttttagtttcttacaccaaatgtaggttccgtaagttcatgcaagtacagtgggtcttggatcactgaagtctgaattttatattagcaactgaaaagtttactgtggcctctttccttctgagcaggttagtaggagggctgctttccctcagcctggattactgctttgtcctagaagatgaagatggcatat

SEQ ID NO: 9507 - DNA, 489 bp, Homo sapiens
  misc_feature (1)...(489): n = A,T,C or G
agggtnaatactagaccctagtacacgtcgnggaanncaccggactgcgtttttttttccgaacgcccgcagcagggtcagaagggaggtggtcgccctccgtcgtggtctggcgtgtattccgagcgttggtgtctggcggtttccgagcgttggtgtctggcggtttccgaccgttggtgtctggcggtttccgaccgttggtgtctggcacgcgccaccctctcttgctttggttgcgccatgccgatgttccagacaagaggacaagaaaatgatttgaggacagcttcaatctcggtgtgaagaagaaagcagcagaccgaccactgaaaacaacgccggtggcaaaatatccatagaaagggtcccaagcggaacatcgtcgtacccggatacagacagagccaccatccaatgatattttcaatgctgcgaaagctgccaaaagtgacatgcagggatgtccttcctgagatccgtgctatc

SEQ ID NO: 9508 - DNA, 335 bp, Homo sapiens
gagtatctctctttgcagttcaccaaaacattctttttggaagatgatacgacctatactagaaaatgaaaataaatttaaagatgattcaatgacacaagctgggaatcctcctaagtggcttgctgtatcccccagtgcctgagctgggctttcacaggatttgggagagaaagtggggatgaggggggcagttctatcttaagatgaactagatacacgttctcaacaaggatggcagtgctgctcgggaggtgttggaaaatttgttgaatgtggaggaactgattgtcacaataattgagggaggaggtgctattgagatttagtgggca

SEQ ID NO: 9509 - DNA, 457 bp, Homo sapiens
  misc_feature (1)...(457): n = A,T,C or G
natgagtgcatacncacgncgnggaattcatttaaatatgttgcaagtaactttccctcggtagcttgttcttttcacttctgatgtcttctgatgtacagaagttcttgattttaattcagtcaaatgcagcaatcccttcctgagctgagatattctattctattattttcacacagctctactgttatgacagtcacatttagatccaaaatctacatggattaattttcccattgatgtgagacggatgccccatttactgcagacagctcccgcctcactctgcgctggctgcttcctctgtcagaaatcaagcgtgcatataggcacacgtctatttctgggccccagataatctctctactttgtgtcataggtttatttatttaaagcaaatctggtaggagcttcctctggtagcgtatggaggatggagtgcagtgggaggaaagtg

SEQ ID NO: 9510 - DNA, 470 bp, Homo sapiens
  misc_feature (1)...(470): n = A,T,C or G
gatgcgagnccccactataccttgcgatagacgacgattgcnagggacgcccaggtggagctggacagaatatttctgtccataagacccccagaagtttcctaagtgggataccagtgaggactgctccagcagctgctgtctctccaatgcagaggcattcgacttacagcagtgtgcggccagccagcagaggggtgactcaacgcttggaccttcctgaccttcccctctcagatattctaaagggaaggactgagaccctgaagccagacccccacctccgcaagagtccctcactggagtcactgagcagacccccgtctctgggctttggggacacaagactgctgagtgcttccacccgggcatggaaaccacaaagcaaactcagtgtggaaagaaaagaccctctggcggccttggcccgggaatacggtggttccaagcgcaatgctctactgaaatgg

SEQ ID NO: 9511 - DNA, 453 bp, Homo sapiens
  misc_feature (1)...(453): n = A,T,C or G
catagaccccccactgatgatcatcgcacagngcggaggaantcagccggaaagggtctatctaccactgagtcccactctcttcagctctcccttcccccagattcaccatcagaattcatctcctttaggagtttaccttgtcaatagggccccgtgtcctatgggatctcacatccagagtatcgattttaacaaaattcttcagctcacttttttcattagtttctgggagatctctttctggttttatttattctcattttcttccttttcaccctcgattcccctccctcaaagtcaacctttctaatatatttaatgtgtgtctgtttttcatatgtatttttgcagaatgggtattgtgttttgtttgcgggcattttaactgacatgcaggatggtgtgctgtagatcccattctattgcttttttccacactgagaaccatan

SEQ ID NO: 9512 - DNA, 480 bp, Homo sapiens
  misc_feature (1)...(480): n = A,T,C or G
acatgacctcngnanngncttganttctaggannnnccnnannnantnngnattggattcccttcaccctcctgttcctgacggctgtggtccagcgcatcaccgtgcacgtcacccgcaggccggtcctctacttccacatccgctggggcttctccaagcaggtggtggccatcgtccatgccgtgctccttgggtttgtcactgtgtcctgcttcttcttcatcccggccgctgtcttctcagtcctggaggatgactggaacttcctggaatccttttatttttgttttatttccctgagcaccattggcctgggggattatgtgcctggggaaggctacaatcaaaaattcagagagctctataagattgggatcacgtgttacctgctacttggccttattgccatgttggtagttcttgaaaccttctgtgaactccatgagctgaaaaaattcaaaaaatgttctatgtgag

SEQ ID NO: 9513 - DNA, 496 bp, Homo sapiens
  misc_feature (1)...(496): n = A,T,C or G
nttgaaaccttnnaannnctttgataccttggccangngccggaattcatgtaaaaggaatataaggatgtgttggatgcctttttcttagaccaggaatggggaatttataacacctgtgccgccgctcttttaaggaggcattatgaatgagtgcagcattcctgtcctctgtgccaggatttggtcttagaatccatgtcagattggtgcttccagacatctattcccagtccatcagagtgaaatgaaggctatttgccatccctgccttagacagaggagtgaaagaattaagtgggtagacaccaaccaaaatgactttgaaagcagtgagctgattgagctccagttctgtggttaccagaaatactgagtgtctgtcatgtgcaagacaatgctaagaacagaatacagacataaataagtcacggcccatgaccttgaagagcttacggccttataaagaggttcactgtaatttgcttcaccaggg

SEQ ID NO: 9514 - DNA, 498 bp, Homo sapiens
  misc_feature (1)...(498): n = A,T,C or G
ntttgatnccccttggccagngngcttggattccctcttctccgggagccagtccgcgccaccgccgccgcccaggccatcgccaccctccgttttcatgtccaccaggtccgtgtcctcgtcctcctaccgcaggatgttcggcggcccgggcaccgcgagccggccgagctccagccggagctacgtgactacgtccacccgcacctacagcctgggcagcgcgctgcgccccagcaccagccgcagcctctacgcctcgtccccgggcggcgtgtatgccacgcgctcctctgccgtgcgcctgcggagcagcgtgcccggggtgcggctcctgcaggactcggtggacttctcgctggccgacgccatcaacaccgagttcaagaacacccgcaccaacgagaaggtggagctgcaggagctgaatgaccgcttcgccaactacatcgacaaggtgcgcttcctggagcagcagaataagatcctgctggccgg

SEQ ID NO: 9515 - DNA, 335 bp, Homo sapiens
acatttgattcttaaggcccaccccgcctcactcccaccctcttctacttaattcaggatgtgaatagcacatgccttccatcttcagacaaacactgaggcctggacaatgacctgcattaggtagatagaatctactgaaagctaaaagccttttcctgtgtcttagcagcacggaagccacgcctccttccccccaatgtttgtgcaaaccctagagaagaggagacagcccctatgatgtgtgaggttgaatttcctgccctcaacccatcaaatcaggcagaatgagggctcagtcagaactacaactacaaaagagaaaaattttaatg

SEQ ID NO: 9516 - DNA, 495 bp, Homo sapiens
  misc_feature (1)...(495): n = A,T,C or G
cgtttgtaagggcggccnnnnnaaattgagaactgagagcactcgcacagngcggnggaantcgcccggcatcgtggagctggggcccccttttgcctgggagttttgtagtcgcctagggtcagcggtgacatcccaaagggcaggcccggcagccgccatggtggccaaggattaccccttctacctcacggtcaagagagcgaactgcagcctggagctacctccggccagcggtccggccaaggacgctgaggagcctagtaataaacgggtcaaacccctttcccgagtcacgtcgctagcaaacctcatcccgcccgtgaaggccacgccattaaagcgcttcagtcaaaccctgcagcgctccattagcttccgcagtgagagccgccctgacatcctcgccccccgaccctggtccagaaatgccgccccctcgagcacganacggagagatagcaagctgtggagtgagaccttcgatgtgtgcgn

SEQ ID NO: 9517 - DNA, 220 bp, Homo sapiens
atttggaaaggcccccaaggggggggggaggggaacatttttttttaagaaaaccggggtttttaagaaaatttgggccccctcctgttttttgggggcggtttttttttgttggcatttaaaaaaggggggggggggctgaaatttttggggggggttaaaaaacgttttttttttttggttttttttttttggcctttggtttagaaggcccccctag

SEQ ID NO: 9518 - DNA, 447 bp, Homo sapiens
  misc_feature (1)...(447): n = A,T,C or G
atagaaaactgatgaccctctagaccaagcggnggaattcgaggcctcactcctgtgcttgaaggtggctgaggccgggccagtctttctggggttggggcctgaagcctcagggagcccctctgttcccactcctgtcatttgaacccctctgggtggggtttggatgtgcctcgcggggttggatttatgctgacctgctacttaccaggcccaggctggggtggtgtgaaccctcagtgtcctgtggcgcccccaccccggggccactctgcttctgctgtgagccccctcctcgcccaccccgccacgtggggagggttattttaagttctcagagacccaccgcgtctgcctcgtgctcttcttgcccctggagcgctgggggcatcctgagtcaggctgtgagaagattcgccaccagagggcgccccgggccctgggtcg

SEQ ID NO: 9519 - DNA, 481 bp, Homo sapiens
  misc_feature (1)...(481): n = A,T,C or G
tggcgggngnnnnnnnaatcgtagacattagtctttgcggngcaattccataatgccagtttggtatagagtccaactttaaaacatgaattgctcgacagagttctattcagtaggtgtttctttgtattgtcttttgtgaatttattatgaaaatgctgcgttgtgttgaatgaaaaagacccaaattactgcttatgaagaaataaagccagcattgatcacttaatcctgtttctcatgtccagccagaaaaaagaacttcagtgaaggtaagataaataaatacatacacatatgtttttttggtagataagtgctaattacatatatgtaatgctttattaaatttctgaaatatttggtaactaaaattttctttttggaaattaataaatccagatacatattaatgttgatatgagtaaaaacaaataggaagaaattgaaatttcttttcatcaacatgtagagctgctat

SEQ ID NO: 9520 - DNA, 480 bp, Homo sapiens
  misc_feature (1)...(480): n = A,T,C or G
gcggggggnnnnnnaaagtagaccctagtctttgaggtcgaattcggcagaaagagaaagaggataacactgaccaggtttgggtctggtcagagcccccgcctcttcagggcaggtgctgagttgtggaaatttgaggagcctattttcgtgtttagttttcaaactaagactgctgcttctgcttctctgacgggcttcagctgggaacagattaactaggttgctaaaggaacaaatatttcttccgtgcactgaagacaggcaggaagacaacagataacgtacctgcagtggagaggttaagctcctgtacggaagcgtaattcataaatagataaatataggaaaggacaacaaagaaaatagggatagaataacgggcagagaatttagagatgatgtcaggtgattagttttctcatctaaaagcttgaaaatcctgcatgtttgtggagtggtcaagcaagtggtgaaaag

SEQ ID NO: 9521 - DNA, 455 bp, Homo sapiens
  misc_feature (1)...(455): n = A,T,C or G
ctagacaacantnnttgatgaccattatacagngcggnggaattctgggcttgcttcacacaggatgctcccctcatttgggaataacttctccagggtttggcttggcccttttcctatggaggtgaacatgaggcagggtagtgggacggtgtatggcctgcatgactgcagctggctttgaagccacaactgatgctcatggtcttcttcatctactatccattctagagtaccctcagtctcagccaccatgtctgccgttctcagtgacctggctggtcgagtaacagacctttatccctgaggattgtttctgagcccatggtccccgtgcccttctcagactgtggaaattgcatgtgtccatttaccataaaaattgggcagggaattattaggagacattcaaatggatcacctgggtgccaaatatatccttctctgttcacagg

SEQ ID NO: 9522 - DNA, 445 bp, Homo sapiens
actaatgacctgagaacatgcggaggaactccattcctaggcctagaaaaatgtctgacacatagtggcaattattcattgaatatttggacctctggatagtacattagctatgctatatgcatacattaaagatgtagattatcgactttcaaaagataattaatgtaacttcttactgcttctgaacatgtttgtgagttatattgctgagggacctttatcttctcattctttcatcttaacccagtgttataaaattgaaatcaccaatattattccatatctaaaattaatatctaccttgtaaaaaatatcactctgctgcatttgagaatagactttttaggtaataatgatgcaatccatagggttttttgggggcacagagggattcatgctaacagaacattttatttgctattttcccagagctgtaaaacat

SEQ ID NO: 9523 - DNA, 453 bp, Homo sapiens
  misc_feature (1)...(453): n = A,T,C or G
aatagatgaccattgttgagngccgtggaattccttaaatgataattggcctactcatacgacactaatcctttatcaagtccaaagaatgtggcccgatctgtcctaagtacttgaatattttttatctgatcctcactgcaatcctgggaaggaggtataatcatccccattttaaaaacgagattgctgaagttcagagaaacgagtaaacactcaaggtcacagttagtgaccaggcttggaaacaaggtctatcagactctaacacccacttgtttatattacagtatgcaggattttaaccatttattcccattcatatactttcaagcctattttatgaaatgtccatcacctccctgctgaatcacgttgagatgggttgggtgcttcctatttctaagcctacaatgcagggactttgctgctccatccctctgaaaggagaaa

SEQ ID NO: 9524 - DNA, 457 bp, Homo sapiens
  misc_feature (1)...(457): n = A,T,C or G
taaantttgtagaccttagtccagtgccgtggaattcgtcacagtgtaaaaacaaatggaaataacagctcaaatcttcaaaatattactatagcattatgtttaaaataatctacaacaaaaatgtaccattttcaagcagtactacattaggagcccttttatagaaaataatttcttctttacccccgttccagtgtgaatctagtattctgttaacatttgtgtggcatttggagtttgtcatccccattgaagggagagccttctcagacatgaagcaagggaaacatactgaatagttttacacaaatttgatctggcttccatttgtccccctcatttcccaaatgtttaaatgtattggatttggattctcaatgtataagttgccttatctgttaatgtctatcttctgtctctttaattttggatatctgctggtttgcttttggat

SEQ ID NO: 9525 - DNA, 479 bp, Homo sapiens
  misc_feature (1)...(479): n = A,T,C or G
naactgtaccctcgcagngcactgattacctccagcaggcggggaacctgcttaacagtgcttggacggaacccggcgctcgttccccaccccggccggccgaccatagccagccctccgtcacctcttcaccgcaccctcggactgccccaaggcccccgccgccgctccagcgccgcgcaggcaccgccgccgccgccgtctctccttattcgccgccatgacgaccgcgtccacctcgtaggtgcgccagaactaccaccaggactcagaggccgccatcaaccgccagatcaacctggagctctacgcctcctacgtttacctgtccatgtcttactactttgaccgcgatgatgtggctttgaagaactttgccaaatactttcttcaccaatctcatgaggagagggaacatgctgagaaactgatgaagctgcagaaccaacgaggtggccgaatcttccttcaggatatan

SEQ ID NO: 9526 - DNA, 487 bp, Homo sapiens
  misc_feature (1)...(487): n = A,T,C or G
gggctgaaaacctcgaangncactgagtgtcctactccgtgccgtggaattcttccacttgtatttaaattttttttgcttctctaaatttggatattcaatttgatgaattatttaccctatcactcttggcttttctaattctttaaaaatatactatttttgccagcttgtttacatatttttaagaggttgtctttggattgaactaaacatttattaagtaatttgcaaaatttaagaaaagagattttgatgggattgacctataatttaaaggataaatggatatcactagaaattttaagatacaattttgaagaatttcaaagtaatcctggaaacttctaaatatgattgtaggagactctgcttgaatagaggtgatgactattaaataggcatatcaaatgatttgccttgagacaggaaccaaagtatagtgacaggattgattagatggcgaaacaataaaagcaccaggagn

SEQ ID NO: 9527 - DNA, 447 bp, Homo sapiens
aatagaagacctttagaccatgcggaggaattcagttaaccttattaaatattgattagaattgttctgtaatattactgaatttgtatgatctttagcaaagatttttgagcaatttataaatgtagagcaaatgtttctgtttactgcactttttgtaactgaaggtgataaattctcaagccatgattattggcttccatgcactgcaatatttatccacaattctagacattttccatttttgtggaagagttgctgttaccttaattataaatgcaattgtgtggttaatgagagctaatgctagtagttaaccttttaaagtggattggctacagttgagggagaaatctcttttaatataaatcacatcattccttaactgcctctcttggaaagagattgaaaccttttttttaaagcacgatttatcatcctaagctt

SEQ ID NO: 9528 - DNA, 501 bp, Homo sapiens
  misc_feature (1)...(501): n = A,T,C or G
attgatncccgttgggannnncttttgagtcccctagtcagtgtgctggaattcggtgggcacattgatctgggatcgggcctgaggtttgccatcatttagaccctgcatttatagcatacggtatgatattgcagcttatattcatccatgccctgtacctgtgcacgttggaacttttattactggggtttttctaagaaagaaattgtattatcaacagcattttcaagcagttagttccttcatgatcatcacaatcatcatcattctcattctcattttttaaatcaacgagtacttcaagatctgaatttggcttgtttggagcatctcctctgctcccctggggagtctgggcacagtcaggtggtggcttaacagggagctggaaaaagtgtcctttcttcagacactgaggctcccgcagcagcgcccctcccaagaggaaggcctctgtggcactcagataccgactggggctgggcgccgccactgcct

SEQ ID NO: 9529 - DNA, 448 bp, Homo sapiens
atagaaacctgatgacccttatacagtgcggtggaattcttcagcaagtcacttgggcgagcacacttggtctatcctggaaagtctccttataagagaagttgtgtatttcatgtgcaccgagcaagggcattggaagacgtcatgaggctgtattttagcaggactgatcgtttttctaagtagacctgagctttgtttatcagtgaaattcaaggagaaaatgaggttaatgaagaggtatcagttaaatatccccttcttctcaccctgccaaaattagcagttggatttttggaaactctggaatattctgggtcattttgttttgtatgtttgttgtttttcgtcttccaaaggtgaaagctatgatacagttccacttaaattttagtgttttcttactcagctcaagcattaatttttgattaagtcttaatctgcatga

SEQ ID NO: 9530 - DNA, 471 bp, Homo sapiens
  misc_feature (1)...(471): n = A,T,C or G
gtggggcnnnntttgatcgcagtcataggacangcggnggaattcggtaaaaccccgtctctactaaaaatacaaaaattagctgagcgtggtggcgcatgtctgtagtcccagctactcggctactcaggagactgacgcacgagaatcgcttgaacccgggaggcggaggttgcagtgagctgagatcgtgccactgcactccagcctgagcgacagagtgagaccctgtctaaaaaaaaacaataataataaaataaaataacatacctagctgactcgccatgggctcgctggcctgtgggcgacactggcttcccttttgggatttcccagaagatccagattttcttaagtccccttggaacagactaagaaaggatcaccttagaaatcacctggtcctattgtcccccccgtacatgagtaactgaggcccacagagagcaaatcgcctgcctgagtcacact

SEQ ID NO: 9531 - DNA, 445 bp, Homo sapiens
atagatgacttgagtccgtgcggaggaattctgggactacaggcgtgtgccaccatgcccgggttatccaggctgtcttttttggcatctgtgtgctgactgatctttccagtcttctgactcgaggaagtgggaaccaggagcaagagaggcagctcaagaagctcatctctctccgggactggatgttagctgtgttggcctttcctgttggggtttttgttgtagcagtgttctggatcatttatgcctatgacagagagatgatatacccgaagctgctggataattttatcccagggtggctgaatcacggaatgcacacgacggttctgccctttatattaatcgagatgaggacatcgcaccatcagtatcccagcaggagcagcggacttaccgccatatgtaccttctctgttggctatatattatgggtgtgctg

SEQ ID NO: 9532 - DNA, 482 bp, Homo sapiens
  misc_feature (1)...(482): n = A,T,C or G
ggagcggccnnnnnccctgagaaacttgagaacctacggaaaagccgcgaagctatgaagacacaggtgagccatctcgcctggcccaatgttttttaatgcttttattttaaaacattttattatttggttatatatttatttgagacagcatcttgctcttttgcccaggctggagtgcagnggtgcaatcatagctcactgcatcttggaacactgaggctcaagccatcctcccacctcaacctctcaggtggctgggactgcaggcatgcatgaccacacctggctaattttattttttcattttttgtacagacatggtcttgctatgttgcccaggcgagtcttgaactcctggcctcaagtgatcctcctgccttggcctcccagagtactggaattacaggcatgagccaccgtgcccaggcttaatgactttaatgttctgggaaaatattactataatttcataaagatac

SEQ ID NO: 9533 - DNA, 485 bp, Homo sapiens
  misc_feature (1)...(485): n = A,T,C or G
agaggccnnnnnnatttgagaactcgagaacctacggaagagccgnggaatttcccgncgcgccgacaggatgggcaagagacgaggacttcgtactgctaggaagctccgtagtcaccgacgagaccagaagtggcatgataaacagcataagaaagctcatttgggcacagccctaaaggccaacccttttggaggtgcttctcatgcaaaaggaatcgtgctggaaaaagtatgagacgaagccaaacaaccaaattctgccattaggaagtgtgtaagggtccagctgatcaagaatggcaagaaaatcacagcctttgtacccaatgacggttgctcgaactatattgaggaaaatgatgaagttctggttgctggatttggacgcacaggtcatgctgttggtgatattcctggagtccgctctaaggttgtcaaagtagccaatggttctcttttggccctatacaaaggcaaaaagg

SEQ ID NO: 9534 - DNA, 225 bp, Homo sapiens
  misc_feature (1)...(225): n = A,T,C or G
tctaatgngagnnctcattcttagaattattgttcagatgggtcgatagataagtaactttcacatgagaaatattattatattatgatataataagaaatatatatatatattggtcattgtctatggttcctggcttacagcttctaaaactcttgtaatttcctcagtgattagagctataaggaatttttgattatatttgggttttgtctttagttcctg

SEQ ID NO: 9535 - DNA, 418 bp, Homo sapiens
  misc_feature (1)...(418): n = A,T,C or G
ctttgaatgaatctagaaaatcaagaatccctatgaaacaatgatctgatagaatgttgtgtgctctccacatattttacatgatcttatgtgtgccgtgagaacagattcctaaagcaacccgatacatggaaacccattcaccactcaccatttaaacagatgatgaattctgttttttttattaagcccatttaacattttacatagtgtttttatggattccaggaatggcttctctttctcaaatgatcaacttcaagtcttctttccatatttcacatctgattatacaatgagcagtgccattgcatgccctgctagaactgtggataccctttanaacaagtagaaaatgatagggtggggctgattangtctaatctcagggaacactgggtagtatttcatgtctagg

SEQ ID NO: 9536 - DNA, 466 bp, Homo sapiens
  misc_feature (1)...(466): n = A,T,C or G
tgggtntnnntttgatagcatacgtagngcgggcaattccaaccccttcaagggctgggccacagcagggagtccagccctaccttcttcccttggcagctggagaaatctggtttcaatataactcatttaaaaatttatgccacagtccttataattggaaaaatactggtgcccaggttttcttggagttatccaagcagctgcgcccctagctgggatctggtacctggactaggctaattacagcttctccccaacaggaaactgtgggatttgaaaaggaaagggaagggaaaacagagaacctagtggtctaccaagtggttggcaactttcccaatgtctgcttactctgaggcttggcactgggggccagggcctgccccagggctcctggaatttcccttgatccagctaggctgggacactccctaaatcagctgcgtgttggtagcatcaggca

SEQ ID NO: 9537 - DNA, 451 bp, Homo sapiens
  misc_feature (1)...(451): n = A,T,C or G
atagaaacttgtagaccttagacagtgcggtggaattcgaaaagattaacaaaattgacaaacctttagctagtctgatgaagagaaataaaagaaagtagtaaagttattaaaaaatgagagaagggcattaccaccaattttacagaaatacaaaaggattttaagagaatataatgagcaactatataccagcaaactggataacctacataaaatggacaaagtcctagaaatataaaaactaccaaaactgacactcaagataaaatagaatacatgaatagacttataaaagtaaatattgagttagcaagaaaaaacttctaacaaagaaaagctcaggaccagatgactccatcaatggattctaccaaacatttaaaggaaagttagcaccaatccttctcaaaatctttccaaaaaaatagcagagggaacactttctaan

SEQ ID NO: 9538 - DNA, 472 bp, Homo sapiens
  misc_feature (1)...(472): n = A,T,C or G
gggtggccnngnntnnggngacctgatgcccctngaaatgagaccatagtccgtgcggtggaattcgagggccagaagctggtgctgacgcagacaccaaggtggactggcagaggaagtggacgacaaagttcttcatgctgcgttcattccttttggagacatcacagatattcagattcctctggattatgaaacagaaaagcaccgaggatttgcttttgttgaatttgagttggcagaggatgctgcagcagctatcgacaacatgaatgaatctgagctttttggacgtacaattcgtgtcaatttggccaaaccaatgagaattaaggaaggctcttccaggccagtttggtcagatgatgactggttgaagaagttttctgggaagacgcttgaagagaataaagaggaagaagggtcagagcctcccaaagcagagacccaggagggagagcccattgctaaa

SEQ ID NO: 9539 - DNA, 473 bp, Homo sapiens
  misc_feature (1)...(473): n = A,T,C or G
gagcgcnnnnnaatgagaactgagaacactcggaaaccgcgaagattgaactctgtctcaaagagagagagagagaatagccgccaccattattccccctagtgaccccactgaactctactgaaaaccttgcctcatcctcctgcccacgcctgggcaaccccactgggaacagtcatctgcagggacaagcacaaaatccaccctgtgtgctttccagacggatgatgacaccactctgtttgtttaagaacccgtcttttgattctctcataattcctcacactgcttctgcagaatttgtatctaactcaagagggaagaaacaggaagatttctggcttttctttagttgccttaaggtcagcttttcagctgtggcactgaaggggcttcctgggaagcacccaagaaaatgacatgggcttaccagacaagatgtcctgtccaccactggcaaagacagggagtan

SEQ ID NO: 9540 - DNA, 477 bp, Homo sapiens
ccccccccccccccccgcttgacccccatcgcgatccatgtccatgtggtggaattcaagatatgaagaacgagaaagttttagctcagcaagaaatgtaacaatttaaagtttttattctgtcatgattctaaaagcctctagaattgtcatctgccttttcacctaattatacgcatatatacatactctttatatatatacactttgtatatattatgcatattatgtaaatatatacatatgtacacatatataatattcatataattatacacgtatacacatactatatagtatatgcgagtatatattatagcatgtattcagcatggtataatataaaggtctctaaagacaggcagacctatgaaaacatagctcttatcacctattactgagtgacctggggtactatgcttaacttctctaaaacttaaattatcatgtccagtccactggaaaataatagggcaa

SEQ ID NO: 9541 - DNA, 489 bp, Homo sapiens
  misc_feature (1)...(489): n = A,T,C or G
nactgtaccctttgagnttgagtacactcgtcagtgtggtggaatgccatccccctggctgaatgggaaagccggattgcggtaacatggacccctgggagaggttctggagtcttggcctggcagacacctgggaggagtagggttggggcctggcatatcgcagcctgctcctataggcatccctggtgtcctaggcagctgtcacctgcaggggtagcatagtgggagggcagggcatacgtgctgatggctgtggagatgggcggcgcccatggaggtctatagcagggatcccttctgcctttcctcttttgggctggggacagctgcatgctgcctgtgggagatctctgctagttggatgatgctgactggctgaggtggtggccaggtgcccgttagccagtatgccctctgcctcaccctgcaggaggtggatgccagtgtggtacgtgagatctgctccaagtacatctatgaccagtg

SEQ ID NO: 9542 - DNA, 498 bp, Homo sapiens
  misc_feature (1)...(498): n = A,T,C or G
ggcggggnggnggggggggnnttttnnattgtagaccctantnagtctggtggaattcgattgcttgaggttgggagtttgaaaccatcctgggcaacataccgagactccatttctacaaaaataaaaaaattttaaaattttattgtttaaaaaaaatttattattttattattatgttgggcacacacctgtcattctagctcccaggaggctgagctgggatgatcgcttgaccccaggagttagaggctgcagtgagagcgcaagagtgacagcacaagagtctgtctctaaaatccaaaaacaggaacatagcctctttttgctatttcctctgccatccccagggtgggggccttttccttgtgttaaccagatggcttctggaagtccagccttcatatttctgttccaggcaagaaggaggaaaggattaagggtaaagggtaggtttcccagccaaattttaaagactttttctggaagtctcgctaa

SEQ ID NO: 9543 - DNA, 449 bp, Homo sapiens
  misc_feature (1)...(449): n = A,T,C or G
atagaaaaactgatgacccttatacagtgcggnggaattcctcctttcccttcccaacctgcggagagaagacagccccagagccgctgtctccattctctgctgatgcctgctgtctttatgttggcctcgtcgtccgcactgcagtgtggcaggggcgtccctcgtttcccgcggactgaggtgggcgccgggcattcagtaaacgaagaaaccaaagcggagaaggttgggaatcaaacgtctgtcatatctgccaccagcagacaagcggctttgggtacctcctggacccaaagacgaactcagcccctccaggagcgcagtcattggcaccctcgtgggaacaatgccagtgggatgggtggccaccggatgtttccggggcccctcagaggcccagcagcgcaggtcttggagaatgaatgtgggtcactgggccgcgctgc

SEQ ID NO: 9544 - DNA, 453 bp, Homo sapiens
  misc_feature (1)...(453): n = A,T,C or G
gggaaaatgagaccatagnaacngacggcctattgcgaanncgaagacagttttgtgatataaagattacacctcttaggtctattgttactattttttaattgataattatttaatttgtgctattgaaaatgtgatgccgaaaatcatgatgtttcctgcaaaggataacagttttgacttgaaagtatgtctaaggaacagaatttcaacttgaattttagatctgaagctttttgcccaaacttacatttctttttaaaatagcgtaagaggccaggtgtggtggctcactggtaatctcagcactttgggaggctgaggcaggcagatcgcttgaggtcaggagttcaagaccaacctggccaacatggtgaaaacctgtctctactaaaaaaatacaacaattagctgggcatggtggcaggtgcctgtaatgccagctacttgnga

SEQ ID NO: 9545 - DNA, 460 bp, Homo sapiens
  misc_feature (1)...(460): n = A,T,C or G
atcgagatcattttgaagactgttggaattcgcagntcttatgtccttggtgatagaaatgggtttggaccgcatcaaggagctgtccgaactctgtctggggcaaaacgagtttgattttatgacggacttcgtgtgcaaacagcagcccagcagagtgagctgttgactcgatcgaaaccccggcgaaagaaatcaaacccccaacttcttcggcgtgaattaaaagaaacattcccttagacacagtatctcacttttcagatcttgaaaggtttgagaacttggaaacaaagtaaactataaacttgtacaaattggttttaaaaaaaattgctgccacttttttttcctgtttttgtttcgtttttgtagccttgacattcacccacctcccttatgtagntgaaatatctagctaacttggtctttttcgttggttgtttttactcctttccct

SEQ ID NO: 9546 - DNA, 420 bp, Homo sapiens
gcagtctgttacatacagtcagtgcacctcagccaggggcaagtgggaccctaacaatcctgaaggacactgtgcacaataggccctcagtaaattgtggaatggaacacaggcagggaaattttgacttgattgttttcttttgcgccctttcttagttttatatttgagattcagtggatatctgcagatggagggactcattttagggaggctgggagcagaggctccagagccggccaatgtgcaagttcaaatgatagcttcacagcctacatgctgtgtgatcttgcccaaggtaacctgtctcaagcccagtttcttcttctctgaaatgggtgtaatagaagtattttttactactgattaaaatacctggcagtagtgccgggcacagagtaaatgcttaatagatagtgg

SEQ ID NO: 9547 - DNA, 471 bp, Homo sapiens
  misc_feature (1)...(471): n = A,T,C or G
tgggggttnnnnaggatagcattcgtcagngcggnggaattctgagtggccgcgtgtgcgtggggtccccgcctggcccaggcttcggctcttcccctccaggagcagaggcagctcccagcctgagatacgtgccttacggtgcttcaccccccagcctagaggggctcatcacctttgaagcccctgaactgccggaggagacgctgatggagcgggaacacacagacaccttacgccatctgaatgtgatgctgatgttcactgagtgtgtgctggacctgacagccatgaggggaggaaaccctgagctgtgcacatctgctgtgtccttgtaccagatccaggagagtgtggtggtggaccagatcagtcagctgagcaaagactgggggcgggtggagcagctggtgttgtacatgaaagcagcacagctgcttgcggcttctctgcatcttgccaaagcccaaa

SEQ ID NO: 9548 - DNA, 460 bp, Homo sapiens
  misc_feature (1)...(460): n = A,T,C or G
ntttgagnccctgatgctcttcagaccancnggnggaattcgatgagcctccttttagcagagtgaacccctttttaaaggccactttatacaacatccaccaatatattgtttagagacggtttctgtctagtgtaaaacttgagtggtctgactctaataaatggttttgaaatgtgtgactggtattataaaatttgtgaataaaacatataaaatatgaaaaaaaaaaaaaaaaaaaaaaaaaaaaaaaaaaaaaaaaaaaaaaaaaaaaaaaaaaaaaaaaaaaaaccccacctttaaaagggggggccttgtaaaaaaggggcccctaaaacccccggttgaacctccgggcccgttttttttttggccccccttggggggctccccccccccccgtgtttttttcccccggggggggctctccccaaggggtttttttttaaaaaagaggggg

SEQ ID NO: 9549 - DNA, 469 bp, Homo sapiens
  misc_feature (1)...(469): n = A,T,C or G
catcgatagcctacgccangncgnggaattcgaggtaaccaattcttgtcatggtgaaatctgattgagtaaccaagcagttttactattctggtgctgcttcataacaaaaatgaaaagctgcatgcatctacagcaggcatggattgtttatgtcgtatgatatcctttattaagtaagttcacttatagtatttctataatttgattcattgccgtaatagagccatgtaggaaatgcactgattgcatgttattgtggcaagaatatcctaaatgtcattaaaatcctccaacatgatggatctacttatggtcttgtttgttgacatgacaaattaacattcttatagttacatctggaaatgagcatttgaaatagataatcctttaagccttgtggcaaaatttttgtggcttttgtttaacttttgaaggttattatgcactaaccttttttggtggctaa

SEQ ID NO: 9550 - DNA, 472 bp, Homo sapiens
  misc_feature (1)...(472): n = A,T,C or G
gggaggccccgnttnggggngaatgagaccctngatttgagnacattagacagtgcggtggaattctcaccacagtcagcatgccccaagtgcccagcatggggcggatggccaggaatgagtgaaaacttcccttcctgggtagttgtgactagtagagaggaaaaataatataattgcctgcttactgcatgccaggcattgggctgggaatttttatattggatctaaaataactcttaagttaggcattatccccattttatagatggagaaactggccccaaaaggtgggaacttgtccaagacgtcacaggtagcaagaggtacttttacctggctccaaatctgtgttctttccactgacaaatgagatatgggatatggtgcatctttacagtactataataagtattggcgataacattattttcaaggaactccaagggccacaggagctgacaggtttttc

SEQ ID NO: 9551 - DNA, 467 bp, Homo sapiens
  misc_feature (1)...(467): n = A,T,C or G
tcccgattgtagactactgtccagtgcggtggaattcacggcggcgacttagcaggcggngcgcatgctgcggagggcaagagtccactcgtactcgccgctcgccgccggcccagatccagaacatttctgccttcaactccagccaggatctgaaggtccaggaccttaggaaagctgcctgcagagaggtggagagatgtgaattattaaaaagaaaatggcccaacggagcactgtatttccttctcgtgtcaccaaggaaaggtataatatatggaaaatatgcatctaaggcgagtgagaaccatgccccgacacagccagtccctgaccatggcaccatactcatctgtaagcctcgtggagcagctggaagacaggatcctctgccatgagaaaaccaccgccgccctcgtagagcacgcctttcggattaaagatgacattgtcaacagtttgcagaa

SEQ ID NO: 9552 - DNA, 469 bp, Homo sapiens
  misc_feature (1)...(469): n = A,T,C or G
gggggcccggnttnnngnnaaatgagaccatagnaactgaggnctatagctacagacncaagtttaattacagatggaactttgctaggtaagtacaataggaaatggacaaaagagttataggtgtgattatagtgatgaaccatggaatctaagctgggtaaggaggatgaaagagggtgatgaatcatggacaaacaacagggctaattgattggagatccaggcggacaaaagaatcttggactgcaggttttactctaaaggaggtgaatctgtaagatggtgtatgatggtcagagaagagaacatttccaatagaaatttagaagatggaacaattgataattataacatccagcttctcacctgtatctagggcagtggttttcaactaggggtgatttcatgctccgggaaatatttggcaatgtctggagacattgtaggttgtcataactaggggagn

SEQ ID NO: 9553 - DNA, 483 bp, Homo sapiens
  misc_feature (1)...(483): n = A,T,C or G
ggcgcgnnnnnnnnncatcgatagcctactccgtgtcgnggaattcattttctctctacttcaaccaaaatcagatctttgaggttttgctgacattgttggtggttttgcacatgttctttctaattggatttatgaatagttctatgggttttcaaagatgaatcatgctaagaacacttctgctttttgatccactgtttgcagcagaattatatatatgtataggaaaaatccactttgaataatccatgttttgtatttggaaattgtttttaaaaataaaaaggaaaggaaatatataaagctgttatttattctgcatttcttacatatctatcgcttgtcagtatacccgttttggtatatattgcctctgcacatctacatttgtatatgcaacagtgagctttatatctacataaactgtaaataatcctttctgtgaaaggatcatcatatcaagatgataccaaaagatgn

SEQ ID NO: 9554 - DNA, 482 bp, Homo sapiens
  misc_feature (1)...(482): n = A,T,C or G
ggagcggggnnnnnaactgagaactgaggaacntncgaggaanccgacaacagcagactaggcccttatccatctcccagacaaaatgcctccaaaatccatctcccagaaatgataggttgatagcaacaccacctccatctaggatgcagttaaagaggaatttaattttttaaaaaattaacccaaccagcctgatcccagtagaatcaactgcacatcaaaatttcatggaaaaaagtttttaaaacacagatttcaagatcatcttcaaactaaacagcttctgcctctggagatggcgcttggcaatctgtgtgtatctgtagttcctccaggtgattctgaagaagcctgtggagccacattagggaatcactgcagttctcaattgaattgaaaacaggtttctccaggtggactccagaaaatgcagattccaaacagtcttccgttgggaccacatggaatgagaaagagct

SEQ ID NO: 9555 - DNA, 505 bp, Homo sapiens
  misc_feature (1)...(505): n = A,T,C or G
tggcnggcnnnaagccgcattgataccctattgcagtttggtggacttcgttatttttaattgctgtatgaaatgtgatcagattattttactaccaacagttatagtttgaaagtccaactgtattaattgactgataatatgataatatagagattaaattgtttgtcttcattccttatatgtttagaagtttttgctttgtctgcctgcttacttgtatatgtaagcatgagggaaatacactgttgctaatactgaaattacaatcaagtaactaaggccttgagttcatatgtgacactgaatgcactagcttccttcgttctataactaatgtaccttaacttcccccattcttatatttacaagaagctaagtcattatgttctgagtgtgtggtatgttcccttaaaaaaaaatgacacttggaagaaaaatgtatgaaattcagaaattccgatcaaagaaaagtaattctttctttttttttttgagacagaan

SEQ ID NO: 9556 - DNA, 473 bp, Homo sapiens
  misc_feature (1)...(473): n = A,T,C or G
gcggtgntnnnttttgatcgcgtacattaggccgngcggtggaattcggaaagtccgatccaagggaagctggccgcgcctccgcgacggtgttcttggcacggaggactgaggcgcagtccggctgtctccccttgcctgctcttcccgcgctgtcccgccgctcctgaccccttcagactgtcccgagaagtctaggaaggcaccggagaccctcggcacaaggcactgaacctggagcgcctgaggggaactgacgcttgcttggcacctttgggaagactgcgaaccagctcaggtcccaggggagcgtgtccgtgtctttttcggccgcattgatgcacccgcccaagtcatttcctcagtcttctgcttcctagaagcaaaacaaggaataacattatgatacctttaaaaagctgaggcgtgaaactgctcctgcaacttggaagcgcagggcacttgaactttat

SEQ ID NO: 9557 - DNA, 568 bp, Homo sapiens
  misc_feature (1)...(568): n = A,T,C or G
ngttcgatccccntnnnnnncctcgatcncctatccgtgtggtgcaattcggngatttgatcgtggaggcatgagcagaggtgggcggngaggaggacgcggtggaatgggcgctggagagcgaggtggcttcaataagcctggtggacccatggatgaaggaccagatcttgatctaggcccacctgtagatccagatgaagactctgacaacagtgcaatttatgtacaaggattaaatgacagtgtgactctagatgatctggcagacttctttaagcagtgtggggttgttaagatgaacaagagaactgggcaacccatgatccacatctacctggacaaggaaacaggaaagcccaaaggcgatgccacagtgtcctatgaagacccacccactgccaaggctgccgtggaatggtttgatgggaaagattttcaagggagcaaacttaaagtctcccttgctcggaagaagcctccaatgaacagtatgcgggtgggctgccaccccgtgagggcagaggcatgccaccaccactttcgtgaggtccaggaggccccagan

SEQ ID NO: 9558 - DNA, 440 bp, Homo sapiens
gtttgcggtctagttgggaggacattatcttcacaagaggtgacagtgatgcgtggcacgcaggaagtaccagtgatgctatcagtcactgaacccagaggagggagaaacttgcagtgtggagtaatcaagaaggcttcaccggagaggaggggttgcaaacaaagttgtagagaagggactccaaatggggtaacgagagcagcgtgaaggggagaagaaatgctgattgtgtatttcaggaccgttgtaaagtttggctggacttttgttcctgcagtggaaggagtgtagggctcatcctctggtgagccctgactgtgatgaatgtcgggcagttgtcgaaggcgtctgacacagcaggccatgtgcgcgggacaggctgcccctgcctgagtgggctttaggggcagaagaagccttggttgagtcctgactgt

SEQ ID NO: 9559 - DNA, 409 bp, Homo sapiens
  misc_feature (1)...(409): n = A,T,C or G
gggtccannntaagnaacactgagaccctatgcagngactgataaccctgcggatctgctgaaaggagccgggtccctcaggccgtggacgccctcgggaggggggtgactgtggcttgtgtctggacaggaatgtgtcatttcccacatcttctagagggctgccagctgggaagacagttatcagggcaagctgtgctctgagtttcgggttctgctcctacaaagaacgtgcggtgctgcgggcgagggccccggcacggacaagggccactgcagagtgtgtttctgctcgtcagctgccctgggcagcggatgggctgggcgatgcagctggatgcacatctcattctgtcatgaatgtccagtaaaaatctgaattggttgcaaaaaaaaaaaaaaaaaaaac

SEQ ID NO: 9560 - DNA, 473 bp, Homo sapiens
  misc_feature (1)...(473): n = A,T,C or G
agagggcccgnnatnggggngaatgagaccctngacatcgagactatcagtcagtgcggtggaattccccgcctcaaccgccgctccgcgtgagtaccccctccccaccctaccgtgtccctgtccccctgcccatttaccatacctgggcttagccagtgctgcctgcaggctggctcgcgtgggcaaggtggggcctatgattgggcagtacgtggactctcagtggagcctggcgagcttcactgtgcctgctgagtcagcttgcatctgcgccttcggtcgcaatacttccaagaacgtcaactctgtcattggtgagtgggaacagccccttggttgggggtactgcatggggcaaaggcctgcaggttggacctgaaaggattttagggccatgtgaggctcagcttcatcatcagtaagggggacagcactgggcaaaggcctggaggcagaccctaggtcctgag

SEQ ID NO: 9561 - DNA, 482 bp, Homo sapiens
  misc_feature (1)...(482): n = A,T,C or G
cgccctttgataccatattgatantcctacgcaagnngcgnggaantcgggtcgcagttcttgtttgtggattgctgtgatcgtcacttgacaatgttagatctttttgaagactctgactggtaagacggtcaccctcgaggttgagcccagtgacaccatcgagaatgtcaaggcaaagatccaagataaggaaggcatccctcctgaccagcagaggctgatctttgctggaaaacagctggaagatgggcgcaccctgtctgactacaacatccagaaagagtccaccctgcacctggtgctccgtctcagaggtgggatgcaaatcttcgtgaagacactcactggcaagaccatcacccttgaggtcgagcccagtgacaccatcgagaacgtcaaagcaaagatccaggacaaggaaggcattcctcctgaccagcagaggttgatctttgccggaaagcagctggaagatgggc

SEQ ID NO: 9562 - DNA, 470 bp, Homo sapiens
  misc_feature (1)...(470): n = A,T,C or G
nattgatagacgtncctaggccanngcgnggaattcagcaaaaggaaacatttaaatgctatctttcaaagataactactcttaaaaccttgagtatcttttcagacctttttcttggcaaatgaatccatattgacatatttgatttttttaaaaacatggaaacgtactgttttgtaaattctttttaactgcacatctactgttcataaatatacctctgtaacataactttttgtggttctaatgtactctgttgtatagctaatacaagttaggatgcttttggccagaggtaacagtgtccaaatataattggcctaagtaacctaggaaattgtttgacataacacagggttcaggggtgtcattaaagacacactttttttgccttgacctcagttgcgttggtttgccttaagctattccacctctcgatcacaagagctgctgctataacttccagtttn

SEQ ID NO: 9563 - DNA, 474 bp, Homo sapiens
  misc_feature (1)...(474): n = A,T,C or G
ctgcggngnnnnnncctcgaaaccctttganggtctcgcaaannncannanggttngggtcccaagaagcatttgaagcgggtggcagctccaaagcattggatgctggataaattgaccggtgtgtttgctcctcgtgcatccaccggtccccacaagttgagagagtgtctccccctcatcattttcctgaggaacagacttaagtatgccctgacaggagatgaagtaaagaagatttgcatgcagcggttcattaaaatcgatggcaaggtccgaactgatataacctaccctgctggattcatggatgtcatcagcattgacaagacgggagagaatttccgtctgatctatgacaccaagggtcgctttgctgtacatcgtattacacctgaggaggccaagtacaagttgtgcaaagtgagaaagatctttgtgggcacaaaaggaatccctcatctggtgactcan

SEQ ID NO: 9564 - DNA, 490 bp, Homo sapiens
  misc_feature (1)...(490): n = A,T,C or G
aggagcgggccnnnnnnacttgagaccctcgagaccctagcgaagngccgnggaanatcacccaccaagtcctaagcagattcaccatagggccattttgagagcttatgacccactggaggttgcatcccgccttggggcccaagagcccctgcaccttcacgtgcctggagccccactgacaccattctgtgtccacccagagagccgtagcagcaataacaccagtcagactcagcagaatggcagggtccccagcactccagcacacacagtgccctgtatgccaggtaaacggtggtgcagcaccctagggaggctctcccaggacaaagaaagccaaagcacatactctctatggccagagaaccacctacctgggacagctaccacatataatgaccctgcccccagcagcagggctactgcaatcacactctgaggacagaccctctcatcaccagccacagccactattgctgccaccaga

SEQ ID NO: 9565 - DNA, 420 bp, Homo sapiens
gaaaaaaataaaatctaaatctcaattaccctaaagtggaaaaacctaagtatctaacctaggaacttgttgcctggtggtggttgttgttgttgttgttttttaatttatttagtgttgatccttgagttatttaatggtatccaaatgatatctgaaagtgattgattttaagatgtaatagttggcaaagtcatttcatttgtgtctcaaacaaataaagcccactgccatgggttaccatctgaaccctgattcattaggcactagtcatgccaaatggggatctcagaatagtttaatcttttcaaagatactcacaatggccaactgtgtgtgaatactggaaagtttgagattcttctatattcttcaaatttatggtcctgagactaggagggatctccagaggtcatatgg

SEQ ID NO: 9566 - DNA, 488 bp, Homo sapiens
  misc_feature (1)...(488): n = A,T,C or G
agagcatccnnaggtnnnnnncctgagaccatagatagagcgcgtagnncgncaatttcctgccacactctggccaaaaaagcgaatttcatgtcttatgatcaaataaccgtaactttgcaagagcagagtgtgttggaacagggatattgagggtccctgtgtggcttggggcattgccagggcagctacagggtctgagtgtttttattttattcctgctttattgccctgcctaatactcccatttgaaaatgtcgtggagtaggctggtgtcatttgttttcataaattaatgtctattgcaatttatggccagatgggccctgaaaaataagagccttgtgtgtctcttggaaggtttaaagaaaagcagtgggcaatgctcagggtgaacttttgcactttaaggcttcgttgtggggagagagtaaatgcttgtgaaaaatcctgttttataacagctgggcacaaaggactccttattn

SEQ ID NO: 9567 - DNA, 472 bp, Homo sapiens
  misc_feature (1)...(472): n = A,T,C or G
tcgggactnnntttcgattgcatctctccagngcggnggaattcgtagtgtctgctttttagacttttctttagactatttgtatttttttcagatggagtcttgctctgtcgcctaagctggagttcagtggtgcggtctcggctcactgcaatctccacctcccgggctcgagcgattcttctgcctcagcctcccgagtagctgggattataggcgcctgccaccacgcccagttgatttttgtagttttagtagagacggagtttcaccatgttagccaggctcatcttgaactcttgacctcaaatgatccgtctgcctcggccttccaaagtgctgggattacaggcatgagcccctgcgcccggtcgattctttgtctttttaagtcaacttttatatgtgaacaatgcttggcaggtggttggtagatactaagtgatgttcgtggtttggggtcaaggcaaga

SEQ ID NO: 9568 - DNA, 474 bp, Homo sapiens
  misc_feature (1)...(474): n = A,T,C or G
tgggggcttttattgatagcgtacattaggccangcggnggaantcgagagacggaagtcttactaatagagctggagcaaatgctgcagcaagcactgcattccacagccacacctgatgaatcaaaagaaggacatggagaggaaataaatatgggagaaaagttatctaaatgcagcccagaagctcctgcaggcagtctgtttgaaaaccactatgcagaagacattcatgtgattgatggtattttaataacagctggagaatgcattgttgatataactaatagagataaataaatagatgctttgatgtctgagttttagaacattatacatttttcaaattaattataaaaatactggcactctctatatttatccaaaggtcagactttaaaaatgtttaacgaaatatgtattaattataccaaagtttatatttgcggaaactttctacttcatattttgagg

SEQ ID NO: 9569 - DNA, 469 bp, Homo sapiens
  misc_feature (1)...(469): n = A,T,C or G
gaagtccccgnttnggggnaaatgagaccatagacattgacggccgattgctccggcatgaccagcatgatattttcagagtcttgtccccggggtattagcacctctttttgaacagggaattgattcaagattggacatggtctcctctgattatcaggtactggggctgagggcattaaaaatagtaagcctccctcctcgtcccctgcctcaagaaattgcctccttatttatcaacatctttttcctccctttccctgagagctcacagtacaatgtttcagaagccccatttgcacaggttttcagcaactcagaatgctctacttctttttctttgagaaaggattaagatacactcctgctgtgcccccatctttcctccaaactcctgcctgtgaatgtgtggatacccagtcccagaaccacactgttgagttggacacactgtaaacccctgggtaaa

SEQ ID NO: 9570 - DNA, 470 bp, Homo sapiens
  misc_feature (1)...(470): n = A,T,C or G
cattgatagcgtccctacgacanngcgnggaantcgctttcttaaaccctagcatgtagtcttattatgcctttaaaatatgagtagttataaggtcacatttgctttcaaaaagctattgtcctcatgttactttactatgtttggatctctaaactagctcttttgttagtatcgtctcacaaactgattattttcctctttctttggtaaggtcaataactgggagatggacaaactagagatggaagatgcagtcacatttttgaagactaaaatctattcagtagaagctcttcctgttgctgctgtaaatgtgcaaagcacacaataaagtgaaaatcaaccttttcatattaggagacatgcatttgtaaaaattaataaagatgacaagtcagttgtcaatggaattgagctatctgctaagacaaaaaatgttacctcagttcactattaaaattaatttg

SEQ ID NO: 9571 - DNA, 468 bp, Homo sapiens
  misc_feature (1)...(468): n = A,T,C or G
cactgatagcctgcacaggccgggcantttaagcgctgagggaactgggccggcacgaggatgccagcattgtatggcgcagccagaacgcagggtaactaaccgtttggttctccgccccgagggagagctgaggaaggcgtggatctcccctgtgctgaggaaagtcggggggtcggggctgtcttgtgtcactcctaatgcagcacacaactggctgtagctcagcacctgaggggaagctagagttagggggtgcagaggccccgagggtgaggcccgcccacaccccagcaccccatgagacgcccaggtggcgggagggaggcacctcttcctggctgatttctccatagcgcttgtcctcaaaccgctgcttcacggcgggcagagagacttgcctgtagtccttgggggcgtcatcatggaagctggaaacagagtcacgtggagtggacatgtgaggcn

SEQ ID NO: 9572 - DNA, 474 bp, Homo sapiens
  misc_feature (1)...(474): n = A,T,C or G
tgggtgcccgnnttnngggggacatgagaccctagnaatgagaccatagtcagtgcggtggaattcattggacctagggaaagagaaagaaagaataaaagctggagagagagtgaagtgaatgcaagatacaaagtgggatggaagaattaaatccagagttccaggcaatcaaaatgagtgcaggttgaaagaaaacaggtgaattttagtggcatatggatgataaagctgtaaataaaattcttttgatgaaactctccggttatgagacaaagactgtaactgaacaggagctggtgtgactgttaccagacagaggcaactgatgaaaaagccctgtgaaagataggatgtgaggtgagcatgagcttgagctgagagacagacacaacagtatctgaaaagaatacatactctttccatgcatatatggaacatggatggaaactgaccacctactttgtccagaan

SEQ ID NO: 9573 - DNA, 451 bp, Homo sapiens
  misc_feature (1)...(451): n = A,T,C or G
nggaaaatgtgacctttgcattgacggctattgaaggaccctttctctttttaaaaactttttatcatgaaaactttcaaatacaaaaataaaatggtagagtgaacctccatgtacccagcatccagctccagtaaccatcaatgtgtaccattatttcatctctcttcctgcacatgctcttctgatgtgtgagctagagtatctgaaaggaaatttcagaaaaccctaaaaaccactatgtctctaacagataagggctttaaaaatacatatatgagccgggcgcggtgactcatgcctgtaatcccagcactttgggaggctgaggtaggcggatcacaaggtcaggagattgagaccatcctggctaacacggtgaaaccccatctctattaaaaatacaaaaaattagccgggcatggtggtgggcgcctgtggtcccagccat

SEQ ID NO: 9574 - DNA, 454 bp, Homo sapiens
  misc_feature (1)...(454): n = A,T,C or G
gtagcacctagcacagcgcctagcccataacttgtgttgaaaattaagagaaccttcttaatatcacttttccccactctagttctgaatttaaagaaagaaaaaggtaggttagcaaatataggtatcagttatttctattgacagatcatttggagaacatgtttttgggcgtgggagaaaaaagattcctaactctccgccccagaaataattttgctgacacaaaaatcagccagacatggtggcacaggcctataatcccagctacttaggaggatgagtttgaggataaggatacattgtgaaaaaggtgggaaaatcacttgaacacaggaggcagagattgcagtgagccaagagtgtcccactgcactccagcctangcaacagagaaagactctgtctgaaagaaaaaaaatgttgttgctatatagcacataattntattgtg

SEQ ID NO: 9575 - DNA, 499 bp, Homo sapiens
  misc_feature (1)...(499): n = A,T,C or G
aggagttccnngggtnngnncaactgagantcctcgactgangcgtcctagnanagnccggnggaattcaaagngtataaatctgaggattcacttggtctcaccattacatataatggngttttctatgcttttataaagagaattaaagatggtggtgttattgactcagttaaaacaatctgtgttggggatcatattgaatccataaatggagaaaatattgttgggtggcgtcactatgatgttgctaagaagttaaaggaattaaaaaaggaggaactctttactatgaagttaatagaacctaagaaggcatttgaaatagagctgaggtcaaaggctggaaagtcatcaggagaaaaaattggttgtggaagggcaacacttcgcctgagatcaaaaggtcctgccaccgtggaagaaatgccttctgaaaccaaagcaaaggcaattgaaaagattgatgatgttcttgagttgtacatgggaattcgag

SEQ ID NO: 9576 - DNA, 455 bp, Homo sapiens
  misc_feature (1)...(455): n = A,T,C or G
cttgangaccattttgtagacccctagtccgtgcggtggaattccaagaaatgaggagagctgagactggcttggaatccctcagtctgccaggccaagaaatctggcaaaccagtgattttcaaactgtgacttaagacctatggagtggttatacattcaatttaataggatagaagcaaaattttagaaaacatctgacgtgctaggataggaatagaatagaatacgaattgacccttgaataacatggatttgaacagtgagcatccattcatatgaaattttttttcaatgaatatattagaatattttttgaagatttgtgacaatttgaaaaaactcacaggctgggcatggtggctcacacctgtaatcccaggactttgggaggccgaggcgggcggatcatgaggtcaggagatggagaccattctggccaacatggtgaaacc

SEQ ID NO: 9577 - DNA, 479 bp, Homo sapiens
  misc_feature (1)...(479): n = A,T,C or G
gtgcggngnnnnnnaaactgagaccagtttgaggtcgtggaantngcgnnnaaaaaaacacagatttttagtgttaatattgtgtaaatgtactcaccttatggattcatttgaatgatggtattataccatgattgtatacagtttgtgaaattgttgcaagggcaaagataactcttaaaaaaccgtcgagattacaatgctctagaatcagcatataagaaaataaatgatatctgcatgttgaattggggtggatggggggagcaagcataatttttaagtgtgaagctttgcatcaagaaattattaaaaagctttttttctccagtattttctgtattatcttaatgtttatggcaaataaaatgtaaaggaacatgcnnnanaaaaaaaaaaaaaaaaaaaaaaaaaaataaaataaaaaaaattnnaaagcccccttaaaattaagggggctctcttacccctctttacct

SEQ ID NO: 9578 - DNA, 455 bp, Homo sapiens
  misc_feature (1)...(455): n = A,T,C or G
attgannccttgagaacctagtcagngtgcnggaattctggccaggctggtttcaaactcatgacttcaggtgatccgctgccttggcctcacaaagttctgagattacagacatgagccaccatgcccagcctgaaataaggttcttaaactcacatgcctttcagttgactcctgcagtcagtcccaggaggacattaagtagtctatgcatatgtcctatgacttgaggagtaaattggaaagagacctctatactatcgaaccacagcagaaagtaggctaaaaatccagagcgttctagagaaagctaattcatctagataatcacagattaaaagtctgctaagtgataccatgtatccaagatgggtcttcggtgttcctttgtgcattggcctgtcaacctgcttgctgatcaccttggaaactgtgcttctccttaagagaaattg

SEQ ID NO: 9579 - DNA, 481 bp, Homo sapiens
  misc_feature (1)...(481): n = A,T,C or G
cccccccccccngnnnnnnaattgagaccatagatggagngccgtaattcctcacggttcaggttaaagaggcactgtcaacttactatacaagcataatttaggtttttcctttttctacttgaaaaggaccagcttaaacacaaacccttatgtaaattaaaaggtttgaatccaaagcagagagaactgcttctggaaaagtgtagtttaattttaactattctaaaagcaatgagcaaaggcccttgtccaaggcgttgacagttttctaaagtggttatgctgtatatctggatgcatgcctttgggctgccactgcttgattcctttcatgtacagataatattacttcagtttagatttcccactttaaaatgcagtgatttgtgttgaatacatcttgattgtgctttacctaaagtattttcttaaaaggctttgtgtaaaatttaaatgtatatattttcctgtagacttn

SEQ ID NO: 9580 - DNA, 490 bp, Homo sapiens
  misc_feature (1)...(490): n = A,T,C or G
gcgcgccttgannccatgatgacattagncagngcggnggaattccctggactcaatcatggcttgtggtctggtcgccagcaacctgaatctcaaacctggagagtgccttcgagtgcgaggcgaggtggctcctgacgctaagagcttcgtgctgaacctgggcaaagacagcaacaacctgtgcctgcacttcaaccctcgcttcaacgcccacggcgacgccaacaccatcgtgtgcaacagcaaggacggcggggcctgggggaccgagcagcgggaggctgtctttcccttccagcctggaagtgttgcagaggtgtgcatcaccttcgaccaggccaacctgaccgtcaagctgccagatggatacgaattcaagttccccaaccgcctcaacctggaggccatcaactacatggcagctgacggtgacttcaagatcaaatgtgtggcctttgactgaaatcagccagcccatggcccccag

SEQ ID NO: 9581 - DNA, 484 bp, Homo sapiens
  misc_feature (1)...(484): n = A,T,C or G
cccccccattgaaaccctngnnnactgagacctctagtccangcggtggaattccatgaatgtgatttcctgggttctcactgtctttgcaccacgtctaggaagaatcttcttgatagctctcccacaccatcagtggccctcataactggagtagagttcctggttgcttttcataagagggagagttactttctttgtatctctgcaagcagagatttctctttggttttgaggttgaagtgtctttggcccatttgtaagtccccatccctaccctacacaaagtaaaagcagaagatagataaaaaatgatgtaattgcagctggtaggatgtctggtgccaatccaggaagtgagagccatttcttttgtaccggatttaatgactttgaactgtgctgtaaataaataatacagctggaccttatacctgtgtgttgcttctgaagctcacttcaactccggctgatggaaatgctg

SEQ ID NO: 9582 - DNA, 404 bp, Homo sapiens
ggccagtcggtgaccaccattcccactgtgggtttcaacgtggagacggcgacttacaaaaatgtcaagttcaacgtatgggatgtgggcggccaggacaagatccggccgctctggcggcattactacactgggacccaaggtctcatcttcgtagaggactgcgccgaccgcgaccgcatcgatgaggctcgccaggagctgcaccgcattatcaatgaccgggagatgagggacgccataatcctcatcttcgccaacaagcaggacctgcccgatgccatgaaaccccacgagatccatgagaaactgggcctgacccggattcgggacaggaactggtatgtgcagccctcctgtgccacctgaggggacggactctatgaggggctcacatggataac

SEQ ID NO: 9583 - DNA, 493 bp, Homo sapiens
  misc_feature (1)...(493): n = A,T,C or G
aggagttnccnnngntnnnnnnnaactgagaccntagatagagcgccgtaattcgntctggagtggaaagagcacgatagagcaccaggctaagaggcacgagatcaaggcggtagtcacttccgctctgcagctagcatttcaaccatatgtggatcctttcatttctcagctccctggattccttcccctaaattaggacctattatttacctgtaggtaagcaagctactgtagctcttctgaggtatctgccaggctgttttctgtagcctcagattgcctatctgcttagcctgagaacaggtagatgaaaactaaactgatgcctaggcccagggtcagtctcagatggaagctgggcctgggtggggaggctagcatgcgtggctccctgggtatttctgtcagtccccatggcaagcagtgatttagtaaaacaccccagagtcagggaagccaaccaccttgaaacctttagaacatctctgct

SEQ ID NO: 9584 - DNA, 474 bp, Homo sapiens
  misc_feature (1)...(474): n = A,T,C or G
aatcgagagcatcgggtggagcggcattnccctnancanggaaggagtgtggcaaagccttcacccagaaaatagcctccattcagcatcagagagttcacactggggagaagccttatgaatgtaaggtgtgtgggaaagccttcaaatggtatggaagttttgttcagcatcagaaattgcaccctgtggagaagaagccagtcaaggtccttgggccatccctggtcagtccccagtgctcctctccagccatacctcctgttcttctccagggatcctgttctgcttcagccgtagctgtgccttcactgacctttccacatgctgngctcattcctacctctgggaattttttcatgctgctgcctacatctggaataccttcttcatctgcccaaatagtgcgtgtcttccagggtcttactcccactgtgaaaccttccccagttattctcaccccttcttctcacn

SEQ ID NO: 9585 - DNA, 504 bp, Homo sapiens
  misc_feature (1)...(504): n = A,T,C or G
gaggggnnnnnttgggttgacgtacgtagngacgngcaannnnaaagctaatgagtgatgcagaagagaattctagctctgaaagtgtctgttctggtctttgttgcctcaccgcaatgcttctgctgtagctagaaaaaagttattacataattctgaagatgaacagagcttaaagtcagaaattgaagaagaggagctaaaagatgaaaatcaaccattaccagtgtccagttctcacactgcccagagcaatgttgatgaatctgaaaacagagactcagagtcagaaagtgatttgcgggtagcccggaaaaattggcatgctaatggttacaagtcccatactccagcaccttcaaagacaaaatttcttaaaatagagtcttctgaggaagactctaaaagtcatgattcagatcatgcatgtaacagaactgctggcccatcaacgtctgtgcagaaacttaaggcagagagcatctcagaggaagcagattctgg

SEQ ID NO: 9586 - DNA, 465 bp, Homo sapiens
  misc_feature (1)...(465): n = A,T,C or G
nnngggaatagaagnacccactagtccagcccggaggaattcgaaataccttaagaagaacaatcttcgtgattggcttcgagtggttgcatctgacaaggagacctacgaacttcgttacttccagattagtcaagatgaagatgaatcagagtcggaggactaggcaaaggctccccttacagggctttgcttattaataaaataaatgaagtatacatgagaaataccaagaaattggcttttagtttatcagtgaataaaaaatattatactcttgaaaaaaaaaaaaaaaaaaaaaaaaaaaaaaaaaaaaaaaaaaaaaaannngggggcccttttaattaaaagggccctttaaaaccccgtaaacacccccgggggggctttttaattccccccccttttgggggggccccccccccgggttttttttggccggggggggggccccctccctttgtt

SEQ ID NO: 9587 - DNA, 454 bp, Homo sapiens
  misc_feature (1)...(454): n = A,T,C or G
catcgacgacacattgaagngcggtggaattcttcacttttaaatactaaaaggcacacagcacacagacattttcggggcagttttctttgggagggtctttgataaattttgtaatcacctctcggaagaaagcccaaaatgacatgtgaaaataatattaaaccatttaccagatgtccagcaatataaaaatagacctcacatgctacccttcacatgctgattctcttgccttgctgtttaaggatccagtttcttatgttaaacattttccttaccttttgcaataatattattggccatatactaaattctcattcacttagctttctaagaattctttgaggttggaatcctgaaatcataaagctaccagatctgcacaacagcagtggtagtatctgagcccaaactctgagacgctctagagttttagtttacaaacatgagc

SEQ ID NO: 9588 - DNA, 474 bp, Homo sapiens
  misc_feature (1)...(474): n = A,T,C or G
taagagaccatccggaaatgcaggccattcaanncaacccaggnctgtcgaccttggatatcatgcatgtgggaaggtgggtgtggtgagaaaagttttaaggcaagagtagatggccatgttcaactttacaaaatttcttggaaaactggcagtattttgaactgcatcttctttggtaccggaacctgcagaaacagtgtgagaaattaagtcctggttcactgcgcagtagcaaagatggtcaaggccatggaaaaagcagaaatttaccaagaaagctgatacccatgtatagttcccactcatctcaaatacatctgctatctttttaagctaagtcctagacatatcggggataacatgggggttgattagtgaccacagttatcagaagcagagaaatgtaattccatattttatttgaaacttattccatattttaattggatattgagtgattgggttatcaca

SEQ ID NO: 9589 - DNA, 505 bp, Homo sapiens
  misc_feature (1)...(505): n = A,T,C or G
agagtgccccccattgagaactgagtaccctagcgacaattcgcgtgaatatactcgcttcactgcaaaagatactatgtgtttgattatgaggtttgcctagatcctgctgggtgggatatttggtattatatgatagacgtattagctttctgagtccaaaatactctggctccaaaacccatgtggccccaggggtttcacatcaagagattgtgaacctatagcacccttgtgaacagtgttagttatataggatgcagctgacctaaacccgccgctgaccaccttctaatgtgcctgtcatgcacatgctgaagtgcattgagctggatgagcggctgaaagccatggaccaggagatcacagtgaaccctcagtttgtacaaaaggtgatgagggttcccttattacaagaagtangctgggtggagaaggaggggtgttgtcacatcacgcacaggaactaagtttcaggttattaaatatttcttgaaaaccttaa

SEQ ID NO: 9590 - DNA, 411 bp, Homo sapiens
  misc_feature (1)...(411): n = A,T,C or G
ctggactatgctaattacagcttctccccaacaggaaactgtgggatttgaaaaggaaagggaagggaaaacagagaacctagtggtctaccaagtggttggcaactttcccaatgtctgcttactctgaggcttggcactgggggccagggcctgccccagggctcctggaatttcccttgatccagctaggttgggacactccctaaatcagctgcgtgttgttagcatcaggcagaatgaatggcagagagtgattctgtcttcatagagggtggggtacttctccataaggcatctcagtcaaatccccatcactgtcataaattcaaataaaatgtctgaacaaggaanaaaaaaaaaaaaaaaaaaaaaaaaanagggcgccccttcaattttaaaggccccttt

SEQ ID NO: 9591 - DNA, 489 bp, Homo sapiens
  misc_feature (1)...(489): n = A,T,C or G
cggagggattgagacattgatcacngtcggggaanncgcgcagggaaaacagagcaagcaatagaagcaagaaagatgtgttttttcctttctcgaattttgcattgtcactcggtgaaggggaagggagccttttaccttctgcctcaatggaagacaggagcagggccgcgcccagggcggcaagcgctgggggaagcctactccgcatccttggcctccgagcttacagcggcatgaagagatctgcgggaggaagtagtgactgcatcagaactgggtctgggcaggccttgaaccaggttagaactggagcctggacctagtccagaacccgaccagatctgccttaaaaaccacagggcctactccagcacataatgggcctattgtgaagcagtggaagtcaagttcgtctacagaagtttaatcatggccctaggaggaagttcaagtttaaaaagggtcctgttctcctggagactggtc

SEQ ID NO: 9592 - DNA, 488 bp, Homo sapiens
  misc_feature (1)...(488): n = A,T,C or G
cgcgccatgagncttcgggatcatcgcanagngcggnggaanncgaagaggagaaagggatattcttaaggaaatgttcccctatgaagcatctacaccaacaggaattagtgctagttgccgcagaccaatcaaaggggctgcaggccggccattagaactcagtgatttcaggatggaggagtctttttcatctaaatatgttcctaagtatgttcccttggcagatgtcaagtcagaaaagacaaaaaagggacgctccattcccgtatggataaaaattttgctgtttgttgttgaggcagtttttttgtttttggtctatcaagctatggaaaccaaccaagtaaatcccttctctaattttcttcatgttgaccctagaaaatccaactgaatggtatctctttggcacgttcaacttggtctcctattttcaataactgttgaaaaacatttgtgtacacttgttgactccaagaactaag

SEQ ID NO: 9593 - DNA, 478 bp, Homo sapiens
cccccaatcgagatcccttgtgcagtctggtggaattcgaatgcttcatggacttctgcaaggactactcctttagggaggaaagccagatgctgtcctggggcaagctgtgattgctgctctatatctctctaggtatactcactatggccaaggtagtctcgtgagtctgggcatttggaagaacctaacagaaacatcctagtgagcattgcactatggtagatggacattcctgccttttaacctgtggaatgtgctgcatcgtccttcctctccctgtttgccttctccttcctgccatgctcttactttatgcttctttgtctttatcacttctagcatatttctttattttgcttgatattttttccccttttccctttgcctttctccccaatcctgacatagcttttacctagtcttttttccccttcctttttcttatccttcactggtttttccttaatctcttact

SEQ ID NO: 9594 - DNA, 403 bp, Homo sapiens
gactggagctgttaacagaatctgctataaactagctgtattctaacataccgtaggaactaaaacctcctacctggatcatgaattgctttgaaataattcatattttcattgtctctcactaaatgtcaaataaccttcatttcacttggataggctcaacctacctggcatatttattttgcagtcttggcgaaagttcatgaaactttggactttttaataagacgaaacactcggaggaaactgttaatctctgcagtttattctctcttaaggaataaacactcccactgtctgatctcttcaatgcgtatggagatcaaatgacattcttgaaatattacaattaaaaatagtgatgtaactgaaacatatgctggaattggatatttaattgatg

SEQ ID NO: 9595 - DNA, 442 bp, Homo sapiens
  misc_feature (1)...(442): n = A,T,C or G
nttcgagatccgtagtccatgtggtggaattcgaaatagattaacacccttaggtaggagattacagttgtgggaaatgcttcctgaatttgaattagggactgctttcattctcagtttcatcctttacgtccttttcatgatgttctctgcctcatgcctcttattaccatgtaacaagctgaacagaaacaactcagcttcttagtatgtagaaattgtgaaccagaaagataaccaggtggaacatggagaaggtagtagtttagagtaatgctaccaacgtgatattcagtggagcaatgagtttttagcctagagtagatagcaagttggagctgaggagaatagctctttactgtaaggctttcttacttggtttgaatgatgaattccagtatataagatgaactcatatgtgaatggaagttctaaaaactta

SEQ ID NO: 9596 - DNA, 480 bp, Homo sapiens
  misc_feature (1)...(480): n = A,T,C or G
catgatcgntntcggnnattgaagactctagnacagngcggnggaattcttcttatcctgcgagacattgatggtttgatggatgagtttatcaaatggctttccaaaagcagaaacaatctacctggacacctgcttcgctttatgactcaccttattttgtttttccgtactctgggactacagaccaaggaggaagtttctattgaagttttaaagacatacatacagcttttaataagagagaaacatacaaatcttatagcattttatacctgtcatttgcctcaagacctagctgttgcccagtatgcattatttttggaaagtgttacagaatttgaacagcgccaccattgcctggagttggctaaagaagcagatttggatgttgcaacaataacaaaaactgtagttgagaatattcgaaagaaagataatggtgaatttagtcatcatgacctggccccagccctagag

SEQ ID NO: 9597 - DNA, 456 bp, Homo sapiens
gcgtgaatatactcgtttcactgcaaaagatactatgtgtttgattatgaggtttgcctagatcctgctgggtgggatatttggtattatatgatagatgtattagctttctgagtccaaaatactctggctccaaaacccatgtggccccaggggtttcacatcaagagattgtgaacctatagcacccttgtgaacagtgtaagttagaaaggatgcagctgacctaaacccgccgctgaccaccttctaatgtgcctgtcatgcagatgctgaagtgcattgagctggatgagcggctgaaagccatggaccaggagatcacagtgaaccctcagtttgtacaaaaggtgatgagggttcccttattacaagaagtacgctgggtggagaagggaggggtgtgtcacatcaggcacaggaactaagtttcaggttattaaatatttcttgaaa

SEQ ID NO: 9598 - DNA, 504 bp, Homo sapiens
  misc_feature (1)...(504): n = A,T,C or G
cagaggnnnnnntaagaagactgtcgtaagaagcgncgaggaannataatagntcctctggtgcaagtgtggtagctattgacaacaaaatcgagcaagttattttctagtgaaaagccatttgatgtatgcgggcagagatgaagtggaggtcctcaaagagcaaatcaaagaactaatagagaaaaattcccagctggagcatgagaacaatctgctgaagacactggccaggcctgagcagcttgcccagtttcaggcccagctgcatactggctccccccctgccaccacccaggcgcggggcaccacacaggcccccgcccagccagcatcgcagggctcaggaccaaccgcatagctgcctatgcccccgcagaactggctgctgcgtgtgaactgaacagacggagaagatgtgctagggagaatctgcctccacagtcacccatttcattgctcgctgcgaaagagacgtgagactgacctatgccattatctctt

SEQ ID NO: 9599 - DNA, 456 bp, Homo sapiens
  misc_feature (1)...(456): n = A,T,C or G
nttggagaccacttgaagagcggtggaattcgaacattacttacaataatgatattgaaaattggcctcaggtttatgtaattggattgattaattactagactggattatggcatattctcattattgttccacgcatggtctaatcttatttagttatgtaatttaaataatgtaataaatacttgacccaaccacccaaaataaaaagtaggaccttgtcaataatttacatccaactgtaaactttcctaagcaacctattattctgttttccccaacctgaggtaagaattaccttgaatcctatattcattattctcttatttttctgtgtaaatagtattattgttatggataggtatttttgtaaaatagttcaaaaattttagttgtttaaaaaactttagtaaacagtttttcattatgtatataatcttttgtttttttccctta

SEQ ID NO: 9600 - DNA, 494 bp, Homo sapiens
  misc_feature (1)...(494): n = A,T,C or G
gccagggccnnnnnnnncctagagnactgagaggcgctcgcaggaancngntncttgcgaccaaagatccgtgagcaacgataaatactcttaggaagagagaaaataatgtttcataagtttgtacttgaaaacatttggattggtaggattttgtaacacgtcaaccatttgatgcttctgaaaagtactttcaacttgcgaaggaaactcttctttaaagactgacctaaacaccgagggaaacttaagaacgtttaaaatataggagtccgtgatttccctgtgttttcagtttctttccttctgtgaacgatgagacttggagaacgggctggtccttcaccacttcctgttggccctggcctggccggggaaggtggcagcggcaccggactgacctgcagtgacccgcgatgccgcgccacgagggacacttatggcttcattcgagagctgctgccaaaacgcctggcgccgccaccgtcggaggc

SEQ ID NO: 9601 - DNA, 500 bp, Homo sapiens
  misc_feature (1)...(500): n = A,T,C or G
cccccgccccgccccgcccnnatagaaaactganaacantgngcagngnccnggaattcctcagcctatagggaggggtcagcgcatcatctcagcctatagggagggttcagcgcattatctcagcctatagggagggttcagcgcatcatctcagcctatagggagggttcagcgcatcatctcagcctatagggagggttcagcgcatcatctcagtctatagggagggttcagtgcatcatctcagcctattgggagccttcagcatgccatctcaaccaaaagtccactgagtcattactaccaaaaggatgggtttgccactctgttgcagccagagaagggcttcctgatttggttacctaaaggaggactgctgcagtagttgggcctcccagggcctcctagccagcaggagttgtccacaccaggtgtggccctgtgagaagattcgcgtgtcctggccagagggtgggtccagagggttcagcccatgg

SEQ ID NO: 9602 - DNA, 458 bp, Homo sapiens
  misc_feature (1)...(458): n = A,T,C or G
ctcccaattgaagacttgagtaccgtgcggaggaactcgtcaaatcatgaaggttctgtgaaggtgcatatatcacaatcacacctgcaggattgtccaattatgagattaacaatctcacacaggtccgggttctaggtatgagagtcaacacctgtgtgttggatccaaatagatgagtcgtagtctcaacaattgacttgatccatgtgtgagatcctagtttctatttgcattactattggtaccagtacctattaattcttccaccttctacatctttgttctgtatgaatgtatatacaaagattgatacatatacaagattatatgagtatttctatgtaaatatgtacacaaaaattgttcctccaaagacatttttcagtatcttagcatattctaagggtgcagatgtagaattatttctcttctctggctcagtagcatgtcagaan

SEQ ID NO: 9603 - DNA, 412 bp, Homo sapiens
gtttgatgctgaagtgcaagaagtgtgttgagatgctgccgtttctattttgaagcgagctttcaacaggcgggtcccctgtggcaaagaaaatcggaaccctgttgccgattttccatttgtcaccccagcagaatgtccggcacttgctcccttgctgccccttctcaggtcagaggcgggtgttccagggcctgccgcggggctctctgggccggttccctgcagacccgcaggagagcacatgtgccttgcatgaagtgtgggttgcgccaacaattcccctggtccctttcaacctgtttagttcaactcaagcctccctgtgtcccagaccctcctgctgccaccaccacccaggtcctccctagtcctccagcgtcaacactatcccttgggagttgagctgctg

SEQ ID NO: 9604 - DNA, 483 bp, Homo sapiens
  misc_feature (1)...(483): n = A,T,C or G
cggcgcgccaattgagnnccntaatcgagancataggacangncgnggaantcggagatatgatgttatcatgttataataaagataatgagatagagatgtgcaggtactatatttgtggggtcagtgtggagtttacaaaagaagaaattccattaataatctgggaaatctgaggaggaaggccccccctcccacagggcgggtgaggaaagctatcagtagttgtcatctccagcatccacacataaggaactaatgtaacatgtcatattcttcaccttgaaagttccaccaaatagctaggcttgtatcaatttgcaaggtgctagaaaattattgaatgctctgtgcatatttagagatattgaataagacagcctgaaaaatttttactattagataatgtatgtaattcttatttgaaaaatttggtttttgggaggttaaaactggaattaataaggctaagtaattttgctt

SEQ ID NO: 9605 - DNA, 410 bp, Homo sapiens
gtggctaccagtgtgtgtgtgggggtcatcactgccttggggaggagtggggcagggcagagaatccccccaattcctgcctgaaatctctggcctcacccctgctgggggttggactgaaaaccctcctccccaatttggggggtgttgccccatcactgcccagctcctctgactgccccccctgaatttagggtgggggtactagtcactgccaatgtgtgtatgggacttgctggaaaacggggatgcttgcccctttccaggactattgagcccagagagagctgtcctctcattgggtgaactgattgaggaagggtctattgtctttttaaatggcacaattttaagggtttgagggtacagtcccttaacctgccacgggagggggcccccaaactttcttc

SEQ ID NO: 9606 - DNA, 503 bp, Homo sapiens
  misc_feature (1)...(503): n = A,T,C or G
agaggggcccncatgagaactgagtcactgtgcgggaattcgcagtcataatgataggttaattcttcaagagataagataggaagctgcaccttgcctttgtccaagccccacctattaaaaccctctactcacagtttgaaactgaagcagtaaacttgtttccagacatctttttcagattgtcttaagcccaaagttgcctcacttccactattctcagcagccaaccaggatttggcagctgctccactgttacggttgagggaacagggatcagtcctgttagaagtctgtgagcctcaaactctacctgttctctgcaatcatccaaaatttgaaaaagaagctatatccagtgtttcactgccaaacagattcactactcttactgattcttcactgagctttgctagtataagcagagatccaagtctcccctagggntggctctacatttctttaatcattccaggggtagggtttagctgggggaaggacat

SEQ ID NO: 9607 - DNA, 488 bp, Homo sapiens
  misc_feature (1)...(488): n = A,T,C or G
ggctgcccatattgataatccgtagaacctcgggaaanncanacanccatagccattaatcatacaattattaccagctacagcattgagaatctttttcatgaatgtagatctattttggaaagactgcagacagatggacaattcgctttggccaggagggtagcagaattagctgagttacctgtggacaacttggttattaaagagataacacaggaaatgcagaccctaaaacacattgaacagtggtcactaaaacaagcaagaattgacttctggaaaaaatgccatgagaattttaagaaaaattcaatttcaagcaaagcagcttcttcctttttctcaacccaggcccatgtggcatgtgagcacccaactggatggagcagcatggaggagcgccatctgctgctcaccttggcagggcactggcttgcccaggaggacgtggtgcccttggataagctggaagagctggagaaccn

SEQ ID NO: 9608 - DNA, 458 bp, Homo sapiens
  misc_feature (1)...(458): n = A,T,C or G
nttttaattgaagacctcgagtaccgtgcggnggaactcgcctttgaatggagtagagggaaggcatttataagaaatccccaaaaaatatttctagaggtgtgactgccacttcactttttaaaaaaggacatggctagcgtctaggtagaacaattaaggcctctagaaagcctggtctaaagaggcctctggttattataaaagaatgggcatcctgtgtgaaatacagtagcagtcgactggggccccagatgtttcttcagtctgctcctttcccatgcagagaactgtgacatgtggttcaccaaaatagaacttttcatttttactaatcatttgttattaaaacaggatttagaaatgctttggtgaggccaggctcatgcctgtaatcccagcactttgggaggccgaggtgggtggatcacttgaggtcaggagttcgagaccagcct

SEQ ID NO: 9609 - DNA, 446 bp, Homo sapiens
attgtagactagtagacccctaggccgagcggtggaattcccctggcctcccaaagtattgagattacaggcatgagccaccgcacttggacctacttcaaatttttcagaagtcatttttaaaactttgagtgactctgtttttttttctttctatctttttttgaataaaagagatgaggtcttgctatgttgaccaggctggtctcaaactcctgggctcaagcaagccatctgcctcagcctcccaaagtgcagaactacaggcatgagtcaccgtgcccagtcctgggtgactccattttaaaatgttcactatgataagggagaagggaaatgcctgcattgtagggctttgtgattttatctatatccttaattgaagccttgggtaaagtgttcactgagtatgttaaggatgaaaagtgtttaagtattatcagaac

SEQ ID NO: 9610 - DNA, 455 bp, Homo sapiens
  misc_feature (1)...(455): n = A,T,C or G
nttgaaacccttgatgactatctagaccagncnggnggaattcatggatttggggcctccacaggcagggtaaatgtattaaaaactttgtggggttactcgtggccacctggaaagtgccaaggggaggttctctgggcattgagaatttgacaactttgcctgtgttgatacaacttgctagagcaggcaagacttgaagagggatggctgtggtcctgtcatgtttatcagagtggagcagatttcttttgtgtgagaagtcatgcaagaaaaatccggaaatgagccaacagcacttaaacttttgttttctgctggggagcatggaatagagaaggtgcaggttctaaaatttctgtatgggtggtggttgctttcctgacacagagttccagccccagaccactttactcacttcatctccctctgttccccttgctgcattcttggcn

SEQ ID NO: 9611 - DNA, 450 bp, Homo sapiens
  misc_feature (1)...(450): n = A,T,C or G
aatgatgccccaactgatgacatctgnacagncnggnggaantcgtgaatcacaaggaaataaagatgagtaaaagcaaagatgatgctcctcacgaactggagagccagtttatcttacgtctgcctccagaatatgcctctactgtgagaagggcagtacagtctggtcatgtcaacctcaaggacagactgacaattgagttacatcctgatgggcgtcatggaatcgtcagagtggaccgtgttccattggcctcaaaattagtagacctgccctgtgttatggaaagcttgaaaaccattgataaaaaaactttttacaagacagctgatatctgtcagatgcttgtatccacagttgatggtgatctctatcctcctgtggaggagccagttgctagcactgatcctaaagcaagcaagaaaaaggataaggacaaagagaaaa

SEQ ID NO: 9612 - DNA, 462 bp, Homo sapiens
  misc_feature (1)...(462): n = A,T,C or G
agagggannnnnnnnnnccccgtagaccagtagaccgtgcggtggaattcagaccgagtcttgctctgttgcccagattggagtgcagtggcacgatttcggctcactgcaacctttgcctcccaggttcaatcaatcctcctgcctcaggccccctagtagctaggattacaggattacagacacgccccaccatgcccagctaatttttgtattcttagtagagacagggttttgccatgttggccaaggctggtctccaactcctggactcaagcaattcacctgcctcagcctttcaagtgctaaatacttaacacgtgaatattttgctaaaaaagcatatataactattttaaatatccatttatcttttgtatatctaagactcatcctgatttttactatcacacatgaataaagcctttgtatctttctttctctaatggtgnatcatactct

SEQ ID NO: 9613 - DNA, 448 bp, Homo sapiens
  misc_feature (1)...(448): n = A,T,C or G
cctgaactgcatagcactagcccangcggnggaattcccaaagtgcagggattacaggcgtgagccactgtgccctgcacaatcattggtttttataaaacaaaatattatagccacaaaaatatcccataaccattcttccctactcctatcgtggtagaaaaaaacctagttcttgtcacacagccaggaaaaggttcatcctccctctatgcccagaggtaaccatgacttgaatttaatggggttttttttatttttaatttttgtgctacatagtaggtgtatatatttatggattacatgagttttgtttttgtttttgtttgtttttcaagacagggtctcactctgtcatccaggctggagagcagtggtgtgatctcggctcactgcaacctctgactcctgggttcaagtgatcctctcacctcagcctcccaagtag

SEQ ID NO: 9614 - DNA, 467 bp, Homo sapiens
  misc_feature (1)...(467): n = A,T,C or G
ngccaactaagtacatcgcacaggactgaggacctctgcattnacagnacagcaagcaagagaaatggtactagagattatccgagaaaaagaccaagctgactttcggggtgtacgcggcgatttcaactctcgaatgggaggaggcagtatagaggtatctgtgcctaggtttgctgtggggattgtaataggaagaaacggggaaatgatcaaaaagatccagaatgatgctggtgtgaggattcagtttaaaccagatgatgggattagtccagaaagagctgcccaggtcatgggccctccggatcggtgtcagcatgcagcgcatatcatcagcgagctgattcttacagcccacgaaagagacggctttggaggcctggcagcagccaaaggaagaggtcgtggccgtggcgactggagcgtgggagcccctggtggcgtccaagagataacatacacgg

SEQ ID NO: 9615 - DNA, 505 bp, Homo sapiens
  misc_feature (1)...(505): n = A,T,C or G
agagggnnnnnnnnttgaagtcnatcgtaagaagcgncgnggaannctncagaaggaacagtacatctataaaaggaaaagtgatggcatctatatcataaattttttgaggacctgggagaagcttctgctggcagctcgtgcaattgttgccattgaaaaccctgctgatgtcagtgttatatcctccaggaatactggccagagggctgcgctgaagtttgctgctgccactggagccactccaattgctggccgcttcactcctggaaccttcactaaccagatccaggcagccttccgggagccacggcttcttgtggctactgaccccatggctgaccaccagcctctcacggaggcatcttatgttaacctacctaccattgcgctgtgtaacacagattctcctctgcgctatgtggacattgccatcccatgcaacaacaagggagctcactcagtgggtttgatgtggtggatgctggctcgggaagttctgccg

SEQ ID NO: 9616 - DNA, 413 bp, Homo sapiens
cccggctcgagcggccgctttttttttttcccctttcttgaaataaatgataaaattccgagtctttctcactgcctttgtttaaaaaaaagtagctcgtcctcactggtctacactggttgccgaatttacttgaattcctaactgttttgtatatgctgcattgaaacttacggcaagaaggcattttttttttttaagggaaccaacctctcaaatcttgaagggatataaaagctgcttatgcctacaaagctttaaattcaggccccagttgctgtcccaagggagggagggaacctccccccctccccctttttttatataaaaaaagggccttaccatgggtggaacctgcccccactacagtaagctggtttacaaatgttttccactgaccatcacaataaaaa

SEQ ID NO: 9617 - DNA, 413 bp, Homo sapiens
ctcgagaacatgctgcagaactccgtctatgtcaacttcctgctgacggggctggtggcccagctggcctgtcacccccagcccctgctccgctctttcctgctcaacaccaacatggtcttccagcccagtgtcaagtccctgctgcaggtgctgggctctgtgaagaataagattgagaactttgcggcttcccaggaggacttcccagcactgctgtccaaagccaagaagtacctcattgcccgtggcaagttggactgggctgagggccctgcagcaggacctgccccacgccgttctgatcccctagaaccctaaaggagaagtccaagaacctagggggtgggggaatctcccctctcagtccaagggaggttccctgatcccagcaccttcatgatacccctgtt

SEQ ID NO: 9618 - DNA, 456 bp, Homo sapiens
  misc_feature (1)...(456): n = A,T,C or G
ttcnaattgatgataatgagaacagtgcggnggaattccccctgatggggaggccatcgtcactggtgctggagacgagaccctgaggttcttgaacgtctttagcaaaacccgttcgacaaaggagtctgtgtctgtgctcaacctcttcaccaggatccggtaaacctgccaggcaggaccgtgccacaccagctgtccagagtcggaggaccccagctcctcagcttgcatggactctgccttcccagcgcttgtcccccgaggaaggcggctgggcgggcggggagctgggcctggaggatcctggagtctcattaaatgcctgattgtgaaccatgtccaccagtatctggggtgggcacgtggtcggggaccctcagcagcaggggctctgtctcccttcccaaagggcgagaaccacattggacggtcccggctcagaccgtctgtact

SEQ ID NO: 9619 - DNA, 448 bp, Homo sapiens
  misc_feature (1)...(448): n = A,T,C or G
nttgtagactttagaccatgcggaggaattcgtttatgtcataggacatggggggcactctgtaaagtatcagagtaaggttgtgaaaactagaaagttctgttagttaccttcttatagagatatattatgtagaactccaggagggacattaaatcactttaagtataaactgactactcccacagttgagagaagttgtgacctgtacttgtactatggaaggaaggatatcaacgtgtgtatattgatgtttatataagtaactcttgaaggagacttgttctagcgtgccccatggtacctagtgtgtgtctgatgccggttggtgtcaaagatagagggcttcttgaaggaacttgccattccttgctttgaccactgcatgaactgcttctaaattattttattacctaaaaatttaaaatatgccattcattgcacacan

SEQ ID NO: 9620 - DNA, 480 bp, Homo sapiens
  misc_feature (1)...(480): n = A,T,C or G
aacctggagtacatctgaaangccnngnaanaactangtaccattagtccangcggtggaattctgcgtgcctgtaatcccagctactcgggaggctgaggcaggagaatcgcttgaacccaggaggcagagtttgccatgagcctctcaccgttgcactccagcctgggtgacagagtaagactctgtctcaaaaaaaaaaaaaaaaagtttcccaaaacggaagtccggccccccctataaaaaattttttttcagggggggggacacccccatagaataaatttttttccctcggccccccaaatgtttaacaccgggtttacaaaatgggatcttctttgcctagggccctcattccaaaaggggacccatttactcctaactgaggcttcagaaccctggaggcctacgggggttggattttttacctacataggacaggtccgctctaccctgacaaaaagatgggagttaaaa

SEQ ID NO: 9621 - DNA, 453 bp, Homo sapiens
attgagaccatttgacagcgttgcggaattccgagtagctaggactacaggcacacgccaccacacccggccaatttttgtaatttttttagagactgggtttcaccatattggtcaggctggtctcgaactcctgacctcaggtgattacaggcgtgagccactgcacccggcctgttgtggggttttgtgatttggtttggtttggtgttttctgattacagcaactttctctttattctcagttttgcacagtaataagttgactcacacagacttaaagcctgaaaacatcttatttgtgcagtctgactacacagaggcgtataatcccaaaataaaacgtgatgaacgcaccttaataaatccagatattaaagttgtagactttggtagtgcaacatatgatgacgaacatcacagtacattggtatctacaagacattatagagg

SEQ ID NO: 9622 - DNA, 488 bp, Homo sapiens
  misc_feature (1)...(488): n = A,T,C or G
gatganaccctggannnccnctgtagaccctagtccgngcggnggaattccacctgcagggcgtccccagctaacacccatccacgcaccacctccaggacgagaacccttgatgtcaaaaccaagtgcccagtggaggcggtgaagctctcggaaatgctgccacctgtgtgaggccgggtctgaactcgagggagtcggagctcagctgtcggtttaaagagacactgaggggaccgggctgccgccctcagcctgcattcctgtgcgcaatcgattccgcaatgacagcaccttactccttcctgcggcaggctcacccctgcctgtgggatgttgtgagaggaacatgagccagacaaagacttggctcatggctccgtggaacaagccaggatgcacggngagctgggggagcccccagcctggggcagcccagcaggccgctgaacaaacaccccagaagccagcactgtggcagggtgctg

SEQ ID NO: 9623 - DNA, 488 bp, Homo sapiens
  misc_feature (1)...(488): n = A,T,C or G
ggatcgagaccctagtcagngcggttgaattcaccgtagcgggagcggccaaaatgaagtttaatccctttgtgacttccgaccgaagcaagaatcgcaaaaggcatttcaatgcaccttcccacattcgaaggaagattatgtcttcccctctttccaaagagctgagacagaagtacaacgtgcgatccatgcccatccgaaaggatgatgaagttcaggttgtacgtggacactataaaggtcagcaaattggcaaagtagtccaggtttacaggaagaaatatgttatctacattgaacgggtgcagcgggaaaaggctaatggcacaactgtccacgtaggcattcaccccagcaaggtggttatcactaggctaaaactggacaaagaccgcaaaaagatcctcgaacggaaagccaaatctcgccaagtaggaaaggaaaagggcaaatacaaggaagaaaccattgagaagatgcaggaa

SEQ ID NO: 9624 - DNA, 489 bp, Homo sapiens
  misc_feature (1)...(489): n = A,T,C or G
agagggccggnntgnnnngnaactgatgccctcggnnnnatagatgacccttagtccatgtggtggaattcctttgggatctagggagcagattttaaaattctggtataggccaaaaccaaggaggctcattttaatagggcaggcccacacttgggtggcaattttgctgactatggagtaagccattgatcaaaaatgaacgcatcccctgtggacccagctacaatcctgtttcgccttggtcctgccaccagaaccatcctccaaggaggagtcatgctcacccatgcctaaagtgacaggtccaccaaccacaggcctggcagcagacgctgaagtacccctgtaactcagctctagcccctcatctagtctgagaccaatcatgcccgcccagagacctgctgggagacacacccatctgtgccctgggaagtaggcttgctaccctcagtcccatagcagaccctgaaaaagctctaactt

SEQ ID NO: 9625 - DNA, 485 bp, Homo sapiens
  misc_feature (1)...(485): n = A,T,C or G
agaggggccgggnttnnnngncaatagagattatagtccaaatagaggacttcaggcattccaagtacaggaaaaagcattttaaaaggctcaggaccttttggctggaacaaccatcttccagtaatttgccaaaatgacaaatacaaagggaaagaggagatgcacccaatatatgtcctctaggccttttagaaaatatggagttgttcctttggccacatggtacatgtgaatctatgagacaggtgatactgtagacatcaagggaatgggtactgttcaaaaaggaatgtcccacaaatgttaccatggcaaaactggaagagtctacggtattacccaacgtgctgttggcattgttgtaaacaaataagttacaggccagattcttgccaagagaattgtgcctattgagcacattaagcacactaagagccaatagagcttcctgaaatgtgtgaagggaaatggttagtaaaaga

SEQ ID NO: 9626 - DNA, 481 bp, Homo sapiens
  misc_feature (1)...(481): n = A,T,C or G
ggtngtnccccggnggnncngttgagnccctattgtagacatctggacangcggnggaattcgacacattggaggaaatgggaaaattcctggaaaacagaatttatcataactggagcaaacaggaagagctcaatggttttatgatctgctgagaaaattgaattaataactttaaagccttcccacagagaaagcttcagggcgagtgcctttactagtgaattctttccaattttaacggaagaaaatgacgccaacgttagacatatcttccaaatactagaagaaaggaacagtctccagcctatctaagctggcatggtcttgatcccagagcctgacatggcatttcaagaaaggaaattatcactcagcagagatgtgcaactattaaagtaaataccagcaaattgaatccagtgagacagaggaagaaccgtgttgcatggtccgcaggctcattccaagaactcaaggt

SEQ ID NO: 9627 - DNA, 485 bp, Homo sapiens
  misc_feature (1)...(485): n = A,T,C or G
aggctcgnccattgacgaccnttagnatagtacgaccactatccatgtggtggaattccgttatccaggagaatcgcgttggactcagggaagacctgcacaggatccggttgttgctgggtccgagggctgtagggagtggagaaagggccgggaatcgttaagcggggtctgggagaacgacttgcagattcacatttcctccgcccgcggatgtcctccggggaattgaggcttccttcctcagctgcccttgtttctctctttgctcccgctgccccttgttctatttcgtttcttactatttatgtagtctcattgcttgcggttataatggccaccactttattgagcattcactgtacaagcatctcgcagcaggcgctcataagcgtctggcaattcttggccactgctggaagcccaatcattcttttaccatggaagggatttgagagcctacataatcctgtactctaatagcc

SEQ ID NO: 9628 - DNA, 473 bp, Homo sapiens
  misc_feature (1)...(473): n = A,T,C or G
attcgcggacccctagtctagtgtggcggaattcgttctgaatttttgtccctcacataggattccagaacactgctacaagggtttgaaagtttgtccctcacataggattccacaacactactgctggggtctgaatgtttgtccctcacataggattctagaacactccagctggcttctgagtgtttgtccctcacataggattcctgaagactgctgctgtcgctatagtcgttgcaagtgtctgaatgtttgaccttcaccaaacaccaaatatcctgaccctttagtcttggactttccagcctccagatctgtgagcaataatctctgttgtttatgaattactcagtctaaagtattttgttatagtagcctaaagagactaagagagcatcacctgccctgtcacctcatcaccgcattactgaagctatanctaacacagtcacttttagtgggtgttcatg

SEQ ID NO: 9629 - DNA, 427 bp, Homo sapiens
cagaattgaagcttaaatttgccaacaggcaaatgtcctcaaggcaaattggcttaggtgttcgatattcttcttaccagaaaggtaaacttgggttttttacttcacccaggatttggcatgacagttccccattatcttgtcagcttagtgctttaagtgattgcatttaaaaaaattctgcattttcagtttttagcaggaggaatggcctcaactagtggttttcaactggggatgatttttttcccctaggggacatttgataatgtttggagatgttttagttgttagaactggggttgggggaactactgtcatctggtggggagagaccggcaatgctgttgatcttactataatgcacaggccacccccaacaacaaacaaattacatagccccaaatatcaataatgccaaggtcca

SEQ ID NO: 9630 - DNA, 456 bp, Homo sapiens
  misc_feature (1)...(456): n = A,T,C or G
aatgagacccattgtaggccgtggaanacagcgagcaaggcctacttatattttaatactttaaagttatttttattaaactgtctgctgtccaaacataatacatgttgtaggccaaaatggccatgaagctaccagtttgcaaaccctgaactgtgaaatcttttagccacttccctatcttctctgttggagccatcattagtacttaaaaaagtacctttgagtcagggagttctattctactctgtgtttgtgagaaatacgggcctgcccctctgggccacagattcctcatatgtaaaatggggccactcatgtccacttcccaaccccagtgccttgtggtgagactgttgctccggggatgacggtcccgcccctcctttcaggaacaggcctttgagagcagccagaagtacaaagaggggaagtacatcattgaactcaaccacn

SEQ ID NO: 9631 - DNA, 455 bp, Homo sapiens
  misc_feature (1)...(455): n = A,T,C or G
attgagatcgatgaccctctgnccgngcggnggaattccaccagccattgtatgtagctttagctcaccgcacagaagagcgccaggctcacctcactaaccagtatatgcagagaatggcaagagcacgagctgttcccaaccctgtaatcaacccctaccagccagcacctccttcaggttacttcatggcagctatcccacagactcagaaccgtgctgcatactatcctcctagccaaattgctcaactaagaccaagtcctcgctggactgctcagggtgccagacctcatccattccaaaatatgcccggtgctatccgcccagctgctcctaaaccaccatttagtactatgagaccagcttcttcacaggtgccacgaggcatgtcaacacagcgtgttgctaacacatcaacacagacaatgggtccacgtcctgcagctgcagcc

SEQ ID NO: 9632 - DNA, 451 bp, Homo sapiens
  misc_feature (1)...(451): n = A,T,C or G
ctacagacaccattagatagacntgcggaantcacgagaacagttattacagaaaaattggaaagggtcaagaaccagtgggatggcatccagcatggtgttgagctaagacagcagcagcttgaggacatgattattgacagtcttcagtgggatgaccatagggaggagactgaagaactgatgagaaaatatgaggctcgactctatattcttcagcaagcccgacgggatccactcaccaaacaaatttctgataaccaaatactgcttcaagaactgggtcctggagatggtatcgtcatggcgttcgataacgtcctgcagaaactcctggaggaatatgggagtgatgacacaaggaatgtgaaagaaaccacagagtacttaaaaacatcatggatcaatctcaaacaaagtattgctgacagacagaacgccttggaggctg

SEQ ID NO: 9633 - DNA, 454 bp, Homo sapiens
  misc_feature (1)...(454): n = A,T,C or G
natagaagactgnagcccttgcggnggaattcagcactctgagntttcccttcctttttttctatatgtaaccttatatattattaacaatatataacattctttcctcatggcatatgttcatcagatttttcctatatataaccttagaaagaatgttaatacctctgctgattttgcttgcccataccttttcatgtagacattctactatatatccttataatttcatatatgtacaacttaggggatgtattttatgtgtgtgcatttagctactggtatattgcacagtaattttctaattacacaaatacttatttcagataaattagaaaataaatatgtatgtgggggttaagacttataatcccaattcttagagacaagcattagcactgtactataccttcttccagaattttctgactattataatatatgtattccatta

SEQ ID NO: 9634 - DNA, 546 bp, Homo sapiens
  misc_feature (1)...(546): n = A,T,C or G
ggctcgagtaccactgcgagtggngcaattcagaacattgagcacgtgaggtgagattttttttctctgatggcattaactttgtaatgcaatatgatggatgcagaccctgttcttgtttccctctggaagtccttagtggctgcatccttggtgcactgtgatggagatattaaatgtgttctttgtgagctttcgttctatgattgtcaaaagtacgatgtggttccttttttatttttattaaacaatgagctgaggctttattacagctggaaaaaaaaaaaaaaaaaaaaaaaaaaaaaaaaaaaaaaaaaaaaaaaannnngggggcccctttaaaataaaaggcccctttaaacccccgtaaaaacccccgatggggctttttaatgccccccctttttgtggtcgccccccccccccccttttttggcctgggaggggccccccccccttcctcttttaaaaaaagagaaaattctcccttttgtgggggggggcgttttttttctttggggnncccncncncactcctctaaaaag

SEQ ID NO: 9635 - DNA, 495 bp, Homo sapiens
  misc_feature (1)...(495): n = A,T,C or G
ngattgagnccccntggnnnnnnnnnaatcgagnatcatagtccatgcggtggaattcgctgatgtacgggatgctcttctctatccgctcgtttgtcagcaagatgtccccgctagacatgaaggatggcttcctggccttccaaactagccgttacaaactccattactacgagacgcccactgggatcaaagttgtcatgaatactgacttgggcgtgggacccatccgagatgtgctgcaccacatctacagtgcgctgtatgtggagctggtggtgaagaatcccctgtgcccgctgggccaaactgtgcaaagtgagctctttcgctcccgactggactcctatgttcgctctctgcccttcttctccgcccgggctggctgaagcaacctacctcaagtctcaggagaattcatgtctgcctggggcccttccgaacctgtgccaacntagggcccccacatgtagcccccgcacccccaccccctgc

SEQ ID NO: 9636 - DNA, 492 bp, Homo sapiens
  misc_feature (1)...(492): n = A,T,C or G
nggagggcgggcggccnnnnanaattgaaactgagattatagcccagngcggtggaattccagagcaagactccatctcaaaaaaaaaagtgtatttgtttccttaaaaaaatttttctgaaaagtgggtaatgacataatacagctttcaaattactttatgctgttattttattcttattgaattcacatgtgaaagcatgtgatcaatttttgctgcatcagagatattagagatagttttttattaattgggcatttatgaccttttctataaaagtaaggacattaaaatgtaagatgcatgatgaaaatataagtggagaggctctttgtagttaacctatatgaagtaatgtataaggtaggtcagagtaatacttttctacattatagtgcaagaaataattattgataaaagtatattaaactaaattcngatattttacttattgcacttttatgtaataaaatgcagtgcatttaaaaatt

SEQ ID NO: 9637 - DNA, 460 bp, Homo sapiens
  misc_feature (1)...(460): n = A,T,C or G
cttcgagatcgtatgactattagtccagngcggtggaattcattctggtgggtgcattgtggtatatcattataattttttttactcatatttagctttttaaaaaacacttttcataaaaagctggtcatttatcttatcaggctaatggttattaaaggcagaatattaagaagtatgggagtatgagtagctagaaggtagcctcaagaagtgataattgatagataattcaaatggaaggagatggaaacaatgttcatagctgacattgtgactgaaatactatgttatctgagggcattcagtgcaaggacagaaatgcctagatgttctaatttttctcaaattctttactgtatagtataatcatgaatgacctcgacttaccaagaaaagttaacttttgtttaagagggcagataagtaagtattacagaattttaaatccagaaaatcn

SEQ ID NO: 9638 - DNA, 465 bp, Homo sapiens
  misc_feature (1)...(465): n = A,T,C or G
nnnnaatcgaattcantccctangccgngncgnggaattcgcagacttgcctcctcctactcccccaccccacagggtccagcacagcgttctccactccctccttatcctggaaacgcaaggaaataatctatctcccagaacagaacatgtgccaatgggcgatcttgcctggaataaaatgcctctactcagaaacaggcaggaaagaattgctccaaggaatactttttggggtcagataatgtgtcaggtggaatatccctgctaggagatataggatttctactctgctcaaagctgaccccatctggagtattaatgtttggttctatggaaccacattttaagagatctgctgatccacctaagcacattcagggaagagtaatgtaattgacaaaatatctgataatcatgttgtttaagggctaggtgaagaaagtttcagtattgatcctggaa

SEQ ID NO: 9639 - DNA, 491 bp, Homo sapiens
  misc_feature (1)...(491): n = A,T,C or G
gggntcgaattgaaaccctggntaatgagaccttaggacagngcggnggaantcgntcacccaggaggagctgtgcaagttcatcaagtttgcctgctaccaggagcgcattttgttcacctgcccctgcaaagatgggggtcccgacactgcccatgtgcccccgtaccccatgaagatcgcccccccagatggcacagcaggttccccagactctcgctacatccgcgtggagacctgcatgttcatgatcaagcttccccagtactcctctctggaaatcatgctggagaaacttcgttgtgccattcactaccgtgaagaccccctcagtggctgatgggagggagccccanaattaggctgtcactgaggcacccactctgctggcttgggaagccaccactgcggcccgtccctccagggccctgcgtgaggagttggcaacattttgcttttccaaactttcgtccacattccagggcctcctg

SEQ ID NO: 9640 - DNA, 468 bp, Homo sapiens
  misc_feature (1)...(468): n = A,T,C or G
aatcgagacctagagctatcgcggnggacttccaaaagaccatcctgctctcaactacaacatcgtttcaggccctccaagccacaaaactgtggtgaatggaaaagaatgtataaacttcgcctcatttaattttcttggattgttggataaccctagggttaaggcagcagctttagcatctctaaagaagtatggcgtggggacttgtggacccagaggattttatggcacatttgaatgaagatgaaggatcattgatttccttgtgtatggataatccgggaacaggccaactaaatatttgatgaatgtatgatttcaaatacagtgaattccctgggagtcatcaaagaagaccggcattntatggttggttttattaagtgtatattctttgctcctgaaaatgttattaaataattggttaggccgggcgtggtggctcatgcctgtaatcccagcact

SEQ ID NO: 9641 - DNA, 471 bp, Homo sapiens
  misc_feature (1)...(471): n = A,T,C or G
aggtagcgcgccgttttnnnnnnaaactttangaagncgtnncncttnnntntaangacagaccgggaaagtntgggtccaaaacaggcggatgaagtgttagattgtaaagggtggacagcaaggagctgcggctggggaaaaggaactggtgaatgtgaaaaagggaacacttctcccatcagagctgtcgggaattggtgcagccaccctccagcaaacaggggactctatagcaaatgaagacagtcacgacagtgaccacagctcagagcatgcgcacttatgatataaacagaggaccagctccattctcaggaaagaaatgttgtgatggcaagccttacccaaatatcgtttacacagagagatgactatggcagtgatgtttaatattataaaatccaggcatttcgaatctgtttttcatgatttatagagggtttacacaaagtgccacttattaaagaa

SEQ ID NO: 9642 - DNA, 448 bp, Homo sapiens
aatagatgacctgtagaccgtgcggaggaattcgttcactgtctgttatctgaagactatgaagacttctatgctaaccgaattaaaatgtacttgttgatctctgaatagctcacttcttacaatgtacaaattcctcattctgtcaccttttaaacattgttttataatgcaggtgttggatttgctccagtatgtgtaccatcttgtaaattcatttgagtagatcatgtttacttcccagtggaaggagcactgaaaacctcttaaagaaaaagcatttgtgtgttttccttgaactgtctgtatcaagacgtgttacttcgagatatccattcactttataattttgactgcaaaatattttgtaaatacacttttttacttttcaaacgagtaaaataatgtgcaatgatttttatacaaatgattttcaagttgtttggta

SEQ ID NO: 9643 - DNA, 464 bp, Homo sapiens
  misc_feature (1)...(464): n = A,T,C or G
ggggaatcgatagcgtaccntgngncgnggacnnnggatgtttctgtttcacctctattcattcattcattcatttgcttcacaaatattgagcacctcctgagtgacagacactgatttgggtgctggaaagcataagcagccctggtgcctgtcctcacagagcctatggtctgctggtgagacggatttaatcagataaacacactaatgaatgtatagttgcaccaacagatcctcatttaattgagctggactaggacctaggcatcagtattttttttataagcttcataggtaactctgccaggcctgggaatcactgggctagaccatgcaagttctaatcatataggctctactcaagcattaagcattttgattttatctttcaagctgtggtgaaaacgttactgaagagaggtgatatagtaagatgctcacggtttttaaaattaaacttn

SEQ ID NO: 9644 - DNA, 448 bp, Homo sapiens
  misc_feature (1)...(448): n = A,T,C or G
atagaaaacctgatgacccttagtccangcggnggaattccagttctgtcttgggcttaaattgactgaagactttagggggaaagaatagtatttgcatgtaaacaaatggggacactctgttcaggagaataatccgactggcatttgtggcagtttttgaaatgtaaatgtattcatgtgtgttcttgtaaatacgtgtcgctcagatgtcctttgaagtgggagggaatcaatccggggataatttcaaatggaatagagtattttgatattgttcattcagagggtgatgtgtacatatctatattgtatatatgtgatgaaaatgcattggctttttgtgcagatacaacctgctctctgtactgctgttggacagtcagtgttttaatgtttctacagttttgctattgcacgatttcatattttgcctctatgatgaacg

SEQ ID NO: 9645 - DNA, 457 bp, Homo sapiens
  misc_feature (1)...(457): n = A,T,C or G
atcgaccatgatgaccattgcgccgngcggnggaattcgccatgcatagaaccactcatagccagactgcaaggcaggaacatgaggttggtctttaagaggccaacaaattctgctaaaggggattctttttataaaatacactctttcaggacattgtcagatcctctgcatatagtcctcaaaatacgtccttgatccagcttgttttaagtgtttatgcaaaataatggtatgtttgaaagtgttagatattaattttttatttctgttttgaaggcattcaagtatcacggactatcagcaccttcgtttctttttttttttttttaaccccaaccttcggggacaaaaagaaaaaaccggttttgttggaagggaaggtgggggaaaaaaaaaagccaaattccccttacggaaattttaaacaaccctaacctctttttttttagaaggg

SEQ ID NO: 9646 - DNA, 465 bp, Homo sapiens
  misc_feature (1)...(465): n = A,T,C or G
gagggcctnnnttagaaaatagtagaccattacgccagngcggnggaattcttcccttcgtttaggtcggctggaaattatgtcctccgtcggttttccgcagtttttccaccaagcgagatatttttgggagttattccctaaataactgcattatatgctcctttcatgacgaaattgctgccgtggagaagactggaggaaactcgaggaagagggagaagccgacaagtgctcgacgggctaggaactgtcctgcttgggtgttagcgtttcccgccgggccagtaaggctgagtgacccggcgtggctactaggagaaggacgtacggtcctgctagtagaggaatatgtcgagtttctctagggcgccccagcaatgggccacttttgctagaatatggtatctcttagatgggaaaatgcagccacctggcaaacttgctgctatggcatctataagn

SEQ ID NO: 9647 - DNA, 448 bp, Homo sapiens
atagatgactttagcccgtgcggaggaattccacatctagacgttcaagtttgcaaatcagtttttagcaagaaaacatttttgctatacaaacattttgctaagtctgcccaaagcccccccaatgcattccttcaacaaaatacaatctctgtactttaaagttattttagtcatgaaattttatatgcagagagaaaaagttaccgagacagaaaacaaatctaagggaaaggaatattatgggattaagctgagcaagcaattctggtggaaagtcaaacctgtcagtgctccacaccagggctgtggtcctcccagacatgcataggaatggccacaggtttacactgccttcccagcaattataagcacaccagattcagggagactgaccaccaagggatagtgtaaaaggacattttctcagttgggtccatcagcagtt

SEQ ID NO: 9648 - DNA, 441 bp, Homo sapiens
  misc_feature (1)...(441): n = A,T,C or G
ctagatttctagatccctagtccatgtggtggaattcgagccatgctacatttatctggtatgaaagactgcaagacaattgtggctattagtatagacccatatgctccaatcttccttgtggccgattatggaatagttgcagatttatttaaggtagttcctgaaatgactgagatattgaagaaaaaatgaatcaggatcatgccttaaaaagaaaacttttgttaaagtattccactgaaatcacagatatttgtgggtattataacaatcattggaaagcatggagagctacatttcataatttgagggaaaatttctaacagatgccagaatgcttgtttatgggattgctgtgtttccttttaattatttgtggntccaaacaattattgtttgaacttttttaattctgtactaaaatctataataaagctn

SEQ ID NO: 9649 - DNA, 467 bp, Homo sapiens
  misc_feature (1)...(467): n = A,T,C or G
aaaanaattgaattcagtncataggccangncgnggaattccagtgaactacaagactgttttgatgttcatgatgcatcttgggaagagcagatattttggggatggcataatgatgtccacatatttgacacaaagacacagacttggtttcaacgcacaaattaaaggtggagttgcaccacagccacgagccgcgcatacgtgtgcagttcttggaaataagggttatatctttgtgggacgtgttctgcaaactaggatgaatgatttgcactatctaaacctatacacctggacttggtctggaaggattactattaatggagaaagcccaaaacatcgggcatggcatactttatcacctatagctgatgataaacttttcctatgtggtggactaaatgcatataatatgccattaagtgatggttggattcataatgtcacaacacattgttggaaac

SEQ ID NO: 9650 - DNA, 460 bp, Homo sapiens
  misc_feature (1)...(460): n = A,T,C or G
ggggntttgattcgataccattagcccangcggnggaattcaaactgcaaaaattagccaggcatggtggtgcacacctgtaattctagcttttttttaggctgaggcaagataatcgcttgagcccgggaggtggaggttgcggtgagccgagatcacggcactgcactccagcctatgcgacagagtgagagagaacccgtcttaaaaaaataaaataaaaagagttgttcagggcatgggggccgggggagcacacagcaagcacattcactgagcatatttaggagacgatgtagatttatccatgtatctccacccacggtcagtccctttcctcccagctgttggtcaaatggatctcagaggctgggactctgggatcttgttagcataaagatgccatccccctggccagcccctaaattgctgagcttagagaccagactgcatggtgccg

SEQ ID NO: 9651 - DNA, 495 bp, Homo sapiens
  misc_feature (1)...(495): n = A,T,C or G
agggatgcgggccngnnnnaactgaaaactagangcntangcagnggcnggaattccagactggagcgcaatggcacagtctcggctcactgcaacttctgtctcccaggctcaagtgattctcccgccccagcctcccgagtaactgggactacaggctcccgccaccacacctggctaatttttgtatttttagtagagatggggtctcgccatgttggccaggctggtctcaagttcctgacttgagtgatctgcctgccttggcctcctaaagtgctgggattataggcgtgagccaccctgtctggccaggactatgcaactttaaatcatgagaagacatgggagtcattgagagcaaacccttcatttctgaggtgaggaaacaggtccagagaaaataaatgacttgctcaaaatcgtactgcccccaagtagcaaagcaggggcttacatttgtattaaagtggatttcattaattctaaagatgg

SEQ ID NO: 9652 - DNA, 449 bp, Homo sapiens
atagaaaacctgatgacccttataccagtgcggtggaattcctaattggcatgtttaatagcatatcaaaaaacattttaagcctgtggattcattgacaaagcaatgagaaacattagtaaaatataaatggatattcctgatgcatttaggaagctctcaattgtctcttgcatagttcaaggaatgttttctgaatttttttaatgcttttttttttttgaaaaaggaaaacatccttttttaaaggggattatttaatttttacaaccctgggctattagaaataactttttaaaaattactgttctgtataaattttggaaatccaagcccaaaaaatatctgaaacaaaaagctttgttgcttggccataatacaagtgccctggggcagtgccgtttgttaagaacccacccctgcaccccttttgggggggctccctcgtt

SEQ ID NO: 9653 - DNA, 456 bp, Homo sapiens
  misc_feature (1)...(456): n = A,T,C or G
atagtagttcgtgacccctaggccgngcggnggaattcctgattttgtgacctacatatgtttcagctggtttttagtatactgggaattaagtagccagatttgagtgggttacagaacgcctcttttccagcttttacactaagccacaatgactatttttctctttacaaaatatggtattgaacatcatttaccattctttcttccttttaagttattgatgagacagaggaataactgtttattgaattatagtttatgaaggaattgctattatatattatgtggaaaacaaaacctgtggagtctttggctgcctcgcaaaataccacaggggatagctttggccttgacggcaaactgtataatacttggtgaggtagattaggccaaaccataacagctttttccacagttggttttagttttgaatggattgtcatatatatagat

SEQ ID NO: 9654 - DNA, 451 bp, Homo sapiens
  misc_feature (1)...(451): n = A,T,C or G
atagaaaactgatgaccctctagacagngcggnggaattcgccaacatgggccgcgttcgcaccaaaaccgtgaagaaggcggcccgggtcatcatagaaaagtactacacgcgcctgggcaacgacttccacacgaacaagcgcgtgtgcgaggagatcgccattatccccagcaaaaagctccgcaacaagatagcaggttacgtcacgcatctgatgaagcgaattcagagaggcccagtaagaggtatctccatcaagctgcaggaggaggagagagaaaggagagacaattatgttcctgaggtctcagccttggatcaggagattattgaagtagatcctgacactaaggaaatgctgaagcttttggacttcggcagtctgtccaaccttcaggtcactcagcctacagttgggatgaatttcaaaacgcctcggggacctgtn

SEQ ID NO: 9655 - DNA, 448 bp, Homo sapiens
atagaagactcgtagtccatgcggaggaattcatcccttccccctttacatcagaatcttgtgaaatgggaaaacaacagaaggaggggatcaaagatagctgatctcacatgcttcccaggcagggcagaggtgggagtcaaacccgggtgacaggtgggtggagagccctgtttgaggttgtggctgatccctctctggtattagtttttcccctgggagcaggaagccctatgaagaggggactgcagggtccccaggggatctttcctccctcccctgcatgaggcagaggcaagctgcctgccaaccccctccctcaaggaatggccttgcccaggaatgcccaccacacataccctcttctttttttctagtcaaactcttgtttattccttggcttgcctccctccttcctcccctctcaacctttacttctgatttctat

SEQ ID NO: 9656 - DNA, 455 bp, Homo sapiens
actagaagacctcgtaggaccctcgtggcggaagtcatttataggaggcagattttcttgcttaagtttatgcttttcactggtgctcattgtgtgtcaaatgattgacattcagtaaaattcctcttaacagaagttcattgggagcaagaattgggaggccataggtgtggaatttcaatatcatggcctatgtctcgtggaaaacggggccctgcagccagccaaatgttgactcctttgtagggtatggtatctgtctgaatctgtcagcttctcccatcatataagatttcatatgcaaacaagtaaacacttacttagaacacatccctcagtgttctcattaacagaccatgtgtgaagcacactcctactgatgtctaaatagagtgacttgtcatgcctcccatatattctaatgggttgagaaaaagtaaacaaagactgtttct

SEQ ID NO: 9657 - DNA, 450 bp, Homo sapiens
  misc_feature (1)...(450): n = A,T,C or G
atagaaaacctgatgaaccttatacagngcggnggaattcgttgtctgctaaacctgctcctccaaagccagagcccaagcctaaaaaggccccttcaaagaagggagagaaggtacccaaagggaaaaagggaaaagctgatgctggcaaggaggggaataaccctgcagaaaatggagatgccaaaacagaccaggcacagaaagctgaaggtgctggagatgccaagtgaagtgtgtgcatttctgataactgtgtacttctggtgactgtacagtttgaaatactattttttatcaagttttataaaaatgcagaattttgttttactttttttttttttttaaaagctatgtggtaagcacacaaaacacttttttgttgtttttgggggagggggcatatgtcactaataaaatgcccccaaagctggattgagggggaaaaac

SEQ ID NO: 9658 - DNA, 472 bp, Homo sapiens
  misc_feature (1)...(472): n = A,T,C or G
attgtagccattngnannnattgatgactatctgtacagtgcggtggaattcgtaaaaaggaggcgaaggctgtatatcagctgtatatcttcaaagtaattggtgaaagcagggttttgggggactgcaggagggcgattttgctagagtataaggtttctacctttccactaactagttctctgaatttcatctaatgatttaaaggtgaatgtggggatattttattagtaactaccttctatatcacattattgaattattctgtacttactctgaacactgaatgtttgaaccaaaaactaacttcttcagtaatagtttacttcacacgtcacccctctcgcattagttttgttaaatcagttttttctcaagcttaatatttctaacattttgtcatcaattaaaagaattactagaaattaggagttttcttgagggtagtaaagggaaagattcatggtttgg

SEQ ID NO: 9659 - DNA, 440 bp, Homo sapiens
  misc_feature (1)...(440): n = A,T,C or G
ntttgagttcgttagcnattgcggnggaattcggagcactcaaaccagagttgagtcgaagatctgctactgaactttttgaggcatatagcatggcagaaatgacattcaatcctcctgttgaatcttcaaaccccaaaataaagggtaaatttttacaaggggattcatttttgaatgaagatttaaatcagctaatcaaaagatactccagtgaagttgctactgaatcgcctctggatttcacgaaatatttgaaaacatcactacactagtagaggaatgaagtcagtggactttcttgtatatttgtgtgtgcagatgtacataaagatgagttgttaacttaggatcttttctttttatacaaggaaagcttcctaagaatgtctaggaagaagaggaagaatgaccctttgcatggcacagggttctgcccn

SEQ ID NO: 9660 - DNA, 470 bp, Homo sapiens
  misc_feature (1)...(470): n = A,T,C or G
cccccctttgagacactagtccgngtgaggacttcccgatgccccgctgtttataaccaaagcaacctgcacgccggtctggacttaatgctggaggagcttagggtggccggcattcacgtgagggcggcccggaccatcggcatttctgtggatccgaggaggcggaacaagtccacggagtccctgcaggccaacgtgcagcggctgaaggagtaccgctccaaactcatcctcttccccaggaagccctcggcccccaagaagggagacagttctgctgaagaactgaaactggccacccagctgaccggaccggtcatgcccgtccggaacgtctataagaaggagaaagctcgagtcatcactgaggaagagaagaatttcaaagccttcgctagtctccgtatggcccgtgccaacgcccggctcttcggcatacgggcaaaaagagccaaggaagccgcaga

SEQ ID NO: 9661 - DNA, 466 bp, Homo sapiens
  misc_feature (1)...(466): n = A,T,C or G
catcgagaccantgatcgagngccgtaattctttatgaaaggagtcatggatgaatgtactcatgtagcaaatttctcagtcccagttgatccaagcctcattatagtggttcaagccaaagaagatgcctatattccacgaacaggagttcgaagtttacaagaaatttggcctggttgtgaaatccgatacttagaagggggtcatattagtgcttatctttttaaacaaggactcttcaggtaagacggctggtctaaacatgtattcgttcatttgttgtttgttttctggattttttgcttcaacaaatgtaaaagatcacatatttttatagtctgtttcaatctttgaattccctcctcacctcccacaaatctcacagagttacttttccctctttcctagaatttgatcttcttattttcttctagagaactaagcatgatgcatattataggcatg

SEQ ID NO: 9662 - DNA, 453 bp, Homo sapiens
ccccccatcgacgaccattagatagagcgccgtaattccacgcccggaaagtgagccgccttagctgctgattgtactagagcaggcaatacatgagtcggcccattctcaaaaccactgataggatgtgagtttcactaaccccgttttacagatgaggaaattgaggcaaggccagggctcacacctgtaatcccagcactttgggagtccaaggttggagggttgcttgagaccaggagttcatgaccagcctgggcgacatagtgagacccccatcttcccaaataaaaataaataaatcagccggacatggtggcatgtgcctgtagtccctgctgctcagaaggctaaggtggaaggatagcttgagcccaggagttcgaggctgcagtgagctatgatcataccactgtactccagcctaggtgacagagggagaccctgtctcaa

SEQ ID NO: 9663 - DNA, 479 bp, Homo sapiens
  misc_feature (1)...(479): n = A,T,C or G
cgcccccttggagcctnttgnnnnnntttgacgnaccattantccatgcggtggaattcattttgaatggctgcataatagcccattaaatgcacatagccataatttatttaaccattttccagctggaggcatttccctgaccacaccctaatcccaacttgaatgctcctcctttggaccctttatcatagctttgctttttgtattcagtgtatctacttattaatctgtctacttcactagacttcaagctactttgtgtcaacggcagtgtcatccttgtgtacttatgtcctgatgctagacccagctttgaagagctgaatgaatatgtaccagaagcttgggtgtggttttatccctgtttccacaggcatggtaaaacccagtgagatgacttcccattccaggctctgtggtctctgtgtatcccttccagaaaagtgcaagtgtagaaagagggtccaaaatacaaa

SEQ ID NO: 9664 - DNA, 465 bp, Homo sapiens
  misc_feature (1)...(465): n = A,T,C or G
attgtagacactagtccangtggaggacttcgactctgccaaactaagcaactaataactgttagaggcaggattcatttgtatgtcttgatttaattttaagacacaggctctctttctgtggcccaggctggagtgcagtggtgctaccttggctcgctgcagtatcaacctcctgggctcttcccatctcagcctcccaagtagctgggaccgcaggctcatgccaccatgcctggctggttttttgggtttttgtagagacggggtctcactatgttgccagagctggtcttgaactcttggcctcaagtgatcctcctgccttggcctcccgaagtgggattacaggagtaagccactgtgttcagccagaggcaggatttaaatctacatggtattattccagagaaagtggttttaactttcttgaggatcctccaacatgtttggaaaatcaaaagc

SEQ ID NO: 9665 - DNA, 463 bp, Homo sapiens
  misc_feature (1)...(463): n = A,T,C or G
aagtgnnatcgatacattactattagcccagggcggnggaattcgcgctgcctaccaacatggtgttcagatctatgaccggacatctgttctttaagttatgggcagaaaaggtcaagttactggagtggagaccgattaaggacagattgagtgccagtattttgtctactgtgctggccagctattgaggatgctgatggaagaatttatattcggaactggcagggtggcatcctgtctgggggctttgagaagaacccaaaaccaattttcactgaaggcaagaaccagctggagattcataaactacaggggactgggatcactttgagcctctgatgagttgccttctgaggaggatgccctaattacagactctggagatcatgaagttggtgaactgcccatagacctttccatcaaacatgaggtgcatcatgggcgaatctcctgcagtgta

SEQ ID NO: 9666 - DNA, 480 bp, Homo sapiens
  misc_feature (1)...(480): n = A,T,C or G
ctttgtccctctcgnnnantgacgacactaggaaagngcggnggaattctgacaggaagtggctgttttggataagacgatcaggaaaggtacccgtctgcggaagtgatactgggtctggagtgaagcggttggaagagaactgcacctctctggaggaagacagtgccaggcacagctgaaaatccggggctagagctactgggaggaacaggaggagcagctgggaaactgggtggccggagcagacggggagggtgagcagggagggtaaagataagcaagcaaggggctggggctgtcaccgaggtggggtgcctcggagggtgcaggagcagagtcaggatctgacttaggtttgataggctcctctggctgtcctgcgatttatcagggacccaggttgcgagcaggccgaccactcaagaggcgtctacatcaatgcagtcaaaggctatgctgacttggaccagatggatg

SEQ ID NO: 9667 - DNA, 470 bp, Homo sapiens
  misc_feature (1)...(470): n = A,T,C or G
atcganccccctattcgtatggatcactagtccagtgtagtaggaattcgtgcagcacgtgcacagccaggtcgatggccaccgtgttgccgctccctctggggaccacgatgtctgccaggcgcatggtgggctggatgtactggtcgaaggagggcttgacaaacttgttgtactgcttgatgacaccctcgatgtcccggccgcgctcactgatgtcccggcgcagccgccgtaccaggcggatgtcggagtctgtgtccacaaagatcttcatgtccaggagctccaacagtgtcttgtcagcaaaggccatgatgccctcaaagatgatgacgtttgcaccatacagtgttttccagtccttcttccggctgtgcgtggtgaagtcataaatgggcaccttgacactcttcccctgcttcagcttcttgagggtggaaatgatgaggtcgaagtcaaaggcatct

SEQ ID NO: 9668 - DNA, 397 bp, Homo sapiens
ctagaatgtttcggattacagaagaaaccggttctcttcacatctttatccctgtgatgcagcattccacttgcaattggaagccgagagaaaccatgtttatgaaagtaaagaggctgctcagatgactgcaaaccagccttccttactggttttatcactggtaatgttataaagacagttgtccagtttcatgaatcttgtaggttttttttttttgattttttttccaaaatcagtattgtaaaaaactatgctgccccaaaaaagatgattggacactctcaagcggggggctggactttgtcatcttttgcacagccatctccacaccttagggcttacctcaggttagttttttatattctgcaaagacgaaatcaaaataatccaaatt

SEQ ID NO: 9669 - DNA, 440 bp, Homo sapiens
  misc_feature (1)...(440): n = A,T,C or G
nttagaagatcgattgcccttgccgnggcattcgatgattgcagtttaaaatgtcattattgtgcaggcttggataactaacattccatgatgtagcttgtttctgatgagatgattgtaggtacatttttctcattatccaatcatctgtgggatacttagttttctaatgtgccattatctatttttattctgcagttatgttcaaaatacagtacatattttaaaatagaataaattgttaaacataaaattttaaaagtagtagatgtgcgtaagaaaactttgtaaaatagttatgagtcctacccagtagcaacttctggcattcaagcaggattccactatgtaaatatctgtaatgcatttataataagttgtgtagtttgtcctgcatccatactacactatttgctaaagtctcagtgccatctcctaat

SEQ ID NO: 9670 - DNA, 465 bp, Homo sapiens
  misc_feature (1)...(465): n = A,T,C or G
atcgagatcgatagacttngccagggcggaattccagggttagctggctctagctcaggggcaggaggcaacctgctttggctcccttggaataagggagataaaccaagaaggagctccccagtgaagcatggccttgtgcaccataagcagatttgaagtttaagaagatgactctagatgttccacggagaatgttaggagtgagaatggccatgggaagacccactgggaggctgttgagttgcccagggagaacaaagaactgtgggcatcggaatcgggaagacctactgcctttaggaaaagacaagaagatcttcagaagccaagaagaatagaagagttgcagagatatggaaggtcttctccttggtggcctctggtgccttgaactgaagctgagatgggcaggctcctgatgtccagcttagattctgaggatgagcagggacaaagatacta

SEQ ID NO: 9671 - DNA, 474 bp, Homo sapiens
  misc_feature (1)...(474): n = A,T,C or G
tggtggccngncctgagnccaactgagatcatagtcagngcggtggaattcaggaaagaagagagggagagagaggaaagggaaggaagaaaggaaggagggagaagggaagaaagaaacaatgtctaacccaaccctatcttgaaagttgaactcaagtagaaaaatggatagaaacaaaattctctagtactcatccaggaaaccattcttcaatgttgcatgtggctgtttgccaaggcacacaaagtgcttgtaggcagcaaccatatgctacaagaattgtaaactgcatacagtttgtttgaagtagacagtgaggataataacaaagttgctaggcaggaaaaaaaatcaggaaaaaagcttgtcgctatttgagaatctgtatatttttaaaggcttaaaatattataaccacagggtatccagccaaattcaacattactgcaagtcttagagatttaaacattc

SEQ ID NO: 9672 - DNA, 458 bp, Homo sapiens
  misc_feature (1)...(458): n = A,T,C or G
nattgtagttcgtagtcactgcggaggaattcgtagtgttagactgaagatgaagtaagtgctgtttgggctaacaggatctcctcttgcagtctgcagcccaggacgctgattccagcagcgccttaccgcgcaccccgaatattcactatggtgaaaatcgccttcaatacccctaccgccgtgcaaaaggaggaggcgcggcaagacgaggaggccctcctgagccgcacggtcagaactcagatactgaccggcaaggagctccgagttgccacccaggaaaaagagggctcctctgagagatgtatgcttactctcttaggcctttcattcatcttggcaggacttattgttggcggagcctgcatttacaagttcttgatgcccaacagcaccatttaccgtggagagatgtgcttttttgattctgaggatcctgcatattaccttcgngg

SEQ ID NO: 9673 - DNA, 542 bp, Homo sapiens
  misc_feature (1)...(542): n = A,T,C or G
acaaacttatatgataacatttactaatttgtatcacaaacaattaacactcttaccagcaagcaacacgaccnaannaatgagaccatgtcgtaggcgntaannacccacncacactagaatgaataaaantttaaaagactgacaatgctaaatattcccaggatgcagaacaatcaaaaccctcatatattatgggggacatggaaaattgtacaactcctttggaaaacaggtagtttctacagaatttcaatatatacataccatacaactcagccattgcattcctatttacccaacagaaataaaatcatttgtctactgaaaaatttgcaaaataatgttcattgcggctgtagccattataaccctcaaacggaaacaacccaatgtgcatggattgtgaatagatgacaaatggtggtccatctatacaatggaatattgctcttcaacagaaacaaactacaggtccatgtaacaacatgatgattgaaagaagtcagatgtaaaaaagtacatatgtatgatgcaattta

SEQ ID NO: 9674 - DNA, 458 bp, Homo sapiens
ggcttggctttcgagcactactagtatagagcggcggaattccagtagcacgtatattagaccacctcattttagccaacatctctctctctcttttcctttcttgctctctctttatgcttccatttggaaattttctgtttatgttagacaaaaaccataggattatctcaacaggtgcagaaaaggctttcaatataactcaacataccttcatattaaaaactctcagtaaactagatattaaaggaacatacctcaaaataataagagccctctatgacaaacccacagccaacatcatactgaataggcaaaagctggaagcgttcttcttgaaaaccagcacaagacaaggatgctgtccctcaccactcctattcaagatagtattggaagtcctggccaaagcaatcaggcaaaagaaagaaatgaagggcatccacatatgaagagag

SEQ ID NO: 9675 - DNA, 465 bp, Homo sapiens
  misc_feature (1)...(465): n = A,T,C or G
naggcccccccctgnccccnaaagtttccanagannngcgctnnnntnagngaancacggcagagcactttcatctcgtcaaaaggaaacgtctttcctgttaagcactcactcctattccccacacgcctgagcccttggcaacaactaatctgctttctgtcactatagatttgcttattctgaatgtgtcatataaatgggatcatgcagtttttttttttttttttttttgaaaacgaagtttttttttgccccccagcccgaattgggaattgaaggggccaaatttgggttaattgaaacccccctttccgggtttaacccttttttcctgcctaacccccccaagaagttggaataaaaggcccccccccccggcccgggttatttttttgttttttaataaaaaaggggttttccctttgttacccggaagggtttgaatccccgcccctaaggaag

SEQ ID NO: 9676 - DNA, 504 bp, Homo sapiens
  misc_feature (1)...(504): n = A,T,C or G
aggggtagccccagcgcagcccncaactgatnactancagcacctngcacnngncgnggaannnggnnntttcaagaataatttggagggccagagagtgggtgctgctgatgggtttgtgatgttatcatagaggagtggaaaatggtccttgtgagtgctcaattcacttctgggtagggacaccacctgggtggggccacaggcaggttcaggtggagacattggtcatcagaaatgcaaaaacctgaaaagacatcacaaaaggccaatcttaggttctataagacagatgttatctgcaagagtaattggggaagttgcaaatcttctggaggttactccagaataatgggttataatcctttatgtctacaccttagcagaatttaagctcctctcattctcctaacctggaggtctttcattagctttacaaagggtggtttagttttggggaatggctattatttaaactataaactaaatgttcccaaggttagg

SEQ ID NO: 9677 - DNA, 440 bp, Homo sapiens
  misc_feature (1)...(440): n = A,T,C or G
ttgactttgatgaccttacacagngnggnggaattcgagctgcattccttgaattcccaggtcaaaggaggtgacagggccactgtctgtttagttggtcagagcatggccaaactgttgttttcccatgggacagcaggtttaagagtggtatcaaaaataaaggtacgtgtgttgagaggagggcaagtgggacggagacactttgagaggcgacagcacctccccgctgcttacattggaaaagggactagggaggggctgggatagttgactgtgaataatgaaaagctgggcttgggaggaggtgagggaagattttgtcccaaagagtagagctctttgtggagtgagtagaactttacagcggggaattttaactcagaactggagggactttccaatagcttgagcagagcgaaaatgggggacttgtgagn

SEQ ID NO: 9678 - DNA, 440 bp, Homo sapiens
  misc_feature (1)...(440): n = A,T,C or G
nttgactttcgagaccattagacagngcggnggaattccgttcacgttcgcggccttctgctacatgctggcgctgctgctcactgccgcgctcatcttcttcgccatttggcacattatagcatttgatgagctgaagactgattacaagaatcctatagaccagtgtaataccctgaatccccttgtactcccagagtacctcatccacgctttcttctgtgtcatgtttctttgtgcagcagagtggcttacactgggtctcaatatgcccctcttggcatatcatatttggaggtatatgagtagaccagtgatgagtggcccaggactctatgaccctacaaccatcatgaatgcagatattctagcatattgtcagaaggaaggatggtgcaaattagctttttatcttctagcatttttttactacctatatg

SEQ ID NO: 9679 - DNA, 461 bp, Homo sapiens
  misc_feature (1)...(461): n = A,T,C or G
cggggnaatcgagtcattagccagtgcggnggaattcattggattctgtcagaaggcctagatttgaaataatgttttgtacttcggtaagatggaaaacttagtgattcactgatttcttagacactctaatatgatatgctttctggaaggataaaacgaatacatatgggaaaaagtacttgagaccaaggccagcatcaattccagacatcttcatgttcctaataggctaaatgaagttaaaaacttatttcagatttttctcatctgtaccttatatctcataaatttattgtatattttatgtcagtagcttagctgtttattgtctttaaaataacatgtaaacttcaatgttctatctggaagcagaataaaatatttacatagataccccnnntnnnnnnnaaannnnnannnnanaanaaaaaaaaaaaaanaaaannaaaagaangggg

SEQ ID NO: 9680 - DNA, 470 bp, Homo sapiens
  misc_feature (1)...(470): n = A,T,C or G
agacctcnaatcgagaccataaatcgttagcataggaagngcgcggaatnctccctcacttccctagctccatgtgttagccactgcaggttaattgatctaaggcttattttcttcaaatataaaatgaagataataatgcctacccagagggtcatgtgaacattaaatgagatcaattatgtaaagatctatctatgcagtgcctttcacagagtatgcccacaaataaatgttacctgtttcattttagttatctatgtttagctatctttgtgttttttctatcctgcttcttctcgctccactatactcttacatcctaattctctctctctctcatacacacatactttgctgtgtctagcacagtgctttgcttgtggctcacactctacatgcttgttaccctgaactattaacaaaagcagctgctagtaacaggtaatgttttctgaccacctacatgg

SEQ ID NO: 9681 - DNA, 481 bp, Homo sapiens
  misc_feature (1)...(481): n = A,T,C or G
ggcctgataacctcgcagngcattgagatctactcaccncgccgagatggngaaaccccatctccactaaaaatacaaaaattagctgggcacagtggcaggcgcctgtaatcccaactacttgggaggctgaggcaggaggattgcctgaacctgggcggcagaggttgcagtgagccaagattgcgccactgcactccagcctgggtgttagagtgagactccatctcaaaaaaaaaaaaaaaaaaaaaaatttttcctcaggctggggggctgccccgggtattcccacctactcggggggttgaaccagaaaaatggtttaaccctggggggggggggttgcagggaccctaaatggaaactttgcccttcacccggggggagggagcaaaattttgtttcaaaccaaccaataataatactactattattattattacacccacccctccgaggtggggggttggctaaaaagaag

SEQ ID NO: 9682 - DNA, 473 bp, Homo sapiens
  misc_feature (1)...(473): n = A,T,C or G
tgcgggcccnnnagggnnnatactgagatctcatagaatgncgtggaannccaccacacttgtcttctctacctggaagttgtattccccatacccacatggctcacttcttcacttcattcaagtctctgctcagatattaacctcttcagagagcccttccttcacacactgtcttgcatagcagcctcccctacaagttgtcttctttctccttaacttttgtgatggttaattttaggtgtcagcttgactggattaaagaatacctagagaactggaaaggcattatttgttagtgtgtctgtgagggtatttccagaagagattgatatatgactgaatggactaagagggaaccatccgccctcaatgtgcaggtggcttgaaacaaaaacggaagaaaggcaaattggtcttactctcttggagctggaatacacgcttccattcctgcccttggatttcaggat

SEQ ID NO: 9683 - DNA, 489 bp, Homo sapiens
  misc_feature (1)...(489): n = A,T,C or G
agggtccgccccttttgagaccctagtagatggcggtaatncgngncttcctgganaccctgtcaaaagccttaccgcctgcctggagaaacacagagcctgcccttggcaaatatatgttggtgtatctgaaaaacagctcctggaagctttttctcattcaggctttaagggttaccccatctttccttatgtgtgtaatattggagaatgtacactctcactgaactggggatgtttgacttaaaatgatggacaataagatagtgagcagtaagtgtgctctatgctaggctacgagaggccatgagctcctcatctcttctctgttctgagctctctgatccactgcacttggggcagggggtgcattctctgtgcctctcctgagtctactttctgcatcattggttctcccagctcacttccataatgtcctcctaggctgcattggaattgtgtgttgtctagacccatggccaagactgg

SEQ ID NO: 9684 - DNA, 404 bp, Homo sapiens
caggaaaccacagtcatttgttcatgtatcagaaacattcaacccacatcaagccctgtgataggcgctgggagctatggcttacagtttgagcctgagcctcaccatctgtcaaatggctggtggtgttaccccatcatatggaggaggagatggaggcccagagatctaataagcaggggattaggggggctaatgagggggactaacttgggggagccaacttcagagccttactgcccatgagcctcccacccgctctgttgtatgttttttaaaaatcagtttttgaataaggaatatatttacatattaaaccctaattgtataaacaggtgtttgtaatggagtggaggcccctccctagtcttctagttactcttctcaatttattctttacctta

SEQ ID NO: 9685 - DNA, 507 bp, Homo sapiens
  misc_feature (1)...(507): n = A,T,C or G
agggatatggcccacgcccccccctttataaattaccgaacacaactaagcacnngnccnggaanncctcggccgcggcgagcaggtagttagttgttgttagtcagtgtcagttgctcttctgcgtttgccgnggccaccaggaaggggacgggacggacggtgatggtggtcgccgcggcggcgtgtgcgcccctcaggtatctgcccaaactggaacttatgctgtagacatttctttgtggtttatctaaaaaccaaaggaaaagaatacttgagatccatttgtaaggaaagaaaaggaagcaacaacataatgcccagagttggagccaattaaaccaggctggagtgcggaggcgtgatcttggctcactgcaacctctgccttccgggttcgagtaattctcctgcctcagcctcccaagcagctgggtctacagtgagactaattacatccttcaatgaagtaccattttgtgagaaagtgagaattcaatgatttat

SEQ ID NO: 9686 - DNA, 487 bp, Homo sapiens
  misc_feature (1)...(487): n = A,T,C or G
tggcgatccnnncggcngancctttgaaacctntnnatttgagaccctaggccanngcgnggaattccggtactgaagatgctccagtaattggtgacccaaccctaggaagtagggagaaatgaaggaagggcataggaaaattttcccagtaaatcccctgatggtcacattaaggtaaaggttttggctggtcagtgtgccaagacctctccagcttctcattcatgatgacctctcaaagttgggaaacaagctgatttcttgccaagaggtctcccaggagatatttgggaaatgtgaagttcgtatctttaaggagcattcttggtcagcatggttgatgaactaatgatgagagagttaaggaatgttgctagaacatagggcttgctggtacctatgtgactaagaaagggacatgatgtaagggaaaaggcctcaaattcttgtgaatgtctggacattctcgttaatattcttttgg

SEQ ID NO: 9687 - DNA, 467 bp, Homo sapiens
  misc_feature (1)...(467): n = A,T,C or G
naaggccggcngctgnnccaggttgccagatcggcgggcaattgaggaagaaacgagaatcggcagtttccttacctgctagcaactctggaaaaacacacattgtaaaataagaattcttcaaagacaacttgaagacatctgggaattctgaagcctgaaaattccatgagttcatagcagtgttcactaattccactgatctaaagacaaaaaggagagtcaactgcgtgcccaaactcatttctgatgatttcttccatcctaacttttctgcctctctgggggtggttatgcctgtgaaaaacattgaagctgtcaggaacagagtcggctttcaagattggaatgtcaaagtagagtcttcttttcctcagaccagaaggggcttggttggggataaagcttaaaagcatgggatgtatctccattaggaaatatgaagtgagttggtatattacaggtat

SEQ ID NO: 9688 - DNA, 460 bp, Homo sapiens
  misc_feature (1)...(460): n = A,T,C or G
gcgggtttaaatcggacctacgacttgaggctgtagaaannacactgacattacggaaagtgccttagacactacagtactaagacaatgttgaatatatcattcgcctctataacaatttaatgtattcagttttgactgtgcttcatatcatgtacctctctagtcaaagtggtattacagacattcagtgacaatgaatcagtgttaattctaaatccttgatcctctgcaatgtgcttgaaaacacaaaccttttgggttaaaagctttaacatctattaggaagaatttgtcctgtgggtttggaatcttggattttccccctttatgaactgtactggctgttgaccaccagacacctgaccgcaaatatcttttcttgtattcccatatttctagacaatgatttttgtaagacaataaatttattcattatagatatttgcgcctgctctgg

SEQ ID NO: 9689 - DNA, 459 bp, Homo sapiens
  misc_feature (1)...(459): n = A,T,C or G
actgagaccctgttgagngccgtggaattcacctactaaatgaacaacatcagatagcgaaggaactatttgaacagctgaagatgattaaaccttcatccaaacagcagaaggaggtagagaaggttaaaccccagtgtaaggaagttcatcagaccctgattctggacccagcacaaaggaagagactccagcagcagatgcagcagcatgttcagctcttgacacaaatccaccttcttgccacctgcaaccccaatctcaatccggaggccagtagcaccaggatatgtcttatcttccttgtgtcgtgttttcccagaaagagctgggaacctttgctcaaagctccatcgcccttcaccatcagtacaaccccaagtttcagaccctgttccaaccctgtaacttgatgggagctatgcagctgattgaagacttcagcacacatgtcagcat

SEQ ID NO: 9690 - DNA, 474 bp, Homo sapiens
  misc_feature (1)...(474): n = A,T,C or G
tgcgggcccccnagtngnnacactgagaccatcgctgagaggcgtggaaancggacaggatccctgctgcaccttccccaccccctcctgggaagtgccccctcacctcagggcacccgcaacctgggctcctccctgagcgcaccggcccttcctgtcacccaggtccaccctcagtactcaagctgcagtatacagcgggaaaaactgaggcactttggtgctaggggtttgggactgaggcgtggagagcagatgtgatggcaggaagactctcgcttttaaacatctggtttgggagagaccatcgacttggccagtgagactgagaatggattccgagtagtgatgggccgtttgcacctcggtttttccacgtgagaaatggggagaacgctgctgttaggaggaagttgtgtccagttcagggtgccctcgggagccctgtccctgttgctgtggcccctctcacgc

SEQ ID NO: 9691 - DNA, 492 bp, Homo sapiens
  misc_feature (1)...(492): n = A,T,C or G
gaccaagccccttagatncccctttttgagnacactagtccatgtggtggaattcgtttattccagcgatgtgacttttttcataatatttcttggaatcatattcatagtctggggctgtgtgttgagcagccttaaggatgctagacactcatttagtgcccatggagtccagcgaatgacgtctgtggccaagcgaggtctcaagtgcaaagcacaaggaccatttacagtaaaacagcttggattcaatcatgtgacttttaaattggctcagaaagcacttttgtaatttcagagagagttttgagccatggccacgttgtcattgtgagtctatagcttgactccttggagaacaatattcatttggttgtggagactgattcgctgggagaaatctgtcctgttactttctgggcatcccaagttctgacttttaccaggggcagaataacacaaacaaagccatgagggacataatcccctctt

SEQ ID NO: 9692 - DNA, 443 bp, Homo sapiens
  misc_feature (1)...(443): n = A,T,C or G
ntttgaaaacctgaggacattgcaaagngcggnggaattctgagggctacactctgaatgcagataaaaaaacatgttcagtccgtgactagtgttccctaggctctcatggttgccagcacatttgtgtgagtgatggggccgcatcctaccactgtgattgctatcctggctacaccttaaatgaggacaagaaaacatgttcagccactgaggaagcacgaagacttgtttccactgaagatgcttgtggatgtgaagctacactggcattccaggacaaggtcagctcgtatcttcaaagactgaacactaaacttgatgacattttggagaagttgaaaataaatgaatatggacaaatacatcgttaaattgctccaatttctcacctgaaaatgtggacagcttggtgtacttaatactcatgcattcttttgccg

SEQ ID NO: 9693 - DNA, 482 bp, Homo sapiens
  misc_feature (1)...(482): n = A,T,C or G
ctttgagaccantagttggagagccgtaattcaccagctctattctttgccttagctttgcagagagtgctgctcatgtcctcccctccacccgcacatgggggtcgctgcccttcactcctacccccagaggccttggccaagctgctgctttgaaagcgggatcttggagacaggccatccatcctggagcctcatggaacaggatgatggcactgagaaagccaatgaccgaatctcttttctctgtaaaaatgtagactgaaaagccatgtgtattttcctatgtgctgtagctctcctttggaaataaatcacaggcatctggaaaaaaaaaaaaaaaaaaaaaaaaaaaaaaggggcccgttcaattttaaaggcccctttaaaccccgtgaaaaaccctgaaggggcctttttattggccaccctttggtggttgccccctcccccggcctttttttgccctgggaggggccccn

SEQ ID NO: 9694 - DNA, 495 bp, Homo sapiens
  misc_feature (1)...(495): n = A,T,C or G
cgcccccccccnttagaaaaccctnttttgagaccctaggacagngcggnggaattccgctgtgcctcgggttcgcgccccgagtgagcagtcctggcccggagcgtcggtcctggtaatctgtaagaaaagcgctgcggcccagggggtaaagagagatcagcctctgtggactcggtgcttctcctggcaagtaaaccccaaggaggactgaccagttcttgaatttctataccatggcccttcgatcagtgatgttcagtgatgtatccatagacttctctccagaagagtgggaatacctggacttggaacaaaaggacttgtacagagatgtcatgttggagaactacagcaacttggtctcactgggatgcttcatttctaaaccagatgtgatttcctcattggagcaaggaaaagagccttggaaagttgtgaggaaaggaagaagacaatatccagatttggagaccaagtatgagaccaagaagn

SEQ ID NO: 9695 - DNA, 460 bp, Homo sapiens
  misc_feature (1)...(460): n = A,T,C or G
ggtggttaactgaaacctcgactagaangctntgnaangncgnggaantcggngccaggcattctgctagatgctttacatccatcatcatttgctctttacattaagctggcgacttggagactgcttacctcattgggtagatgaggaagcggtgtgactagtaaggggcaggcagcactgggatttttagatccaagcctggtctcattcccaggtccgtggcctttgacatcacatcctttaagctgcatggcctccctgagctctcctttccgttggctctcatgcctgtgcaatgattccgtccctgatttggggtcctgtcacgtgacccccatcacttattaaccaggtgacactgttagtcttttcactgactgagtggcattttccctgtcagtaaaatgggagagaatgatccttcttctttaacctgttgttgtgaggagtaaatgag

SEQ ID NO: 9696 - DNA, 478 bp, Homo sapiens
  misc_feature (1)...(478): n = A,T,C or G
cctgacaccctcgttagaggccgtaatncgaacgacctccacacactaaaaactggaggcctcagttgcttgtattactgaaactagatgaagacttacatgtcaagcatcctcgcctcctcacctttgcctcacagctcaaagcaggaaaaggtctcactattgtgggctctgtcatcgtggggaacttcctagagaactacggtgaagctttagctgctgagcagaccataaagcacctaatggaggcagagaaggtaaaaggattctgccagctggtggtggccgccaagctgagagagggcatttcccacctcatccagtcatgtggccttgggggcatgaagcacaacacggtggtgatgggctggcctaatggctggcgtcaaagcgaagatgcccgcgcttggaagacttttattggcacagttcgagtgacaactgctgcccatcttgcactgctggtggctaaaaacat

SEQ ID NO: 9697 - DNA, 484 bp, Homo sapiens
  misc_feature (1)...(484): n = A,T,C or G
ccttgacccccctnttttgagaccactagcnagngcggnggaattcttgcttgtttgttttctgcaagtctctttcttaacagtattttcatcaaaccacttgtactctggacatctttaaatttattataaaggcattgctggatcccctacttaatgctatttaatcaatgctttttatcttcctaagtgaatcattgtcataaataatttggggaacaatgtcttctgggtttctgagactgcctgacaaatctttgagtatgtcttttgtgttaagcataagttcctgtgcatcagcttttattccagagcacacacacctttgagatgacaggtttgaaaagcattttgtaaactgtcaaaagctgtttaaatgttactacacaataatgagtagtagtcatagctgtgactgccttttctcctttgcttttgtttgcagatttcatgactataaaactaaaaggcagggaagtatatt

SEQ ID NO: 9698 - DNA, 457 bp, Homo sapiens
  misc_feature (1)...(457): n = A,T,C or G
gcggttttacctaggacctcgactgaggcgtaagaannncagccgnggacttgggttgtaaatttatttgtggggagtgcgctccaggaatagccaccatccctgcccccgttttcccaccggggagtctgtacagagatttttctacgtttttattttttgcctcagagggatgggattggggaggaggggatgggcagcggagggttgggggcatggtctgcaggctcatctgtgtccgcctttcactccactaatgctgtctcagtgttttctctctctctctttcgagcttgcactccggtacccgacccggcgccctggcccatcccatgccggggggccagtggaaagaagacaggccgtccagcccgtgcccgcctgcgggggnggcacccagcaagcccgcccaccgcccgctgcctcacctgcttcgccacagactcttgttcccagg

SEQ ID NO: 9699 - DNA, 466 bp, Homo sapiens
  misc_feature (1)...(466): n = A,T,C or G
aggtggtttccctgagaccctcggctgatcgccttcgnaagngcggnggaattccgctgtttgccaagaaactcgccctgcactcaggcatggactacgccatcatgacaggcggggacgtggcccccatggggcaggaaggcgtgaccgccatgcacaagctctttgactgggccaataccagccggcgcggcctcctgctcttcatggatgaagcggacgccttccttcggaagcgagccactgaggagataagcaaggacctcagagccacactgaacgccttcctgtaccacatgggccaacacagcaacaaccgcatcgacgtgatggtccacttcgacctgccgcagcaggaggagcgggagcgcctggtgagactgcattttgacaactgtgttcttaagccggccacagaaggaaaacggcgcctgaagctggcccagtttgactacgggaggaagtg

SEQ ID NO: 9700 - DNA, 495 bp, Homo sapiens
  misc_feature (1)...(495): n = A,T,C or G
natagaganccntggcagatagaaggacttcttcttgactccgctgctcgccatgtcttctcacaagactttcaggattaagcgattcctggccaagaaacaaaagcaaaatcgtcccattccccagtggattcggatgaaaactggaaataaaatcaggtacaactccaaaaggagacattggagaagaaccaagctgggtctataaggaattgcacatgagatggcacacatatttatgctgtctgaaggtcacgatcatgttaccatatcaagctgaaaatgtcaccactatctggagatttcgacgtgttttcctctctgaatctgttatgaacacgttggttggctggattcagtaataaatatgtaaggcctttctttntaannnaaannnnnnnnnnnnnnnannnnnnnaaaaaaaaaaaaaannnnngggggcccctttaattaaaggggcgcattaaaaccccgtataaaacccgaaagtgggtt

SEQ ID NO: 9701 - DNA, 478 bp, Homo sapiens
  misc_feature (1)...(478): n = A,T,C or G
natggagcctatgganatcgcagaccctagtgcagngtcgnggaaatcgaaggatgtgccaaataattgacaagacatgcttatctccaactcctactttagaacaacatcttatgtgggatgatattgctattttagcacgctacatgctgatgctgtccttcaacaattcccttgatgtggcagctcatcttccctacctcttccacgttgttactttcttagtagccacaggtccgctctcccttagagcttccacacatggactggtcattaatatcattcactctctgtgtacttgttcacagcttcattttagtgaagagaccaagcaagttttgagactcagtctgacagagttctcattacccaaattttacttgttgtttggcattagcaaagtcaagtcagctgctgtcattgccttccgttccagataccgggacaggtcattctctcctggctcctatgagagaga

SEQ ID NO: 9702 - DNA, 483 bp, Homo sapiens
cgccccccatggagaccttacgacaatggacgaccatagtgcacagccaagaagaggaagaggagcactttgaagtcattaaagatgaagtaaaggttgtggccagaaagcacgggcagcctgggactcctgttgccatagcaacccagctaccgccgaggacttctgcggcttttccagcccagcagcagccgctccagcccctggcacccaccactgtactgtctgtctctgcggattggaatgcacttctccagcgacctaacaaatacatatggggactccagtacctggagatgtgaattccataaaaatggaagcatctaagaggcagtgaacactggcgcccacaggagaaccaggtgcatcaccgcattgcggagctgaggaaagcaggtctgtggtcccagaggcgtctgctgaagctgcaggaggcccacgacccaagtcccactgtgactatctgctggaggagatgcagtg

SEQ ID NO: 9703 - DNA, 479 bp, Homo sapiens
  misc_feature (1)...(479): n = A,T,C or G
cctgagaaccctgtttgaggccgtaattccggccgaagncccacagttagctgcagcaaaacgcaggctgcctcaaggaaaggagcctgggttgattaacttgtgtgccaatgtcccacccgtcccaggtaacattttgccccctgaggtccggggtaatttaatggctgctggacaaaacctccaaagttctgaaagatcagaaatgatagctacctggagtccagctgtacggacactgaggaatattactaataatgctgacattcagcagatgaaccggccatcaaatgtagcacatatcttacagactctttcagcacctacgaaaaatttagaacagcaggtgaatcacagccagcagggacatacaaatgccaatgcagtgctgtttagccaagtgaaagtgactccagagacacacatgctacagcagcagcagcaggcccagcagcagcagcagcagcagcagcacccgg

SEQ ID NO: 9704 - DNA, 471 bp, Homo sapiens
  misc_feature (1)...(471): n = A,T,C or G
nggaaaatannnctcgtagaacactattgagngccgtggaattcgtggaggcaagttggtcaatgctgcatgatgagaggccatatttatgtaatttcttatgaacgatttatgaaaattcatccagacaggcactaatgaacattttgaaaaaagatgggaacgataagctttgttgggtttcagcaagagaacactggcagcctcaggaaacaaatgaaagtcttaagaattaccaagatgccttgcttcagagtgatctcacattgtgcccggtcggagtaaacacagaatgctatcgaatctatgaggcttgctcctatggctccattcctgtggtggaagacgtgatgacagctggcaactgtgggaatacatctgtgcaccacggtgctcctctgcagttactcaagtccatgggtgctccctttatctttatcaagaactggaaggaactccctgctgttttaa

SEQ ID NO: 9705 - DNA, 505 bp, Homo sapiens
  misc_feature (1)...(505): n = A,T,C or G
aagcggnnnnnnnaattagacatcactacgaacngncgnggaanncggaatgcaagccttttctcaaggtcttaatgagcaacagcaacagcagtctccagttattaaagagagaattaaatacagcagagatttcctgttgaagctctcaagtgtttccatctgcagaaaaaaaccagactttctgcctgatcatcccattgtactgcaaaaaccagaaaacaaccaaagttttaagtagcattttaagaacagatgaatttaagtttggacatctgcaaatgaggtggatctagcaacaataactgtaatggactgtgacaattcaatttattcttaattttgatggttggctatttgacttctctaaaaatgagaaagagctattttaaaatataaagaattttctaatcagtttcagctttgcaggaggtttcctgcataaattgggaagtaacactggaaagtaggaatttggttagtgaagtgggaagactgtatattt

SEQ ID NO: 9706 - DNA, 492 bp, Homo sapiens
  misc_feature (1)...(492): n = A,T,C or G
nattgaganccntgtccagttggaggacttagcccatgtctggcgaccctacccactccggcctgggctgtagtttgaccctgagctggtgctggtctcggcaggatttgactcagccatcggggaccctgaggggcaaatgcaggccacgccagagtgcttcgcccacctcacacagctgctgcaggtgctggccggcggccgggtctgtgccgtgctggagggcggctaccacctggagtcactggcggagtcagtgtgcatgacagtacagacgctgctgggtgacccggccccacccctgtcagggccaatggcgccatgtcagagtgccctagagtccatccagagtgcccgtgctgcccaggccccgcactggaagagcctccagcagcaagatgtgaccgctgtgccgatgagccccagcagccactccccagaggggaggcctccacctctgctgcctggnggtccagtgtgtaggcagctgca

SEQ ID NO: 9707 - DNA, 473 bp, Homo sapiens
  misc_feature (1)...(473): n = A,T,C or G
aggggacggngnncccccaatgatnaccnttgatagacgtgggaattaccagggaggtagtgtctgcttacaaagatcatgtgtgagatgaatttgaggtaatggctaaatagctaacgagtagcaagcctgttagttagaaggtagaacattgagtgaaagaggcagattttagagacttttatattcattgtatttgttggagccaaatattaatagaaaaaaagattaaggttagtagcaacactcacatttaaggaacaataaccaacacaaacgaaagaggaaggggtagctatgaagatgtgtgggtgcagacagaagtacaaagatacgaaaaacagatagcataatattaagaaaaacttgcttataaatcattaaagtgctatagtagaggataagaagaatgagaccttttagttttacacgagcacatcagcggaaactttgggatgaagagttttaagtag

SEQ ID NO: 9708 - DNA, 475 bp, Homo sapiens
  misc_feature (1)...(475): n = A,T,C or G
gaggagggagnncccccactgagaccttttgagacccttaggacatgcggnggaattctacaaggagtcagtatacaaggaggaggtatacaaggaggaggtatacagggggctagcaagcaaggtggaagccagcctagcagttgtagtcctgggcagagccaggtcactccacaggatcaggagaaggcagctttgatcatgcaggttcttcaactgactgcagatcagattgccatgctgccccctgagcaaaggcagagtatcctgattttaaaggaacaaatccagaaatccactggagcgtcttgaaaggttttagaaaatatttggctgtaggctcaaattttattctgtagcatggagaatgggtgcaaaaagctgacttctgtatccccacacttggattagggtttccctcctcctaaaacctaaccttattttttgatctttttctttctttctggtttccttt

SEQ ID NO: 9709 - DNA, 476 bp, Homo sapiens
  misc_feature (1)...(476): n = A,T,C or G
tgagatgcncnnnnagtngnnncaactggagaccatcgctagatggcctgaganccccggtgcaacctgtcccgactctagccgcctcttcagctcgccatggatcccaactgctcctgcgccgccggtaagaggctggggatgcccagtgtagactgtaccgctagagaagcaatttctgacccctctttctttctctggtcactcaatttcaggacaggagttgctccttcccaaagagttgtggggtatctttctctccattctaagctattcggagccccctttttaccgttaaggagatctgagttaatggcttgctcaagttcccaggaatcgggtgtggactgaggaactcggccccgggctcttagtacgccgtcccttgttcagggatccacggacggatctcacctctgtcttttctgcttgcaagagactactgcacctgcgccggctactgcaaatgcaaagag

SEQ ID NO: 9710 - DNA, 506 bp, Homo sapiens
  misc_feature (1)...(506): n = A,T,C or G
tgtcagatgaantaggggagaancnaggnnngnnnnnggttttgagaccactttgagatacactaggacagngcggtggaattcgcggagcctgcgcggcgccggtaggatcgcgtcgggagccggtaccgatgcccgagccgcgggagtcgagcgaagacagcgccgaggccgcggtttccccctgggcctccccagcagcagccatgggcatcaaatttttagaagttatcaaaccattctgtgcagttctaccagaaattcagaaaccggaaaggaaaatccagcttagagagaaggttctgtggactgctataacgctcttcattttcttagtgtgatgtcagatcccactgtttggaatcatgtcatcagattctgcagatcctttctactggatgagagttattctggcttccagtagaggaactttaatggaattgggtatctccccaattgtaacatctggtttgattatgcagttgttagctggagccaaaatcatt

SEQ ID NO: 9711 - DNA, 458 bp, Homo sapiens
  misc_feature (1)...(458): n = A,T,C or G
aactggagaacacatcngagngccgtggaattcgacaaccatggcggctgggaccctgtacacgtatcctgaaaactggagggccttcattgctctcatctctgctcagtacagcggcgctcagggacgcgtgctctacgcaccaccccacttacattttggccaaaccaaccgcacccctgaatttctacgcaaatttcctgccggcaaggacccagcatttgagggagatgatggattctgtgtgtttgagagcaacgccattgcctactatgtgagcaatgaggagctgcggggaagtactccaaaggcagcatcccatgtggtgcagcgggtgagctttgctgattccgatataatgcccccaaccagtacctgggtgttccccaccttgggcatcatgcaccacaacaaacaggccactgaaaatgcaaaggaggaagtgaggcgaattctgg

SEQ ID NO: 9712 - DNA, 471 bp, Homo sapiens
  misc_feature (1)...(471): n = A,T,C or G
gaagcgccgngnncccccaactgagacccctgatagccgtcggaattcccgcctcggattcccaaagtgttgggattacaggctgtgagccactgcaccagcctacctttttcttcttaacaagttacaaaaagatttattagggaaggaagttgagaatatgtaagtagggaattttgttcttttgtatttttatcaaagtattttagttttcatattgcattaaaaaataatactattgaacagtatactattagtaatcactttttatcatgctgtgtcttcatatagtctgaaagaataatttttcttgttacaaaataatgcatttttattgttgaaaatttagaaaatctatctttatttgcaatcttctgtcagtatttctcagcctttttcatttctgtctacttgaacttgatttgcatcattttttcttgttactccaaaccaatttatgtttctctgggt

SEQ ID NO: 9713 - DNA, 462 bp, Homo sapiens
  misc_feature (1)...(462): n = A,T,C or G
natcgagaccactaggccattggagggcattcgagagtcaccacataccatacttagagttcctacagaaaggacacagcgaatttcatgtttgagactcggtttctttgcccagtggatgcataggcaaagcatcgcacatctgctccatagaaatgatcctggctaacacggtgaaaccccgtctctactaaaaatataaaaatttagccgggcatagtggcgggtgcctgtagtcccagctactcaggaggctgaggcaggagaatggtgtgaacccgggaggcggagcttgcagtgagccgagattgggccactgcactccagcctgggcgacagagccagactccgtctnctaaataattaataaaaaaaaaaatataanttgcgggccccataatttaagggggcccctataaccccggtgaaacccccaagggggccctataaaataccctccat

SEQ ID NO: 9714 - DNA, 494 bp, Homo sapiens
  misc_feature (1)...(494): n = A,T,C or G
gggtatgcagccaggccaatagaaactganancntacgcagngngcnggaattccacagcgacgccggcgccgagggacaccgcagtatgaggcagagattaacgtgacagtgtcaggtggacccacagccatcccacctccccctctggggagtgctgagagtgaggcagcatggaggagaggaagcatgagaccatgaacccagctcatgtcctctttgaccggtttgtccaggccaccacctgcaagggaaccctcaaggctttccaggagctctgtgaccacctggaactaaagccaaaggactaccgctccttctatcacaagctcaagtccaagcttaactactggaaagccaaagccctctgggcaaaattggacaaacggggcagtcacaaagactacaaaaagggaaaagcgtgcactaacaccaagtgtctcatcattggggctggcccctgtggtctccgtacagccatcgacttatccttac

SEQ ID NO: 9715 - DNA, 481 bp, Homo sapiens
  misc_feature (1)...(481): n = A,T,C or G
gcccccaactgagactntaggaaatagcaggccatccgccaangccttctcctgccagctccgtagggtcccagtcaagtgctggcagtgtggggagcagtggggtggctgccactatcagcaccccagtcaccatccagaagatgacatcttcctatgtcaccatcacatcccatgttcttaccgcctttgacctttgggaacaggccgaggccctcacgaggaagaataaagaattctttgctcggctcagcacaaatgtgtgcaccttggccctcaacagcagtttggtggacctggtgcactatacacgacagggttttcagcagctacaagaattaaccaaaacaccttaatggagccccaggttgattcaatgccttgggaactatttttgcacattggaagcctcaaaaacagtccagacgtttgtttcatcaggacaccaaactctaaaaaagaagcaccacgagatggccag

SEQ ID NO: 9716 - DNA, 564 bp, Homo sapiens
  misc_feature (1)...(564): n = A,T,C or G
ngatcgatcactgtccagagggcgctagattacctcttgtgggagcaacaccaacgcctggctcggagcagcagcctctgaggtgtccctggccagtgtccttccacctgtccacaagcatgtggaacatcttcgccaacctcttcaagggcctttttggcaaaaaagaaatgcgcatcctcatggtgggcctggatgctgcagggaagaccacgatcctctacaagcttaagctgggtgagatcgtgaccaccattcccaccatatgcttcaacgtggaaaccgtggagtacaagaacatcagcttcactgtgtgggacgtgggtggccaggacaagatccggcccctgtggcgccactacttccagaacacacaaggcctgatcttcgtggtggacagcaatgacagagagcgtgtgaacgaggcccgtgaggagctcatgaggatgctggccgaggacgagctccgggatgctgtccttctggtggtcgccaacaagcaggaccttcccaacgccatgaatgcggncgagatcacagacaagctgtggctgcactcactan

SEQ ID NO: 9717 - DNA, 565 bp, Homo sapiens
  misc_feature (1)...(565): n = A,T,C or G
gatcgatnccccttnnnnnnnaatcgatatcctactccgtgtggtgcaattccatcactcacaaaatcagagaaacagtgaactattcttctgctaggttttcctactactgtaatatttaacaaaagaggatcctactgtgaaaatatagctccagcatcaatggagtagatccgatacacttatatatgctcatggaatttgcttgttctctccccttgtgttgaattttatagcataataaataccgagcctcagcagctttcatgtgccttgcaggagacagtggcagcaggggcaaatgattcttcctggaaggtgactttaacaaagacttcttctggggggcaccgatctccacctggccatgtcttcaagcccaaggagaagtcccaggatgggtctgagctaatcacggtgatcacaatacaaatgactgcgctaagcatggcacagctggcctcaatcctggccaatgcaacgtgagaatcaattgctggtgggattctgngggagttttctcactgtataaacagatgcaaagcagaaatacttctctttgctg

SEQ ID NO: 9718 - DNA, 455 bp, Homo sapiens
  misc_feature (1)...(455): n = A,T,C or G
catgacatgatngcactagcccgngcggnggaattcaactacttgaatttttaaattatgtcaaaacttacattacttgccaagcagtatgatgttataggaaacataaataagattacagaggtatcaatttggttaaaattcaccattttataagactaagcaataatcttaacaacctctttcctgaatatttaaatgtgtttgtatggtgttatgactaattgttactgatttagagactaagccctcttaaaacctttagttaaatataaaaagaaattatatatatcttgcctccctgatggaaaactatataaaattgtagacttaaaaggtttgtggaaatacattaggatatcagaaaactaaatatatggagttgctttatgactattacatgttaaataaaaatagcttaattgttttggagtttttttttaaagtcatgaaan

SEQ ID NO: 9719 - DNA, 575 bp, Homo sapiens
  misc_feature (1)...(575): n = A,T,C or G
catagaacactgttcagggggcaatcatagacctccatanaaatgaacgaaacctggaaaacgagggaaagccagaagatgaagtanagcctgatgatgaaggaaagtcagacgaggaagttaagccagacgtggaggggaagacagaatgcgagggaaagagagaggatgagggagagccaggtgatgagggacaactggaagatgagggaagccaggataagcagggcaggtccgaaggtgagggcaagccacaaggcgagggcaagccagcctcccaggcaaagccagagagccagccgcgggccgccgaaaagcgcccggctgaagattatgtgccccggaaagcaaaaagaaaaacggacagggggacggacgattcccccaaggactctcaggaggacttacaggaaaggcatctgagcagtgaggagatgatgagagaatgtggagatgtgtcaagggctcaagaggagctaaggaaaaaacagaanatgggtggctttattggatgcanagagatgtacaggatccatttcgccccaggggacaancgggtgtcaggggagtgaggg

SEQ ID NO: 9720 - DNA, 497 bp, Homo sapiens
  misc_feature (1)...(497): n = A,T,C or G
gggagagnnnaggantnnanagggnnaannnnntttgagcccccttgtagaccctaggccatgcggtggaattcggatattgctatagaaccattgctgtaaatcaagtggacttatatgtgaaggctggagtgcaatggcacaatcttggctcaccacaacctccacctcccaggtttaagtgattctcctgcctcagcctcccgaatagctgggattacagagatgcaccaccacgcccggctaattttgtatttttagtagagatggggtttctccatgtttgtcaggctggtctcgaattccagacctcaggtgatccgcctgcctcggcctcccaaagtgctgggattacaggtgtgagtcaccatactcggccttgtttctgttttttaaacttggtatcatgtcttcagtgttcacccatgttgtagcatgtattaaaacttcattcctttttgtggcttaataatattccattgtatgtgtacaacttn

SEQ ID NO: 9721 - DNA, 500 bp, Homo sapiens
  misc_feature (1)...(500): n = A,T,C or G
catcgagcnccnttngncnntttcgtagaccctagtcagtgtggnggaattcgtataatgctgaactcctagaacaaagaagtaaatcagatgcagtcccttcccccatggggagacagacttgcaaacagctagcacctgagtcagattgtgaattgtgccaccatagaggtctcagccaagtgtggaaggtgcactctcccagggaggtggcgtgtacattaaaccctggagaataaatggagcttcaagcaggaaggaaagaacatcccacaggcaaaaggaacagcaaaggcaaaggcacagagttaagaaagtatggagtcttcagaaacccttggggtgtggtcttggggacagaggacggggaatagattttaaacgtccttcagtgtgaggaggtaaagagttttgactttcctccaggcagtagggaatctttaaagggttatcaatggccagattttccttccaacagcttttgcagtttatgtttggag

SEQ ID NO: 9722 - DNA, 495 bp, Homo sapiens
  misc_feature (1)...(495): n = A,T,C or G
natagaganccntaggccagngtcgaggaacctgccgggcatgatggagagtgcctgcaatcccagctactcgggaggctgaggtcggagaatcgcttgaacccaggtggcaaaggttgcagtgaaccaaggtcatgccattaccatctatctagcctgggcaacagagtgagactccatctcaaaaacaaacaaacaaacaaaactcactaactttcaggtatgatggaatagttcagacagaataacgcttcttctaagatcagctagagaagttagaaaaatatatattttaaatatatgtttgaagtaatcaaagagctacagaggaaaatagtaattaacgggacaaaaccttggagaagggagaaccatatagagaattgagctgacattatgcagtctcttttttcctcaggacatttttaaattctaggtatagagcaataaaagaagaattcaagcaaagggatcaggaagaggattgctactaag

SEQ ID NO: 9723 - DNA, 478 bp, Homo sapiens
  misc_feature (1)...(478): n = A,T,C or G
nggaggcggcccggctgnnaaccccaattttncagangtacagngcggcggaattntttaaagntaatcttctatgatatacttacagcacaacttatatttccatgcagaatcttttatttttaagtgtgagtgttaaaggggacaaaataatgaaatgacttcagtggatttaaaattttgaaaaataatgtcttttctatattgattttacaatttggagaaatttttcactcattttttatatattttttagtgggagaggtttagtctacagtttttatttttagtcaccaaactgtagccaactcttgggtcattttctctgaaaaacatttggagatcatgacagcgtttggattaaaacatttctgttactttgcatgcaaactagtttactgtgttcacagagtggccagtcatgggaccataagcaacacctgctctttgagtgtctttcataccgttaccatcagcn

SEQ ID NO: 9724 - DNA, 469 bp, Homo sapiens
  misc_feature (1)...(469): n = A,T,C or G
nattgagacctaaggacagngcggnggaattcgngaaagtgaaaaaagagagagactcgtgacttttccggtttcagaaaaacccaatgattacccttaattaaaactgcttgaattgtatatatatctccatatatatatatatccaagacaagggaaatgtagacttcataaacatggctgtataattttgattttttttgaatacattgtgtttctatattttttttgacgacaaaaggtatgtacttataaagacatttttttcttttgttaacgttattagcatatctttgtgctttattatcctggtgacagttaccgttctatgtaggctgtgacttgcgctgcttttttagagcacttggcaaatcagaaatgcttctagctgtatttgtatgcacttattttaaaaagaaaaaaaaagccaaatacattttctgacattgtaaaaaaaaaaaaaaaaaat

SEQ ID NO: 9725 - DNA, 579 bp, Homo sapiens
  misc_feature (1)...(579): n = A,T,C or G
ccataggatgcactattcgagagggcaatcattgaagctctcttgggccgcatgtggctcatgggctgtgggttggacaagcttataatagccttctgcaaaactcaaccacctttgtaaagctgagaggccacaaggttaggaggatatgaggaggctataatctgctaacatgtagacataaaagatttccagctattattccggaggtcacaagatttggaactccccaattactcccgcagataatatcaccattatagaacctaagattggccttttgaggcattttttcaagtttttgcatttctgacgaccagtggctccaccaggactggccaacctccaccaaccggtcctatggccccacccagaagctgaatccatggcctaccaaactatccttgaaaaaccctaccctccaaattttcggagattgatttgagtaataactccatctcccatgtggcatggccagacttacatcaattaaactctttattgcaatgccgtggtctcagtgaataggttttgactgtgcagtgggtangaataacccactggctagttacagcanaa

SEQ ID NO: 9726 - DNA, 476 bp, Homo sapiens
  misc_feature (1)...(476): n = A,T,C or G
cgacgttaaaagaagaanacctgaagactnattgatgtcataggaagngcgnggaattcgtttgccgccagaacacaggtgtcgtgaaaactacccctaaaagccttaatgggaatggaaaagactcatatcaacattgtcgtcattggacacgtagattcgggcaagtccaccactactggccatctgatctataaatgcggtggcatcgacaaaagaaccattgaaaaatttgagaaggaggctgctgagatgggaaagggctccttcaagtatgcctgggtcttggataaactgaaagctgagcgtgaacgtggtatcaccattgatatctccttgtggaaatttgagaccagcaagtactatgtgactatcattgatgccccaggacacagagactttatcaaaaacatgattacagggacatctcaggctgactgtgctgtcctgattgttgctgctggtgttggtgaatt

SEQ ID NO: 9727 - DNA, 519 bp, Homo sapiens
tgacagtgtttctgctgatataacattgttagaaaccttgtgggtctcctatgtatattttgggggttcttgtcattagacaagagggttctctatagagcttttctggataatcccatctccattcctaccttctgcttatggttggctgaaggaattcatgagtcacactcctgatcccttcagcatgactaagaggttgtcctgcaacatgcttgactttctctccacagcatgcttttcttaacagtgaatttcctaattttaacatattttgttggctgggtgcggtggctcatacctgtaatcccagcactttgggaagccaagccaggtggatcacctgaggtcaggagttcaaaaccaccctggccaatatggtgaaaccctgtctctactaaaaatacaaaaaaaaaaaaaaaaaaaaaaagcgccggctcgagttaaaaggcccgtttaaaccccgttggtcacccctgaccggccttttatatggcaagccatcggtggttgccctcc

SEQ ID NO: 9728 - DNA, 580 bp, Homo sapiens
  misc_feature (1)...(580): n = A,T,C or G
caatagaagccccgtccgcaggggccanncatagaagaccgtagcagctccaccatggcctgngctcctctgctcctcaccctcctcagtctcctcacagggtccctctcccagcctgtgctgactcagccaccttctgcatcagcctccctgggagcctcggtcacactcacctgcaccctgagcagcggctacactacctataatgtggactggtacctgcagagaccagggaagggcccccggtttgtgatgcgagtgggcactggtgggattgtgggctccaagggggatggcatccctgatcgcttctcagtcttgggctcaggcctgaatcggttcctgaccatcaagaacatccaggaagaggatgagagtgactactactgtgggacagaccatggcagtgggagcaacttcgtttatgtcttcggaactgggaccaaggtcaccgtcctaggtcagcccaaggccaaccccactagcactctgttcccgcccttctctgaggagctccaagccaacaaggccacactagtgtgtctgatcagtgacttctacccgggagctgtgacagtgg

SEQ ID NO: 9729 - DNA, 454 bp, Homo sapiens
  misc_feature (1)...(454): n = A,T,C or G
taatgatacatngcctcgcccgngcggnggaattctgactctgcacagctccaggagctggtctgccacgtgatgatgggtaacctttttatgtttcgaaaagactcagttctcaacatactcattcagagcctagactgggagacctttgagcagtattgtgcctggcagctctttctggcccacaatattcccctggagaccataatccccatcctgcagcacctcaaatacaaggagcacccagaggccctgtcctgcctactgcttcaactccgaagagaaaagcccagcgaggagatggtgaagatggtgctgagccggccctgccatcctgacgaccagttcaccaccagcatcctgcggcactggtgcatgaaacatgacgagctgctggccgagcacatcaagtccctgctcatcaagaacaacagcctgcctcgcaagagacagn

SEQ ID NO: 9730 - DNA, 452 bp, Homo sapiens
  misc_feature (1)...(452): n = A,T,C or G
cactgagtcatcgcacgngcggggaattaatgctctagatcctagctatacaaacaaactgggattcccaactagtactatcagttctacctgggagctcttcacaaatgaaaatcctaagtgccaccctagacctacagaaccagatctccaagtgattcacatatattagttagtgaaacactaccaaatccatatgtcactgaatcctcaaaacaaccctgtgaaatatgactatacctatttcacaaatgaggaagcctaagctcaggaagttaaatgacttacccaaagtcaaagccatcaatattgggagatgcgattcaaattcaaatttacctttaaaaatgtctttctacaatgtattgtctctcacagaaaaggtcacgtattatctaatagaaatatgatgcaagccacgtatgcaatttcaaattttctattagccacan

SEQ ID NO: 9731 - DNA, 496 bp, Homo sapiens
  misc_feature (1)...(496): n = A,T,C or G
ataatgagaccactgganannnnccatacttgagactcttcggaagngccgnggaattcgacagagcctccatctgtcacccaggctagagtgcagtggcgggaacacagatcgtggtaacttcaaactcctgggctccagtgatcctatagcgtcagcctcctaagtagctgggactacaggctcgtaccaccacacctaatttttttttttaagtttttgtaaagatatggccttgctatgttgcccaggctggttttgaactcctggcctcaactgatccttccatctctgcctcccaaagcactgggattacaggcatgaaccactgcacccagcctgaaatttcatttaactggacatcccgtctacgggggatgtggaatgggaactgcccagataacatactagtctgggtgaatgttttgttgagaggaccctgtctcaaagaaggtcagcatttgtctgcagctggcgtctctgccccagggaaggn

SEQ ID NO: 9732 - DNA, 449 bp, Homo sapiens
ggttaaattgagatacctagtccagtttgataggacttcaaaaatggtacttgtagtccatgagcttgaacccaatgactgattgtttgacttttaaaataagtaatagcagccatttgggagtagggggtaggtggggaagatgtactccgtatcaaataataatgatgttgaaataatgatagtaggtatgtattatggattggagaagcacttattacactatctaacctaatatgtagaacaattcttgagagttgtatctgtcgttatttctgaatgtgaagctcagagaagtgacacagagtaaatggctgatcttctatattgtagtatattttgtccttccctcttccctgaggaacaaagcacgtatctttagtctctttgatatttattctgagaccaagggcttgcttgacctgatgattttccttcagctctctgaa

SEQ ID NO: 9733 - DNA, 490 bp, Homo sapiens
  misc_feature (1)...(490): n = A,T,C or G
natcgagatcgctaggccgtgtggnggaattctaaactcanagtcattggacaggatagcagtgagattcacttcaaagtgaaaatgacaacacatctcaagaaactcaaagaatcatactgtcaaagacagggtgttccaatgaattcactcaggtttctctttgagggtcagagaattgctgataatcatactccaaaagaactgggaatggaggaagaagatgtgattgaagtttatcaggaacaaacggggggtcattcaacagtttagatattctttttattttttttcttttccctcaatccttttttatttttaaaaatagttcttttgtaatgtggtgttcaaaacggaattgaaaactggcaccccatctctttgaaacatctggtaatttgaattctagtgctcattattcattattggttggtttcattgtgctgatttttggtgatcaagcctcagtccccttcatattaccctctcn

SEQ ID NO: 9734 - DNA, 577 bp, Homo sapiens
  misc_feature (1)...(577): n = A,T,C or G
cattcatatncactanttcgagaggngcaattcgatgacatccccctgctgagcaagctaagtcttttacaaaacaaggacagcagaggagggtttgcagagacctccctctgaaaaacacaaagaatggactctctcctgggatgaggacttgctttctttacctccggttctttccatgtcttagttggatgtccctgaaatggacacaggctgtgccattgtgccagaaacattgagttatcttttatgttgttgttgttgctgttaaactataatatgtgacttctttttttattattttttgtttgaatgctttaaaaatcttttaagtctgtggatctgctgatgtacagtgcctttgctgctatggatcaaaatcaaaagaaccgtgtagatatactttattgtataagtagaaaattacttaatttcatactagaaatggatggatgctgcaagttgaaatggactgtccattgacgttcctaatgtggtagcagaaaaaatggtgtctaagtgcttagagtngatgcattaacagttcgtaaactctacagtgagaaagatttgatct

SEQ ID NO: 9735 - DNA, 474 bp, Homo sapiens
  misc_feature (1)...(474): n = A,T,C or G
nnaaggcgggccggttgnaaaggggaagttcaganagacagngcgnggaattcaagaatccgaccagaagatgacaagaggagaaactatggaggagtatatgttgtcctaccatctgaagctgtcaatatggtgtgcagtcaaacaaagacggttcggaaaaattagaagaaaataacatcatgactcacgaatcaagagcttgctcatcagtttggaaggaatttggctccgtgggacgttgtaatgtgcacagacatttccaaggaaattctaaacaggcacccttcccttttgcattcccccaaatcttaagtgtatacataaaaccctgggtacatattgctgtggtaatagaagggaattggttaaacagtacacttgtttatggaactttctgtggccacctacgaaagacaagttaacaaactgtcatggaggctgttgttgcccagccagggccgctgcattttg

SEQ ID NO: 9736 - DNA, 483 bp, Homo sapiens
  misc_feature (1)...(483): n = A,T,C or G
nnaaggccggccgnctgnnnnngggaaactttagnaacgacggnccaattnntnattnnnggnggnggcaagacaactgggctttggcatgatttatgaattgcctggattatgcaaagaaaaatgaacccaaacatagacgtgcaagacatggcctgtatgagaagaaaaagacctcaagaaagcaacgaaaggaacgcaagaacagaatgaagaaagtcagggggactgcaaaggccaatgttggtgctggcaaaaagtgagctggagattggatcacagccgaaggagtaaaggtgctgcaatgatgttagctgtggccactgtggatttttcgcaagaacattaataaactaaaaacttcnnaaaaaaaaaaaaaaaaaaaaaaaaaaaaaaaanngggggggccctttaatttaaagggcccctttaaaccccgggaaaaaccctgggggggttttttatttggcccccttttttgtg

SEQ ID NO: 9737 - DNA, 450 bp, Homo sapiens
  misc_feature (1)...(450): n = A,T,C or G
nctgagttcactagcccagngcggnggaattcgagcagcattgcagatcactacagggaatattaataatgagtcttcaaatcagaaccccactagacagagccaccaactggcagtacgtcagcactaatggtgacaatttcctagcactcctgggtacaagtccataaatgtaattggcaccaagcaatagagttgtcacagctttcacctgccgcattagggcaaactgcttttatgtctaaaccactgggcctgaaagcttcctctaagtagagcctggaattaatcttgatccactgtaattcaaagtatcgtcagattttcatttcccagagtgggagcgcgcccccattgccatgttttatggccttgtttgagcctctacaagtgcttgtttggcagcgatattcagaatcaccaaaccatggggatgttctgctaggtaan

SEQ ID NO: 9738 - DNA, 454 bp, Homo sapiens
  misc_feature (1)...(454): n = A,T,C or G
ttttgatacgatgctgctcgcccgngcggnggaantcgtgagtactcagagggtcaataattattttttgacagtgtcagggatggatcatctttcaactgaccagacaatggccagaaattggtgtggatccctgtactatgcctggggcagtggcccatacttttttgttttagtttaatcccaccatgtggaaacacaaaccccatccttttctatgagttctttgtgagtaatgtcctgagtgtgtcaaatgaatttgctgaaagaagggtgtcttcagggtgatgttacacctgtactcctagagaatgtcagatgcagttcaaatcctgcctgcaaagattgtgtatggtggcagaactgtcgaggtaccccgtggtagccagataacggtctattgtgtcccttcgggggtgaaagcaacctgcagctgagatctgttgaaataggc

SEQ ID NO: 9739 - DNA, 521 bp, Homo sapiens
  misc_feature (1)...(521): n = A,T,C or G
gcccgagtgtaaagggaccattataacccgctgctcaatcgagagtgctacttctattctgcactcatatgtggttagcacctcccccgtgacttgcttgagcctgggacgagccgctctctctgaccttctgtaaaataacgaagaaattgcaactaaacgattgaccctgcgtcatactattttgcccaactttattttaatggaattgtttggatttcttgattgttttgtaatagtgggacacagcaggccaggaaagatttcgaacaatcacctccagttattacagaggagcccatggcatcatagttgtgtatgatgtgacagatcaggtaagttccaagaggagattgtgttacagtgaccaagtaggaagccattatttgattaatgtcagattcatttactacttcatatataagccatcagtattaattntatggcagaaaactttgtccactctcaaatataaatgtgaatcacttaaaagacattttgtttccctgaataaataaaag

SEQ ID NO: 9740 - DNA, 426 bp, Homo sapiens
ctagggagaaaataaatggggagttattgtttaataggtacagagtttctctttcaaagaatgaaaagttctgtaaatggatagtggtgatgattgcacaacagtgtgtacttaatgccaccgaactgtacacttaagaatggtaaattttaggttatattttaccacaataaaaaattaaaatcaacagtaaagaaatcaatccaattaaaaatgggcaaaagatttcaagacacatttcaatgaagaggatttacatatggcaaacaaatggaaagttgtttaacatttctagctaatagggaaatgcaaattaagaccatgagatattataacacatttattagagaaccactaaaataaaaaatggtgacaacattaatgctggcaaagatgcagacaaactgatttctcatacattgcaag

SEQ ID NO: 9741 - DNA, 476 bp, Homo sapiens
  misc_feature (1)...(476): n = A,T,C or G
nggaggccggccgcttttnnnnaaggctttagancgacgnngcaattnnnntgaaggggacgaggaagcccaccaggaagcggtagtagttgatggcacgctgtcatgtatcggtccacggagatgcagcagaggagagccgacgctgatgtagatgttctcgtacaggaggatgccgcacacctggcaggacaggtcgccgtgagaccagttgtcgtgctgcagcacgtactgcagccagaagggcagcgagcagatgtagaagaggtcggccaccgtcaggttgcacagaaggtgtactagcccaccaactccaattcaactagaatatctgaacggctggacatgatggcttacacctgtaagcccagcactttgggaggtggggatcgctcgagctcaagagttcaagaccagcctgggtaacatggcaagcccttgtctctataaataaataaataaataaataaataaca

SEQ ID NO: 9742 - DNA, 526 bp, Homo sapiens
  misc_feature (1)...(526): n = A,T,C or G
gcggtggaattcaataagtatgtgttactatttttctttccaattgttgagtaaaactcactgtattcatcctgtgactttgtactgcccagcctagctcattgttttttacctgcctcatttcctgagctgggcattgctcagtttcagaaggtatcaggtgtcattgaacacctgatatgaaggatgtaaaagttctctcttttctatctaggtgtctatattttaattggaggctagatgatatttgcaacctgtctttatctaaagcattgtcagtgaactcacctacttaggaattcatatgcaccttagttaaaaaaaatgtattgtggttttaaattttttcctcaaccactgtaatatgaagaattctttttattttttaagagattctaagaaaatgttcacattatcaaaactagaattctatcaacttttaagacatttaattattttggaataaaatgtgaatttttagacagagnatggcaaanactagtatgaanatatatcatggtacatg

SEQ ID NO: 9743 - DNA, 415 bp, Homo sapiens
  misc_feature (1)...(415): n = A,T,C or G
attcagaacagacaggcccagattgaggtggtgccttctgcctctgccctgatcatcaaagccctcaaggaaccaccaagagacagaaagaaacagaaaaacattaaacacagtgggaatatcacttttgatgagattgtcaacattgctcgacagatgcggcaccgatccttagccagagaactctctggaaccattaaagagatcctggggactgcccagtcagtgggctgtaatgttgatggccgccatcctcatgacatcatcgatgacatcaacagtggtgctgtggaatgcccagccagttaagcacaaaggaaaacatttcaataaaggatcatttgacaactggtcnngnnnggattnaaaaaaaagaacaaaaaataaaaatgtggggggggcggtggggtggagg

SEQ ID NO: 9744 - DNA, 466 bp, Homo sapiens
  misc_feature (1)...(466): n = A,T,C or G
ctcgaaatcgatcgcatacgcagngngcnggaattcctccccatagctcttttcaatgaattctaggtacaacaaccagtcacctactctcttcgggaacattttcacagatgtcaatgtggacaagggcagtggcatttggtagtaagaacccacttacaaataaattagggtttttaaggtggaagaaagaaaagaaaccaaagcggaaagtcatcaagataaaagcctgggctagaagctggaaaacctgaggtctggttcaagttctcagttccagttctacttagtcaccctgcacctaacgacgtgcttctgttaaagaagggttggggctcacgttaaaggagtttaaacatgagtatccagttctgtgatctgatgcagaaaattggcaaatggtacctcattctgtgagagtaaattatattttcaccattccaagataagggtaagaatagatttg

SEQ ID NO: 9745 - DNA, 473 bp, Homo sapiens
  misc_feature (1)...(473): n = A,T,C or G
gggtggccnggnnttnnngnnnaaactgagactctagncattgcggcctatattcgnccggctgtagaaacaaattatttgattgaacaaattaccagtgaattaaactaagcggtaattgaaagcttacagattttgccatttgtttcctaattaaagtatcggcttaaaagatatttgtctgctctgattctaagtccctcaggcataattacaaatgctttgagatctttctatgtttatttatcaataattatctataattaatttaaaggagctgacatttaaaaatgtcagatttgagaggttctttattattgagaccattaacaactcttacatttggcgttaccaaaagtaacttgacgatatatatgttattatttattatttttatgctagaacatttgggtagaattttagttcttattcttacagctgcatatgtatgcatgcatgtcatgatgcatgta

SEQ ID NO: 9746 - DNA, 474 bp, Homo sapiens
  misc_feature (1)...(474): n = A,T,C or G
nttgatccccctngnnnnncctttgtagacccttagtccgtgcggtggaattccagagagcctggatcagagcaggggcatagtatatctgtattcaaagaatgagtgaatgactcacactacatctagcttctttattctagcattcatcacagcaattggcagagtatgtgtgagtctaagttcaaattcttagccaagatgatctggtatagttctacccctgggcagaattgagcagattgaagattgctagtcagctgatgggttggctcccttgagccaagtgctcacctctggtttagtgtgtggccacttccgtggagagaagacggaattttctctttctggggagttgtaggcaggcagttgaagctagaaggagctggccatgtcgggcaaatggactgaccgcagaactggccacagaagtgtcagcttgattggggtcagggattagagggaaggagatan

SEQ ID NO: 9747 - DNA, 468 bp, Homo sapiens
  misc_feature (1)...(468): n = A,T,C or G
atccgaacncccttnnattgaagacccctagtccagtgcgggggaattccctttttcttcatttttttcaatattttaattgaaaagttcatccgagtttcatctaagttttttcaaagtgatacaaatctccaaaaaattttccaatatatgtattgaaaaaatccaggtgtaagtggctctgcgcagtccaaacctgtgttgttcaagggtcaactgtgtatgaatccaagcgaaagcttttcttaacacctcataagaactattttttaaaaaacaggaactagcatagagtaaccatcacaggtaaagtgtaatttgttatcagccatcttttgcccatttcagtactggtagaaggctcaatggtaaaaataaaaacgggacagtcagaagatctggaagtcctgaccctgctttcacctggcatgtgtaatccagtcatgctcgtatcagtctctgtaggag

SEQ ID NO: 9748 - DNA, 478 bp, Homo sapiens
  misc_feature (1)...(478): n = A,T,C or G
catcgagaccctattgagngccgtggaannccccgggagcaagttctacagccggtcagtgctgagttgttggagctggacatccgggaggtgtatcagcctggctcagttctggactttcctcgacgtcctccttggagctatgagatgtccaaggagcaactaatgagccaagaggaacggagcttccaagactatcttgggaagattcatggggcttactcctctgagaaactcagctactttgagcacaatctggagacatggaggcagctgtggcgggtgttagagatgtctgacatcgtcctgcttatcactgatatccgacatccagttgtgaatttcccgccagcactttatgagtatgtgactggagaacttggactggccctggtgctggttttgaacaaggtggatctggccccgccagctcttgtggttgcctggaagcattatttccatcaacactatccccagc

SEQ ID NO: 9749 - DNA, 464 bp, Homo sapiens
  misc_feature (1)...(464): n = A,T,C or G
ggttttaggggaatgagaccctgnaattgagatcattagncagtgcggtggaattcggcctacaaaaatgataagcagatgtcctacggattcctctttcctccttatctgagctcttcaccagaggctaaatatgatgcattccttgtaaccaatatggttccaatgtatcctgctttcaaacgggtctggaattatttccaaagggtattggtgaagaaatatgcttcggaaagaaatggagttaacgtgataagtggaccaatcttcgactatgactatgatggcttacatgacacagaagacaaaataaaacagtacgtggaaggcagttccattcctgttccaactcactactacagcatcatcaccagctgtctggatttcactcagcctgccgacaagtgtgacggccctctctctgtgtcctccttcatcctgcctcaccggcctgacaacgagga

SEQ ID NO: 9750 - DNA, 454 bp, Homo sapiens
  misc_feature (1)...(454): n = A,T,C or G
gggaaaatgagaccctagncattgaggactattgcggaaggaggagaaaaaggcggcatgcccctgctactgaggaggagatggatgaatgtgagcaggcgctggctgctgagcccaaggccaaggaccccttcgctcacctgcccaagagtacctttgtgttggatgaatttaagcgcaagtactccaatgaggacacactctctgtgggactgccatatttctgggagcacttagataaggacggctggtccctgtggtactcacaggatcgcttacctgaagaactcactcacaccttcatgagctgcaatctcataactggaatgttccagcgactggacaagctgaggaagaatgccttcgccagagtcatcctttttggaacccacaatagcagctacatttctggagactgggtattccgaggacaggagcttgcctttccgctgag

SEQ ID NO: 9751 - DNA, 463 bp, Homo sapiens
  misc_feature (1)...(463): n = A,T,C or G
cgggcgcattattgtacnccnnnaattgtagattattagaccgtgcggtggaattcggcaaaacactaataaaagggctaaaaaggaaaatgatgcttttcttctatattcttactctgtacaaataaagaagttgcttgttgtttgagaagtttaaccccgttgcttgttctgcagccctgtctacttgggcacccccaccacctgttagctgtggttgtgcactgtcttttgtagctctggactggaggggtagatggggagtcaattacccatcacataaatatgaaacatttaccagaaatgttgccattttaatgagatgattttcttcatctcataattaaaatacctgactttagagagagtaaaatgtgccaggagccataggaatatctgtatgttggatgactttaatgctacattttaaaaaaagaaaataaagtaataatataactcaaaa

SEQ ID NO: 9752 - DNA, 454 bp, Homo sapiens
  misc_feature (1)...(454): n = A,T,C or G
ggatggaaatgagaccatagtagagngccgttgaattccagaggccccctggggctcatgactcacgcacaaaggtgcccaaacctctgatatgtgggaagacctttgaactgtattattcagattctgaaatgacctctacgagcaacctatgtgtatgcgtacatttgtaggataaattccttaaaattatgttgtttaagctctgtggtatatatgtgttctggctaaattggagacattttctgttacatgatttttataatggacttcaattctgtgattgcgttgttggttctagaaagcagagttcgaaacgtaatgtggaaaaggcatttggttttttttttttttttaggttctactttagggaaaatatattttctgaccgcttgttttaaagggaccatctcagaattaattaaataaagggaccttttccatgtccttcctt

SEQ ID NO: 9753 - DNA, 449 bp, Homo sapiens
  misc_feature (1)...(449): n = A,T,C or G
taatgcagtatctgctctggcacacctctgtccaggatagtcacgttatcttaaatttcaaatctgaactaacgtgctttacaaaaccccagattcctgtttactaggcagaatttagaagaatataattacttaacatttcaatctaatacaataggaatacatataacagaaccccagttgataccacttgtagcaaaagtgattttctttatttccaaattgctaatctctaggccagttctcctcaaagtctattctgaggactcggggttccatgaaaccctttcaggggggtctgatcctgaggtcaccccttttctaactacctagaatgccagattttcttcatatactttagtctctatgttaaagatggggcatataatggcaatgtcttgagatatttttggttgtcatggggctggggaggtgggaagagactggtn

SEQ ID NO: 9754 - DNA, 478 bp, Homo sapiens
  misc_feature (1)...(478): n = A,T,C or G
tganatgaccccnnnnnaggggnnnnaaaattgaagactatcgattgagngccgtggaaatcccacagtcaagcaagagactagttgaagggagttctggggccaggctcactggaccattgtcacaaccctctgtttctctttgactaagtgccctggctacaggaattacacagttctctttctccaaagggcaagatctcatttcaatttctttattagagggccttattgatgtgttctaagtctttccagaaaaaaactatccagtgatttatatcctgatttcaaccagtcacttagctgataatcacagtaagaagacttctggtattatctctctatcagataagagtttgttaatgtactattttactcttcaataaataaaagtttattatctcacnnnaaaaganngnaaaagaaaataagaaaaaaaaaaaagaagagnggggnnggggggggaagcagcgtctca

SEQ ID NO: 9755 - DNA, 458 bp, Homo sapiens
  misc_feature (1)...(458): n = A,T,C or G
ccccgttgtagaccactagtagaccactaggacatgcggngcaattcattctgagtgagtgtcatctatttccctgactggtacagtatctcttctgaaaaagcagagtgcattcaagtctgtaggaaaacccttttcttagggaggtgattttttttctctctctgcttcttatttggcctactttacaatttctaactaactagttattggcatttactgacagtaaattattgcagtcaccaataaatgatagtacattgtgaaacaaaatatttgctcatattagcaaataggacattctttggctttgaagtctttctttcttttgtgaagacttcacacacggttgcttcagcacacagttgctgctcaggttttatgtatagatgataataatagaaagcacagtttactaacatggtaaaccaacggagttcaagtcaagtcagttaatn

SEQ ID NO: 9756 - DNA, 466 bp, Homo sapiens
  misc_feature (1)...(466): n = A,T,C or G
natcgaattacgtgggcgtgnggcggaattcgccctgcagttgagactgccaaatcccagcaccaccgcaaagcaggtctgctgtccagggggactgttcatcctttcctatttgtctactaagtgaggatcatgataactacttcgcagtctggttaaaggagctacatgactttgataccaagaaggtacttagaatggtgcctggtccagcaagcacgctatgactcagagatgaggggggcaacaccatgcctccctatccaggcgccctcctcctttccagccagtgatccaaccccttcacaatgcaacccaagacccgcagccctgcccatggggctccgcccaccactgccattgacgaacatttccgggctactctgttgcactctcactccgtcctctacccacatttcttgagtgtcaactctgtgtggatgctggtgtacacggcagaaccagn

SEQ ID NO: 9757 - DNA, 469 bp, Homo sapiens
  misc_feature (1)...(469): n = A,T,C or G
cggagtgcccccnntnnnnnacaattggaccatcactcgnnactatcggaanangcggaangaccagcatgatattttcagagtcttgtccccggggtattaccacctctttttgaacagggaattgattcaagaatggacatggtctcctctgattatcaggtactggggctgagggcattaaaaatagtaagcctccctcctcgtcccctgcctcaagaaattgcctccttatttatcaacatctttttcctccctttccctgagagctcacagtacaatgtttcagaagccccatttgcacagggtttcagcaactcagaatgctctacttctttttctttgagaaaggattaagatacactcctgctgtgcccccatctttcctccaaactcctgcctgtgtttgtgtggatacccagtcccagaaccacactgttgagatggacacactagaaacccctggggn

SEQ ID NO: 9758 - DNA, 466 bp, Homo sapiens
  misc_feature (1)...(466): n = A,T,C or G
nattgagatacatgtgcagtgngcaggaatccattntggaaaaatcagactcctcaaatgaatcttaggctaaaaactgttcaagaacgatgttaacatcacatgtaagaatgctgcgttttctaggatttgactttttcagtaatcaataattagtatattttgggccaggcatggtagttcacgcctgtaatcccagcactctgggaggctgaggtaggcggactgctggattccgggagttccagaccagcctgggcaacatggcgaaaccccgcctctactaaagatacaaaaaattagccgggtgtggtggcaattgcctgtagtcccagctactcaggaggctgagggataatcacctgagcctggaaggtcagggatgcagtgggccgacatcacgccactgcactccagcctaggcaaccagagtgaagccttgtctcaaaaaaaaaaaaaaatccct

SEQ ID NO: 9759 - DNA, 458 bp, Homo sapiens
  misc_feature (1)...(458): n = A,T,C or G
nnggggtttgtagatnacttggacagtccggtggaattccgcggccgactcgcaagatggcgccgcagaaagacaggaagcccaagaggtcaacctggaggtttaatttggaccttactcatccagtagaagatggaatttttgattctggaaattttggtaccttccctagtgaatatctagggttctcttccctagttttgcattttttctgttttaaaataggagcaatttctacgggagaaggttaaagtcaatggcaaaactggaaatctcgggaatgttgttcacattgaacgcttcaagaataaaatcacagttgtttctgagaaacagttctctaaaaggtatttgaaataccttaccaagaaataccttaagaagaacaatcttcgtgattggcttcgagtggttgcatctgacaaggagacctacgaacttcgttacttccagattag

SEQ ID NO: 9760 - DNA, 451 bp, Homo sapiens
  misc_feature (1)...(451): n = A,T,C or G
ccatgagnccataactgaganctatagacagtgcggtggaattcgcggcgcctgtcgttggtgacaagaaggtcatcgcaccgaaggttttgggaacagtaaaatggttcaatgtaaggaacggatatgggttgatcaacaggaatgacaccaaggaagatgtatttgtacaccatactgccataaagaagaataaccccaggaagtaccttatcattgtacgaaatggagagactgtggagtttgatgttgatgaacgagaaaagggtgcggaggcagcaaatgttacaggtcctggtggtgttccagttcaaggcagtatatatgcagcagaccgtagccattatagacgctatccacgtcgtaggggacctccacgcaattaccagcaaaattaccagaatagtgagagtggtgaaaagaacgagggatcggagagtgctcccgacgc

SEQ ID NO: 9761 - DNA, 456 bp, Homo sapiens
  misc_feature (1)...(456): n = A,T,C or G
gcggtnnnattgagtaccattacccgngcggnggaattcccagatcctcttcgaggagaacaagctgtagtacagcgtccacctccaaggttctatttaatacctgccacccagtgatttatgaagccttggagacaaagcccttatgtctgtattttcactcatgccttctgagtggtggggagccccttttcagcagcattctgggtgcctttgaagaggtacaagcctgctctccccaaaagaatcagggccacagctcttgacagatctcccgggacaagatgcgcctgggtttgagccctgagcgtaaggattctgatcctgagagcagccaaggagattttctgctgagccaaaccccttcacatttttctcctctttccccaggttttctttaaaatcgtttttaaatcttaattttactctctactcttcctgtatccacgatacaag

SEQ ID NO: 9762 - DNA, 447 bp, Homo sapiens
cactgagacccttggaagacgtgtggaattcgcctcccgtggccttcccctggcctctcttgtctgtgtctcttccaaagacacttgtcgcgttggagttaaggcccacccagataatctgggatgatctcatttcgagaaccgtaacttaattacatctgcaaagaccattttcccaaataagttcttattcacagattctgaggaagggtggttgtacatggatatatttgtgggggtgcatttatcccgctacaaatgacactgggtccttctacttgtggatggtgggtggggagagggttgaacactcctgtaattctttctttttttttttttccttttccccctggccgggcggaaaatatggggccaccacccaccttcaggtccctggaattgggaaggaaaaaacgggcaaagggcaaggggccctgccaccttttt

SEQ ID NO: 9763 - DNA, 463 bp, Homo sapiens
  misc_feature (1)...(463): n = A,T,C or G
atcggaccctaatagaggcagtaattcgngcgccactacgcctggctaaatttttgtattttttgtagagacggggttttgccatgttgcccaggctggtctcaaactcctcagctcaagttatctgcctgccttggcctctcaaagtgctgggattacaggcatgagccactgcgcccagccctagaatacaaatctttcatcacattgtgactgggttttagtagcctggaggcccttcactctgttagtctgaacctcagctctgggggagtgtcaagcttagtgaaggtgggagagaaggcaaagcatggaaccatgaggtagtctctctttattcttcttaccggcaaacccaagccatgaaaacagcccagctgaaggctgctgaaccacccttcttatctccctctctctctctctctcctttccagggattctgccccacattggcagtgccacc

SEQ ID NO: 9764 - DNA, 456 bp, Homo sapiens
  misc_feature (1)...(456): n = A,T,C or G
cgttcgacaccacttagacgaacatctaggacancnggtggaattcatcctagctgccttgtcaacatcttcgagcatcggcagctccggatgccggggtaactggcagcaggtaggaaactatgtgaaagaatctcctgatgtcataatttccgggtgtcaccggaacatttgatcatcattcctttggcaattccagccttctgtggaaaggccagtagaaagcattgatttattcacctctacaggaatcagactcagcctcttttggttttcagtgaagtatgccttttcaatttggaacccagccaaggaggtttccagtggaaggaggagattcttcaattgagctggaacctgggctgagctccagtgctgcctgtaatgggaaggagatgtcaccaaccaggcaactccggaggtgccctggaagtcattgcctgacaataactgatg

SEQ ID NO: 9765 - DNA, 454 bp, Homo sapiens
  misc_feature (1)...(454): n = A,T,C or G
cctgggtagcctacgccgcgccgnggaattcgaaatctggggggntcaatttctcagagataaatccttgctcttctgtgagagagcttgggtgttgaacacttggatgcataaagtgggaggagccgtggggtcctacttgttttcagtcctgtacctccttaccttccactatcgggtacttccaagcactgaacctctcaggttctgttgggaaagtggcttgcctctcagcagtacctcctttgcaggcccttggtttgcctcaacgctggcaagtcagttactgctgttgctcctttcctgttctctttgaccttgcagattaaaacccttttcattttcttactgctattctacaagagactcaggaagaagataggtgccaacttgaatgatcagtctcccttttacattacaggctgaacctcctcaaaagagcaactggagatag

SEQ ID NO: 9766 - DNA, 525 bp, Homo sapiens
gcggtggaattcggatcacctgagctcaaggagttcaagaccagcctggccaacatggcaaagcaccatctctactaaaaatacgaaaaaaaatgagccgggcatggcggcagccacctgtaatcccagctactagggaggctgaggcaggagaatcacttgaacccaggaggcagaagttgcagtgagccgagatcgcgccactgcactccagcctgggcgacaaaggaagactccaccaaaaaaaaaaaaaaaaaaaaaaggggggggatccttaaccattttcccttggtttggagagttgactgaaatttttaacccaggggaaaattcctttgagattcttgcgaaaaacaaaaaggagtaccccatttggaacagcccctcctttgtaatccccctcagagtagaatcaagaccctggtacaaaatgctctttttaaaaacccaaaaggggtcgggaattgaagggtttttactcccaaagggtgatgcattggaggtgaggaggggataacaaaccca

SEQ ID NO: 9767 - DNA, 491 bp, Homo sapiens
  misc_feature (1)...(491): n = A,T,C or G
nttgactgacgacactagtccagngcggtggaattcctgtgctcacacagtcagtcaagaacaatacccaagtgctcatcaactgccgcaacaataagaaattcctgggccgcgtgaaggccttcgataggtgagtgctgggtcctgggaggtgttctccgcaggcctggagaggccactccagctccagtctgaagagctcaaagacagctgtctcagaagcctggggtgtatggccaggcgtggtggctcatgcctgtaatcccagcactttgggaaggcaaggcgggtagatcacctgaggtcaggagttcaagaccagcttagctaaaatggcgaaaccccatctctactaaaaatataaaagccaggcgtggtggtgcacgcctgtattcacagctactcaggtggccgaggcacaagaatagcctgaacccacgaggcggaggttgtggtgagctgaaatcgcaccactgcattgcagcctgggn

SEQ ID NO: 9768 - DNA, 489 bp, Homo sapiens
  misc_feature (1)...(489): n = A,T,C or G
catcgatagcattccaccgngcggngcaantccacgtcactggatctgagctggaataacttccacacaaggggagctgtggccttgtgctatggtctccggggtaatgtgaccctgacaaagctggatctctccatgaatggctttgggaatgaggtggctctggccctaggggaagtcctccgactcaaccgctgcctggtctacctggatatcggtggcaatgacatcggcaatgaaggggcctccaaaatcagcaaaggactggaatccaatgaaagcctcagagttctgaagcttttcctgaatcccataaatatggatggggctattttacttatcctggctatcaagaggaaccccaaatccaggatggaagagcttgatatttccaacgtgctggtgtccgagcagttcatgaaaacgttggacggagtgtatgccgttcacccgcagctggacgtggtattcaaggcagtacaaggcctc

SEQ ID NO: 9769 - DNA, 457 bp, Homo sapiens
  misc_feature (1)...(457): n = A,T,C or G
agttgaaaccctagaaagngcggggaattcagtgaggacatctgaccagctcaaaccatctatctatctatgctttgcaaagactaaggcgtattataggaagagggctagaaacctaactgattcttctcagttttctcagtttaaaacagcccagtattcctttgtatcctcaagggtccttgagaatacttctgttattgagaccctgtgggctacttgtactgtacctcctctcaagccaagaagggctgtgggataatttaccatgaatccttagtagcaatgacagcagagttaaaaaataaaaggtgttttactttcaggctcttgttttggttcagaggagattttaaatattgaatgacacttctacagaacaacggtttttcttctgccaaggctacttcctttaacgaagtgcctttaattcagccttatccaactagggaaaatg

SEQ ID NO: 9770 - DNA, 505 bp, Homo sapiens
  misc_feature (1)...(505): n = A,T,C or G
cgccccccnggnnnnttttgactgacgtcattagtccagngcggtggaattctcttgaaagagggcacagcagtttgtttaaaatagctgtttttcagggaagaaggaagagttaagaggaagaaagtagagcatgttttgggactgagcttgcatgagaagacgggtgccctaaggtgctttcctgtggggtagtagctgggagtgactgggggagaggtgtggtgcactcaattggtttggaggtttcctgcagacaggctgagattccacatggagtcagggacatagagaagagcagcagccagctcaactgcaggctgaatctttgttcaggggtctggtgggatgtcggcaagctctgaggaagggatgagcctgcagactggctacggtagggaaaggaagcacttcangaagaatgtgttgaggagggggtggtgaggggaaagactcactttctcagagaatacttctctcttgatggaaatcacatgtgtatgtg

SEQ ID NO: 9771 - DNA, 445 bp, Homo sapiens
  misc_feature (1)...(445): n = A,T,C or G
cgggcncannattcgagacactaggaccagcgttgtggaattcgaagtattgttaggaggtgaacttcactacatgttaagttacactgaaagtgttcatgtgcttttaatgtagtctaaaagccaaagtatagtgactcagaatcctcaatccacaaaactcaagattgggagctctttgtgatcaagccaaagaattctcatgtactctaccttcaagaagcatttcaaggctaatacctacttgtacgtacatgtaaaacaaatcccgccacaactgttttctgttctgttgtttgtggttttctcatatgtatacttggtggaattgtaagtggatttgcaggccagggagaaaatgtccaagtaacaggtgaagtttatttgcctgacgtttactcctttctagatgaaaaccaagcacagattttaaaacttctaagat

SEQ ID NO: 9772 - DNA, 455 bp, Homo sapiens
  misc_feature (1)...(455): n = A,T,C or G
ggcgtgcgnttttntccgttctgatcgcatcggcaggaccnanangaaactatgaccagggcaagccgggagcatgtcgtcacttggcttttttgccattttagttttctagatagagacccctgtcactgcggttaggtttgctgaatttgtaacttgagatcacggttcacttccttatctggcctccatcccattcacaatgtcattttgtatagcaaatctaatgtgttttttttgactggatggttgttttttagacggagtttcactctgtcgcccaggctacagtgaagtggcgcaatcttggcccactgcaacctccgccccctgggttcaagcgattctcctgcctcagcctccctagtagctgggactacaggcgcgtgccaccatgcctggcagattttgtatttttagtaaagatggggtttcgccatgttggccaggctgat

SEQ ID NO: 9773 - DNA, 447 bp, Homo sapiens
  misc_feature (1)...(447): n = A,T,C or G
aatagatnaccctnnntttgtagaccttagtaagtgcggtggaattctgaaggtattattacctgcacagcccatttcatcacgttgctaggagctctcagtcagccaacaaatatgtatacagcacctgatataggctaggcactgttctagaagctgaagatacagcaggaaacaaacaaacaaaaatcccgggcctcatggagctgatattttcaagaagcatgggaattgtttgagagacaggagcttggataaagggatggagtgttttagacaggaacagagcaacatgtgtccagtgctgactgtacgtggagatagtttacttgcacagcagctccaaagtggctgtgatttttctcaatttggaaaggaggggagtgtctgagggttaagccagttgctcggggcaacagacctagtacttggaagagctgagactgc

SEQ ID NO: 9774 - DNA, 447 bp, Homo sapiens
  misc_feature (1)...(447): n = A,T,C or G
ntttgangaccccttgtacagcgtggtggaattcagggaagctacccacccccttcaccccacctgaatgagatgatttctgaagtcctcagcagccctgattctaagcctcataaggaagagtaggtgttaatggcatcctagggcaatggtaggtgcctgatgcagatctgctgtgagccatgtgctggcatcacaggggtggtttattaatttcatttatcatctggacagccccttcttataacgtacatccttgcctcttctgaggcgctaagatccccaaggtggctcctgtatccagaaaccccttggccttccctcccagttaagcaagatctctcttcaactcanggatgctgagagattgaaagtgaactacacacaggaacagccaagataggagttatttctatagcaccatgcttggctgatgttctttacacg

SEQ ID NO: 9775 - DNA, 492 bp, Homo sapiens
  misc_feature (1)...(492): n = A,T,C or G
ctttgactgcatgatcataggacagngcggnggaattcccaggatatcctaaacctgaggaaggaatacttgacagtttggatgtttgggtcattgctgtgattgttattgccatagttgttggagttgcagtaatttgtgttgtcccgtacagatatcttcaaaggaggaagaagaaaggcacatacctaactgatgagacccacagagaagtaaaatttacttctctctgagaaggagagatgagagaaaggtttgcttttatcattaaaaggaaagcagatggtggagctgaatatgccacttaccagactaaatcaaccactccagcagagcagagaggctgaatagattccacaacctggtttgccagttcatcttttgactctattaaaatcttcaatagttgttattctgtagtttcactctcatgagtgcaactgtggcttaactaatattgcaatgtggcttgaatgtaggtagcatcctttg

SEQ ID NO: 9776 - DNA, 469 bp, Homo sapiens
  misc_feature (1)...(469): n = A,T,C or G
aaatcgagaccttacgaagngcgnggaattcgttttgagacgttacacacgcaggggcatttcctgtgatgcccaccatgcccacggattcacctaggtgggtttggcaaccctggtgatggcaggggtagtggcacatcctgcctttgcagccagccctccgtcacacggactgtgcagaaggatggacccaacaaggggcgccagttccacacatgtgccaagccgagagagcagcagtgtggctttttccagtgggtcgatgagaacaccgctccagggacttctggagccccgtcctggacaggagacagaggaagaaccctggagtcggaagccagaagcaaaaggccccgggccagttcctcagacatggggtccacagcaaagaaaccccggaaatgcagcctttgccaccagcctggacacacccgtcccttttgtcctcagaacagatgagctcagggtg

SEQ ID NO: 9777 - DNA, 477 bp, Homo sapiens
gcccccccccccccccattgtagacctatggaagtctggtggaattcggagatggaggttgcagcgagctgagatcgcgccactgcactccagcctgggcaacacagcgagactctgtctcaaaaataataataacaaaatattagctttattgatgaatacctcatacaccataaaagctagtgtttatagtatagtcacagagctgcacagccatcaccacaatgtaattttagaatatttctgtcactccataccctttagccgtccccagctcccccctcacccaggcaaccactaatccacttctgtctctgtaatttttctgttctggacagttcatatgcatggaatcatataaagttttttccatatctgcttttttcttaagttgacatataataattgtatccatgtccgcttttaaaatgcaatttgactttcacagtttagctgaatgctttcactttcgttatt

SEQ ID NO: 9778 - DNA, 460 bp, Homo sapiens
  misc_feature (1)...(460): n = A,T,C or G
aggcgggngnttttnattgaattcatagcattgtgcnggaactccaccaggggaagctggatgacagcttcaatccatcaatgataggcctcagtccagcctatctttatggactgcagaggtacttaagtctgtgggggttgaagtctagcccagttcatcttccacacgggctgctgcccagagcaggtaggcaggtatgggatgggggtgagagtgccctgggccctggtagttctagttaatcagcttccaaagcaaggccccaaggaatagcagtggatttgggctggagctgcgtctcttgtccacagcagttcaggatctggttatccctagccctgcaggctgaagaggagcttgaggaaacctcatgcatgaagggacacagatctcagttctaccttgtccaactctagcctggctttgcccatgtactgctcagttctgcagggggtgg

SEQ ID NO: 9779 - DNA, 489 bp, Homo sapiens
  misc_feature (1)...(489): n = A,T,C or G
tggnnccgggcgcgncgnncnnnnaattgatnaccatagtagacccttaggccagngcggtggaattcattggatcctagccataacataaatataagggtggaaccaaagttttaatcaaagtatgtggtgttcagttgctgcttacaatagttgataccccaggatttggagatgcagtggataacagtaattgctggcagcctgttatcaattacattgatattaaatttgaggactacctaaatgcagaatcgcgagtgaacagatgtcagatgcctggtaacagggtgcagtgttgtttatacttcattgctccttcaggacatggaccattacataactgaagactcccaccttcaggcaggattgggtagtacgtgtttgtaactacctggcattgccttttgttgaggaagggtagatgtctacccaaatggaatattgagtatcagagacttcaaatgataacttttgtttgtttggagg

SEQ ID NO: 9780 - DNA, 474 bp, Homo sapiens
  misc_feature (1)...(474): n = A,T,C or G
atcgagccccctagccaatggaaggccattccctagaccgaagaagcttcatagcattcaccctatggatttgttgcacatattcaatgataggcaagcactcatagattctgttaataaataactgaacatattctatctcacataatgaagcaatggcctacattgctcatagtccatctacatgagacaggtaactcatccttgggtgaaaagtttgttacactcacacttggttaggaaagcagactaagaaaggctctagctttagaaaacttatgtaaggatctttctacaagaaaatcttaaaggtatacatttaaaagttaagtctttatgctgggtgcagtggctcatgcctgcagtctcagcactttgggaggccaaggcgggcggatcacgaagttaggagcttgggactagcccggccagcatggtgaaaccccatctctactgggaattgcaaaaattagn

SEQ ID NO: 9781 - DNA, 491 bp, Homo sapiens
  misc_feature (1)...(491): n = A,T,C or G
cattgattagcactcgnccagngcggnggaattcgcagctgaaagtaaacagaatggattgccagttacatgtatgcctgcccagttccctttttatttgcagaagctgtgagttttgttcacaattaggttcctaggagcaaaacctcaaggattgatttattgttttcaactccaaggcacactgttaataaacgagcagggtgttttctctcttcctttctaatatatggagtttcgaagaataaaatatgagagcaatatttaaattctcaggaattgacttatactcttgagaatgaattcagtttcaatcaagtttacattatgttgcttaaaaaaatagaaattattctttatcttgcaaagaattgaaaccacatgaaatgacttatgggggatggtgagctgtgactgctttgctgaccattttggatgtcattgtaaataaaggtttctatttaaaaaaaaaaaaaaaaaaaaaaaggcgc

SEQ ID NO: 9782 - DNA, 470 bp, Homo sapiens
  misc_feature (1)...(470): n = A,T,C or G
natcgaagatccgtagaccactacgccagagcggaggaattctgttttttattttgccagcacaagggattgaaaaacaatgttaccaggcggatattaaaacgactacaacatgagctgctgcttttctatcattttatattcagcttgctttttatattttacctttctagcccccgtaggcatttgattttgtaactccctggaacaggtcagaggattacattaaaatataattactaggtagtggcatctattcttgctgttgtaaaagcacaattcttaaagttgttaggacaggccaaacttacattaataatgaagaaactagcaggatgacacggagctggttctaagagcatttgcagagcagcattaatagaatcagttgaaagggactgcaaaataaaattttaaattaagtataagataactttctacagggcaatgggtacttaacctttcggagg

SEQ ID NO: 9783 - DNA, 471 bp, Homo sapiens
  misc_feature (1)...(471): n = A,T,C or G
aatgagaccataggaagngcgtggaattcgagaaaagaatcttccttctctccagtaagcactgaggtaagcattgagccatattataggtttatgactttgagactcagaaatttaaattcttggccaggcgcagtggctcacgcctgtaaccccaacactttgggaggccaaggcaggcagatcacttgaggtcaggagtttgagaccaacctggccaaaatggtgaaactccatctctacgaaaaatacaaaaattagccaggtgtggtggcgggcacctgtaatcccagctacttgggaggctgaggtaagagaatggcttaagttctctttatctgctttatttcagttgcctctcttagatgaatattaatgacttacatagcattttagatcagtggatgtttttgtgattcttttatttgagctttggccaaagataacagtacccacaggttttttccagcn

SEQ ID NO: 9784 - DNA, 481 bp, Homo sapiens
  misc_feature (1)...(481): n = A,T,C or G
cgcgccccccccnnntnnnnatcgtagacactantcagtgtggtggaattcgaaatatttaattacattgggagcagttcatgatttagtcctcagaaatggactaggaatagaaaattcctgctttctcagttacatgttttgtgtatttcacaatgtcgtgctaaataaatgtatgttacattttttcccaccaaaaatagaatgcaataaacatcttcaaattattaacaataattgtatgaaaaaagtgtatctttacagcagtattaaacatacagctactataattaacccaccttaaatctctttttcttagtacatgagtatcttctagcagttaagaaaggcagtcttcagaaaatggagaactgtggcggaatgcagtacacaacagtatttaggacaactcctttgccaacacaatggctcccctcgctggtgaaagatctctttacagcttaagaaaaacaacggaaat

SEQ ID NO: 9785 - DNA, 472 bp, Homo sapiens
  misc_feature (1)...(472): n = A,T,C or G
tggagcaaccgggngtgcnnnaccttgaaangcatacgatgngcagnggaaaanccgcgagngngtgtgcatgcacttgtgtgtgtgtgcacgtgtgtgtgtgtgtgtgtgtgtgtgcatgtaacacttgagcatgtatcacgccttattggattcactgccaaaaattggacttattctctttcagagatgaaaagattaatacgcagaagggatccagagagaggcctatatgcctagatttttttaaatatacatataacacgctagtgtcagatgaaaatactctttgagggaagaactactcaagaagcaaagataaaatttgattagcgctttttactctctataaaaaaagagaacatgctctctatgacacaagaaattgaaaaaataagacaagccaggcgcagtggctcatcgcctgaatgctggcactttggcaaggcaaggcaagaggattgcttgcccn

SEQ ID NO: 9786 - DNA, 463 bp, Homo sapiens
  misc_feature (1)...(463): n = A,T,C or G
tggcgggcaattanttcggatcatcatacgcttgggcnnnaacnnnngccngaaggatgggcgagggtcggggacttcgtactgctaggaagctccgtagtcatctactttaccagaagtggcatgataaacagtaggagaaagctcatttgggcacaggcctaaaggccaacccttttggaggtgcttctcatgcaaaaggaatcgtgctggaaaaagtaggagttgaagccaaacagccaaattctgccattaggaagtgtgtaagggtccagctgatcaagaatggcaagaaaatcacagcctttgtacccaatgacggttgcttgaactttattgaggaaaatgatgaagttctggttgctggatttggtcgcaaaggtcatgctgttggtgatattcctggagtccgctttaaggttgtcaaagtagccaatgtttctcttttggccctatacaaagg

SEQ ID NO: 9787 - DNA, 454 bp, Homo sapiens
  misc_feature (1)...(454): n = A,T,C or G
acttgaaacttcactgaccattagcccagngcggtggaattcggtccgtggttaaggactccaggtttagagtggaagttaatagggtcaaattcacaatgctgggaaacaccatcatttaaggcagtgttactgaatatatgagctgagttattatgcctgtgtcaaaattacgtgggctgcttgataaaaaaaatacaggttcctgggactcatccaaggttaatgaattacgctctcttggggcgggatttgggactctacatttttgaactgcctcaagtgctttttaagtgtgccttaaaatttgagatccactgacataaagggaaagcagaagaagaggaatctgtgacagaggcagagagggacttgcctgagttaagaggaacccagaggccggcgcggtggctcacacctgtaatcccagcactttgggaggccgaggtgggtg

SEQ ID NO: 9788 - DNA, 465 bp, Homo sapiens
  misc_feature (1)...(465): n = A,T,C or G
attgagcccctattgtagacatctagaccangcggnggaattccaggaacacatgttgcttagaaaagccaaatccagccttgtctctgcctcctctggtctcatgatgtgcatctgttaccttgaaactggaaaccagtctatcaatgtctgtgccaattttttattccctccccaacctccttccccataggactttttatttatgtaggatgtgtgctgtctaatgatgggatgaccacacttttccatgttctaaaagtgctcctctcccgcagggtcccagggctggtggttgctttgggtctacagctacgtcttacccgcctcctgcctcaacagcctgtgtggtggcaaagccggtgtggggctggggaacgcagcgttctccaggagggggacccggctctccttctgcagtgcaggcgaaggcctagatgccagtgtgacctcccacaaggcgtg

SEQ ID NO: 9789 - DNA, 419 bp, Homo sapiens
  misc_feature (1)...(419): n = A,T,C or G
cacatggctcggaaacgcgcggccggcggggagccgcggggacgcgaagtgcgcagccagaaatccaaggccaatagcaaggcccggcgtgaggaggaggaggaggatgcctttgaagatgagaaacccccaaagaagagccttctctccaaagtttcacaaggaaagaggaaaagaggctgcagtcatcctgggggttcagcagatggtccagcaaaaaagaaagtggccaaggtgactgttaaatctgaaaacctcaaggttataaaggatgaagccctcagcgatggggatgacctcatggactttccaagtgacctcaagaaggcacaccatctgaagagaggggctaccatgaatgaagacagcaatgaaaaccagatggatcgcagttgatgaagagacacagaaagaccggn

SEQ ID NO: 9790 - DNA, 459 bp, Homo sapiens
aatttgataccctcgtaaggcccgggaattcgtttgtagacgtctcacacccagagcacttttgtctggccgaactgcagccagatgttttatacggagaaagggctgtgcagccacatgtgttttcacagcgaccagtggccgtcacctcgagggaagcaggaaccgcaggtgtttggcacagagttttgcaagccgctaagacaggtgctgaggccagaaggggacaggcatagtcccccaggaaccaagaagcccttggaccccacagctgcagcccctttggtggtcccccaatcgatccccgtggttccagtgacccgacacataaggagcatggccatgatcaagtggatgggtcctttggcatctgtgtggtgaaggatgacaccaaaatcagcattgagcctgaccgagctctgcaatgtggcatgctccagcgtgatgccaggagggggg

SEQ ID NO: 9791 - DNA, 490 bp, Homo sapiens
  misc_feature (1)...(490): n = A,T,C or G
cgcgtttagacctaacgaaactctccgcagngccgcggaannacagcatcccgcaggagctcttccgcaagatcaaggctgccgagtatttcattcctgttgatggacgggtttctgagaacaccgtgtgtctcatacggaagctgctggtccttgacccccagcagcgcctggccgccgccgacgtcctggaggccctcagtgccatcattgcatcatggcagtccctgtcatctctgagtgggcctttgcaagtggttcctgacattgatgaccaaatgagcaatgcggatagctcccaggaggcgaaggtgacggaggagtgctcccagtacgagtttgagaactacatgcgtcagcagctgctgctggccgaggagaagagctccatccatgacgcccggagctgggtacccaagcggcagttcggcagcgcaccaccggtgcgacggctgggccacgacgcacagcccatgacctccttggacag

SEQ ID NO: 9792 - DNA, 481 bp, Homo sapiens
  misc_feature (1)...(481): n = A,T,C or G
tggacggggnngnnnnnaatcgaagacctcattgaagngcggtggaantcgcttgaatcatcataaaaaaaatacctgcttttcatctggacaacccaattgagccactttatctccttttggcaatctgagtaggcggggaacctaggcagggctggctttcttagcgtgtaacttgtgtagcagcacagggcccacacttagaaggaccccacacttggttcaaggctctgctatagcggaaattcttaataatgtttgaagaagggccccatgatttcattttgtgctgagccctcaaaattatgtctgtttcgtggtgggaaatatcctatgttttcttgctcaaacacctttctctctgaaagcagaaaaaggcactgatataaagggaagagaaggaggctcaccggagggaagagaacatagtgaagattcccgcctttggggaggtctggaccacccagggcctccactgcca

SEQ ID NO: 9793 - DNA, 512 bp, Homo sapiens
  misc_feature (1)...(512): n = A,T,C or G
nggagtagagccaaggggnnnnnnnnngattgagaccgtggnannnnccactgagnaccntagtgaagngncgnggaantcgcacaagtgaggtcagccatggcactaggtcattcccattttagccaaggtgcctctataggggtcagacatcatgtgcccagacctaaggtcaggaatgtcatatttttctgttaaaatcattttatttctgtgtatcttacctttaaatcattgtggtttactctgagattctgtagtcctaatattgtatcattgtgctgtctgcaaaacaacttgaatctattttgtttgcatcttttgttacatgtaacgcagctgtactttatgttctttgcaactgtttccattatgagaacgctgtgctatttacaaggttacatttttcttggccaggcgaggtggtcatgcctgtaatcccagcactttgggaggccaaggtgggcggatcacttgaggtaaagagttgagaccagcctggctagcatggc

SEQ ID NO: 9794 - DNA, 468 bp, Homo sapiens
  misc_feature (1)...(468): n = A,T,C or G
cgaggacccaggntgcnnaaccttggaccaatangatgntcatcggaaanncgaangnaagagngcaggctaccccgggactttgatcccctacagatgtgacctatcaaatgaagaggacatcctctccatgttctcagctatccgttctcagcacagcggtgtagacatctgcatcaacaatgctggcttggcccggcctgacaccctgctctcaggcagcaccagtggttggaaggacatgttcaatgtgaacgtgctggccctcagcatctgcacacgggaagcctaccagtccatgaaggagcggaatgtggacgatgggcacatcattaacatcaatagcatgtctggccaccgagtgttacccctgtctgtgacccacttctatagtgccaccaagtatgccgtcactgcgctgacagagggactgaggcaagagcttcgggaggcccagacccacatccg

SEQ ID NO: 9795 - DNA, 487 bp, Homo sapiens
  misc_feature (1)...(487): n = A,T,C or G
naatgagaccgtctgannnccattgagaaccataccacagngcggnggaantcgtcaagatctggacacccacagctaaagctgccactgatcttactgggttaaagaaggtgattaagaagaacaagtgggaacgagatgaagacagcttgcaccatggcagcctgtttgaccagtacatgctttggttcctcctgcgtcacgtgacgcagagaggtcgtcaccaggactggagaagtggtgaagctgaatttccagatgaagaatcggatgagtcttccagcacttcaaagacatctgaggaggaggtccaagaccgagtgcagtgcatgccatcctgaaggcctcatatccagtccagctacatgccacctaagtacactggactttaaaattcagtttgactaatttagaattgtcaatagattaatagatttgctttttgtcttctattttccataatatatgctgaaaaccgtctcttccg

SEQ ID NO: 9796 - DNA, 468 bp, Homo sapiens
  misc_feature (1)...(468): n = A,T,C or G
nattcgagattagtagtccgtgtggcggaattcctgtaatcccagtactttgggaggctgaggcgggtggatcatgaggtcaagagatagagaccatcctggccaacatggggaaaccctgtctctgctaaaaatacaaaaattagccgggcatggtggtgcgcacctgtagttccagctacttgggaggctgaggcaggagaattgcttgaacccgggaggcagaggttgcagtgagctgagattctgagattgcaccagtgtactccagctggcgatagagtaagactccatctcagagaanaaaaaaaaaaggaaaattaaaaaanccccggccttttaaaaataaggggccctaaaaaccccctaaaaaccccctaagggggcttttaatggccgaccatttgtggggtgccccccccccggggttttttttgacgtggggaggggcccccccccttgtttttt

SEQ ID NO: 9797 - DNA, 426 bp, Homo sapiens
  misc_feature (1)...(426): n = A,T,C or G
agcagcatttttatgccaactaaggtatcctgttactctaactgataaaagattaagtcttttactgttccttttatataaatatgagaataaagaatgagaatagccttactgggattatctagtatactattgccaaacttaacataattatcacttggcatacttattaaaagtaataatttcctctctcagagtcttaacacaattgatttgggatggtaactggtaacttgtagcaatagtaagaatctcaggtgattcttatgaaatggtacctttgggaagcactgttctagtgggactactgaagggaaaggtttccatactttctccttatggttgtagtcttccttgactaccatgggtatgtgtaactggagtgtcaaaaaggacattcatagatccagtgtcccagctttatgn

SEQ ID NO: 9798 - DNA, 466 bp, Homo sapiens
  misc_feature (1)...(466): n = A,T,C or G
ggagtaacccggatggccaaaattggattcattganangccatgacaagcggcggaantnattatttttctcccttattctgttaaaatgtgaacttgcactgattaattttgtaatactaaaccaactttacagggtagaataaatatagattggtcacactatattatgcttgttacttattgttggtctatgttaactaatactttgttttgtatatttacatctatttttgtaatttagattggctgataatttacctttcttatggctttattttattttttattatttttgagatggagtttcactcttgttgcccaggctggagtgcaatggcgcgatcttggctcaccgcaacctccgcctcccaggatcaagtgattctcctgcctcagcctcccgagtagctgggattacaggcacgcgccactacccccagctaattttgtatttttagtagaga

SEQ ID NO: 9799 - DNA, 486 bp, Homo sapiens
  misc_feature (1)...(486): n = A,T,C or G
ttccgatagcatgcgannncntaccgtanagtctcgaagnngcnggaagccaaaagcggccacagcgggccacatccaatgtcttctctatgatcgaccagccccagattcaggagtttaaggaggctttcaacatgattgaccagaaccgtgatggcttcattgacaaggaggacctgcacgacatgctggcctcgctggggaagaaccccacagacgaatacctggagggcatgatgagcgaggccccggggcccatcaacttcaccatgttcctcaccatgtttggggagaagctgaacggcacggaccccgaggatgtgattcgcaacgcctttgcctgcttcgacgaggaagcctcaggtttcatccatgaggaccacctccgggagctgctcaccaccatgggtgaccgcttcacagatgaggaagtggacgaaatgtaccgggaggcacccattgataataaaggcaacttcaactacg

SEQ ID NO: 9800 - DNA, 480 bp, Homo sapiens
  misc_feature (1)...(480): n = A,T,C or G
aactgtaccctcgcaggncggatgagtgtccttgaannngcggcaaggtcagacagtgttcgtacttgttctaaattgctattatatgaacacaaaaccatttgagagaagcatttaagaattagaaggtttatagttaatacttaatgaaaattttcagcttagcagacatgacaaaatagatgggtaaaaataagtagctgacaaatagggccttgtggatttgagttaaggtggcaccgtgaagtgcagagggagtgaaggggaaaagctgttttattgtccacgtggaagcttctgcttgaaaattgctaactctaatcaaggaaacactggtagggagagtggagtattttagaaagactttcccagaatgcatcttggtgaacattcaatgaggaacaatttcaatggcatcctctctgcaactaagaatctgtagtaatggaatttgctttctttaaggtggtatatgaactg

SEQ ID NO: 9801 - DNA, 216 bp, Homo sapiens
tcatattggtgtggggtatttagaattagtgctgttgtggagtgcgtctgtaaagtgcttgttttatcatacttcctgcctctcccctcccccagtttctcctcccctaaaataaaaatagtggtcaactttagtaatataaaaggctgctggatgctgagattccacataacacatggttgtcaaaattggatgttaaggattcttagaaaaaca

SEQ ID NO: 9802 - DNA, 417 bp, Homo sapiens
cgtgccccactggcttcaaggttggcatcaactaccagcctcccactgtggtgcctggtggagacctggccaaggtacagagagctgtgtgcatgctgagcaacaccacagccattgctgaggcctgggctcgcctggaccacaagtttgacctgatgtatgccaaacgtgcctttgttcactggtacgttggggaggggatggaggaaggtgagttttcagaggcccgtgaggacatggctgcccttgagaaggattatgaggaggttggtgtggattctgttgaaggagagggtgaggaagaaggagaggaatactaaagttaaaacgtcacaaaggtgctgcttttacagggaagcttattctgttttaaacattgaaaagttgtggtctgatcagttaatttgtatgtagcag

SEQ ID NO: 9803 - DNA, 447 bp, Homo sapiens
  misc_feature (1)...(447): n = A,T,C or G
cgaattcaagttccccaaccgcctcaacctggaggccatcaactacatggcagctgacggtgacttcaagatcaaatgtgtggcctttgactgaaatcagccagcccatggcccccaataaaggcagctgcctctgctccctctgaaaaaaaaaaaaaaaaaaaaaaaaaaaaaaaaaaaaangccccccctttgaataaaaggggcccataaaacccccgaaaaaccccggggggggcctttaaaggcccccccctttgggggtgcccccccccccggttttttttttacccgggagggggcccccccccctgtctttttctaaaaaaaaaaaaaaaatccccccccttggtggaagggggggagtttttatgtggnnncaacnccttttgtggagagacactatgccaacaaaaactcatacattggattatttacagaagatag

SEQ ID NO: 9804 - DNA, 460 bp, Homo sapiens
  misc_feature (1)...(460): n = A,T,C or G
ntttgagacttttttattgcgcgcaangcgaaggagacaagattttctatttactcatctcatgatgtcatttgaagggcatgttcagatatcttataattataataggctcaagaatcagtctcaggtcactttacccaaaaacatttgaaaatctgaaccacaatctcctgaaagtttttctcctatagattgttgacaacacattgttttctggaggcatttgtgccattaggtttccatttatcttcagtttttttctttggtgtttgggatgtcttattttgttgccttatgtccttttcaatttaaaatgtttgagtttgtatatagttttgaaattggattatgtgttcattgttgtttagtttgcatttttgtcaaattatggttttgaaggttcatttggaacttactgttagtctgtaacagggctgcccttgtccaggatttatttata

SEQ ID NO: 9805 - DNA, 471 bp, Homo sapiens
  misc_feature (1)...(471): n = A,T,C or G
ggcgagccccgggggnccaaaccttgaaatttcattgantngccagcacangcggcggaaatctttgagatatctaaccatagcataacagtgcttgtgttattaacttcattttattcctgaacatactcattggcttggactttttttgaaagattttctgggggtgggagtgtatcttttatgagataaatacagagctggtacttttttaattcattctcaataccttctgctgactttgtttgattactgttttttgcgggtggttgaagaaagttccaggtgaatgtagatagttgtttcttaccaagctttgggccttggttatacattgtcattctcatgccaagatttgagggtatagttgtataaaagaaatacacagcacattcttggtgtgagggggagtaccttccatattcttcctttggccttctctacatattttttatagtccctcgacatgcg

SEQ ID NO: 9806 - DNA, 463 bp, Homo sapiens
atcgacaccataggaattgtagacatctagaaggcggggaattagttttagggacccttggtgttgctccttacctagagcccattaatctaccccatcaactctctgccatgaaagccatcttccaggagccctgttttttggagctgaactgcacagattatagctgctattgtacttaaataagggagaggaaaagaaggttctcaggcacagactttctatttttctcaagccaaaccagtttaaaatgtctagcagaatgaactgtatttccatttcttcatgtctacctgccttccccccacaccctaaagttgtacttgtttctagcaaactagaaggaaaagataggaaagcctggcactactaacctcacctctcatacacctctttgaaggccccagctcttttgttcaggcctctcttctcccctagactcactcagcttggtatccatcat

SEQ ID NO: 9807 - DNA, 458 bp, Homo sapiens
  misc_feature (1)...(458): n = A,T,C or G
cactgaaacatanangcntcgcggnggcannngaggaacctctttagaatttatccttagaattacagaattgagagcccttttattctatgatagatgacaagcctttagccattcatttaggcaaaacaataaaagtattcagtttttagatctgattaaactaaaaaaaacccacatatacccgccagaaacaaggtaataggtaagttactggtaataactttataacaaagagaaattcgaaactactcttattttataaaataacctcttgaacattttgttttcccagctgtcagtatgtaaaatgaccaagaaaatgatgagttcctccttgcatccccaacatttgcccttccagcaaacaattagtacttatccttcatgtaccagctcaaatatcttctgttgtatctttcacaacatgccttctttctccacaaagatttaggggg

SEQ ID NO: 9808 - DNA, 456 bp, Homo sapiens
  misc_feature (1)...(456): n = A,T,C or G
cttgaaccgatgccacagcacgngcggnggaantcttacagactcctactcaaaatggaatagatagtgatgagagntttcttttgttatctttaattatgacattaattgctgggcctggcttacttgatttggagagggtagcctcagagtggaggcagggaggaagggagaaggaagaagagaagagaattggagagatggagaaagagaatatgaattgaaacctttcatcattatgaataagaattcttgaagaagaaacaggtttgttcagaattggtttagtttttattatttctatccagtgccagaaaaaattgctcaaggaaattccatccaaccctttattatcccctaaaaatttttagtattacttcatagtttcttttttttttttcccgagaggggagtttcgcatttatttcccaggctgaagggaaggggggcaacctn

SEQ ID NO: 9809 - DNA, 504 bp, Homo sapiens
  misc_feature (1)...(504): n = A,T,C or G
agtggcnnnntttcgttgacgatcgtagngacgngcaanncaanntttaagttggctgtacttattcaatgaaaaagcaaaaaatacacataaatttgtttttttaagaaatagaattttgtgtctaaccatttaacaggtctcccttagtattttagaaagattttaagccattttagaaatgtgttatcattagttaagtcctcttaaatagattattattattttcctatagaaaatgcagaggcctgaggtgaacgcaagggtcataggcatccattaagatacataactatatagatatcttaaaactctgtcacattgtttccttaatcccttagacctatttcctcccatgaaaactatcataagctatgcttttgttatggtctatagaattttcaaaggacaaatttttttttttaggataaagatcttgtgattgtccgtgggctcacatggtttcttttgttcaattttttcaaaagatttctttttcaatcg

SEQ ID NO: 9810 - DNA, 466 bp, Homo sapiens
  misc_feature (1)...(466): n = A,T,C or G
cggcgagcccggntggcnaaaattagaccaataggtgacgtcnggaaanncncannnggngnnnagntngaaaaaggacttgtcagaatcaactgtgtcatcaaaatttaagtaatgtgcattgaaaataaggttgatcatgggaatatgcagaatttccaatgtatttttaaatacaaataaaattgtaatttagaatttttaatcttaggtttcttgattaatttataagagatcaattattgtcagtcttttttgtatgttttttaaaaacatagtccagagcatgggcagaattgacacctctcttttaagtgaaatttggattgctcacaaagcactaggaaatgtcatggggttcaaatatatatcctacacaactgggcaatacatttttggttgatttttaggtctgtgtatacattaacagttcatgtaattaatacctgatcatttgggataatga

SEQ ID NO: 9811 - DNA, 487 bp, Homo sapiens
  misc_feature (1)...(487): n = A,T,C or G
gtggtccnatgagnccattgagactctaggacangcggnggaattcatggaattcccttctgggaggtaagatattctttttaataaccttgtggaaagacatgttcatatgtcactcctctacactaactgagatgtgttaaataaactgggaaaagagtttgaaaatagaattttcaagcaactcaaagattatctatacacaaaacggttatttatatagaagtcacaagtagagaacatgttgctataatgttccccagaaaccatttattaattggtatgaacatgaaactaaaaaaggtttcctggcaatggtaatgctacatgttaaccacttagggaggaaacttcggattaatcttggacttttttaaggcattaatcttcacatacagttttcatgaggcaaggtttactctggcaagggccttaaatttcttttttttaaaatggcactggagccaccctaagtcagaactcattg

SEQ ID NO: 9812 - DNA, 534 bp, Homo sapiens
  misc_feature (1)...(534): n = A,T,C or G
tattagtccagtgcggtggaattcgacatagtaagcatagtaggagctgaaaaactagaagcaatgacaatgtcaactattttgagcaaaaagaagcagtgtcttcggaacatttgatcataaaaccagaaattaaaggatgagaaaaacatttttctgaagcttatactttcacatttcctagagagcatatttgtgtggatgggggtgggtaaacactcaacaaaagtttctttaaaaagaagaaaccatcctggtttgatgtaatcaatggttgcccactgctcccttcctgtgcctgtgacccttcccaaactgccctgttgcttgcaggctcgcctgagctgaaaggcagccctcacatcccgtcggcacctccctggggccttctttacaccctggagaacttcacagggaatctgtgtctgtaacacaaaggcttcctggtccagatgtagatactaaggctgacttggttattaagtcctgcggacttactctgccaaaattatttaatcatggtaaaataatttn

SEQ ID NO: 9813 - DNA, 504 bp, Homo sapiens
  misc_feature (1)...(504): n = A,T,C or G
aaggggnnnnnnttttatcgacatcactagtcagngtcgtggaattcaattttcagaattggttgcagtgacccccatcgttttcctcctattttctctagattcattattcagactattaacttatagtctccaatactttgtccttacatctcaataataaatgtattttgatctatttctttctttagattttgagggctttattattacagggtaatagtcctagatttcttaatattttgggaattctatcgtgaaattactgagtgatttggggaaagctatttttttgggaagaattgctttgcatttggtgtttagttctgtgtttttagtcctaaaccctatactcatgacaaattggacatatttgtgcttatgttgaaaaaactgaattgagattaatctttttctttctttttttcttttttagacaatcttgctctgtcacccaggctggaatgcagtggcacaatcttggctcactgcaacctttgcctc

SEQ ID NO: 9814 - DNA, 483 bp, Homo sapiens
  misc_feature (1)...(483): n = A,T,C or G
aattgaaaccctcgcagnggcngctgatggtcatcgaagcanacatcagagggctctggaggtacacagttgaaaaacagagcaacaggtaactatgatcaaaggacatcatcaagcacacagttaaaacacaggaatgcagttcagggaagcaaatcctcattgtcaaccagttctccagagtctgcaagaaaacttcatcctagaccaagtgataaactgaaccctaaaacaattaatccgtttggtgaacagtcacgagtgccttctgcatttgcagctatttactctaaaggaggtattccttgcaggtccattcggatgatgaagtgtttgaaagaggattgaatgctctagttcagctaagtgtcgttgttggtccttctctaaacgaccatctgaagcatctgcttacaagcgggagccttagcatcatcaaatctaaaattccaacatactgctccatatgctgttgaagaaggg

SEQ ID NO: 9815 - DNA, 490 bp, Homo sapiens
  misc_feature (1)...(490): n = A,T,C or G
aaatcgaaaacctcgaannnnccaactgatantcctcgaagngncgnggaattctttcttttcaaaaaaccaacttttcattttatcatttgtgtgtgagtgtgtgtatacacacaacatatatgacacatgccatgtgtgtcatatatgtatatatacatatatatgatatatatattcacttttttgggggtttttttagagatggagttttgcttttattgtccgggctggagtgcaatgggatgaccttgggttactgcaaactccgcctcacctgggaggcgaacctcctgcctcatcctcccgagtagctggaattacaggcatgcgccaccacacccggctaattttgtgtttttagaataaacggagtttgattacgttgaccatgctgggcgtaaactcccgacctgaggtgatttgcccgccttggcctcccaaagcactgggattacaggcgtaattgacaaaaggtgtgccaaacttn

SEQ ID NO: 9816 - DNA, 491 bp, Homo sapiens
  misc_feature (1)...(491): n = A,T,C or G
natcgagattcctaggccagtgcgaggaattcgcaggctgatcacttgagcccaggaggttgaagctgcagtgagctgtgatcataccactatactccagcctggataacagagcaagactcttgtttccaaaaacaaacaaaaaaaccagatcgcagactgtggatgccacattaccttgaagcatgcaatcgtaggctttcctgtctctccttcctaaggcatcccagaatccgagtggctcggagccttcatcacactcgtgtattgtgactttgctgctactatgcagtcctgcttccaggggacatctgcaagggagaaactccaagagttctttataagtctggagagtgctggtgacccaaaattattattactattatgataacagctttataatagctttattgagatataattcacatgtcataaaattcactctttttatgtgtacagatttcagtttattcacagagttgtgcaactgg

SEQ ID NO: 9817 - DNA, 464 bp, Homo sapiens
  misc_feature (1)...(464): n = A,T,C or G
agaagtgnntttganncccctnattgtagtcactagtccgtgcggtggaattccaggactgcacggtttaacacagcagagtacagaagggtgaagaagtgagcagaggcttatgaagatattcagatactcttctatgccaggaagcacaaagactttgttgagatttgcctcagttcagtagatcttccttggcagccagccataggttgtttctttgtcttccgggtcctaaagagcacagagaaaatggaggtccccagtctaggtaggaagctgattggatgaggacttctttttttccgacagcaggatggggctcttgggctccacacaccagatgctttggttttctacaactgttgctatgtgtagagggtgctcagagcgtggcatgagagcaaggagaccatggctactctttgaaatggatggggaaaattagcttaaaaatttaatcacga

SEQ ID NO: 9818 - DNA, 493 bp, Homo sapiens
  misc_feature (1)...(493): n = A,T,C or G
tggcggccnaggcggggnnggttgatccccctgagaccactgtccatgtggtggaattctattattccactgagtagctgaggcccatgagggaggtgcctgtccttgaacagccctttcctaaaaatcatcatcatcccattgtatctgctcccagaatgatttgattgctccatatgaacaagtcctataacactagtaacaatgataccatgagagaccgagccccgatggcctaagtaaggacgagacctcaagtcctttgaccctggatgcattatttctactatatcatagttccctccttgtaagactgatgtaagaatcaaatgagattatgcaagttaagcatttaaagcatctggcatagagtaaggacaaagcattagctacctcagtactacaattagtattgttatcatcaccctctagggagacttgcctgacttccttccatggtcacctcttttcctctgtcatcctatagatattt

SEQ ID NO: 9819 - DNA, 484 bp, Homo sapiens
  misc_feature (1)...(484): n = A,T,C or G
gggtnaatgagacatgatcacngtggnggaantcctgaggccccgccctctgggaaggagctgtggaggagaagcagccccatgctgggcacgggccagactgggtccaagatcctgatgccacccagatgtgcctccagggctctggccaaagggcgggctggagcctggagcccctgtcagcagccagccagggtgaccatcagctccccatggtggtccaataggactttacagtccagatgcaactgacagcttcttcccaactgcaatccccgcttttccacacttgagctcgtcctggcctgttgggccaggcttctggggtcttctgggggtggcttgtgatagaaacaatgctgaagcttccgcggagagcccgtcgcttgttgaggcccaacagacttccaggaaatcagggtttatcatcagttttgagaatggtcccagcaagctctggtcatacgaagtcctctcttccctg

SEQ ID NO: 9820 - DNA, 415 bp, Homo sapiens
  misc_feature (1)...(415): n = A,T,C or G
tattacaaggtaaattggaccttcttagtgataccaacatggtagactttgctatggatgtatacaaaaacctttattctgatgatattcctcatgctttgagagagaaaagaaccacagtggttgcacaactgaaacagcttcaggcagaaacagaaccaattgtgaagatgtttgaagatccagaaactacaaggcaaatgcagtcaaccagggatggtaggatgctctttgactacctggcggacaagcatggttttaggcaggaatatttagatacactctacagatatgcaaaattccagtacgaatgtgggaattactcaggagcagcagaatatctttatttttttagagtgctggttccagcaacagatagaaatgctntaagttcactctgnggaaagctggcctt

SEQ ID NO: 9821 - DNA, 509 bp, Homo sapiens
  misc_feature (1)...(509): n = A,T,C or G
gaggggnnnnnnnanttaagacatccgtacgaacngncgnggaantctgcagggctctgcgcgggaacgctaacctggtccggagcgagtctgggtctcattctctttgaacagcctttcacgagtcttcaagctttcaggctatcttctagtcaagatgagtgataagccagacttgtcggaagtggagaagtttgacaggtcaaaactgaagaaaactaatactgaagaaaaaaatactcttccctcaaaggaaactatccagcaagagaaagagtgtgttcaaacatcataaaatggggatcgcctcccaacagcagatttcgacattacctgagagtcttgattttaggcttgttttttgtaaacccatgtgtttgtagagattttaggcgtcttcggatatcttctcacctatgttccctggctaagaagtcagaggtagccaatgtttccttaaattcatttttaaacttaccattggtgcatatgttccagatggcagatgn

SEQ ID NO: 9822 - DNA, 479 bp, Homo sapiens
  misc_feature (1)...(479): n = A,T,C or G
aactgaaacctcgcanggcnactgacgtcctctgangngaacgnccctgctgcaaagttggtgggtgagagaatgggacttcctctttgagagtctggggagagaaaaggtggccaggatcctaggactgaatgactcgattttacctatttgagctgcagtcctgtttgcgctccttgaattggttaggaagctgcttccttttccctcctgcttcccttcagtctcttcaggaccacaggatggatatgcagacatgtggggtcattgggaagggagtgcgcttcttttctctgtcttagaaaagggagtcaagggttggctttggaattgggcctctggacagagtcagaatgagggaataatgaataggtcacatctggttggtggaaaactaggtgaagtgcttctttaatatgcactgtcttgtcttcccacgcaagatgtgacaatgtttgagaaaaggtgtgtcatactcn

SEQ ID NO: 9823 - DNA, 462 bp, Homo sapiens
  misc_feature (1)...(462): n = A,T,C or G
nttgagacccctgaagaccattagacagngcggnggaattctctgaatgttactttatcatgattgcactgcaactttttccttaatataactgcttttgtaagaacggtgatattggagtgattagtataaattcaatggaatttgagaagcaatggcagcgggataatttagagtcactgatattacgagaggggtctttttgtaaacctccttttcaatgtcaaagcaccaatttataaaacgctgcagatgtagaggttatgtgcaactgatctgtccagtttgtgtatgaaatggatttgataaagtttttgctagttatttactacattttgggattaataagtgatttatatgcatatttttctgtaaatctacagttttttgtacaagatattctacaagttatgaagctaagggaagaaaatgccaaagatacctctagttatgttgaacaca

SEQ ID NO: 9824 - DNA, 435 bp, Homo sapiens
  misc_feature (1)...(435): n = A,T,C or G
nttcgatcacatcgagtggccgtaattcccaggaggagcaagaaagttcaacgaggatctgcataaacagggttcctgagctcactgaaaagactattgtgccttaggaaaagcatttgctgtgtttcgttagcatctggctccaggacagaccttcaacttccaaattggatactgctgccaagaagttgctctgaagtcagtttctatcattctgctctttgattcaaagcactgtttctctcactgggcctccaaccatgttcccttcttcttagcaccacaaataatcaaaacccaacatgactgtttgttttcctttaaaaatatgcaccaaatcatctctcatcacttttctctgagggttttagtagacagtaggagttaataaagaagttcattttggtttaaacataaaaaaaaaaaaaaaaaaaa

SEQ ID NO: 9825 - DNA, 491 bp, Homo sapiens
  misc_feature (1)...(491): n = A,T,C or G
gcgcggccattgagnccattgagtaccatctagacagngcggnggaattcgggacaaagccctttctggtggcaaacggaaagagactttggtgtagagaaggctctgtgtgttaactgatgggagagactgtttgtttataaatgtgtacagttttgttttctcgtaaggggagcatcatagggttactttataccagttgtaacattttcattgtttttggttgttcttttttctttttttaatggcagctaaagatatacagattactgttaaattgcagtccttttttttttaaagatattttcttgaattatttagaacatggcaagcctggtattttttaatcaaacaaaatatttatgaaatgggttttctcttaattctggattcatcatggctttctaataccaattgtaatatttacaatattcaccaaaacttagaattttgcaaatgctggaattctgccagtgtttctttgctaagcc

SEQ ID NO: 9826 - DNA, 442 bp, Homo sapiens
  misc_feature (1)...(442): n = A,T,C or G
cttgaggatcatgacccttagcccagngcggtggaattccacagcagtactgcagaaatgagctgcaaattccaagcaacatattgagtttgtgatttatttgttttccaggcaggccaattaattgttttgctgtgatgctgccctaaattgtaaatagaaagagcaagaaaatgaattgtcacattctgtgcctgtgtctcttgctacttaggatgacaaaagcagtttctgctccgactgcaagtgatattgtaaaatatgagaattaggctggacctaaatgtgttggtcagtgtgtttcagaggtgcgttttagaatggctttaaagacattgtactaagactttactaccagtaggttctggagagaatgttataagacaggaaaaaggaaaataattcttatttcatgcctatcatgtgtgctttctttcttgaa

SEQ ID NO: 9827 - DNA, 417 bp, Homo sapiens
  misc_feature (1)...(417): n = A,T,C or G
cggattatgtctgctgtcatgtctgggtctttagggtaggacaggctgtggtatgagaggcaggagtctccacaaggcttcgtgtggccccttatagggcaggccctgccctctgggaaggtcccttcatgctggaggcacacagctttaaggaagtaggttgaagtaggactccttcgtcctctcactggctttggctccctcaataaactgtgtgggaacctggctcagtgtctgtctctctctctcactctctgtttttcctatctgaggtctttcatctcctcacttcaggaaaacacagttcagcaaagtcttcagatgcgatcctgtgtaggagaaaatacccttctggtgccccatgagaaagggaaataccanaaccatttgttcactgagccttgcaatatgtgctcn

SEQ ID NO: 9828 - DNA, 417 bp, Homo sapiens
  misc_feature (1)...(417): n = A,T,C or G
cataaactgaaagctgagcgtgaacgtggtatcaccattgatatctccttgtggaaatttgagaccagcaagtactatgtgactatcattgatgccccaggacacagagactttatcaaaaacatgattacagggacatctcaggctgactgtgctgtcctgattgttgctgctggtgttggtgaatttgaagctggtatctccaagaatgggcagacccgagagcatgcccttctggcttacacactgggtgtgaaacaactaattgtcggtgttaacaaaatggattccactgagccaccctacagccagaagagatatgaggaaattgttaaggaagtcagcacttacattaagaaaattggctacaaccccgacacagtagcatttgtgccaatttctgggtggaatggtgan

SEQ ID NO: 9829 - DNA, 465 bp, Homo sapiens
  misc_feature (1)...(465): n = A,T,C or G
ngaaaaagaacctcgatgaacactagcttgatgtgccgtaattcccacggngacagaccaggtggtgggactcggcctcgtcgccgttagcctgatcatcttcacctactacaccgcctgggtgattctcttgccattcatcgacagtcagcatgtcatccacaagtatttcctgccccgagcctatgctgtcgccatcccactggctgcaggcctcctgctgctcctgtttgtgggactgttcatctcctacgtgatgctgaagagcaagagagtgaccaagaaggctcagtgaaggtcccgcagggatgaggctgccagccccttctctgcttcccctccagcacagggaccaagtgggggagcctgcagaacctgtccaggcacagtggctcctcaagcctgcctgtcctgcagagtccccatggcatggagcttacacctgactgactggagccccctccn

SEQ ID NO: 9830 - DNA, 472 bp, Homo sapiens
  misc_feature (1)...(472): n = A,T,C or G
ggctgcccnnggtttgagacctttttgagaccttagaacagngcggnggaattcgttggtaatcggctcagcgaatggcagtgtgatgcaggcttttgcataggctgcaggagcagtacaggtggcctacattacacaagtgaatgaagattgtgtgggcgacggggtctgcgtgaccttctggagaagcagccctttggatgttgtagataggaacaacagaatcgcaatcttattaaaaacagaaggaattaatttggttacggccgtgctcactaacccagttactgcacagatgcgaatcaaagaagataggttctggacatgtgcctatcgcttgtattatgctctaaaagaggaaaaggtcttccttggaggtggtgcagttgaatttttgtgtcttagctgtcttcatattcttgcagagcaatctctgaaaaaagaaaaccatgcctgctcaaggcggatgact

SEQ ID NO: 9831 - DNA, 507 bp, Homo sapiens
ttcagtccaagatgacagaggttctgctgatataacattgttagaaaccttgtgggtctcctatgtatattttgggggttcttgtcattagacaagagggttctctatagagcttttctggataatcccatctccattcctaccttctgcttatggttggctgaaggaattcatgagtcacactcctgatcccttcagcatgactaagaggttgtcctgcaacatgcttgactttctctccacagcatgcttttcttaacagtgaatttcctaattttaacatattttgttggctgggtgcggtggctcatacctgtaatcccagcactttgggaagccaagccaggtggatcacctgaggtcaggagttcaaaaccaccctggccaatatggtgaaaccctgtctctactagaaatacaagacatacaaaaaactcttaagccggcccttacaatgtagggccccgttacaaccccgggtacaacccgaagggtgccctataatgg

SEQ ID NO: 9832 - DNA, 472 bp, Homo sapiens
  misc_feature (1)...(472): n = A,T,C or G
gggttttnnnggatcgatgacccnattgatgagccgtggaanncggcaaggggcagatcgagaagaggaagctgcgggagaagcggcgctccaccggcgtggtcaacatccctgccgcagagtgcttatatgagtacgaagatgatgaagcagggcagacagagcggaaacgagaagatgctattacacaacagatcactattcagaatgaagctgcaaacttactagatccaggctgttcctatctgctacaggagccacctagaacagtttcaggcagatataaaagcacaaccagcgtctctgaagaagatgtctcaagtagatattctcgaacagatagaagtgggttccctagatataacagggatgcgaatgtttcaggtactctggtttcaagtagcacactggaaaagaaaattgaagatcttgaataggaagtagtaagagaaagacgagaagacctatgact

SEQ ID NO: 9833 - DNA, 416 bp, Homo sapiens
ccatttggtgcaagcaaaaagcaatcagcaattggacaggaaaagaatggcattgaagcagatttccagcaacaagtgctttgggggattgcagaaagtttttgaacatgacagtgttgaactaaactgcaaaatgaaatttgctgtctacttaccaccaaaggcagaaacaggaaagtgccctgcactgtattggctctcaggtttaacttgcacagagcaaaattttatatcaaaatctggttatcatcagtctgcttcagaacatggtcttgttgtcattgctccagataccagccctcgtggctgcaatattaaaggtgaagatgagagctgggactttggcactggtgctggattttatgttgatgccactgaagatccttggaaaaccaactacagaatgtactcttatg

SEQ ID NO: 9834 - DNA, 415 bp, Homo sapiens
  misc_feature (1)...(415): n = A,T,C or G
ggcatcggctctgctgctgcggagcccccgcctgcccgcccgggagctgtcggccccggcccgactctatcacaagaaggtggttgatcattatgaaaatcctagaaacgtggggtcccttgacaagacatctaaaaatgttggaactggactggtgggggctccagcatgtggtgacgtaatgaaattacagattcaagtggatgaaaaggggaagattgtggatgctaggtttaaaacatttggctgtggttccgcaattgcctccagctcattanccactgaatgggtgaaaggaaagacgtgctggctgaagatgcaatcaaggccgccctggctgattacaaattgaaacaagaacccaaaaaaggagaggcagagaagaaatgagccctcccttcgcgaagcctccagt

SEQ ID NO: 9835 - DNA, 524 bp, Homo sapiens
  misc_feature (1)...(524): n = A,T,C or G
tctattttattcccaatgcgttccaagaagatttttggaagcgtgcatccagtgagaccaatgaggcttgagtcttttagtgcctgcatttgggtcaaagccacagatgtattaaacaaaaccatcctgttttcctatggcacaaagaggaatccatatgaaatccagctgtatctcagctaccaatccatagtgtttgtggtgggtggagaggagaacaaactggttgctgaagccatggtttccctgggaaggtggacccacctgtgcggcacctggaattcagaggaagggctcacatccttgtgggtaaatggtgaactggcggctaccactgttgagatggccacaggtcacattgttcctgagggaggaatcctgcagattggccaagaaaagaatggctgctgtgtgggtggtggctttgatgaaacattagccttctctgggagactcacaggcttcaatatctgggatagtgttcttagcaatgaagagataagagagaccggagagcatagttn

SEQ ID NO: 9836 - DNA, 489 bp, Homo sapiens
  misc_feature (1)...(489): n = A,T,C or G
gcgggnnattgagccatcgatgacattagnccagngcggnggaattcctttgagccttgatagctgaggcttctgcataaaacagccctctgggtaaattctcaaacttgccaactcaaaaggattgacagatttcctgttgtcttgcctgcacttgtccccagttaagaggaggttgagatcaatagtaccagcaacataacaggtaaagctctgtggttggtttgtatgggccagttagccctgccagctgtttctgccttctcatgtctgtcctggatcctagctgggtctctctgagtggcctcccctgatcgagaaagcatctttgtcattctttagcatcaaacctggtttctcccagtgtggggagagccttttgtctttggagttgggcctaacctgtccctgctgtcctttctcctctaggttgtgcgttgagacttggacacctgctgagggcactgtgcccctttcctgggtgtggaa

SEQ ID NO: 9837 - DNA, 486 bp, Homo sapiens
  misc_feature (1)...(486): n = A,T,C or G
agggttacctgagacatggtcacngtggnggaanncagaatagccaagcaactctacacccgctttagcccccacaaaaacaagcggattgcactacaaataatttgcctatttggaaaatgaaagcttctctgtagtttgaggtcctattttttctttaagttgttacagtcttttcatggtccttgaggtctaggttaggtttttgtttggggtaatttttgtatcctatggatactatttaatctttagtattgagtcagtatttctcacttaggccttaggggaatactgcctgaagtatgtagggggcatgcggaattcagacgtggcttggaaactgcaccatgggttcacccaagaaacagaccagaggcaacacattctatcactaaaacgtgttctcagttacacttcccttccaaagcaggattatttgtgcccatgagggaaacacgaaggattgtcagtattcatttgctatcn

SEQ ID NO: 9838 - DNA, 504 bp, Homo sapiens
  misc_feature (1)...(504): n = A,T,C or G
aagggtnnnnnnnacatagagacctacgtagngcgggcaanncggaacatgtaccttcatgttgtaaagttaatagagataaatatttttatcaaaaattttatatacacagcctttctttagcattgatttaatttcagaacatcttcatattgattattagccataaagtttctaacatgaaacatttatctataaattttgtgattatagtagtggaatacatagaaaaaatatgctttcaactttgtgagtgaatttcgtgttgtgtaagttatatgtcaaatctttgaattttaattttactcttttatacatgtgataatttcataaagtgagggatcccaaaaaaagagtttcatccaacattcttgttctgcaggttgcttttataaagaaggtgaactattttcatgtaatgttaagagttaaacttatctttcccaaatataactttattattagcttgggaaaaatgaaattgtattcccatttttaaaatan

SEQ ID NO: 9839 - DNA, 462 bp, Homo sapiens
  misc_feature (1)...(462): n = A,T,C or G
atttgagaccctaggacagtggagtgccattcagaaancacgaaggagggatcccagcctgcttacagaacaaaccaacaggacagtgatatcgaagcgttggccaggtgtttggaaaatgtcctgggttgcacttctctagacacaaagaccatcaccaccatggctgaagacatgtccccaggaccaccaattttcaacagtgcgatggccaggaccaagatgaaacgcatgagggaatcacccatgcagaagctggggacagaagtatttgaagaggtctatagttacctcgagagagcgaggcatccgaatgctagcgactcagaaatgccctagtgatagacaaacgtggtgcctcaagccagcgactgttttgaagtggaccacctcctgtactttgaagagcagctgctgatcacgaagggaaaagaacctactctccagaaccatctctaggcn

SEQ ID NO: 9840 - DNA, 416 bp, Homo sapiens
gaattgggaaaccataacgtacaggcaaccacccttccttgcccttcgtaaaatggagcaccactttttggccactatcggcttgttctttgttgttgctcaaggtggtaaagagagccagggttcccacttctgcccttggtcttttgtaggttactctggaagaagtcaactcccaaatagccctagaatacggccaggcaatgacggtccgagtgtgcaagatggatggagaagtaatgcccgtggttgtagtgcagagtgccacagtcctggacctgaagaaggccatccagagatacgtgcagctcaagcaggagcgtgaagggggcattcagcacatcagctggtcctacgtgtggaggacgtaccatctgacctctgcaggagagaaactcacggaagacagaaagaag

SEQ ID NO: 9841 - DNA, 440 bp, Homo sapiens
  misc_feature (1)...(440): n = A,T,C or G
attgangatcgattgcccgtgcggnggaattcgttgattccttggtgacaagtgcaatggggtatgggtagaatttattttcagagccaagaggacttgatggttataaataaagttgcctttagcaatggaatttacagatcgatcatgttgttccgaaagatgtgaataggatccacaataacaagttgattcagactaatgtagatatttagattagcaagtattgaacatttgatttcttagactgaggttttaaatgaatttcattatttctcccggtaatacacagagcatcgggattaggaaattagccattttggattctgtctgccacaaacagacctattctaaacagtgctattaaattttagactgttgttcaaatattttattttctcctaaactactttttatggtgatgaataattaagaccatt

SEQ ID NO: 9842 - DNA, 490 bp, Homo sapiens
  misc_feature (1)...(490): n = A,T,C or G
agggttaaatgagacattgagactctagnccagngcggnggaattcccgccattgtaagaacatgccgtacccaaagtctcgcttctgccgaggtgtccctgatgcctagactcgcatttttgacctggggcggaaaaaggcaaaagtggatgagtttccgctttgtggccacatggtgtcagatgaatatgagcagctgtcctctgaagccctggaggctgcccgaatttgtgccaataactacatggtaaaaagttgtggcaaagatggcttccatatccgggtgcggctccaccccttccacgtcatccgcatcaacaagatgttgtcctgtgctggggctgacaggctccaaacaggcatgcgaggtgcctttggaaagccccagggcactgtggccagggttcacattggccaagttatcatgtccatccgcaccaagcttgagaacaaggagcatgtgattgatgccctgctcatggccaagtn

SEQ ID NO: 9843 - DNA, 456 bp, Homo sapiens
  misc_feature (1)...(456): n = A,T,C or G
cattgacgaccacnattgaagngcggtggaannctcaccagccgacaccaagaagcagagatggcccagaatgcagttcgccttcactatggactaccagttgtggttaagctcttacacccaccatcccactggcctctgataaaggctactgttggattgattcgaaatcttgccctttgtcccgcaaatcatgcacctttgcgtgagcagggtgccattccacgactagttcagttgcttgttcgtgcacatcaggatacccagcgccgtacgtccatgggtgggacacagcagcaatttgtggagggggtccgcatggaagaaatagttgaaggttgtaccggagcccttcacatcctagctcgggatgttcacaaccgaattgttatcagaggactaaataccattccattgtttgtgcagctgctttattctcccattgaaaacatccag

SEQ ID NO: 9844 - DNA, 562 bp, Homo sapiens
  misc_feature (1)...(562): n = A,T,C or G
cgcccaccgacgaccccgcggtggcagcacggccgaccagacctctcctctccgattcagacgtgcttatcncnccccaccnccccaggccncccccccaattgagaccntgcgttgagcgccgtcagccacagcaggagaaaagaacctatttatttaatcaaacattggccgagctgagaacatattcagggaaagttactccaaaataatagttaattcccctttaaggtgcttctggaccattgggatctgcttattccattgacaatgaaaacttcataaacctcagataagtagttgcttacataccagcaaaaatatcccttagcacttcctaggaagggacactaaaagtaatcgcctttcccacccttcattcactacacactctgagcctcatcatgcaaaaatacctaggagccaattttaaacatagaattcttttagctgttgattcacaaaatgtcttaggatgattaatttctaaaaatatcctcaaaggtttgagataataaagccacagcagtgttttcaatgcggcttccaagataagcaataa

SEQ ID NO: 9845 - DNA, 453 bp, Homo sapiens
  misc_feature (1)...(453): n = A,T,C or G
actcgagaccactagtcagtgcgccgtaattcgccgaaagtcctgcaaggtcataaatctttcagagtgacatcaccaactgtactgcatcttactggatttaggacttctgagatgcttgtgaagtatagatggggttgtggtcttagattgacagcattagagaagactggttagaacatctggtctcgctggttagtgcctcgttggctgaggactaggtgtgcatttctcctagcttttcatcaggaaatcccaaagtttccaaagctttttgtttacagaataaaacttcaaataaaaccaattcattatttgtccagaaggaagcttggctgagctggccttttaacataggaatgtatttcgttggaaacattctgaaaaatctcagagaactgaacccttacaaactttgttttccctcataaccaaagcttcaggttagaagtn

SEQ ID NO: 9846 - DNA, 481 bp, Homo sapiens
  misc_feature (1)...(481): n = A,T,C or G
tgctggtcggggnncatagagatcgtcgccatggcgagaaccggagaatacctgattctcccatctgcaagggagagctttgctgaattccatcccaaagtcaaacatgggcaagaggtgaggatttcacttttaccctcaagtccgatttgtctgtgattttaaactaactgtgtatgtattgatgtttggaagattgtttgaattttaaagtgataatagtacttaatgttatccagtattgttcattaaatggtgttatcctaaagctgcacttgggatttttacctaacgctttactgattctctcaagcacatggcaaagtttgatttgcactccgttcatttctgacacgttttgctgcctcctacctttctaagcgtcatgcaaattcgagaatggagaaggacgctgccggtccctgagcggtgtggagagggcggaaggtggactccagcgcagcttgaggggctgaggacg

SEQ ID NO: 9847 - DNA, 488 bp, Homo sapiens
  misc_feature (1)...(488): n = A,T,C or G
gtgggnaatcgagaccatggtcactgtggnggaattcatttataggaggcagattttcttgcttaagtttatgcttttcactggtgctcattgtgtgtcaaatgattgacattcagtaaaattcctcttaacagaagttcattgggagcaagaattgggaggccataggtgtggaatttcaatatcatggcctatgtctcgtggaaaacggggccctgcagccagccaaatgttgactcctttgtagggtatggtatctgtctgaatctgtcagcttctcccatcatataagatttcatatgcaaacaagtaaacacttacttagaacacatccctcagtgttctcattaacagaccatgtgtgaagcacactcctactgatgtctaaatagagtgacttgtcatgcctcccatatattctaatgggttgagaaaaagtaaacaaagactgtttcttttgaggggaagcagtcaccttggtctttgan

SEQ ID NO: 9848 - DNA, 487 bp, Homo sapiens
  misc_feature (1)...(487): n = A,T,C or G
gaggtnaattgagcccttgagactctagnccangcggnggaattccaggactgaccgcccgtgtgtgcacagtttgttcttggacgaggactcgtgaggatcgagggctggggaccccggtgtgagcaggatggggccctgccctcccgtgggagttgtggactcgagcccaggggctgcccgtcacagcggtgtcccaggtccctgccatccgattttacctgggatgtcttctctggagtttggaattgcttgaggaaccctgcgtgtgcttggagaggccagagggcttgctgagaaccccatggacagtggagagcgggattcgaaccaagggctggactcccacacctctggcctgcgtcgcccagttctttgtggctctgaagaattggccgctgtggaaaagagcaaatgtccgagacccccaacaggaagagtctaaaaatccagtttgcaaccacttctgacctacaaaaaaatggan

SEQ ID NO: 9849 - DNA, 490 bp, Homo sapiens
  misc_feature (1)...(490): n = A,T,C or G
agcgttaaatgagaccttgagactctagnccagngcggnggaattccgtggacttgcgagtggagtgtccgctgtgcccgggcctgcaccatgagcgtgccggccttcatcgacatcagggaagaagatcaggctgcggagcttggtgcttatctgaaatctaaaggagctgagatttcagaagagaactcggaaggtggacttcatgttgatttagctcaaattattgaagcctgtgatgtgtgtctgaaggaggatgataaagatgttcaatgagagatgaactgagtggtatccctactcttgatcctggaaccagacaagcaagaagctttgattgaaagcctatgtgaaaagctggtcaaatttcgcgaaagggaacgcccgtctctgagactgcagntgttaagcaaccttttccacgggatggataagaatactcctgtaacatacacagtgtattgcagccttattaaagtggctgcatctn

SEQ ID NO: 9850 - DNA, 473 bp, Homo sapiens
  misc_feature (1)...(473): n = A,T,C or G
nttcgagacattagnccattcgctgaccttagtccgtgtggtggaattcgcaaaaagagccaaggaagccgcagaacaggatgttgaaaagaaaaaataaagccctcctggggacttggaatcgaaaaaaattaataaagaaaaatatcatttaaaagagagaaaaatataaaaatgaattaaaaacctgggcttttggatgaatgggggctaacaaaccccggtggatccttggggtggggctttttacgctccgccattattttggaggccccccccccggatttttttgggggggggggggggcccccctcccgttttttttaaaaaaaaaaggagaaatgaccccccctgggggggggggggtgtttcttttagggggacatttataccgggttcatcaggttggaatctagcacaaatgcctcacttactaggttaattggcctttgtggatagcgaatcagtttgan

SEQ ID NO: 9851 - DNA, 462 bp, Homo sapiens
  misc_feature (1)...(462): n = A,T,C or G
catcgagcaccctagttcgagagcaggaattcagcgaaagagatgctggaggagttggtgtcagaaaagaaggtgatgtgaggatagaagcagagattcgggtgtcatcctttgaagacagaagaatgcaccacaggccaaagtgtataagtagtcactagaagctgaaaaaggaaggaactgagacccctcagagccaccaaaaggaactagccttctcatcacctcgattttagcccagtgatttctgacatcaagaatgagagtatatagagttgtgttgtttttaagcttctaaatttgtggtaatctgttacagtcacaataggaaactaataagcagccctctctagatacactaccaggaaagctcctccatttcctgctagtacatgtttctaggtcttgcataggtaccaggttttctggtatacaatcctttctcttcctagcagncctagn

SEQ ID NO: 9852 - DNA, 411 bp, Homo sapiens
  misc_feature (1)...(411): n = A,T,C or G
agaatgctgtgatatgaatatttagtatattttaatcatgataaattatacatccttctaccttatgataatggattttaagatctatgctgttaaactctatatttatcctttaattcatatcttgcttattttacatttatctgagaatacattgggtctactaaatctttactatcattcacaagtcttacatcttaagataacttttcaataaaataaaaattcttcattgcacctagaaaggagcagggttttgaaagcgatcaatgattactctgatacctaatataataatataatatagtaaaaatcaaaatacttgaatgaaaaatgtaaaattaatagntttgctttcattgtttttattccagcgtctattttagaatgtttttactctaattgtggttt

SEQ ID NO: 9853 - DNA, 459 bp, Homo sapiens
  misc_feature (1)...(459): n = A,T,C or G
ntttgacgaccacttggacagcctgtgtggaattcgctgagaatactacatcttagtggtgacctttagccacgtgggtgaagtggcaaaggccatggccatatctgttgtcccaggccaaagactaacaactgccttgggaatcccttccttgtgtccttaccaaatgatagctcataaaactctgataatgtaacaaatcactttcaaaggagttcccagaagtcttcagaaagactaaaattctgtctcttcctgctttagacagaattttagcntttctgaaaactaaaattatgtctattgcatgaatagacagacttctaccgaaccagaaaaccactaagatgttgttggagcaaacgctcaaccttcatcagagacaacaattcttttttcctttaacgcaacatactatactagatctctcaacgaaccaatcggaattagctttacccg

SEQ ID NO: 9854 - DNA, 464 bp, Homo sapiens
  misc_feature (1)...(464): n = A,T,C or G
ganngataatttganncccctntttgtagtcactagtaagtgcggtggaattcaaaattattacgacgtttatattgttccctttttaagcctgccttactcttgtcttttgtcattgtctatggtttaatgaagaacacaccaaactaacatttttgtttattttgaggaacaaaaaaacttttctcttttaagggaagttactacacattgagttagtaactactctttcagtcaaggttccttaatcagtccagtctacatcaggactatgacttggggggcggggctaatcctttttgctgttctgagctactattgtcaactgctgttgtacatactgttatgtgtaatggcgtaaatatatttattatgtttgtaaaattcattgcagatcaaggttgctcttctgtgatatatgggatattatgttttaaagaccatcttggaatacaattagagaa

SEQ ID NO: 9855 - DNA, 466 bp, Homo sapiens
  misc_feature (1)...(466): n = A,T,C or G
cccccatcgagaccctatgatgtagggcgaattccaacttcttccttgcatcatatgcattgatcaatttttcagtattccatgcatcacttgcaaaatctccaggatggcgtcctgcattcaaatactacaacatgtggatatcacttcttggagcaattctttgttgcatagtaatgttcgtcattaactggtgggctgcattgctaacatatgtgatagtccttgggctgtatatttatgttacctacaaaaaaccagatgtgaattggggatcctctacacaagccctgacttacctgaatgcactgcagcattcaattcgtctttctggagtggaagaccacgtgaaaaactttaggccacagtgtcttgttatgacaggtgctccaaactcacgtccagctttacttcatcttgttcatgatttcacaaaaaatgttggtttgatgatctgtggccatgn

SEQ ID NO: 9856 - DNA, 459 bp, Homo sapiens
  misc_feature (1)...(459): n = A,T,C or G
nttgtagacctttgtagacactaggccangcggggaattcctaagggtctagagccagctagtcaggcttcctggtgccacgccctgtccttttcccactctgccacactgctctgattcttttcactactgatgttatctaaatccgcgttgctgtgctgcttttttcagttttccaatgaacttgaacttcacattaaatgcattggccgaggaagtggtacagcttacactgttaattattatcctaaatactcgctgaacttgtcagttttcatttaaaagattttttcctctctccccagaaaagcacttggttctgcttcgagatggaaggacacttataggctttttaagaagcattgatcaatttgcaaacttagtgctacatcagactgtggagcgtattcatgtgggcaaaaaatacggagatattcctcgagggatttttgtggtcan

SEQ ID NO: 9857 - DNA, 450 bp, Homo sapiens
  misc_feature (1)...(450): n = A,T,C or G
nattgaagaccactagtccacgtggtggaattccgagagataaagattctatccgacgagtagtacaacacagcaatgtggtcatcaatcttattggacgagactgggaaaccaaaaactttgattttgaggatgtttttgtgaagattccccaagcaattgctcaactgtccaaggaagctggagttgaaaaattcattcatgtttcacatctgaatgcgaatattaaaagctcttctagatatttgagaaataaggctgttggagagaaagtagtgagagatgcatttccggaagccattatcgtaaagccgtcggacatctttggaagagaggatagattccttaattcttttgcaagtatgcatcggtttggtcctataccccttggttccttgggctggaagacagttaaacaaccagtatatgtcgtagatgtatccaaaggaa

SEQ ID NO: 9858 - DNA, 488 bp, Homo sapiens
  misc_feature (1)...(488): n = A,T,C or G
tgagttgccnnaggnnngnnctccgtgaccctcgcggtaggcctcngaanncanggattncaagtgccgnncctaaggttacctcgtcttcctctgcctgtttcaactcagatttcatctactgtgaactgaacggagcgtttgccacaggctgtggcaggggagcaaagctaccctcatgtgcccagggaagccacacagaactgttcacagccaagcagaatgaggcgccaggtccccggaactctggcgtcaactacttgatccttgatgatgatgacagggaaagaccttgggaacctgcggcagctcatatggagaaggggcagtgggacaagggcgagtttgtgacgcccctcctggagactgtctcctccttcaggcccaacgagtttgagtcaaagtttcttccccctgagaataagcccctggaaacagcaatgttgaaacgtgcaaaagaactgttcaccaacaacgaccccaaggtc

SEQ ID NO: 9859 - DNA, 465 bp, Homo sapiens
  misc_feature (1)...(465): n = A,T,C or G
aaaaactgaaaccttccgaaannactggagacactagtacagngcggtggaattccagaaccggagaccttggcctcctcaggctcccctctgactcaaacaaaagccggaattggaaagaccacccctttgatgtgttcgctgtaatcgacgtcctgctttcctcaaccgcccattcccttagccttcttagttgacaggaatattgagtatttgcaaggatgcgaagccagaaaaaaaaaaaaaaacttttaattttataaatcgccccgctgcgtgcgcccgtttgtccgtacagcgcggggcccaccccgagagagggcctggattcaccaaggctgggggccttgagggctttttagggcacgtgaaaggaaaatggagttaaagttgggtcggaataaaaagggggatcattttgcactcaaggaattgaaaaaatcccgttggtaccgcagtttccaa

SEQ ID NO: 9860 - DNA, 476 bp, Homo sapiens
  misc_feature (1)...(476): n = A,T,C or G
gannaagaatcgaagaccctnggnattttgagaccttagtccagngcggtggaattcccggtgagctgcggagagctcatggaaggcgagtgggaacccggctgcctgcctttttttctgatccagaccctcggcacctgctacttaccaactggaaaattttatgcatcccatgaagcccagatacacaaaattccaccccatgatcaagaatcctgctccactaagaatggtgctaaagtaaaactagtttaatatattaaaataaaaaaacttggaaaagaaaacaaaaagacaatgacaaaagggtggggccccgccttcaagacaaagggccccttaaaccccctttaactggattaaagagggcttttaaatggccccccattttggagtcccccccccccgggcgttttttgtcctggggaggggcccccttacagtttcttatttaaaaagaagagggagaaggcggg

SEQ ID NO: 9861 - DNA, 421 bp, Homo sapiens
aacatactacaaaatgtggaatgattgacctttaattctacctgggctggaggttcaagaaatggacagaaggggtcactacatgcacaggaaagaatttcctaattttactagtagagctgatgttgaaggagaaatatgtgctgtaacaagagaacttcaaagtaggatgaatgaaggaaatcttacccccctaataatatggaatttatgcagaatcaatttttacttcagaaggtcagtaaattctgctttcatctaatgtctttacatgtagaattatttttcattatcattgttcttacgttttgtagtgattactctgttgtttatcaagtaaatgataacccgttaccatcagcatcacttttcttgtgatatatagctaactttcagtgatgtacaaaaatatttatcaact

SEQ ID NO: 9862 - DNA, 459 bp, Homo sapiens
gtagagtaccctttgatgaccctctagacagtgtggtggaattcgttaatagagcagtttccagaatctttctttactattaaagaccaagagaaccagatgctgaatgttcagttctttcaagagttgggactaaaaaatgtggtcattagcagacttttgacagctgcacctaatgtttttcataatcctgttgagaagaataagcaaatggtaagaattctccaagagagttatctagatgtaggtggctctgaggccaacatgaaagtttggctactaaaattgttaagccaaaacccatttattttgttaaattctcccacagctataaaggaaacactagaatttctccaggagcaaggtttcaccagctttgaaattctccagcttctatccaaactcaaaggatttctttttcaactttgcccaagaagtatacagaatagtatttccttt

SEQ ID NO: 9863 - DNA, 471 bp, Homo sapiens
  misc_feature (1)...(471): n = A,T,C or G
ggactgtcccggatggagcccctaccgtagctcctcgnnaangccgnggaannccatcttaccttccatcagaggagcctcaccgtacccaggaagaaagttggtgaaagtggaatgtgaaacaggtggctgggacccagaaaccctcttaccctgcacctctgtcatacttctcccggggcatagggagagctattctgcttctctttgccttgatttgtaacatggggtagttgttggtgcagccatgttgtgctgagtgaacatatattaagatctttggaacctttacgagactgaaaataggtaagtatgaattagtatttctggaatggtattcagagaacttcgtaccatttttataaatgtgaaaggtaacctaattagaacagcttggcacttgtcagtacactactagatttcaaaatcagatcctacttacagggagaaaaaaccttcccaatatgccgg

SEQ ID NO: 9864 - DNA, 479 bp, Homo sapiens
  misc_feature (1)...(479): n = A,T,C or G
tggtgtaanccaggnnngnnnggtttgagaccacatgatggcgtggaanacgacagncaccacataccatacttagagttcctacagaaaggacacagcgaatttcatgtttgagactcggtttctttgcccagtggatgcataggcaaagcatcgcacatctgctccatagaaatgatcctggctaacacggtgaaaccccgtctctactaaaaatataaaaatttagccgggcatagtggcgggtgcctgtagtcccagctactcaggaggctgaggcaggagaatggtgtgaacccgggaggcggagcttgcagtgagccgagattgggccactgcactccagcctgggcgacagagccagactccgtctcaaattaaaaaaaaaacactagaaaacatanccggcgcccccaagatcaatggggccctgtaaaaacccgggaaacagcctgaagagctctttaattaacacaacg

SEQ ID NO: 9865 - DNA, 472 bp, Homo sapiens
  misc_feature (1)...(472): n = A,T,C or G
nttcgggaccanagnnntttcgtcggaccatagtccatgtggtggaattcccatcaccgaagcgggagcggccaaaatgaagtttaatccctttgtgacttccgaccgaagcaagaatcgcaaaaggcatttcaatgcaccttcccacattcgaaggaagattatgtcttcccctctttccaaagagctgagacagaagtacaacgtgcgatccatgcccatccgaaaggatgatgaagttcaggttgtacgtggacactataaaggtcagcaaattggcaaagtagtccaggtttacaggaagaaatatgttatctacattgaacgggtgcagcgggaaaaggctaatggcacaactgtccacgtaggcattcaccccagcaaggtggttatcactaggctaaaactggacaaagaccgcaaaaagatcctcgaacggaaagccaaatctcgccaagtaggaaaggaaaag

SEQ ID NO: 9866 - DNA, 477 bp, Homo sapiens
  misc_feature (1)...(477): n = A,T,C or G
ccccgcccgcngccntttgagaccctattcgtagacactagtccgtgcggcggaattcgcagtttttcgtaaagactggatctctgtgttacccaggctggtctcctgggctcaagcagtcctcctgccttgacctcccaaggtgctgggattgcaggcgtgagccaccatgtcctgaccccagtttgttttaaagccaagcgatgcaccaagatgtttgggtgcacatctgacagtggtaatctttgggtcagggaattatagataaattttctttaaattttttctgagctttctaaaatcagctgaaaataaaaccttatttttttatgctcagcgtcgtcttttttaagataaagacattgacatgattcaaaattatgaaaggtgaaaattcttcccacccagttaccatcctctgtcttttcagagggattctaggcatgttcaagaaaatatagcatactgctctgagtt

SEQ ID NO: 9867 - DNA, 475 bp, Homo sapiens
  misc_feature (1)...(475): n = A,T,C or G
gccccccccgcnnnnnnntttcgagatccatagttagagtgccgtaattccggcgagcccctcagcctggttccttcctcttgtttttcttggaaacacacactcgtgtcccgaaatgactcagctgtagtaaatctgcaacacaacgtgcaatacgttcacgttcgacacattgcacagaatgcaaaattttactttttttctttacacactcatgttgattggcactcacgtttgtattttctgctgctctgctttaattacgcagaatgtttctgacaaccatgccttggaatccagtaatcgtcatttttaaaacgtggcgcacggatgtaaaaggctgaggccatttcaattttggtagtactattaataaatgttgctttatttaggaagaaaaacctcatccacaaacaaagtttccttttaccaggagtatatgctggttcaaaagaatttagctactggtctgctt

SEQ ID NO: 9868 - DNA, 468 bp, Homo sapiens
  misc_feature (1)...(468): n = A,T,C or G
gggacgcnnnngtcgtagacccattgatgacccttagaccatgtggtggaattcggcatccctaggcagcagtgtatctgcttcctgtctggggtgtgagctgcatttattctcagaatgatctttattgataagacttgagctggccttcctatcatggatgtggaatacattagtgaccttacaaagttggtgggaacagatactttaccttcttaaacaggagtttaggagcagtgggtccccatcttttggactagctcttaacgttacttttccccgctgtagtgtagcacagccactccccttcactgggggacctcagtgagttggtcagctctcttggccttacatgtggcagttgttttcttgtttgcaggtgcggccgggtgtgtggcaacattacttcatgatgcagccatgaaccctgcggaagtggtcaagcagaggatgcagatgtacaactcn

SEQ ID NO: 9869 - DNA, 470 bp, Homo sapiens
  misc_feature (1)...(470): n = A,T,C or G
gggcgccgnattggagatccctagattagagtgccggaattcccagcggtgagagcagctgccgtttataattggttttaccttttcctttaagcccctattcagagaaggaaaaagcctgcttcacagaaaaagcgacgctttaagactcataacgaacacttggctggagtgctgaaggattactctgacattacttccagcaaatagggaacagttttgccctggaacagagttacagatacacaatcaagagtgttcttgctgatgctcggggtctgaagactgtcttcctatctgcttcttgcggctgaggagaggagcagttcagtttacaaaacaagtgcaaattaccaaactcaaagcttatttgagtagaatgggctcatgggcaatgtgatgttccctgttaaccttctgttactccctgggagaaaggcgctgagcgtgcatgcacgtgtctttgctgg

SEQ ID NO: 9870 - DNA, 484 bp, Homo sapiens
  misc_feature (1)...(484): n = A,T,C or G
cgccgcccccgccccccctttgtagacattanatagtagactattagtccgtgcggtggaattcgctaaagtagcagtgggatacaagaatgactttatctttaatcatttttgtagaataggacatgtacatatccatataaaaagagactgtagcagatgcctcccacaatcaaccagctcttgtaaacattgcatttgtgcatattttcatacttgattccacaattgcgaacaatacgattaaaggcaaatttagtagccacaaaaagtccagtttgacttcctgcaacatatggtaccactcttctcttcagaacaaaacaaaacacaaaacctagcagcacattaaaaaaaatttacaaaacatttcagtactctttccctcccatcaaaaaccaaacaaaaataaagtgcagcacccataaaagtgtcaagaaaatagccaagttcttcctttcttgaacaaaatagcactcggcct

SEQ ID NO: 9871 - DNA, 452 bp, Homo sapiens
  misc_feature (1)...(452): n = A,T,C or G
attganngacactagaacacgctggggaattcctgtttaggaggaacatctgttggatatgctattgtgattcccaccaacttctgcagtcctgatggtcagccaacactgcttcccccagaacatgtacaggagttaaatttgaggtctactggcatgctcaatgctatccaaagattttttgcatatcatatgattgagacctatggatgtgactattccacaagtggactgtcatttgatactctgcattccaaactaaaagctttcctcgaacttcggacagtggatggacccagacatgatacgtatattttgtattacagtgggcacacccatggtacaggagagtgggctctagcaggtggagatacactacgccttgacacacttatagaatggtggagagaaaagaatggttccttttgttcccggcttattatcgtattaan

SEQ ID NO: 9872 - DNA, 467 bp, Homo sapiens
attgaagacccctagtccgttcgatggcattccaaggacatcatctaggcagggggagagcctgggctgaacagctgtgaccaaaactcccttctgccccaccctgccccctccacttcctgccctctgttccatcttcccccttcccaaaggccacagcctttattccaggcccagggatgtaggagggggaaggaggaaacaggaagcccagagagggcaaagggcctacctcggggcgcgaaccatgccccagactattatctcagggctttctgggcactgcacttcagcgtggcccacctgcccatgccctgaggccagttggcgaggggtggctcctgagggtttttataccctttgtttgctaatgtttaattttgcatcataatttctacattgtccctgagtgtcagaactataatttattccatttctctctgtgtctgtgccaagaaacgcaggct

SEQ ID NO: 9873 - DNA, 450 bp, Homo sapiens
  misc_feature (1)...(450): n = A,T,C or G
gattgaagnccntattgaggacccttagacagtgtggtggaattccacctgttaaaatggctattacaagaaaaagaataacaaatgttggagaggatacagataaaaggaaactcttgtacactgtgggaatgtaaacaagcacagatattacagaaaatagtaaggaggtttctctggaaatttaaaatagaattaccatatgacccaataatcctacttctgggtatatgtcaaaaggaaattaaatcagtatgttgagttgatacctgcactctcatgttgatactcatttacagtggccaaagtatgcaatcaaactgaccattgacagatgaatggataaggaaaatgtagtgtgtgtaggtatggatgtcagttaggaggaataagttctggagatggtcagcatagtgactgtagttaataataacataccgtgttgagtcc

SEQ ID NO: 9874 - DNA, 543 bp, Homo sapiens
  misc_feature (1)...(543): n = A,T,C or G
nnttcgaancacagtccagagaggagcatttggatntctcctctacccaaccagaccctgttccatcctctgttttttccttgctaccaattcaggcccacgcctcatgcacattctctgagaattatgtacataagtacctgactctcctggatgtaagctgggtgggcttatcatgcagaggccctgtgtcttactttatctctgcatcactgatgtctggcacatcaaggactgcaagtttgctgagagaatgaatcgccttttatacatggaaatgtaagctctaaactgcctcagagcatatgctggtgggtgacaatctgaggaggtcatgaatataggagaatattgaagaggtcacacaggggaaacaacttttcattatgaaaaactgggagactgacatttaaatgggttatctgcatgattaaattaatcacatttccaacagtgcatcaagcatctgagaataacattattttgagtaaaacagaaactcttcgagagagaccccctcccacaggtcaggctgctcatatn

SEQ ID NO: 9875 - DNA, 460 bp, Homo sapiens
tggagaaaaaattcgagactcgtagacattagtgcaagcggtggaattccacgtctgtaatgccagcgctttgggagcccgaggcgggtggattacctgaactcgggagttcgagaccagcctgggcaatatggtgaaaccccgtctctactaaaaatacaaaaaaattagccgggcgtggtggcgagcccctgtagtcccagctacttaggaggctgaggcgggagcatcgcttgaacctgggaggcggaggttgcagtgagccgagatggcgccattgcactccagcctgggcgacaagagcgaaactccgtctcaaataataataataacaataataataatcctgtttcctcccacttccaggcttttagttcttcatttcaccttccaaactgtattatttttagccctgaggttttaagagcaatcagtaagaaaattaattcctttcatgtga

SEQ ID NO: 9876 - DNA, 462 bp, Homo sapiens
  misc_feature (1)...(462): n = A,T,C or G
nccgggttgaagatnacttggacagcccggaggaattcctttgttccaacgttagtgtggacgatgctcttgcaggatgcctttccttttgggtcttagacaggataaggaagcctgtgtgggtaccaacaatcaaagctacatctgtgacacaggacactgctgtggacagtctcagtgctgcaactactactatgaactctggtggttctggctggtgtggaccatcatcatcatcctgagctgctgctgtgtttgccaccaccgccgagccaagcaccgccttcaggcccagcagcggcaacatgaaatcaacctgatcgcttaccgagaagcccacaattactcagcgctgccattttatttcagtacgtacacccaagtccccatacccaccctcaggagctcaggtgcacagacccagggctcacactgaatattggtggccaggctcctgtaggn

SEQ ID NO: 9877 - DNA, 469 bp, Homo sapiens
  misc_feature (1)...(469): n = A,T,C or G
natcgtagacactagtccagtcgagggcattccaatgcacagcagaggggacagatgttgggactcaaagacatgaggtagagctggccccatgggtaggtgccaccaccagagcccatgaggcttcgtgttctagaaggtggtgggttagtgccgcactgagggcgtgtccgggagggagcatgtgtcaccagggctcaggaaacagcatgagtcatgacgcgggggtgtttaaggcattcgtgccacagcggggacctcggagctatgccttgataaggcaagtgaggttacatgtacgatgatgcggtttgtgctgcagactggaaaaaagcaggggctttgtcctctgctgaccccctcacactctgccttcacggtaggctcctgagaggggggtctccaaggagggtgtcagtactgcagcttcagctggcgtggatggagtgcttacaggagcatcagggct

SEQ ID NO: 9878 - DNA, 476 bp, Homo sapiens
  misc_feature (1)...(476): n = A,T,C or G
cactgatnccgagagcatggccaaggcnngaantcccaagcatagttttttgaggagtgaaacttccagcagcaaaccgcttggataattactctttgttttccctacagtattttctaaggcaatgtgtaagtataattaaggctgtttgaacatgtattctctccgcaggataataaggataatatgtaagaatctgttgctgatttatgtgtttgctgtcttcaagaaagactgtgacaaggcttttcaaatggaggatctgatttttgctcaagacggagcctgttttaaaagtagttgttttaccactattagaatattatttaagggcggggcacacctgtgatcccagcactttgggaggccgaggtgggcagatcacctgaggtcaggagttgagaccagcctggccaacatggtgaaaccctgtctgtactaaaaatacaaaaattagccgggcatggtggcgtctg

SEQ ID NO: 9879 - DNA, 472 bp, Homo sapiens
  misc_feature (1)...(472): n = A,T,C or G
gcaggtccnnnnnattgagnncatgatgacactcggaagngccgnggaantttgacgatgaggaacaggatgatgaagatgaagacgacgatgatgatgaggaggatggtgatgaggtgcctgtacccagctttggggaggccatggcttactttgccatggtcaagaggtacctgacctccttccccattgatgaccgcgtgcagagccacatcctccacttggaacacgatctggttcatgtgaccaggaagaaccacgccaggcaggcgggagttcgaggtcttggacatcaaagctgagtcactggacctagctgtgcccccaacctagattggcagcaccaccccagggcagaggactctctgggcacccgctgtgcatggagccagagtgcagagccccagatcctttagtaatgcttcccctggtcctgcaacaggcccggtcacctcggccgggcccggagctg

SEQ ID NO: 9880 - DNA, 504 bp, Homo sapiens
  misc_feature (1)...(504): n = A,T,C or G
gggccggnnnnnaggaatttgatattctcgnannnncctacttccttcgcananncccannggnnngaaggaccattcttgcgatgtgagtgcctggagcttccactttgaaatagtgagggctgtggactgaagaacgaggttcccgttccaatgaggggtgtcttagagctccctcgcctgctgtgctcagtgtctcatgcacttgtttatttttcctcttgcagaggtggaatttaatgtatcagaagcatttgtacctctcaccaccccgagttctaatcactcattccacactggaaacgactctgactcggggaccctggagaggaagcggcctgctagcatggcggtgatggaaggagacttggngaagaaggaaaggtatgatttgaccgttcacttccaaaccaacagtaaatatgttggtagacccgtggtatctggtatcgctcagtggacttgggatttgagagtggtcgccatccacccatgactgatggg

SEQ ID NO: 9881 - DNA, 492 bp, Homo sapiens
  misc_feature (1)...(492): n = A,T,C or G
tgaggccngnnnnnnnaatcgatagcgtacgtagngcgggcanncagggaggancaagtgttatggcccgttagggctgctttgggcagctcacaattcacacctgtgtacctgccacatccctcacttggtggaaaacacccagaaggtcttgagtcccccacccctgggtgtcagtccaaatgactgtataggaggcccttatttttgtcacagagcaagctggccatgaacgaaggagagaagacgccacagatttccttccctctcctccaggagaccataagatagatcccccatcctctcagccctattcccatgcctccctctcattggaggagctgaccaaagcagccctaacgggccataacacttgaccaattcagctgctggcagagggaggaaacaagtgttttcccaagtggcattttcatctcgctttcaccctgactaaagattgtcttaagtagcagcccagcccgcccagccccn

SEQ ID NO: 9882 - DNA, 407 bp, Homo sapiens
agtccatgctgatgattgtgaaaagttcctttaaaactagaagcttcaaagaatcttgacaggaaagaagtctctcaaatgctgtgttttagacttggttaggacatgaattctttacaaacgtcatatttcacagatgcgagaaaactttgttctgtaaatatgatcagtgtttatattagagtaccaggtgtcccggttctcaagatgtaacacagcagaaaagtcttgtcggagtctgcacaggagagaggccttcctttaacaaaagtatgattgacagaaaaaatggatgtcaactaaaatgtaacctctatgtaaggaggtgtttttcaccactctatctctaccatgtagaattgtgcttggctcataatagggcccagcaattactgaagaaagtgaaa

SEQ ID NO: 9883 - DNA, 449 bp, Homo sapiens
  misc_feature (1)...(449): n = A,T,C or G
actgcattccagactgggcgacagagtgagatgctgtctcacaaaagaagaaaaaggttttaaaagaaaagaaaaaaaaaatgaatttatggggggggttactttttaattattttaattttcaaattttttggaagtaaatgtagggggcataaaaggcttactcttttttctgtacttttactgttcacatcgattttaaaaaagatccatgtatgtataaaggaatgccaattgttttttctgcttgttttccttatatatctgtgctgactcattaattgtattattcaaatctataggttctgtttttctgtttttaaaaattatataaagaaattataaattccattttccatgtgtataagcaaagtagtctgcaatgaagttgaccctccctgtgtgcccctccccacatcgtctttttcccagcaacagtcattgctgtn

SEQ ID NO: 9884 - DNA, 468 bp, Homo sapiens
  misc_feature (1)...(468): n = A,T,C or G
gggacgcctcgngttggagaccctttgaagccgttggaantccgagaggcagaaactcactgcccaggtggagcagctagaggtatttcagagagagcaaactaagcaggtggaagaactgagtaagaaactggctgactctgaccaagccagcaaggtgcagtagcagaagctgaaggctgtccaggctcagggaggcgagagccagcaggaggcccagcgcctccaggcccagctgaatgaactgcaagcccagttgagccagaaggagcaggcagctgagcactataagctgcagatggagaaagccaaaacacattatgatgccaagaagcagcagaaccaatagctgcaggagcagctgcggagcctggagcagctgcagaaggaaaacaaagagctgcgagctgaagctgaacggctgggccatgagctacagcaggctgggctgaagaccaaggaggctga

SEQ ID NO: 9885 - DNA, 459 bp, Homo sapiens
  misc_feature (1)...(459): n = A,T,C or G
acgcgnaaatgagttcgatacaatctgccagngcggtggaacacaactaatgctgatcatgatctgaaagacaatattcttagtcctccccaaattaacttgtatattcggcaaaattccagcaggctgttctgtagacattgacaaatggattctaaaagtccagtcaaaatcccagcaggatttgttttatatatatagatatatagatacacacacacacacacacacacacacacacacacagattctgaattatacatggaaacacacactagaatggccaacacaattgtgagaaagaacaatagtttggaacactcctattatctaatgttaagaatgactataaagctaccgtaattagtgctatattgacataaggctagccacatacctatgaaacagaaacacgtccagagatacccccataacaatatggaaaactgttacttgacc

SEQ ID NO: 9886 - DNA, 483 bp, Homo sapiens
  misc_feature (1)...(483): n = A,T,C or G
catcgaccccccnatttgagaccctaggccgngcggtggaattcaaaggattgagaaggataaactggaatcctggtaagaagcctttatgccagcccgacacctgctgtaattggggtgcatgagctatggagtcagatagttgttgggagggggaggacaagaagtctattgtttggactgtgtttgtctcacaatcaccacaaaataaaagtgtagaaaatgcttgtggtgtactaactcttttctgtacttaagttactcagattaacatgcacttctaattctaaacattttttttggagtcatcactgtcgctgtttaagtagaacaatgccaacgatgtatgagaaacagggaataaatcaggatttgtgtgtgtatgtgtgtggcattacttacatttactttattaaaaagcctaaggaactttaaagaatttgtattcagtttatttttattttttcaagacagagtctcact

SEQ ID NO: 9887 - DNA, 552 bp, Homo sapiens
  misc_feature (1)...(552): n = A,T,C or G
agganaacnannnccttcgaccaccantttgtgtggtgcgaattcaaagccctaagcaagctggtggcagcatgtggtgggcgaatctgtgcctttaataaccgtgctgaagggagcaatcaggatgaccaagtgaaggaactaatggactgtattgaggatctgttgatggagaaaaatggtgatcactataccaatgggttgtacagcctaatacagaggtctaaatgtggacctgtgggatcagatgaaagagtaaaggaattcaaacagagccttataaagtacatggaaactcaaagaagttacacagccttggctgaagcaaactgcctaaaaggagccttaatcaaaacacaactgtgtgttttattttgtattcagttgtttctcagattgataattctgtggctttgcatactgcacagcatgtgcaatttggtttgttgcttactctttagtatgtgcaatttattctgcagtttgctgtttattatacccaaaaagttaatgatatttttgagaacagttattagactagaacgcangacn

SEQ ID NO: 9888 - DNA, 486 bp, Homo sapiens
  misc_feature (1)...(486): n = A,T,C or G
cctgaccaccctntanagaagaacactagcacagngccgnggaantctgngcatgttacaagtagctcagtctaatatctcagatgcaggcacattcctttggtttataaaagtagtttccggagttccataattctgagagcaagctaaatgatatttgggaaatgaaaagtactttgtactatatcttacatgcccaaggatgatgacagggaaataagtagaaataataatatgatggcgttatttacatactcttagagaaccaacgttacaaataagaaatgtctgttcatgttatggaaggagtaaaagaatccaaactattgttggtattaatggttttacaaccactttccaaattagctttaccttccaggagttttcatgtacaaagttgttacaggctgtgtataattaactaatacagccttctcttcagagtgtttaatttttctggagatcttggaaatggaaagatgaaan

SEQ ID NO: 9889 - DNA, 485 bp, Homo sapiens
  misc_feature (1)...(485): n = A,T,C or G
ccttgaccnccctnttttgagaccntaggacagngcggnggaattcgagggagggagggaggaaggaaggaagactgcgaaaccctatctgattgaaagaaagattggaaggaaggagaaggaaggaaggaaagagagaggagggagggaggaagagaggaaggagataaattatgaaaaagaaaaaagatctctcctaatttcaccaccaaaattgagtaagaattatcacttataacattgcctttcagtctttttatgtatatgtttgtaattccataaaattgggatgatgaatataattttattttctgtttttatcattaaatatattttgtgtttttcatattattcagtattccttacagatagcacctaaagtgcaattattgatttaatgatgtcctactgctggtcattgaagctttcctaattttttactcttctaaaattataaacaacattttcaatcataaaaaaaaaan

SEQ ID NO: 9890 - DNA, 457 bp, Homo sapiens
  misc_feature (1)...(457): n = A,T,C or G
actgatnaccnctagacagnngttgataaccctcggagagnccgagaggcagggagaggtagttggggaaataaaataatcatgccaactttaaagacatattatcctttgcgaagagagagagaatataatttattattgagtaggcataaaaagattttgcaggtatgtaagatatctcaaaagtggctatgaagttggggacaaaatcacagttaatacagaacagcagaagaaagtatattcttaataacttctcatccctttgagagacaaagaaagggttgtcccttttgatagtcttctgtacatctcatgagagacacctgagttaatcccagaggtttgtttttcacatatctagcgttggtttggcacatgacttagacgtatctctacattgtaaaaactggagactgaacttaatccttagagagatttatctctgttccaaagg

SEQ ID NO: 9891 - DNA, 490 bp, Homo sapiens
  misc_feature (1)...(490): n = A,T,C or G
ggtcgtncgccggnaannnnaaaactgagattcgtaggcattgcggnggaattcgtggggggtacctgtagtcccagctactccggaggctgaggcaggagaatggcgtgaacccgggaggcggatcttgcagtgagcggagattgcgccactgcactccagcctgggtgacagagcaagactccctctcaaaagaaaaagaaaaaagatgtaaaaaccattcttagtttgtgggccttacaaatcaggccactggcccattgcttgtagttagttgatccatgtcatgcaccctaaaaatggctctgtcactgtgagtggcttcagtaggattttgagaataagtttatattcttgctaggtaaaacaaaacaaaaacgacagtaataccaaggaatttccccccccttttaccctccatttgtgtttattgcatatccactataacaacattaaaggacctttaaaaagaaaaaaaaaaaaaaaaaan

SEQ ID NO: 9892 - DNA, 577 bp, Homo sapiens
  misc_feature (1)...(577): n = A,T,C or G
natcggagncccnntnngnnnggngatcgtatctctactgcgagaggtgcaattcaagagatgcagcgctatgcggaggatgttggggccgtcaagagaaaagattaaaagttggactggatgtaccagggtcctggtgggatggtgaaccgtgacgagtacctgctggggcgccccattgacaaatatgtttttgagaagatggaggagaaggaggcaggctgctcttctgaaacaggacttctcccaggctctatctttgccccatcaggtgccaattcccttcttgacatggccagcaagatccgggaggacccactcttcatcatcaggaagaaggaggaggagaaaaaacgagaggtattaaataatccagtgaaaatgaagaaaatcaaagaattgttgcaaatgagtctggaaaaaaaggagaagaagaaaaagaaggagaagaaaaagaagcacaagaaacataagcacagaagctcgagtagtgatcgttccagcagcgaggatgagcacagtgcanggaggtgagcatgtggcgactgggcctcctttctcgtgattcacttgctcn

SEQ ID NO: 9893 - DNA, 492 bp, Homo sapiens
  misc_feature (1)...(492): n = A,T,C or G
gggtccgcccnnttgaaaaccctgatgatgaacntaggaagngcgnggaattcgttttctcagactccacctttgtttgcactctgttgcctgtgaggagttttctggcatgttattatttacttcaaaactagagttccaagcacctacattaattattttatattgcgtgcagaatagtatatcttttaatgtcagatatgatacactgcacatattgcttttgcactcttaaaatttttgtactaaataatagaaaatatttatattctttgagtgtgagctttgaatagatggcattatcactttattgtttttttaacaaaaactttttctcaattattctattgcaatgttattctgagcaagtcctatgccaaatatcttgtataatgtttgtatggaagattaaattttactcttgtgtggtaagactatttcagttactgattttatagttggaatttgatattccagcacaaagtccacagt

SEQ ID NO: 9894 - DNA, 472 bp, Homo sapiens
  misc_feature (1)...(472): n = A,T,C or G
gtgcggtnnnnattgatcgcagatcactagtccagngcggtggaattcaaaatagtggaagtccattctccaaactgttaatagcagtcacccctagagggtggcatcatgggcagtcgtggcttcagaatgtctacataggagggtttagaaaccatcgaaaggtaggctaggggattcgtcttgaagctgcaagatggcctttgcttagcaagcagggttttgccttacactgcatctatattcagagtcactatgggggtgctgatggagattaggataaagcccccaagccactctctggagccaatctcaatttttttttttttttactcttatttatatggcgggttttctaaatgctctacaatgaagatgtatgacttttataatcagaaaaagattaaggaaaacattacttcttgaaagaaaggcacttctgtgtgttgggatgaatgaacacagtgtcctg

SEQ ID NO: 9895 - DNA, 464 bp, Homo sapiens
  misc_feature (1)...(464): n = A,T,C or G
gggcgccgggggnttttgaatgagtccctatgccangncgnggaattcagaaatatgaggccagctcttgccaatgtcacctccaggttggagagcaccccctaaaataagaaatggggaccatctaaagctttccttgaaaattaaggggtgagaatcccagcactttgggaggcttaagtgggaggatcacttgagaccagcctgggcaacatagtgagaccccgtctttacaaataattttaaaaaattagctgggtgtggtggcatgcatctgtagtcccagccactgggaaggctgaggtgggagaattgcctgagcccaggaggttgaggctgcagtgagccgtgattgtgcctccggaatccagcctgggcaacagaggaagaccctgtctccaagaaaataaataaatgaaaaagaaaagagctgcagcccctaagggaaattagcatgaaatacg

SEQ ID NO: 9896 - DNA, 498 bp, Homo sapiens
  misc_feature (1)...(498): n = A,T,C or G
agcgcggcggnnnnnnnaaccgactagcgagacatcgggacgngccannngaagtggnggactgtcccgcgtgcaagcaacagtgcttctccaaagacatcgtggagaattatttcatgcgtgatagtggcagcaaggctgccaccgacgcccatgatgcgaaccagcgctgcactagctgtgaggataatgccccagccaccagctactgtgtggagtgctcggagcctctgtgtgagacctgtgtagaggcgcaccagcgggtgaagtacaccaaggaccatactgtgcgctctactgggccagccaagtctcgggatggtgaacgtactgtctattgcaacgtacacaagcatgaaccccttgtgctgttttgtgagagctgtgatactctcacctgccgagactgccagctcaatgcccacaaggaccaccagtaccagttcttagaggatgcagtgaggaaccagcgcaagctcctggcctcactggtgaagc

SEQ ID NO: 9897 - DNA, 480 bp, Homo sapiens
  misc_feature (1)...(480): n = A,T,C or G
ccgttggacgaccntanttgagagagcctgaaanncaacnnangctttttgaaacatgatcggagtaaatgtcttataaacattctggagtatgtataactttaatgaatgaaatttaatggacctgattaaaataaagggatttaatctttgttaaagtgaagttagtggaataaattaccttactggaatatagtccaagtcactaaaggtttaatatttgcatttttgtgcttttattttctccttccattcataattatatacttgaaagtacatctgtagcctatgacttgagtctcttgaacttctaggaagaggcaaactacaaactactaggattctgatttcagatataggcattccagaatcttctctttacgagttcacctgctagtataatctccacaacttgaatggccttggttgttctgtaattgctgccaaaatcatcacaagctgtacgtcatcaaggctcct

SEQ ID NO: 9898 - DNA, 457 bp, Homo sapiens
aaaattagaaccctttcaggttgagaacttctgaacgttcctttccaagccattcacttcatgacctatgaattcctgcaggagcactttaacccccagagacggtacaacccaagctcccacgtcctctctggagcttgcgcaggagctgtagctgccgcagccacaaccccactggacgtttgcaaaacactgctcaacacccaggagtccttggctttgaactcacacattacaggacatatcacaggcatggctagtgccttcaggacggtatatcaagtaggtggggtgaccgcctatttccgaggggtgcaggccagagtaatttaccagatcccctccacagccatcgcatggtctgtgtatgagttcttcaaatacctaatcactaaaaggcaagaagagtggagggctggcaagtgaagtatcactgaacgaagccaggggttcagat

SEQ ID NO: 9899 - DNA, 462 bp, Homo sapiens
  misc_feature (1)...(462): n = A,T,C or G
nttgggattcgaagaccactaggaccagcgcggaggaattccttctaccatttaccaatcccgccatttatttggtgtatagtatattagctgcctctcagtacaaggtactgtgtgctaggtacacttcaatcaaacatgcttcctgtcctatagagcataaaatatatttggggagaaaagcataaaaacaattgcaacacggtatcaatccatttgaaaggagctgtacagggtgcaaggtaggttcctgggaatgtctgtaacccacacttgggagatcagagaaagcttcccagaggagaaaagatatcacctgacatccaaaagagctttgctagaaaaatagcacagagagaatacatgtgttaacccttgagaggaatgagtatggctctctcaaactgaaaaaagttattatctggagagtagagtgtgaagtangtggaggagaggagagga

SEQ ID NO: 9900 - DNA, 483 bp, Homo sapiens
  misc_feature (1)...(483): n = A,T,C or G
ccctgaccnccccnactgagaacctgtcacangcggnggaantccttcgaggagccttaagccgcttgccttgctctcagaatcgctgccgtcatggctagtcagtctcaagggattcagcagctgctgcaggccgagaagcgggcagccgagaaggtgtccgaggcccgcaaaagaaagaaccggaggctgaagcaggccaaagaagaagctcacgctgaaattgaacagtaccgcctgcagagggagaaagaattcaaggccaaggaagctgcggcattgggatcccgtggcagttgcagcactgaagtggtgaaggagacccaggagaagatgaccatcctccagacatacttccggcagaacagggatgaagtcttggacaacctcttggcttttgtctgtgacattcggccagaaatccatgaaaactaccgcataaatggatagaagagagaagcacctgtgctgtggagtggcatt

SEQ ID NO: 9901 - DNA, 490 bp, Homo sapiens
  misc_feature (1)...(490): n = A,T,C or G
ganaagcgggcngnnnnnntttgactgcgatcatatgacngcaancagagctgggactacagcatgcaccgctgcacccagctaatttttgtatttttagtaaagatggggcttctccatgttggtcaggctggtcttgaactcctgaccgcaagtgatctgtcggctaggcctcccgaagtgctgggattacaggcgtgagccaccgcgcctaaccataacttcttatttcttgcatggattgtatgcattgactagggacacacaatatattccagttttttgacatataggatagcgcactatacacattgctttgcattttgcttttttcacttagcatatctgggtaggtcattatttaatcagtgccatatttaagtacatttgtttccagcctttggtttttttgagtaatgctgcaattaatatcccttatctgtgtcatttcacgcaggtgcaaatatacctgtaaaatgaatntctggaa

SEQ ID NO: 9902 - DNA, 489 bp, Homo sapiens
  misc_feature (1)...(489): n = A,T,C or G
ggagtgcccggnnnagcngcccctgagaccatagnnctgatgaccatcagaccangcggnggaattcgatgcatttctgaaaacatggaaaaactactgcatctgagagaaagctgagaaatgaacagaagtctgatggtgccaggtcagagaggtctgtgtcatttctcagctcattggttaattcacacaggattgatcaggtacctcatgcatggggccttacccaatgtattgtaaaaatgaaatgtcaaagggaggctgccgcgggtactcaatgcaagtccaggttagggaagaactaaaggaagcacttcatagccagcatttcatatcgctgtccgtctgatggttgtttttaggtgataggggtgtcctggtggatataatgtataaggcttggttggaaggcaatctcagattaaaattcccatcagtagtagccatattgaattttctggggattcaaaggtgaactagtaagagtcn

SEQ ID NO: 9903 - DNA, 467 bp, Homo sapiens
  misc_feature (1)...(467): n = A,T,C or G
cgcccccccccntnnnaatagaatggcctaccnagngnggnggaattcttaagttttactggaataaaaccaagtccattgatttatccattgtctacatacgtttttaggctacgatggcaccactgtgtcactacaaaagaggttatctacacaaaaagcctaaaatattaccgtttgcctctttatggaaaaagtttgccattccctagtctaaggtttacattctgagcttatcattttatcctaccccccctcaccagtgactggctcaaaacaagtctgtgattccattctgactgttctactgagggaattacgccttcttctcatgcagagctgatgagggtaagttgtattaataggacatatgctcaggttttctgaaaaatacttttatctacaaatgcatagaaatatgctggtgcctgaatgtaccatacggggacctggagattgactcacct

SEQ ID NO: 9904 - DNA, 476 bp, Homo sapiens
  misc_feature (1)...(476): n = A,T,C or G
aactgagaccntaggcaatggaaggccattcccccttacaattcatagaggagcaaactggggcccattgaagggtgaagagttactcaaggtcaaacagctggtaacagaatcaagactaagacctaatttacctttccatactctttttttttctcaacttcatctatataaaatcaggcttttaaacataaccactaatatttacctgaagataaccatgagtaaagtatacttttgcattaattttttgagcttatatgcaaacataataaatattattaaatatcaggaaagctaacatttcatacaagatagcttcagaccaaattcaaattgaatttgaataaattagaaatactgtgcatacataaccttcttgtgcaccatgagtatttggaaagttaatccttgtttttgtcgtgtctataaaggaagaacaaaacaaaataaaaacagagccctagagaaatgcg

SEQ ID NO: 9905 - DNA, 495 bp, Homo sapiens
  misc_feature (1)...(495): n = A,T,C or G
gganagcnnaggccggcccccnnaaaattgagaactgagattatagcccagngcggtggaattcgctaaatcaaatgtaaaggcaaatatgtatatttaataaatgagaagtatttttttattactgaaatttattctcaaagcaaatgtattttgtagatgtttcatttgggagattttgctttgccttaaaacatacaaaataaacctgtcttgtggtctgcccacctcaaaacctctgttaacttgacatgtagaaggagttcagaattctttgataatgtgtggttttcacttttgtttggattaaacaaaaataaaattagagtccatagcactttgtaaactaatgtgaagtttcttgttgaatcataaaagctacctgtatgtactttataatttaatgttctgttagtaaaaattgtcagcattttatctttttctcttctcattacattntagtctccaatctttcccactctcagcagtcacagt

SEQ ID NO: 9906 - DNA, 484 bp, Homo sapiens
  misc_feature (1)...(484): n = A,T,C or G
gatgggggnnnccatgagaccctttgagccgtcggaanncccaaaagggctacatttaaaatttgtatttgtttttcttacttagtgaaggttgtgttttttttcatattcattggccatgctatattcattcttttgagaattgctcattcatattttttctgttgcttgcttggagaatttgctctttttttggcatataagttcttaagaatgtccgtcctttgtcatatattgtaactttttttagccttatttgtcatttaacatagtttgtggtatttcagtatagaagttgttttctttaggagtctacctttgtgtatgtgcttgaaagtatttttgtaatccaagaatggataaatgtccttattttcttctagtattttcttatttcacttttacacctatctttaaaaggaatttaaattttgtttatatacattaactaaatcagtacaagtttggggtgaaaaggaaattn

SEQ ID NO: 9907 - DNA, 463 bp, Homo sapiens
  misc_feature (1)...(463): n = A,T,C or G
tgcggggcgnnnnnaagttaaactggacccttgcagngctgagaatcctctaaagatacaaaaattagccaggcgcagtggcacacatctgtaatcccagctacttgggaggctgaggcaggagaatcgcttgaacccgggaggcggaagctgtagtgagccgagatcgtgccactgtactccagcctgggcgacagagtgagactccatctcaaaaaaaaaaaaaggtttaaaacttttttttttgaggcccatccttctccgggaggtcctgataaaaaaaaaaaaaagtggaattggttgggaaaggtgcctacctttggggggaaggaacctttgtaggtttccccgtcggctcttttggggaaggggtttaaagggggccccagggaaaaaaaaaacagcttttttttcttgccaccaaaaaaaaaaatggttaaggttaccatgagtttattttaaa

SEQ ID NO: 9908 - DNA, 470 bp, Homo sapiens
  misc_feature (1)...(470): n = A,T,C or G
agggcggccgggnngntttttgatcgcagtncctaggccgngtggnggaattcgcacgactagcagttgacacaaacagaaaagtgtctcgtctgctctctgggagaaagcgtggatcaaaaccagcaactcagtggagagaaccccgcagccactgaagaagttgcccacgtggcggtggggccagagaaacaccgcgatttcgacgacagccgtagggataccacagagaaacatgcgcggccacagaagtacatccagctccgcgcaatcagtggttctgcgatccagaaaccgccagctgggctagactagaaacttctaaaaaactgtcgtcccatagcagctttcctaaccacgacagacagtcgcctttagagagcacctaacggtgctgagaccggcctgggccagcaaaagcgcagagcggtgccagtgccaagaaacgcccgacttggtgaaaccaacct

SEQ ID NO: 9909 - DNA, 482 bp, Homo sapiens
  misc_feature (1)...(482): n = A,T,C or G
tgagcggnngnnttcgagncccttgntttcgtagaccctagtccgtgtggtggaattctgactgctatttaaaggagcaggaaagggcgtgaggcaggaggagagactggtggagggaagagctgctcctcccatgcagtgcccgactccctgcacccctctcaacctgacctgaacctttattgaatccttattagcttgaatccttattagcttgaatcctccatgcaaatcatggagtctgtgtcccacctgatgtggttgaggagaagccaggtcttcaaagaggggtcagcctggggcaaagcaggactggggggaggtgggcagcagggcctattctgagaatcacatattgttacaggccttgcaccccctttgctgcttccctcctgctcatttggggctgccaccagctctccaccctcctggttccgctggccgggccaagagaggatggagggatgggagtcccaggagaa

SEQ ID NO: 9910 - DNA, 465 bp, Homo sapiens
  misc_feature (1)...(465): n = A,T,C or G
gcgcgcannaaaaagtaagctgagcccctngtanncctgataccctagtccatgtcgtggaattcgccgaaatgggcaagttcatgaaacctgggaaggtggcgcttgtcctggctggacgctactccggacgcaaagctgtgatcgtgaagaacattgatgatggcacctcagatcgcccctacagccatgctctggtggctggaattgaccgctacccccgcaaagtgacagctgccatgggcaagaagaagatcgccaagagatcaaagataaaatcttttgtgaaagtgtataactacaatcacctaatgcccacaaggtactctgtggatatccccttggacaaaactgtcgtcaataaggatgtcttcagagatcctgctcttaaacgcaaggcccgacgggaggccaccggcaagtttgaagagagatacatgacaggcaagaacacgtggttcttcn

SEQ ID NO: 9911 - DNA, 443 bp, Homo sapiens
  misc_feature (1)...(443): n = A,T,C or G
gtgggcgnnnnnattgagaccattgtcttggaggtcgatttcattgttagtagagatggcattttcatcatgttggccaggttggtctcaaacacctgacctcaagtgatcctctcacttcagcctcccaaagtgctgggattacaggcgtgagccactgcgcgcagcctacatcagtgatttttaaagtacacattgagtgccctggggctttttgaaggtgtctcaaagaaagatgatatttaaattagattggcagaacagatttgaaaattcagtccctttatgtctacataagagttactttagattcagacacacaagtagattgaaagtaaaaggatggaaaaagatactccatgcaaacaataaccgaaagagagctagagtggttatatgaataatatccaacaaaatagacttcaagaaaattattttttgcc

SEQ ID NO: 9912 - DNA, 477 bp, Homo sapiens
  misc_feature (1)...(477): n = A,T,C or G
catgcgccctngnnnatgtagacattagtcagngcggnggaattcacataactgatttttagttgacttagctatagcagtacaatgattagtaatgtaaaaattaacacagaaattaacctaaggaatgaagggtgggtttgtcaaaatatcaagtaaatttttgtttctaaagtacatttaatgtagatgacctaaagaatgcgttatccatcctatataaaagaaagataaaacacaggtcaccaattttctcatttcaccccatttaccttgtatagaggattgttcattcctttgggactaagttatagttatggtgagtgtgtatttactgtagttttgcctgatctcactcattgcacttcctggagttaaattttccaacagccatgttgaggaatagcactctgcatgtttttgttttgtttttcggggttttttttaattgaagccctaaaccaggaattatttgtg

SEQ ID NO: 9913 - DNA, 449 bp, Homo sapiens
ctcgactcccctttgatgaccctctagtccgtgcggtggaattcgacaagaggggtgcggtggatactgacctttgctccggcctcgtcgtgaagacacagcgcatctccccgctgtaggcttcctcccacagaacccgtttcgggcctcagagcgtctggtgagatgctgttgccgctgctgctgctgctacccatgtgctgggccgtggaggtcaagaggccccggggcgtctccctcaccaatcatcacttctacgatgagtccaagcctttcacctgcctggacggttcggccaccatcccatttgatcaggtcaacgatgactattgcgactgcaaagatggctctgacgagccaggcacggctgcctgtcctaatggcagcttccactgcaccaacactggctataagcccctgtatatcccctccaaccgggtcaacgatgg

SEQ ID NO: 9914 - DNA, 446 bp, Homo sapiens
  misc_feature (1)...(446): n = A,T,C or G
atgtgggntgntttgagaccttggnattgtagaccttagacagngcggaggaattcctgatcttcaagaagactaagtttgagacttgaccagcatacaagtatagagacctacgaggtggtcttgtggaggtacatttgattaacccattgctggcagtgggagctgatttaggcagggtaaacaggaaagcattaaaagttaaaattcactacaggttttttgttacttttaaagggaatatggataagcatagtaacaaaacccaccagaatctaagcagttttcaccccctcagaaaccactgtcattagtttacaaagttagcactttgaagtaaaactaaatgaggaaggaagtaatgttacctatccttgataccatgaccatttattagatgttttgctatataaattaccgagagaatagtttgtcatccacttagg

SEQ ID NO: 9915 - DNA, 461 bp, Homo sapiens
  misc_feature (1)...(461): n = A,T,C or G
cgcgtgccccnnnnntttaaactgataacctatgcangttcgagaaccctctgaacctgcgaggtggaggtggcagtgagtatcgatcgtgccactgtaccccagcctgggcaacaaagcaagactctgtctcaaaaaagaagaaagaataatacggcagtctccctttatctatggtttctctttctgcatgtggtttcaactacctgttgtcaaccatagtctgaaaatattaaatggaaaattccagaagtaaacaactcataaatttaaaattgcatgctgttctgagtagtgtgatgaaatctcatgtcatcctgctcactcctgcccgggatgtgaatcatccctttgtccagcatatccacactgtagatgctcccagaaccttggcccattagtcactagcagccatcttggttatcctatcaactgttgcagtatcattgtgcttgtgccca

SEQ ID NO: 9916 - DNA, 463 bp, Homo sapiens
  misc_feature (1)...(463): n = A,T,C or G
agcgcgggnntttccatagatagcgtgcntangngcnggaattccttgctgtgtgatcttgggcaaatcagtccatttatcactgtctcagtttccttatctaagaaatggagaccctaatagtacctaccttttagggttgctaggagaaaagtgcctggcacatagtaagaacttactacatgttgggtgtttttatgattattgttatataattagaagagtgaccaggctagcagcagagagtcctcattctcaggagagtgggaagagggagagaggtgaagtgtcagagggctgcagagccaatacctggcagagccccaggcagcaggtttgtcacttggggggcctgggtggggcccaggtagctatcctggttctcaggtcttcatttcagacagtgctctgagcctcccatccacagtccagagcccattctctgcctgcctccttctctact

SEQ ID NO: 9917 - DNA, 462 bp, Homo sapiens
  misc_feature (1)...(462): n = A,T,C or G
ttgnaattcgangaccactagtccagcgcggtggaattcccgctttttttgtttttctaaaagcaggatttgcttccgtaagaggcaagttccttgatgtggaatagtgcaacctgtatatgggttattataataggaaagacatttgtacttgcacagtttaaatcattcttaaattttgaacatgtgaattgtcccaaaaaatctttaattttttggtaatttttactctttttgtgcacatgttgatttcttaatggtaaatccttcatttaaagatagtgttctctgttgagaatatttacatggaataaaacaatcttttcatggcctaaaaaaaaaaagaaaaaaaaactgactacacttctaccctcaaaaaaaaaaaaaaaaaaaaaaaaaaaaaaaaaaacnnnnaanaaccacccccacccttctcaaaaaaatattatttttgtttcttta

SEQ ID NO: 9918 - DNA, 466 bp, Homo sapiens
  misc_feature (1)...(466): n = A,T,C or G
ccgccccccccnnnnnaatcgattagcctagcnagngnggnggaattcccgaagcccatgctctcaattattatactcgactgcctcttaaagatttcctctatttgaaaggtaatttaaatttcggtgggaaaactgctggttattattctcaagaataaactccacaacttatgtgattctgatagtgcaaactcaccagtatcctaccatgaatctgaggatacgttatcattactgtaattactgtctaatctgaaccatgtgaaaataacttttatttctctagcaaagggctattcacagaatattgcttttgacccatagagagcttcttcttgctgtcattttaggaggcatatccctttttccttaatctgtttggctcagagctaactgtgaacttcagaagagtttgttttgcctttttaaaaataccattgctttaatggaactataatttctg

SEQ ID NO: 9919 - DNA, 410 bp, Homo sapiens
gttctcggcatgcaccgatgggatttcctggccgtttgtgctgctcataatgcccctggtgatctgggtctatagcacagacactaactttagcgatatgttctggtcttgactgacagttttccataaagaagatgtttaacttaatcaattaatttttttattgtttaaagcaactgtctatttctgctgaattttcacatgaacatactggctggtgatggaggtttcatactctagattttgttttgctttttctgactccagtggggcaagattttccttttttatacacataattaaagtgtccattgacatgtacagagaactaacactattttatgcaaatatttttttgtagatgaaaaagcatgtacagtgttctggttaatactcatccttgtataaaa

SEQ ID NO: 9920 - DNA, 411 bp, Homo sapiens
gatgaacacgactgcgagccgtcggaccctgagcaggagacgcgaaccaacatgctgctggagctcgcaaggtcacttttcaataggatggactttgaagacttggggttggtagtagattgggaccaccacctgcctccaccagctgccaagactgtggttgagaacctccccaggacagtcatcagaggctctcaggctgacaaattcctgtcccttgtgccgccatgagctgcccactgatgacgacacttatgaggagcacagacgagataaggctcgaaaacagcagcagcaacaccgactggagaacctccatggagccatgtacacgtgaggaggttggggctgagtgctggccctctgcgtcttccttattaaccttgaatcctcattaaaggtttctttacc

SEQ ID NO: 9921 - DNA, 465 bp, Homo sapiens
  misc_feature (1)...(465): n = A,T,C or G
gtgcgggagnttttnaaactggctagatatgcatcgtgcaggaacncgcggnaagaaggcccagctcaacattggcaatgtgctccctgtgggcaccatgcctgatgttactttcgtgtgctgcctggaggagaagcctggagaccgtggcaagctggcccgggcatcaaggaactatgccaccgttatctcccacaaccctgagaccaagaagacccgtgtgaagctgccctccggctccaagaaggttatctcctcagccaacagagctgtggttggcgtggtggctggaggtggccgaattgacaaacccatcttgaaggctggccgggcgtaccacatatataaggcaaagaggaactgctggccacgagtacggggtgcgggcatgaatcctggggagcatccttttggaggtggcaaccaccatcacatcggcgagccctccaccatccgcagagatgn

SEQ ID NO: 9922 - DNA, 464 bp, Homo sapiens
  misc_feature (1)...(464): n = A,T,C or G
cccccttgagacatttgtagacccttaggccangcggnggaattcctcctgctcagcctcccgagtagctgggactacaggcgcctgccaccttgcccggttagttttttgtatttttagtagaggtggagtgttcaccatgttagccaggatggtctcgatctcctgaccttgtgatccaccctcttcggcctcccaaagtgctgggattacaggcgtgagccaccgcgcccagccaagggtatctcattattttatgttttatttttgcttcgtctttgggcccatacaccatccctgccacagtgtgtgtgtaacatagtcattttgccttaaccatgaagcttggtttggtttgttttgttttgttttgtgttttgagacagggtctcactctgtcacccaggctggagtgtagtggcatgatcacagctcaccacagccttgacctcctgggctcaggg

SEQ ID NO: 9923 - DNA, 465 bp, Homo sapiens
  misc_feature (1)...(465): n = A,T,C or G
gggggggcccnnnntatagataaagtncntacgcagngncgnggaattccagtttcaaatgactccacactatattctttcttgctgtggctgactcctaaatggtttgatgagctgaactacatctaaactaaaaatagattttctggaaacattttattattaattatttagaacctttacctggtaaaatacagcagagttagcatcagagactaaatatcctgttgataaaatcctgatgatcttacaggctaaacaactgaaaactcaaacgcttgtatgagccaggcatagtgtaatttcttaacagctgggtataaaacaacgggcacctgaaggtattcagatacaatttccttaaaaataccttggtttccaagcaaaacacgttatttggctgagaacctttagtttgtagataccaaaccataatatacgaatgagatctcaagccaaatgaat

SEQ ID NO: 9924 - DNA, 451 bp, Homo sapiens
  misc_feature (1)...(451): n = A,T,C or G
gtggggtnngnnaatcgaagcccctngnnattgtagaccactagtccatgcggtggaattccattcttggactcttggacctctctgttcttcaagcatcgtgtcactgtgaaatcctaacgcccctgtgtcctacagaccgacggcacaacagacagctgcccatcccatgccatgctctaccctctgcctctcaccaggagacactctgggcctccaggacaattgctgcttgccggctcttatttttctaagcaatattgtgatggagaaaaataacatatttattgggatttggttttttgggtcttttttttttaagggaacaaaaaatggttaaatgaggtctgctgaagttgacttgaaaacacacttgaccctcaggcaggagggcactgaccacaccccacacaacctcaaagggtcagtgcgtcagtgccttttcttctgg

SEQ ID NO: 9925 - DNA, 446 bp, Homo sapiens
  misc_feature (1)...(446): n = A,T,C or G
gtgggtnnnnnnaattgtagaccatagtcttggcnggcgaattcgccggcttcacttaaccttgcctagtgtatcttatccctgcactgtgttgagtatgtcaccaagagtggtagaaggaacaaccagccaatcacgagatacacatgggagggcatttgcattgtgatggaagacagagaagaaaagcagatggcaattgagtagctgataagctgaaaattcactggatatgaaaatagttaatcatgagaaatcaactgattcaatcttcctattttgtcagcgaagggaatgagactctgggaagttaaatgactggcctggcattatgctatgagtttgtgcctttgctgaggacactagaacctggcttgcctcccttataagcagaaacaatttctgccacaaccactagtctctttaatagtattgacttggtaaag

SEQ ID NO: 9926 - DNA, 480 bp, Homo sapiens
  misc_feature (1)...(480): n = A,T,C or G
ggaaggggcggagccannnnnnnntttgaaactgagtactatagaccangcggnggaattcggagtacatgggcttgcagctacggcaggctgtctttgccaaggagagccagtgggaccccacgtggctgtacctgtgcaagagagcggagctgatccccagccacaggatgaagaagaagggccccagcctgcccaggggcctggatgtgaaggagcaggggcaaattcccttcttcaagttctgctaccagtgtggccgctccatcggggtccgcctcttgccctgccctcgctgctacgggatcctgacctgcagcaagtactgcaagaccaaggcctggaccgagttccacaagaaggactgcggggacctggtggccatcgtgacacaactggagcaagtttccaggaggagagaagaattccagtgaagcagcagctgcacgtccgaggcttggggaggacccaggactgtgn

SEQ ID NO: 9927 - DNA, 419 bp, Homo sapiens
ccaccacctcttggtaccagtgagagcgagagattgccttttcttccccatccctccttccagctaagaccaccaaccagctgcaaattgagatgtccatttaaaaatttatatgtcaatatttaaatgttacatatttggccctattttgtagttcagcaaatcctccaaatacacagcatgttacaaggcactggtggcacagggcacaacaggaaatgatatttatttagcaaattcatttaacaaatattattgggcacctgttatgtgagacactgtcctaggcactgtgggataacaacagcaaacacttcacacaacagcctggccttcctgtgttttacaacagctcctaaagatagctgatatcaagacatttgagggacacagttcatgtagaatcaaaatattagtat

SEQ ID NO: 9928 - DNA, 464 bp, Homo sapiens
  misc_feature (1)...(464): n = A,T,C or G
ggcggcgcgnnnnnntttgaaactgacagtcgtcgcagngngcnggaattcgtactaattcatgccagccaaaaattataacagtgattatttagttagtgaaattacattcgattagtgaatcttcaactgagaagggatagaactgccctataaaattcaatatccactacaagtctatcacattttaaatttaaaattaaagtttaaaattaaaaattcatttttctcagtcacactagccacattgctagtgttctttcagtagtcgcatattggacagtgacaaatacagggcagatgtagaaagtcctagtgtattgccggacagtactgctttagaactgtggctcatttttcttttggttttcatttaaattattttgaattgtataagggttttatctgaggaagaaaagaagattatttaggaaaatttagtattatcttgagttttctccact

SEQ ID NO: 9929 - DNA, 448 bp, Homo sapiens
  misc_feature (1)...(448): n = A,T,C or G
ggcggctcccactgaaaccncgactgagaccttagcacangcggcggaantcctggaatttcaacatgaatgttaatgtagtttgggttcctgctctctctcgctctctttcttttttcctgagagagtgattttgtaccatcagactgttttgaagttcttagtcattttgtttctttattagtaaaatgggataatggtacagcatggatgtgagcattagaatactgtgatttgggaaaagaacccagtgctgtaacggaagtctaatagctgctcagtacatagtaaatgctatttcaaatttagattaaagaaaaaacatgttcacggtctatgcaggcagtgtagctctatatgaaaaggaacctattgattaaatacttagaaagtttcaaaaagcccccttttaaatcctaagatattggcattcatgtgatggatgtcn

SEQ ID NO: 9930 - DNA, 446 bp, Homo sapiens
  misc_feature (1)...(446): n = A,T,C or G
gacgttttcccaactgagaccccnctgnagtatctggaaaannnccacnanncgcggncatgggggtgctggcgggaatccctcttccgcacagcctttgctgcggatcgctgcgagctgcagtggagggggattctccggatttgcgtcagctgttgctgaaatgggctctgccactggtgcgggtccaggaacattgcaatgtgctgctatcaattattaactacctcgggagtcaatggtagccggcccggtctcttgcctggcagctcgggtcgtcctcgtcctccagtgattgcttttcagtaaccaggcctcccgcttctctctctcctgccagagtcttttcctgacatctctctgaacaacgagaaggtgctggtggagaccagttaccccagccaaaccactcgactgccccccatcacctatactggccgcttttg

SEQ ID NO: 9931 - DNA, 470 bp, Homo sapiens
aatcgagacccctagtccagtttggtggcattcttcagcttagagacttgattggacatatagttgagttttctcaagaccagcatggttctagattcatacagcaaaaactagagagagctactccagctgagcgacagatggtatttaatgaaattctgcaagcagcctatcaattaatgactgatgtttttggcaactatgttatacagaagttttttgagtttgggagtctggatcaaaaattagccctggctactcgtattcgtggtcatgttctacccttagccttgcagatgtatggctgccgcgttattcagaaagcattagaatctatttcttctgaccagcaggtaattagtgaaatggtaaaggagctggatggtcatgtgctcaaatgtgtgaaagatcagaatggaaaccatgttgtacaaaaatgtatcgaatgtgttcagccacagtcactacag

SEQ ID NO: 9932 - DNA, 425 bp, Homo sapiens
  misc_feature (1)...(425): n = A,T,C or G
gggaaagccatagggtagggttcataattactgactgagatgggaatctgggtatgagttctctgccgttgcttaggaagaatacaatcccaaattcagacttgccctaggttctaggcctctaaggctggtctaggactactgaatgagttcattttagttctggaagggaatgattgagaagcatgcccttgcactgcctggagagacccaaaataagagtaaggacttactctttaactcattgatcccctgaccaagagagtctaagatgtcatcctgaagcttcggtggcaggatgtctttttcatcaccaacctataagaggacagagctccgaggtcaagcangaaggaagtgtggagtgaaggtggttggcagaaaagcataaggagggcatgaattctacacccccactccacccg

SEQ ID NO: 9933 - DNA, 467 bp, Homo sapiens
  misc_feature (1)...(467): n = A,T,C or G
gagcgcaanaaaanagtaagatgaaaccctngtanncctgagaacatagtccangtcgtggaattcgctccatcctggcctctctgtccaccttccagcagatgtggatcagcaaacaggaatacgatgaagccgggccttccattgtccaccgcaaatgcttctaaaacactttcctgctcctctctgtctctagcacacaactgtgaatgtcctgtggaattatgccttcagttcttttccaaatcattcctagccaaagctctgactcgttacctatgtgttttttaataaatctgaaataggctactggtagaaaaaaaaaaaaaaaaaaaaaaaaaaaaaaaaaaaaaaaaaaaaaaaaaaaaaaaaaaaaaaaaaaannngggcggnnnaaaaaaaggggggcctaaaaaacccccccgcccccccggggggggtttttaaccgccccccccccttggggg

SEQ ID NO: 9934 - DNA, 445 bp, Homo sapiens
agggtgctcccccctttaccccatcgagtatctggcaatcacgagccggggccgtgggctgttatctctctgcgtcctgagtggaattaccaattgagtgaactctgccaaggcagggagaggaaacagaactcaatgttctttttcagagttcaaaaatagtcctttttgagttttgaggaagatctagacttaaaaaaaaaaaaaaaaaattccggttccccagggctaaattcagccttgccattatctacaaaaaatgaaccaccaggcattgttgatgggccgttttctcccgtcactcacttttgtggacggggaggggggcccaaaaccaagggagagggaaagttgcgattttgtgcctagggctggcaaaaggtaatactaaccccaggctttctgcccatcaggggaaatctagctgggcccttcccttcctttt

SEQ ID NO: 9935 - DNA, 457 bp, Homo sapiens
  misc_feature (1)...(457): n = A,T,C or G
tggtgtaaaaagtgatctttanaccctngnannccaacctgctccactttggagagccgccctgtatgccaacacctgttgagccatgagacagaagctgtgagcctctggccctttcctggaccggctgggcgtgtgatgcgatcagccctgtctcctccccacctcccaaaggtctaccgagctggggaggaggtacagtaggccctgtcctgtcctgtttctacaggaagtcatgctcgacggagtgtgaagtggttcaggttggtgcagaggcgctcatggcctcctgcttcttgcctaccacttggccagtgcccacccagcccctcaggtggcacatctggagggcaggggttgaggggccaccaccacacatgcctttctggggtgaagccctttggctgccccactctccttggatgggtgttgctcccttatacccaaatcactctat

SEQ ID NO: 9936 - DNA, 417 bp, Homo sapiens
  misc_feature (1)...(417): n = A,T,C or G
cgggggaaggagaaagtgagactcggtttcatcaccaatccatcgccagaaggggaggaaattggaatccagcagcggcgagcagcagctgggcggtcacatctggaaatggaaagccgacctccccctcctcctccacctcctactncanctnatngngnngganctacctagatacaggattattgtgaacaccggtagttcttataaacctggctacgtcttaggtttggtctcaatctatttacaatcggtaccccactcgatacaactcctggcaggtgcacataatcactgtctcttttggcctgatttcacctgaaggagagtggatccaggctggatatgatccatgttgatagagatctagctgatcatgaagtccctactgaggactgcatgaagcagtccctcctt

SEQ ID NO: 9937 - DNA, 429 bp, Homo sapiens
ctggggctggagacggctgggggcgtgatgactgccctgataaagcgcaactccaccatccccaccaagcagacacagattttcaccacctactctgacaaccaacccggggtgctgatccaggtgtatgagggcgagagggccatgacaaaggacaacaacctgctggggcggtttgacctgactggaatccctccagcacccaggggagttcctcagatcgaggtgacgtttgacattgatgccaatggtattctcaatgtcacagccatggacaagagcaccggcaaggtgaacaagatcaccatcaccaatgacaagggccgcctgagcaaggaggagattgagcgcatggttctggatgctgagaaatataaagctgaagatgaggtccagagggagaaaattgctgcaaagaatgccttagaa

SEQ ID NO: 9938 - DNA, 461 bp, Homo sapiens
  misc_feature (1)...(461): n = A,T,C or G
gagcgcaaaaannagtaagctgaaccctgtaaaactganagcctcgtaagngncgnggaannncagctctattggatttatttccatttaattgcatcatgtgttatgtcttggtaaacactccatttcctgtcttggggggcatcctgtctgtgtacctgtgcagtacactttaatcatcaagacttcaaagagcttttgagctatcaaatcttgggagagtcccatctagcatcttaataattatttttccaagttcgttataattaactcctttaacctcatctcattaaatcaattttgtattatcattctgttgttctctggaaagcagccaattgttcagctcttgaatcacaattttcaaagactcacctctcttacctgggcttgcacatatttgtcctaagtaattctctatcccttaaacctctgagtccctctgttttattacttgcccc

SEQ ID NO: 9939 - DNA, 467 bp, Homo sapiens
  misc_feature (1)...(467): n = A,T,C or G
atgcgcgcannnnnnanattttaacctgagacccctttgtagngactgagaaccnttgggatctgccctgcctttctttggtcagtccctgtggtcccccaccagctcccccttccatagggctgcccaccaagccctgcccccagcccaagaggagcccccactgcctgcggggcagtgatgtctggccaccggctcacaccaatgacttggtcctggggtggcagaagcagcaggtgacaggagcagggcccctgtccctctcttctggccctgtggtacccaggccacacgttgtgcccgctcttagggctgaccggctgcagggaccaccagccgctgctactgtgggccgccccggggcagggtgggcagggcttttgtgggttatgaggacacagaagtccctgaggcccccagacctggcacagccaacctccttcctcccccggttgccccccactcta

SEQ ID NO: 9940 - DNA, 457 bp, Homo sapiens
  misc_feature (1)...(457): n = A,T,C or G
ccctagtgcatagaaagaatgaggacttccgnagaagcgcctctcccacccagcagactagctccctgctttgcctcctttcctttaaaaacaggccattcaggcatttgcctgaaaacttaaaatgacccacaccctattcccttacatatactgccagtccctccctccatccctcctctcctccctcattccctctctctctgtctctctctctgtctctttctctctctgtctctctctctcaatctaactcttcattgctgcctcaggtgacatgaggatggaggactgatctcccggctcattatgccctccttgcacaggattaagtaaaaatctttgaacttgtttcctattgttgaggtgtattgaatttgtccttctatctaaagaaccagaataagttttctgtgtgaaggactctctggtcacaggtcagacaactaggcattag

SEQ ID NO: 9941 - DNA, 448 bp, Homo sapiens
  misc_feature (1)...(448): n = A,T,C or G
aatcgatgaccacattgatagccgtcggaannccggcctttacctattcctgcacctaggctaggataactttagagcactgagataaaacgcaaaaacaggaatcatgccgtttgcaaaactaactctgggattaaaggggaagcatgtaaacagctaactgtttttgttaaaggtttataggaatgaggaggtttggctattgtcacatgacagactgttagccaaggacaaagaagttctgcaaacctcccctggacccttgctggtgtccagatgtctgcggttgtcagccccttcctttcccccgacctaaacataaaagacaaggcaaagcccgcataattttaagacggttctttaggacattagtccaccatcttcttggtttgctggctctccgaaataaagtccctttccttgctccaaaaaaaaaaaaaaaaaaaaa

SEQ ID NO: 9942 - DNA, 454 bp, Homo sapiens
  misc_feature (1)...(454): n = A,T,C or G
nctcgangtcccttgtacagcgtggtggaattcgcgacagaacgagactccgtccccccatcattttaatgaaagagagaaaatattatgtgtaaagtcaaattcaacccttgctgggcatggtggcacatgcctgtagtaccagctactcggaaggccaaggcaggagggtcacttcagcccaggaattaaaggctgccgtgagccgtgatcacacctgtgaatagccaccgcactccaacctgggcaacacaacaaaacctcgtttctaaaaaaaaacaaaggctgagcacggtggcttacacctgaaatgccagcactttgggaggctgaggcgggcaaatcacttgaggtcagaagttcaagaccagcctggccaacatggtgaaaccctatctctaccaacataaacattatccgggcgtgcctgtgattccagctgcttgtggggctg

SEQ ID NO: 9943 - DNA, 472 bp, Homo sapiens
  misc_feature (1)...(472): n = A,T,C or G
tccccactgtagccgtcgnnnnnaactgatgtcatcagtccagtctggtggaattccgagcatcccccaaagttcacaatgtggccgaggactttgattgcacattgttgtttttttaatagtcattccaaatatgagatgcgttgttacaggaagtcccttgccatcctaaaagccaccccacttctctctaaggagaatggcccagtcctctcccaagtccacacaggggaggtgatagcattgctttcgtgtaaattatgtaatgcaaaattttttttaatcttcgccttaatacttttttattttgttttattttgaatgatgagccttcgtgcccccccttcccccttttttgtcccccaacttgagatgtatgaaggcttttggtctccctgggagtgggtggaggcagccagggcttacctgtacactgacttgagaccagttgaataaaagtgcacaccttaan

SEQ ID NO: 9944 - DNA, 465 bp, Homo sapiens
  misc_feature (1)...(465): n = A,T,C or G
tacgcggggnnnnnnnaatttaacctgaaaccctantcagngatggagaacccattttttaaacaagttcagtaaaattgaatttctacatttttgcccaatttttttcctttttattttttattttttttacagagtctcactctgtagcccaggctggagtgcagtggtgcaacctcctcctcccatgttcaagtgattctcctgcctcagcctcccgagtagctgggactacaggtgcgcgccaccatgcctggccaagttttgtatttttagtagagacggggtttcaccatgttggccaggctggtctcgaactcctgacctcaggcgatccacctgccgcggcttcccaaagtgctggaattacaggcatgagtcaccttgcctgtcccatttttgcccagtttgtgtctcctcggtgtatgagtgtgtgtgttttgtcaggggcactctgttcctatn

SEQ ID NO: 9945 - DNA, 426 bp, Homo sapiens
aaagaaagaaatgaatccactatcatagctggagacttgaatacctctctatcagaaatgggcagattcagcaggcaaaaaatcagtaaagatatagttgaactcaataacaccatcaatcacctggatataactgacatctatgcgctaattcatccaagaacagaatacatattcttctcaagctcacactgaatatactccaagacagatcacattctggaccataaaacacaccattaacaaatgtaacataatagaaaccatatataatgtctgctctcagagcacaatgtaactaaactagaaatcagtcacaaacataattgaaaaaaatatcaaaatacatgagattacacaacaacctcttaaataacacctgggtcaaagaagaaatctcaaaagaaattttaaaaatattttaaa

SEQ ID NO: 9946 - DNA, 466 bp, Homo sapiens
  misc_feature (1)...(466): n = A,T,C or G
nttaaccctcgattccctattcagngtggaggaactctgaccctaaagactgctctccatgagagactcaggggctggggtagtaccttctaaatttccatgggaaaatgaacatgctccagcaagagcttgggaaaagaagatagtccctaagttttattgtttgaaatttgtcactcaaggatgtgaacgtgtcgctgacaattatgtagcatctcagagctcagaaagcacttttgcatcgattatttcatttcttgttcgtgccaattgtgtgaggtggacaacgttatgttcatatgagaaatgcagcccagagaggctcaaacccagcacttttaactcccaatctccctcttttctcagtaccatgtggtaagtctttattaaccagagtgtccaattaaccagaacatgcctgtgtcttatggatcatcccagactgattttctttgcagaaaacccc

SEQ ID NO: 9947 - DNA, 411 bp, Homo sapiens
  misc_feature (1)...(411): n = A,T,C or G
gcaggcctggggtagtctcctttctggactgagaagagaagaatggagaagcccctcttcccattagtgcctttgcattggtttggctttggctacacagcactggttgtttctggtgggatcgttggctatgtaaaaacaggcagcgtgccgtccctggctgcagggctgctcttcggcagtctagccggcctgggtgcttaccagctgtatcaggatccaaggaacgtttggggtttcctagccgctacatctgttacttttgttggtgttatgggaatgagatcctactactatggaaaattcatgcctgtaggtttaattgcaggtgccaggtactttcattctattactcttctttaccatgtagagttcagtttattgcccagaatactttatgcattcaaaacn

SEQ ID NO: 9948 - DNA, 451 bp, Homo sapiens
  misc_feature (1)...(451): n = A,T,C or G
atggatcncccactgaaantccgcctacnngngccagcacannccggnggaantcgnaangncagtacaggaaaaaaactgtgcaagtgagcacctgattccgttgccttgcttaactctaaagctccatgtgctgggcctaaaatcgtataaaatctggattttttttttttttttggcccatattcccatatgaaaaccaaaactttttttgtcctacaaacctggtttttaaaaaggaactatgtggctataaataaaacttgggccatgctgatagaacaaacggaatttttcatattttttataaaaattcctgcctttaaaaaaaaaaaaactactttcttggttggaaaaaaaaaaccctgaaaaaaaaaggggccttattttcattttatcaataagccagttaattggttccattgggaacattttaaaattcccctttgga

SEQ ID NO: 9949 - DNA, 458 bp, Homo sapiens
  misc_feature (1)...(458): n = A,T,C or G
cactgatgcatcgaccagatgagtgacctcctgganccncangcagccatacaaaccctggttccaacagaatggcgaattttctacagcctttggtatcttggagtatgaccccagtctgttataaactgcttaagtttgtataattttactttttttgtgtgttaatggtgtgtgctccctctccctctcttccctttcctgacctttagtctttcacttccaattttgtggaatgatattttaggaataacggacttttaaagaagcaaaaaaaaaagactgaatttccttgcttactttgcatatacagactggattttttttttttttttcacagcctttcccccaaaggaaggccttgcaaattactgacattgggaatgtttcattcataggaatatttcttattttctacgggttggaaaaacctgtaaaaaataccggatttgttattt

SEQ ID NO: 9950 - DNA, 480 bp, Homo sapiens
  misc_feature (1)...(480): n = A,T,C or G
agcttgcaggggccncctctgaaactcctcgtattaaaacccctccgcaanngcggnggaantcctggacacttaagatgggctcatgcttgaatagtataaaaatttttcagttaatttttcaaaaaagttaattgtaatcttcctggcttctagaattgcagacttttagattacgagtgggtctttgagattgtgttgtcctcacacaacacaatcccagaaaaatagtggcagaaacagaacaccaagccgggttttctcccttgcctctcagtgtccttcttaaaagtcatgctgcaggagatcccgggaaataggcgatgggcatcctcttctccccttctgttctagactcgcctgtgtcccaggggtcttttgctctaaaaggtgtgttatgtcggtcagtcagtgcccacagcacccagggttagcaaggtgatgaatggtagcactgctaagcatgtggatgagacgttc

SEQ ID NO: 9951 - DNA, 462 bp, Homo sapiens
  misc_feature (1)...(462): n = A,T,C or G
cactgatagctatagaaagnattgaggacctcggaagactaccaggctgcggaggagactgcttttgttgttgatgaagtgagcaacattgtaaaagaggctatagaaagcgcaattggtggtaacgcttatcaacacagcaaagtgaaccagtggaccacaaatgtagtagaacaaactttaagccaactcaccaagctgggaaaaccatttaaatacatcgtgacctgtgtaattatgcagaagaatggagctggattacacacagcaagttcctgcttctgggacagctctactgacgggagctgcactgtgcgatgggagaataagaccatgtactgcatcgtcagtgccttcggactgtctatttgacctgcagtccagcctatggcctttctccttttgtctctagntcatcctctaaccaccagccatgaattcagtgaactcttttctcattct

SEQ ID NO: 9952 - DNA, 460 bp, Homo sapiens
  misc_feature (1)...(460): n = A,T,C or G
ccagggtgcttcagaagnttgaggactttccttttcacnccatctatttgtgggtaagtggaggaagatataaagcatatgcatctgtctattaggcagagcctgtaagggaaattatgggcatctaggatttggagttggacagttagggtgatatcaagattaccttcaagcaaagcagtggctgggatttgatgcaacagggacgtgataaaacatgctcctaaccggcagcagctcatttcggaagactgagcctgagttaaaggccagagcaacataacagagttctccaaacagcacacagtgagagaaggccaaagctaaagaggacatcatcggatttagctgcttcactaaagtgttttgatgtagaaaatgaccttggtgctttagttatccctgatgtcaagacctttactctattntgcccaaatttctcagttagataacagcaaag

SEQ ID NO: 9953 - DNA, 470 bp, Homo sapiens
  misc_feature (1)...(470): n = A,T,C or G
ggatgaggnncccctcatgtctctcgtantangacggtnggcacaggcnnagaaattccgctagtccctattcatcatccaggaagacatcagttaccttgtaagtgttctttctcagatgctggctctggcaatggcttctgctcctaagctgggattctctgaattcacctctctctttagttttgggggtggctgctcgccctgtgacttcaattttctggttgacttaagagttgttgattcagcttttattcagccactttattcagctttttacttgctgcgaggatgggaatgatgactcccaagcccttcacatgtttgtgcacaaaccagaagtcctgtgttcacttttacccatttttttttctttctggattgcagnttggataatctcaactatcttcaagttcactgattcttctgtcaatcccaatctgctatgaaagcccttctagagacatttn

SEQ ID NO: 9954 - DNA, 452 bp, Homo sapiens
  misc_feature (1)...(452): n = A,T,C or G
attgtagatcccttggacagcgcggtggaattccacgtggggctgtgcctgatgtggggagtaaggggaagctggagcaggaggtctggagccacctggccctcttgggcctgacacccttccactgcagggcctctatcacctcctcctgtggtcctgcctcctgggatcctgccctgcagtgtttctgcagggatcttctcacctggaacttgctgtggcaggtttcatgtgaggtagagtttagcaaatgttgattggcctctgtgccttacttttcttcatatgctttgctcattctgtgcgtgtttctgtagggtccttttttggttcctatattgatttgaaggatttatcttaaatctgtaaattaatccttgattgcctcatttttgtcatagatacttattctctagtttgatcgttatttactttctgttgatttcatactn

SEQ ID NO: 9955 - DNA, 454 bp, Homo sapiens
tttgcctgagaccatttgacagcgcggtggaattataaaactctgatgaaccatgatggctacacagacattaagtatagacagctatcaagatgggcaacagatgcaagtagtaacagagttaaagacagaacaagatccaaactgctctgaacccgatgcagaaggagtgagccctccccctgtggagtctcagaccccgatggatgtggacaagcaggccatttataggcatccactatttccattattagctttgttgtttgaaaaatgtgaacaatctacacagggctctgaaggcacaacttctgccagttttgatgtagacatcgaaaattttgtaagaaagcaagagaaggaagggaaacctttcttttgtgaagatccagaaaccgataatttaatggtaaaagcaatccaggttttgcgcattcatcttcttgagctggaaaag

SEQ ID NO: 9956 - DNA, 443 bp, Homo sapiens
  misc_feature (1)...(443): n = A,T,C or G
agggttctcacctaaaaccntttgagantctcgaaancncgcnaaaaggntatgatacttatagaggactcccttcaatttccaatggaaattatagccagctgcagttccaagctagagagtattctggagcaccttattcccaaagggataatttccagcagtgttataagcgaggagggacatctggtggtccacgagcaaattcgagagcagggtggagtgattcttctcaggtgagcagcccagaaagagacaacgaaacctttaacagtggtgactctggacaaggagactcccgtagcatgacccctgtggatgtgccagtgacaaatccagcagccaccatactgccagtacacgtctaccctctgcctcagcagatgcgagttgccttctcagcagccaaaacctctaatctggcccctggaactttaaaccan

SEQ ID NO: 9957 - DNA, 447 bp, Homo sapiens
  misc_feature (1)...(447): n = A,T,C or G
aggggtccccactgaatcccgttaaaagngttagcanangcgccggaattaaatttattgagctattagatacgatcttttttgttctgcgcttgaaaaatagcctagtgactttccttcatgtattccatcataccatcatgccgtggacctggtggtttggagtcaaatttgctgcaggtggtttgggaacattccatgcccttctaaatacagctgtacatgtagtcatgtattcctactatggactttctgcattggggccagcctaccagaagtatttgtggtggaaaaaatatttgacatcattacagcttgtccagtttgttattgtcgccatccacataagccagttctttttcatggaggattgcaagtatcagtttccagtctttgcgtgcatcattatgagttacagtttcatgtttctgctgctctttctccatt

SEQ ID NO: 9958 - DNA, 451 bp, Homo sapiens
  misc_feature (1)...(451): n = A,T,C or G
agggttttcccaatgagagccttagagagtctcgaaacccaccctcgngctgtcaactgccgcaagaagaagtgtggtcacaccaacaacctgcgtcccaagaagaaggtcaaataaggtggttctttccttgaagggcagcctcctgcccaggccccgtggccctggagcctcaataaagtgtccctttcattgaaaaaaaaaaaaaaaaaaaaaaaaaaaaaaaaaaaaaaaaaaaaaaaaaaaaaaaaaaaaaaaaaantttataaaaaaaaaaaaaaaaaaaaaaaaaaaaaaaaaaaaatttgggggcccttttaataaagggggccttataaacccccccccccccccctttttttttttttttaaaaaacacctttttggggccccccccccccccatttttttttaagggggggggggggcccccccgggggttttttttaat

SEQ ID NO: 9959 - DNA, 463 bp, Homo sapiens
  misc_feature (1)...(463): n = A,T,C or G
ggagtacccgggtgccnaaaattggaccgctcgaacntcnggaaanncngnaannngagactcttgaactttatgacggagtcttcaatattttgatgtatatgaaacttttgttaaatatgttgtatacttcgctggctgtgtgaagtaaactaaaactctgatgaacactttggagtctgctttagtgaaggagaccaaagtgggaagggctttagggcactgatagaggccctgggtgtacttttcaatcctgtgtaatgtttaattcttgcaactgaatcaaaacagtgttaaattatggcaatatttgcactttgggaatgagtacataactgtatgatcacactctgcaaatgccacttttaaagctgttaatagactttgcaccttttctttgacaaggatgtgtcatatttaaatttttacattcatcatggctacaggtagaactggggagggg

SEQ ID NO: 9960 - DNA, 465 bp, Homo sapiens
  misc_feature (1)...(465): n = A,T,C or G
gagcgtcctcccgattatgcggcatgangcgntatcacgagcccncngcccgtacgcgatattgattctcattgtcagaatatggcgagcgtttcatcctcgtctgttcggctggagcttccggatggaaagtgctatgtgtccctgcatataagaatcaccacgccagagtttctgggtttgcttgcctatatagtgaggctatattttttgcctatacatttttcccacgtttccaacagcacttctcacctattcaataactgaaaaagacattaccatagtgctttacatttttaaagcaatgttacaaggtctggaatccatttggagcagataccgcgttttcgctatttaataagaagttcagtagtgaaatcttactgtaccgcctgttgtatctgggagcctcgcacagaggctcgcacagcagtgatcaagtgtcatcccttacgtgactggggg

SEQ ID NO: 9961 - DNA, 500 bp, Homo sapiens
  misc_feature (1)...(500): n = A,T,C or G
cgcccctccgaccccttcnnnttttgagaccctaggcagngncgnggaattcaaaacaggaaatttgtttaaattgactattttgagcaattttacacaataaattcaaaaactattttgagaaaaatgcagattgccaaaatttactctaggtagataaagtcacaacaaaccaattaccgtagaagaaacaaatagttaaaagtaccccttaccaaaagaagcatcaagcccagattgtttcaaggggatttctaccaaaccttttaagattaaataatcccattcttgcttaaacaattgcagagactaggaaaagaatcttgaacctcaaagtgccaaaaaaagaaaaaaaacaaataaagaaaaactcctgaattcattttataaaatgaatgtaatagcattgattcaaaaacctgacaaagatggtaccaaaaagaaaatatagagcaatctcatgaatattaataaaaagttttaatgataacattagcaan

SEQ ID NO: 9962 - DNA, 495 bp, Homo sapiens
  misc_feature (1)...(495): n = A,T,C or G
ccccctcganacccttccannattgagaccctacgcagngagccggaattcattttcttttgttgcctatgcttttggtgtcttatcccagaaagcattgtccactctgatgtcataaaggttttggcagcgttttcatttaggcatgttatagttttagctcttgggcgtaagtctttgatccagtttgtgttaatttttgtacctggtgtgacatagggtccaccttcattcttatgcatgtggaaatcaagtttctccaacacgatttgttgaaaagtatgcttttccaccaatgaactttcttggcacctattttaaaaatcattgggacatatgtgtgggaagttattcctgggctcaaaaacaaacaaacaacaacagataaaaatacagcatgggccaggtgcggttgctcacgcctgtaatcccagcactttgagaggccgaggtgggcggtcacctgaggtcggaagttcaagtccagcctgaccn

SEQ ID NO: 9963 - DNA, 461 bp, Homo sapiens
  misc_feature (1)...(461): n = A,T,C or G
cgccactgagccctagtccgttggaggacttcccagaccttctatctttaaagaagcctcatgattcaagatagctgctacagtgccagccatcgtgtcatgttttaggcaggcagagagagaggatgaagggcgaaaggacgcgtcttctagctgagttggtcctttaagatctttcctggaagcttcatccaagggcttctacatacctctctgtgaccattctgtctgcaagagatagagaatcataaagtcttttatctgaggaatttgctgcccagatggaatcagggttattttggaaagaaagaagggcagaatcgcttgttgggcaggcaacctgctgtctgtcctacaggtctcaacttgtcacactctcgggccatttggctctgcctctgggagggaggagactgggttgnggaagagtcacagtggaatattcaagttgacctcacagc

SEQ ID NO: 9964 - DNA, 222 bp, Homo sapiens
  misc_feature (1)...(222): n = A,T,C or G
ttgcgctancccactanaaaacccatttgcataataaaaagattagcatggggcagccagggtctttgcgtgctatataaacatcacacctgggccaaccaatctttgagtcctatgtaagttacacaccgcctactcaagtcaatcgtaaaaccccatgcacttgaccacacaatctaaggaccactagggtagcacccctctctctgtagaagaaagagg

SEQ ID NO: 9965 - DNA, 461 bp, Homo sapiens
  misc_feature (1)...(461): n = A,T,C or G
ggggaatcgagncccttngnnattgacgatcatctatccagtgcggtggaattctgctgttttattttctttattttatggttttcaatgatatatttgttgttctttgaggcttcagtgctataacctctattcttataagtatgctgtttagttgtatttaatattatttttttaaaatgtactgtctgctttttaactttagatgtcattggattttttatattttattttgaatgaagaccatcgcacagattgggaactgaatcttctttagagatgcttatcttggatatttttttctttttcttttttttttttttttttttgggggaaaactttacttgtgaaccccaggtggaagggcgggggggtaatttaacttaatggaaccttttacttggggggtaaaacaatttttcttcccttcccccctggagaacttaaaattccggggcccc

SEQ ID NO: 9966 - DNA, 452 bp, Homo sapiens
  misc_feature (1)...(452): n = A,T,C or G
ggtaaacatcgatngccctntnanncctgatgtccctagtccgtgtcgtggaattccctcactaacttatcttttaagattaaaaataatgtaaccaagtgggaagaaaaagagcaaatatgaacaaattgtcattgttttagaatctgcttcttttcctttccggtatttctgtgcaaggagagaatgatctctgaccttgtgaaaggcaaataccatgtgtattcatggttgttattcatttggcaacgacttgaaactcatgacactccctgctgaagatcctccacctattcttaacagctgggctccccagctcctggatcaccaaccagtaccagtctgtggcctgttaggaactgggcttgtacagcaggagctgagcagctggagagtgagcaaagtttcatctgtattgacagctgctccccatcgctcacatacattaccac

SEQ ID NO: 9967 - DNA, 494 bp, Homo sapiens
  misc_feature (1)...(494): n = A,T,C or G
cgccgatagagaccctatgccanatagaggaccntgcgccattcacccggagcccggccactaccgcttcacgtggacggcgcggctggccttcacgtacgcgccctcggtggccgaggccgacgtggacgtgctgctgtccatccccatgttcctgcgcctctacctgctgggccgggtgatgctactgcacagcaaaatcttcacggacgcctcgagccgcagcatcggggccctcaacaagatcaccttcaacacgcgcttcgtcatgaagacactcatgaccatctgccccggcaccgtgctgctggtcttcagcatctcctcctggatcatcgcagcctggaccgtgcgcgtctgcgagaggtaccacgacaagcaggaagtgaccagcaacttcctgggggccatgtggctgatttccatcaccttcctctccattggctacggcgacatggtgccccacacctactgcgggaagggtgtgtgcctgn

SEQ ID NO: 9968 - DNA, 508 bp, Homo sapiens
  misc_feature (1)...(508): n = A,T,C or G
caggggnnnnnnnanttcagacttccctagtccangncgnggaattcgcctaggctgggatgctgagttatccactggagcatcagcagtacaggcaggcacagaggcagtggttccatcggaggtggcaggtgtaggatcatctggtgagcaagtagagtcaccaaatctggctgaccactacccccactacccccactatccccacagacgattccctgtcccttgcctcatgctccggcagggtacaggctcgcacctggggcctcatggagcatctctctaagacctctgtgtcctggtcattgaatgggcacttgagtcacccagggccattggaacaaagaggaagaatcaggccccacgatgttttgggagagtgtttagcacaatacatgcacgacacgggggcactgtcagtgtgggagcaatagtttacaacctccagccctaatctgagcactctcgaacctgtgcaatctgaaaggaacaggagacttgcaggaan

SEQ ID NO: 9969 - DNA, 469 bp, Homo sapiens
  misc_feature (1)...(469): n = A,T,C or G
tgggcgggnnnntnnnaatagatagcnntacntgngnggnggaattcataaaaagactaaagaagaagttgcaggaactctggaagctgtccaaaccattcagagcataactcaggccctccagaaatccaaggaaaattacaatgccaagtgtgtagaacaggagcgtttgaaaaaggaaggagctacacaaagagaaatagaaaaggcagctgttaaatctaagaaagctacagatacctataaactctatgtggaaaaatatgcattagcaaaagctgatttcgaacagaaaatgacagaaacagctcagaaatttcaagatattgaagaaactcatctcattcacataaaggaaattataggatccttgtcaaatgctataaaggaaattcatttgcagataggccaggtccatgaagaatttataaataacatggctaatactacagttgaaagtttgatacan

SEQ ID NO: 9970 - DNA, 463 bp, Homo sapiens
  misc_feature (1)...(463): n = A,T,C or G
aggggaatggagacatctgnaattgtacgacattagtcagngcggtggaattcgggaggaggacagctggacgtctgcagagttggccttgggacacgtgcttggtctcacatggctggggcctggtttgatggggtaatgaagcattgattacaagaaaaaaagatgaaatggcctttgctcattcgttatttttatctcctagctgtggaagacagaaaattgttcataggaatggtttcgaagaaatgtaatgagaacgacatcagggtgatgttctctccatttggccagatagaagaatgccggatcctccggggacctgatgggctgagtcgaggtgagtgtgctgtctggaaagcctctccccttcagtgctaattggagctctgtgtcacagtcgagacagatgtaggcaccgcacacggcaagaggtcaccctgtaatacatcccatgtgatan

SEQ ID NO: 9971 - DNA, 454 bp, Homo sapiens
  misc_feature (1)...(454): n = A,T,C or G
nttgaccttgcagacatcggacagngcggnggaattcgaaatatgacctttaagcacttgtgggctcttgtaatcccaatgtaaaatgagaccatatatttgctaccaattttctattgattgatggattgagacagagtctccatctgtcgcccaggctggagtgtagtggtgcgattgattacaactcactgcagccttgatctcctgggctcaagtgatcctcctgcctcagcctcctgagtagctgggactccaggcatgcaccaccacgcctggctcatttttgtgtattttttgtagagacagttttgccatgttgcccaggctggtctcaaactcctgggctcaagcaacccacccaccttgggcttccaaagtactggaattacaggcatgtgccaccctgccgggccctagttttctatttaaaatccccaatgaaggttaaaca

SEQ ID NO: 9972 - DNA, 454 bp, Homo sapiens
  misc_feature (1)...(454): n = A,T,C or G
nattgaagtagcattacatgngcggnggcattccccgttcccctgcagagctacggngaccggaaggcgaaacagagctgtggacgcgggagcacatgctgcccaccagtggagcacaagtaaagaaagaacgcgcgattgcccggcgcggagaggggtgggggaagccccgccaggactgggcggcgcccggcttggagaatcagtaactgcgaggcaggggatggagcactcccttggcctggttgcgctgaggaaggagttgtggttcatctggatgctgccgactggataggatttaggatttgcctggattaaggtcatcaaagccgaatccgaacttgaattctgtgcggcggattgcagagctgtcttgaggccctgaggactgggatctgcgacacccagtggacaaaagtcggccgtaccccagaggctaattttctcacggcag

SEQ ID NO: 9973 - DNA, 477 bp, Homo sapiens
  misc_feature (1)...(477): n = A,T,C or G
tattgcnacttaagagtgctntncggnaacgcggnggaatttatactgtatttctccttttctctgcaggagctactttttgcagatgtgttgaggtgttatgtcacagcacaatatctttgaactatatacatccttgatgtataatttgtcaggagcttgacttgattgtatattcatatttacacgagaacctaatataactgccttgtctttttcaggtaatagcctgcagctggtgtttagagaagccctactgctgaaaacttaacaattttgtgtaataaaaatggagaagctcttattaaaacatcggggagggaaagcaaaaaaacaaggatttttagaaaatgtaatggcggggattactaaaataacctgtgtgggggaaagaattttggctttaagtggtaacggggtattctgaattttctaccttagttatcattaaggtggttctttattgcacatcggacg

SEQ ID NO: 9974 - DNA, 463 bp, Homo sapiens
  misc_feature (1)...(463): n = A,T,C or G
ggcgggcccggnttgcaaaactagtantactcaaggccttggananccccggaagnnngagagagggctggggtccttcgtggtgggagtcgcagtgggctgtgggtgcctgcctagtgctggagtaggggacaatgggaatcctagaggggatggaagacgcggggagtgagctgggtgggccctgctagcgagagaggtcaaccccggtggccagggaacccacttccaagcgcagggacgccggcctccagctggtgtgtgctaaggctccgtcctgactgccctgtgccctggaaaagcagcaatagcatccgccccttagagccctctggctagaggagccaccagtggaaaggaagaccctccatcctctggtattaacgccttaatgcccctgtcttttactgtaagttacttaagatcatttttggaagcaggcgtggtagagtcctggtaatgn

SEQ ID NO: 9975 - DNA, 477 bp, Homo sapiens
  misc_feature (1)...(477): n = A,T,C or G
catgacccccctnggactgangaccataggacangcggnggaattcccgtttttcatctgtaaaatgaagatactattaatgataatatggacgttatgaggtcacgaaaattcattaatatatgttaagtgcttagaacagtgcctgtcataatatgtgctgaagaaatagccattattatcttagaagtggggaatggagaaaattgtacttacagattgtgtatgtttggaagataccagcctgcatggtttggttctaaataaggtgatcattacaggatttttcagaaaactaaatagtactatgttagaattcgctcaacaaatgtattttgaacccctaccatatgccagaaacaataattgacaggagtagaattccaggtttgataattctttatttaaattcttattttgtgggataattatgtgttcgttgttttactttgctgaagttatatcttggtaccttcn

SEQ ID NO: 9976 - DNA, 444 bp, Homo sapiens
  misc_feature (1)...(444): n = A,T,C or G
nttaaaatgagaacctgtccangtcgaggaactctgtttgcacaacagctaaatctgctaatgatgcatttctcaaaacatgtctccattgttaagcgaagcttgactgtatgtgcatagagaactgtctggatagacttatgaaatagttaacagttgctatatttacatgtagatgaactaaagggcagtaaggagtgaaaagcgaacttctgcttaccaattttttttaaataagtttaactcagatatattaataacataaaattcacatactatacaattcacccatttaaagtgtacagttcagtggctcagtatattcacgaagttgtgtagccatcaccacagtccattttaggaccttttcctcacctcagaaacttcaggccaggtgtggtggctaatgactgtaatcccagcagtttgggaggccaaggtgag

SEQ ID NO: 9977 - DNA, 461 bp, Homo sapiens
  misc_feature (1)...(461): n = A,T,C or G
gggcgccgngnngttatagatagaatncatacgcaggngcnggaattaattttttagacactgattttcaatttaatgttttcattttttaaatcttttagtttatactctattaaactgaaatattatggttggaaaacataacttattttttaaggcataacttataatagctttgtattccatcatatgaagaaaccttcgtttatccattctcctacggagttatattcaggctggatcagttctttgctgttaaaatactaatacagtcagtatccttggacatgtatctctatggctgggtttatctacgtaactagaagtgtggctgcatcctttacttcactagatactgccacactgccctgctaaatatagacttgctcatttttctaaggatggtaggatttttgatttaagagagatttattaacctttcttattatatacagaatgan

SEQ ID NO: 9978 - DNA, 443 bp, Homo sapiens
  misc_feature (1)...(443): n = A,T,C or G
ataaaatgagaacctggaagnctgaggaaccttttaggggncgaaaatccattacacagtcactttacgttaacattgggtcatcttatgtttgtatgagacggatgtgggatttgaggggaacattgtcattcccttaaaataactatcatgaaaaaaatagcaacagtatgtaaagggaccaagagtggcagcctttagggaaaatggagcagagaagagctgtgaacaaagctcatttatttgaaataagcgtgctttatttcacatagaggggcatcagacgttacatttcattcggacaaattactgaacagccgaagtgattgtttccaatgtaggttattataattattggatacaaagatttaactagtgtttctgggttggatttttgaaatagtatgcaagtcataagcacagtttcaataaaacacgtattn

SEQ ID NO: 9979 - DNA, 472 bp, Homo sapiens
  misc_feature (1)...(472): n = A,T,C or G
ctcgagacccatggacagcccctcggaannccggccgccttctgctggatgagcctcgaaggcctggagctctactttcttgtggtgcgcgtgttccaaggccagggcctgagtacgcgctggctctgcctgatcggctatggcgtgcccctgctcatcgtgggcgtctcggctgccatctacagcaagggctacggccgccccagatactgctggttggactttgagcagggcttcctctggagcttcttgggacctgtgaccttcatcattttgtgcaatgctgtcattttcgtgactaccgtctggaagctcactcagaagttttctgaaatcaatccagacatgaagaaattaaagaaggcgagggcgctgaccatcacggccatcgcgcagctcttcctgttgggctgcacctgggtctttggcctgttcatcttcgacgatcggagcttggtgctgacctatgtgn

SEQ ID NO: 9980 - DNA, 454 bp, Homo sapiens
  misc_feature (1)...(454): n = A,T,C or G
cttgaaactgcagacactagaccangcggnggaattcgttctgcacatggagccttggtcatcatttgatatatacacccggaaagggccgctggaaaacccaaagcgtagggaattattagaccaattacaacaaaagctgtatcttattcaaatgattcctcgtcaaaatttatttaccaagaacttaacacctatgaactataatatattttttcacttgttaaagcactgttttgggaggcgcagcgccactgtaatagaccacttacgttcattgactccacttgatgcgagagatatattgatgcaaataggaaaacaggaggatgagaaagtagttaacatgcaccctcaagacttcaaaacactttttgaaactatagagcgttccaaagattgtgcttataaatggctgtatgatgaaaccctggaagataggtagcaactagac

SEQ ID NO: 9981 - DNA, 474 bp, Homo sapiens
  misc_feature (1)...(474): n = A,T,C or G
cggcgannnccggcgtgcnaaaaattgaaangcttagnnnngctnagnagaanncggcggaannncaggaactttagtggcttcaattcgtttaagaaacatattaagtttgagggaaaaatttcccatgaaatatttggaacgtaagagtagtattgattagagaaaattaaataagaaacatagtatggtagccaaattttttaaaaaatcttgaacttttctgtaggtcagttttagaactgctgtgaaaagtgaaggttgccctgtggagattaaaattagagttgttttcataactgacagcatggtgaatccatttgagtcaaagtgaagaatttcctcatcaagtgactatacatttgtttttgtgtgctcaaaagaaatactcaaacacagactgatattaaccagccaggtaaattgaacgacaatgtggcattaggtatttggctgtttattgggcgttaaata

SEQ ID NO: 9982 - DNA, 454 bp, Homo sapiens
  misc_feature (1)...(454): n = A,T,C or G
aggtaagatcgaagnccntntnnnaactgagaccctactcagtgccgtggaattcgtgtgtggtggcttccacctgtaatcccagcaatttgggaggcggaggtggaaggatcacttgaggccagcagttcaagaccagcctgtgcaacatagcaagaccccatctctacaaaaacaaacaaaacacagcaacaaaaagactaaaagatctactatctgtccctttgcaaaaaaagttcaccaagcccatctaagactttgaaagactcccaaatgaccccagatttgaaaataatactcaaaggggctctgtctgtaggaggagccttggcattggctggcatgttaatttcctaggggtgtcatcacaaattacaacacacctagtgtttaaaacaacagatattaactctcacaattctagaggccagaagtgcaaaatcaaaatgtcagc

SEQ ID NO: 9983 - DNA, 453 bp, Homo sapiens
  misc_feature (1)...(453): n = A,T,C or G
cactgagtacattacactgngcggnggaattccacacctgctgagacttgagccccaaccagcccttccttgccactggtctcaaagctgggcagcccattgcatgccctcaactcttgcttggcaggggtaccagagactgaaagacacggcacaaatctcaatattcatctcccacatcaccttccctgggaactggacagggtgaaagtcctcaaactctgggaacaggcgagatggaacagggatttaactccccgcccacaggtccatgggagcttgaggcagtaagggggatcccaggcacccatctcaaggagtggctgggagtcttttccctaacttgtggggacaccaccagttgtcaagctactaagcagtagggtctgagggctcaggcctccacctgagaggttataacctgagagacagctctacccttcctcccagtan

SEQ ID NO: 9984 - DNA, 472 bp, Homo sapiens
  misc_feature (1)...(472): n = A,T,C or G
natcgtagacactgncatagtggtgcaattcggccaaaccacttacagcggagtgatagactgctttagaaagatactgcgtgaagaaggaccaaaagctctgtggaagggagctggtgctcgtgtatttcgatcctcaccccagtttggtgtaactttgctgacttacgaattgctacagcgatggttctacattgattttggaggagtaaaacccatgggatcagagccagttcctaaatccaggatcaacctgcctgccccgaatcctgatcacgttgggggctacaaactggcagttgctacatttgcagggattgaaaacaaatttggactttacctacctctcttcaagccatcagtatctacctcaaaggctattggtggaggcccataggaagatcagccctgggatagtgctgtctttttgtgggtactgcagtaaagaacatccctcctgggaatgaagcaa

SEQ ID NO: 9985 - DNA, 454 bp, Homo sapiens
  misc_feature (1)...(454): n = A,T,C or G
atagacctgcagtacattagtccagngcggtggaattccctcctttggttatgataaaccacatgtgctagtggatctacttgtggatgatagcggtaaagagtccttgattggttatagaccaacagaagattccaaagaattttcatgagatcagctaagttgcaccaactttgaagtctgattttcctggacagttttctgctttaatttcatgaaaagattatgatctcagaaattgtatcttagttggtatcaaccaaatggagtgacttagtgtacatgaaagcgtaaagaggatgtgtggcattttcacttttggcttgtaaagtacagacttttttttttttttaaacaaaaaaagcattgaaacttatgaccctttacttccagataggttaccagtaccggaacagtttccagtcctcctggttcctaggggagcaggtgatgg

SEQ ID NO: 9986 - DNA, 498 bp, Homo sapiens
  misc_feature (1)...(498): n = A,T,C or G
agaatgtccccagggctngccnnaatacccgaaaatgctgatgnnntgccctgnannanncnncgnaannnnnannaagcttacacacctggacaagggtgttagatgagatttgaacaagaattaagatgatatcagtttcttctacatttatatggatacaagagtgggaataagaattctagagtccccctttctcactcggctgttcatttaacacctactcttggccacgtgtgaatgaatctgcagtttctaatgagtcacaaccacaactgaaagtcttctccctggctcattcagctcccctgaccacagaggaagaggatcactgtgctaatggacaggactgtaatctaaatccagagattgccacaatgtggattgatgaaaatgctcgtgcagaagaccagttaattaagagaaactatagttgggatgatcaatgcactgctgttgaagtgggagagaagaaatgtggaaacctggcttggctgc

SEQ ID NO: 9987 - DNA, 479 bp, Homo sapiens
  misc_feature (1)...(479): n = A,T,C or G
ntaagagcatgctcggtaagtagatcatcggacanngcggnggaanngctcacacctccatcctgcgagagggaacactgcggaaacatcttatggaggacatgtttgctggaactctggtggggcggaggctgtagttggggccataggacgccgacaaaggcagcgctgcatggtggtgctacttcatgtgttatgatagcggatgctgaggtgagggggatgcggacatggggtaggatgacctaaagaaacttatgatgtctgcacacaaactggccgctagacggacgctgaggacattttctccctgaggcctctattcaaggcttcctgggggccatctcagcaaacaggagactacaggggactggggatcagggtgtggcctgtgagtgtcatcctcctcctcggaaaaagaaaagctttgggtcaactcaccatcatgtttgcagatgctgacagacggcatcctaatg

SEQ ID NO: 9988 - DNA, 472 bp, Homo sapiens
  misc_feature (1)...(472): n = A,T,C or G
catggagaccctaggaatgatggcgtttgcgncatgaaaggtttcaaatttaaatagccctcatagacagaagttttagaatgaactgcttagttcctgctatagggcaacttacttagaaaacagaaactgaacctctttaagagctaatattttactctttaccaagttgttttcaaaagactatcctctttagcatataaagtaaaggctcaagaacaaggacaagtgatgcctaaggaatcctggaatgctgaacctggaaagagggatttctttcataaaacaaaaatccatccatttaatttaatatcctcatgctttctgttttttattattattattatttggcatgagaaggtaaagcggtgtctgtatcgtgtgctgtctccattctagcaggcatgttggtaattagcctgttttatctgctctcaatatgtgctattttcagtgtctttggcaaaacacc

SEQ ID NO: 9989 - DNA, 461 bp, Homo sapiens
  misc_feature (1)...(461): n = A,T,C or G
ncgcagcncggntcctatagatagcntncatangcgnggcnggaattcagaaacataacatgtagttagctgtctgctcatggtttgttcaaatctaagctaaccttaatggtgctgtgtccgctgtccacagaaaacgcccttaagtagccctaccttactccttagagcttattttgcttttgtatttaataaaagctgtcttaaatgtttccttgtgtagtttatgcataatggttgagtctgtgtgttaattcaatttcaaatgccactagtttgtgaatgaccaggactctgattctctctccgccctctttcctcattgttttggggaatatcacacaggttaggtagagaaaatacttttccctggaatgctggaatctttaactggacaattatattttagtaactgacatctcatgtttctttgttatagaatagctgatgctctcccgtat

SEQ ID NO: 9990 - DNA, 486 bp, Homo sapiens
  misc_feature (1)...(486): n = A,T,C or G
gggatgagccactgaggcgtggaaanccgcggngaagctgtacgtcggcagccccagccccagaaaaggaacctactctccatgttcgtctctctggagcaacctgaagacaggatcttggcctcaggacagttttgcaggctgggaagtccaagataaagccaccagcatctgacaatggccttcttgcaacatcctccaacagagaggaacaacatgtcctcacatggcagaagagcacagaggaaaaagaagaccaaactcactcttttataagagcattaatcccacataggaaggcagagccctcatggcccttttgcttcccaaaattctcatattctaataccaccacggtgggaaccaaatttcaacatgagttttggagcagacaaacattcaaaccatagcaccgctcaaacctttgatgagaccacatcctcagcaaacacctagattaaaatctggtgagctcttaaagcagag

SEQ ID NO: 9991 - DNA, 464 bp, Homo sapiens
gttcgtagaccatagaccagcgcggtggaattcgtgaaagttaaattagaaaccttgtagaggaaaaataggaaatagtttcatgaacttgacacaggaaaatatttcttagactagatactgtagcactcaccacaataagaaatcaagcgaattgcacttcatttttaaaaagcttctccttattatgttgttggttaacaacttaaacgctatctctagaccaggaataattatttgctatataatacagcacaaaatatgtatgtataaatggactcattcaaaatatataacgaactcctattacaaagaaattgacaaacagcccagtatatcaatgaatataaaaatttgagaagatattttccataagaagatatctaaatgaacattaggcatgagaaaaccaaattttaggatatcactacacacctggtgtagtttaaaagactgaagatatt

SEQ ID NO: 9992 - DNA, 458 bp, Homo sapiens
  misc_feature (1)...(458): n = A,T,C or G
nctcgagttcgagtacccagngnggnggaattcagcaggctgtgctgcacatggagcagcggaagcagcagcagcagcagcagcaaggccacaaggccccggctgcccaccctgaggggcagctcaagttccacccagacacagacgatgtacctgtcccagctccagccggtgaccagaaggaggtggacacttcagaaaagaaacttctcgagcggctccctgaggttgaggtgccccagcatctgtgatcctccgggaccccagccctcaggattcctgatgctccaaggcgactgatgggcgctggatgaagtggcacagtcagcttccctgggggccggtgtcatgttgggctcctggggcgggggcacggcctggcatttcacgcattgctgccaccccaggtccacctgtctccactttcacagcctccaagtctgtggctcttcccttcc

SEQ ID NO: 9993 - DNA, 450 bp, Homo sapiens
  misc_feature (1)...(450): n = A,T,C or G
nactgattgcatagcatgngcggnggaattncagtttgagccttcagtgagctatgattgtgccactgcactccagcctgggtgacagcgcaagaccctatctctaccaaacaaccaaccaacaaacaccttgtgatacctgtgattgtattttttattgattgtgtttttgtatttaatattgaaatagtaacatactagttggttttattgttggtacattgtaatacttaaagtaagtgtgtggagttttgttgccctgtgatttattttcagggaaactggaggccaaaggagaagaagtcaaagcaaggtagttaatgaggttgggtgagacctgtgggatgtggtgtgaggagcattggatgggaaagaaaaggcccccaggataaaataaacatggaaaggatgaggacacagggtttgactgtgtaatggaaatgttttttn

SEQ ID NO: 9994 - DNA, 472 bp, Homo sapiens
  misc_feature (1)...(472): n = A,T,C or G
cggtgtcccaggnttgcnaatacctaactgcccgacctcgattgnanaanncnagnacantaccacctnggtaatgagctccattacagaaagtggaacataagagaatgaaggggcagaatatcaaacagtgaaaagggaatgataagatgtattttgaatgaactgttttttctgtagactagctgagaaattgttgacataaaataaagaattgaagaaacaaaaaaaaaaaaaaaaaaaaaaaaaaaaaaaaaaaaaaaaaaaaaaaaaaaaaaaaaaaaaaaaaaaagaggggcccctttttataaaagggccccaaaaaaaccccggaaaaacccctgggggtttttttttagacccccccttttgggggggtccccccccccggttttttttttccgggggggggcgcccccccctttttttttttaaaaaaaaaaagaaaaaatctccttttttgttgggaggg

SEQ ID NO: 9995 - DNA, 444 bp, Homo sapiens
  misc_feature (1)...(444): n = A,T,C or G
tggggcnnnatcganncccatcgtagacatctgtccatgcggnggaattcgtggggcctggcaccgtgcagttgaagagcacctggttgtttaagttaatgtaaaatgtccgccccaatgagaagctttctggacgtttccctcccagggagtctgcgggtcataggcagtcaccggggaggtgtccaattcccaagaggaacaagagagaccaggccaagtggggggtcttggggaggctgcgccaacgtgtgggcccctcccgacgccacggggcctgcacaggctcccatctgcctctgggcgtgacccagatgcaggaaggtatctggggaaaggaatgcccatggcagtcatggcacagtatcatccctggagcctccatcctgcccccacagactagaatattccctggaggaatccccagcctagctgggaagggcg

SEQ ID NO: 9996 - DNA, 500 bp, Homo sapiens
  misc_feature (1)...(500): n = A,T,C or G
agggaagcagagccngccncnactgatnactangagcantagcaagagncgnggaattctcctaaaaaggcggtagtgccgagactgagaaactgcgccccagggtactgttttaagattggatggagggccgggcgcggtggctcacgcctgtggtcgcaacactgtgggaggtcaggcggtcggatcacgaggccaggagatcgggaccatcctgattaacacggtgaaaccccgtctctactaaaaaatgcaaagggttagccgggagtggtggcgggcgcctgtggtcctagctgcttgggaggctgaggcaggagaatggcgtgaacccagcatgcggagcttgcagtgagctgagatcgcgccactgcactccagcctgggcaacagagtgaggatctgtctctaaataaatatataaataaaagaagggagggagacatagtttttagctggagtcaaaagaaaaaatcctcatggagaaggggagcttgggn

SEQ ID NO: 9997 - DNA, 445 bp, Homo sapiens
  misc_feature (1)...(445): n = A,T,C or G
tggggcccgnaatcgaagaccaatagacagtcctgcggaanncccggcctggaaggctacaagtgtcaagaaagattctgtttcgaatatagccacagaaataaaggatggacaaatacgtgggacagtgtgttctcagagacgaccagccttgaagactacaggtgatgagaaagattctgtttcgaatatagccagagaaataaaggatggagaaaaatctgggacagtgtctcctcagaaacaatcgggccagaaggttatatttaaaaagaaagtttctcttttgaatattgccacaagaataacgggcggtgggaaatctggaacagagtatcctgagaatctgcgcaccttgaaggctacaattgaaaataaagattctgttctgaatacagccaccaaaatgaaggaggtacaaacatccacaccagaacaagacttt

SEQ ID NO: 9998 - DNA, 463 bp, Homo sapiens
  misc_feature (1)...(463): n = A,T,C or G
acgcagggnnncttcccatagtatagcctgcntangncgggcattccatacaggcattgcaagtgaatttggaggtgaaaatacagctgggattatgttcccctgcctcctccacccacagtttgctgaattctattcctgccatacagcttccaaaggagaaggaaagatgtgaggcaatgtcatggcatcaagacagatcatacctgtttcccattacctcactagatcctggcccttttcccaagaagtgaattatgagagctgacagaattcattcttcataaatccatgcaaagggctatgccatccattttagcctttttttcctcttttttttttctctttattggagacagagtttctctcttattgcccaggctggagtgcaggggcatgatctctgctcactgcaacctccacctcctgggttcaagtgattctcctgcctcaccctcctgag

SEQ ID NO: 9999 - DNA, 451 bp, Homo sapiens
aagctgtaaggttagcatggttctgcctgggctttgcttctgtgcttctctgcaggctgagctgtaaggttagcatggttctgcctgggctttgcttctgcgcttctgtgcaggctgagctgtaaggttagcatggttctgcctgggctttgcttctgcgcttctgtgcaggctgagctgtaaggttagcatggttctgcctgggctttgcttctgcgcttctgtgctagcaggtgcccacaaaatgtctttttgaatttcttaatttttgggttctggatgcaattcgtgcacgccaagaaactacttgcttgtcagtattttaattctgtagtacatgtgtgtgaatatcagccagtacttacagtaggaggatgaacagaaaaactgagaagacctgtctttcaaaagatgggtttatccactttttaagggaaaaagtgacagtttg

SEQ ID NO: 10000 - DNA, 460 bp, Homo sapiens
  misc_feature (1)...(460): n = A,T,C or G
ntttgagactcgcgatccctagtccgtgtggtggaattcgcgacatggagaaaccccgttcttttcatcctctgctatggagaagggacgaggacacgggtcctgcagtgttggtgtggcgaggcccggaagaagagagaatgggcggcggggactggccacggcgctgctagttatgaaaaacctcctcctgggcttatcaaggttggcattgcaaatggtacggtcaccgaacaggctacaaagaatgccctttctttatcaaagacaaccaaaagttacaacagttcagagtagcacatgaggatttcatgtatgacatcatacgagacaataaacaacatgaaaagaatgtaaggatacagcagttaaaacagttactggaggattctacctcaggtgaagataggagcagctccagttcctctgaaggtaaagagaaacacaagaaaaagaagaa

SEQ ID NO: 10001 - DNA, 466 bp, Homo sapiens
  misc_feature (1)...(466): n = A,T,C or G
cgcttcgagaccttagtagacctctagcagtgcggnggaattcgaagggagacggaaggagccaaatgctgcagagatgaagggagatgaaaggagcctaatgctgcacagatcaagggagacggaaggatgtcgcctccagagctggggccacgggcagcgccagggcaggttcatcactgatggcaagtctgtggctgaccacgttcacaggggtggccctgagcaaaggtcggacatgaggacccaggagaattcaggccccggctctgggacggctgtgcacccccaccctggccgtggctggcacctcagaaggcacagctgtccttcactcgcacggagcaacctcgggacagatggtgggagaggaagggcaactcgaggaggcacattttaggaaactgcccacggagccagtttcgattctccaaacctcgtcagcatgcagaggctccctgactcg

SEQ ID NO: 10002 - DNA, 451 bp, Homo sapiens
  misc_feature (1)...(451): n = A,T,C or G
cctgacgtacattaccatgngcggnggcantcgacaaggtttaaaaacccaaaatataaaattttataaggattctcatgtatgttaaatgatgacaaattttcatattgagtcaggtgaaattctgttttcaggtaagaagcagggcttatgtggcatgtaaaagggtctcagaagtctctttgatcagcctactagatgctgagcagccatttttaaggcttttaaaactagactttatgtaaaaggtagagaaataaggatcaaaattccctttagtgctctgattttgctaataggcatcagaaaagattgtcattatctttctgtatttttaagatgacagattctggagttatctcagaacacccatttcgatgaagtgtttgagcctgttttggaatgtgatcaagttcatctcacagttagttcagtgaatagtttccctgag

SEQ ID NO: 10003 - DNA, 417 bp, Homo sapiens
ggggaaatgcctgcagcttttctgagtgtctttcctctttccccgtctctcagccacttttgtgctagctctaagcacataagtgctttcttgggagaaacagtgctctcccttaatctgggttgcacagatccccagtggaaaggtgagtcgcagagggagactggatgctcttctctcgtactggagtttcattcccttttatgaaccaaatgctatcacagaggctgctttcccacctccccctccacagggtctggagtgttcttctctattcctgtgaattcctatttttcttcttgaattgaagctcacaaagtttatctttatgcttatttttctacttccaagtggctgaggcacactgaaagcccctaatccatcattctaggagaaaaaggatggtttaaataaagg

SEQ ID NO: 10004 - DNA, 494 bp, Homo sapiens
  misc_feature (1)...(494): n = A,T,C or G
agcgattgggcccctcgaaaccctaggccangncgnggaattctttaatagggaaaattagctggatgtggtggcgcggtgcctgtaatcccagctactcgggaggcagaggcaggagaattgcttgaactcgggaggcggaggttgcagtgagccgagatcgcgccactgcgctctagcctgggtgacagagagagactgtctcanaaaaaaaaaaaaaaaaaaaaaaaaaaagggggccccttaaatttaaggggccccttaaaaccccgtgaaaacccccgggggggccttttaagggccccccctttggtggtggccccccccccgggcttttttttgcccgggggggggccccccccctttgttttttttaaaaaaaaggagaaaatgcccccctttggcgggagggggggctttcttttttgggnnnnnnnnnnnnnnnnaanacnancnncnanaaacacgagcaaaccacaaaacacacaaacccg

SEQ ID NO: 10005 - DNA, 464 bp, Homo sapiens
  misc_feature (1)...(464): n = A,T,C or G
aggcgggcgngngnntattgatagcntccctatgcagngncgnggaattcataaagggcaaggaaagtagaaactctaggtccacagtcctttatatcccagagactctgaatactggaaatttttttcataaatttggtgctaaattcgttagatctgaacatattatatgaggctttttatagtcattcatatttatctctaacgtgaatattcatacatgcttctatagaagtagtaatgtgtttagttatagagtactcccatatcaagtcggtgataaatattttacttatatgccatataatcattgaatctgaaaatgtctgaatttctaaatgcgtggtcctaaggatttcacattaagaattataggactatattcaaaatatgtgtaagaactgtaaattccaaatattctatttttatatgtgattagaggagaactgttggctaactggatt

SEQ ID NO: 10006 - DNA, 473 bp, Homo sapiens
  misc_feature (1)...(473): n = A,T,C or G
tggccnaggggnnnnnnttttgagttcactagcccangnggnggaattccttctagtccccgtaaaccgaccagaaggaaatcaccggcttggacggtctgagtctgggatggagcaaaacccactcccggcggggtacgcgcgccacctggcggcagactcctgctaagacaaactccgcccagaggccagaaatgattggttttggaagcgtggggtctgcaaaccggctattgtctgaaaatcagtatgtcaagctggggggagcctaccagtggctttcaaacttttctgaccatgactcacagtaagaaatcatttcgcgcccggcgcggtgggtcacacctatagtcccagcagtttggaaggctgaggtgggcggatcacgtgaggtcaggagtcgagaccagcctggccaacatggtgaaaccccgtctctactaaaaatacaaaaattatctggacttggtggg

SEQ ID NO: 10007 - DNA, 499 bp, Homo sapiens
  misc_feature (1)...(499): n = A,T,C or G
gggccacatgagatcgtggccgtgtcgaggaactcgcctattcatgttccttctcatctagaattctgtgtgattgttttagcataaactgccccgctcccactgtatcatttcacgatctccttttaatgtttttctttcagttttgcactgacagtctggtgacaggtgctgccagggtgcaagttacattgcaatgttctaaaccttttgaagtgttcttagcaaaagcctttctttctgggtgtttttgtcgaatgagtctatgaagactcaatgcatccatcttgggctgatcatgccacagatctcattccagctatagtactgccaagaagtgaagtttatcattgaattttacctgtgttgctctctttntaaagaatgactttgagatgcatgctttgtatcatattgaanaagatgttttattttccttaaagntgtaatattgtgtgtgaaactgtacatattttaaatgatgtagctttcgcaggtt

SEQ ID NO: 10008 - DNA, 485 bp, Homo sapiens
  misc_feature (1)...(485): n = A,T,C or G
agcgattggaccaatgagagcgtgggaaccncaaaggaccacacaacctagattcctggcatgctcagttcacaatacggcgtgcttttctatgagaatctgatgccgccactgatctgacaggaggtggagctggggcggtaatgcttgttccaccactcacttcttgctgtgtggcttggttccggatccgcggctgggggttgggatcccctggtgtataagattaaactccctgaggattggggtggaagcacgaagtgtggaaattgaaactagatatgggtttgaatcctaggactccaaactactttgggaaaattatacatcctcctcttaaggccccttgttttttaaaagtatataaaaatacctagaacacattaggcactatttttaaagacagaaagtatatatttaaggaaacatgcatatacattctttagcctcatcatttgaggtagatatccagtaatttaagctaa

SEQ ID NO: 10009 - DNA, 491 bp, Homo sapiens
  misc_feature (1)...(491): n = A,T,C or G
acggtggagactaccgaaactnctggaagngccnggaannctgcacacatcttgaagataacgaatgtgatatcaaattggcagggttttgtttcatttttagttctgaattccctgtaagactgagtgtatacttagaagaagaggatattactgaagaagctgctttgtctaaaaagagagctacaaaagccaaaaatactggacagagaggcctgaaaatgtgacaggatcatgaatgtcaaaggtgaagcatatagaaaaaacgacttcatagaaatgaataaagataaatgtggatatatgtaccagtctggtggtgaagaaattctgaaacccagaactttataacaagaaaaaaaatttttaaccctgtgaagaagtttgtgaaagaaacttgtgaagtagtaataattagaaaaaaaaccattaaaacaccagagaaaatacatagaaaaatttgagaaattgtcatttgatttctgaataan

SEQ ID NO: 10010 - DNA, 488 bp, Homo sapiens
  misc_feature (1)...(488): n = A,T,C or G
cgcgttgagacctattgaggcgtcggaaacgacccnngaaatacttcagggatgaaacaaattgatgaaaagtcaaggatagtagactttccatgctgttctcaaagaagcaaagtcaattttctagcaaaggtggaggaaacataagtaacaatagcataagaatatattcttctaacattcaataatccttaataactctgggatttagctgagtaaatgactatccagtctcacagctctttattgaagagaggccaccaagttttgaaatctgtccattcttattcctcatgcattgtatttttagctgtcttctatggtgtatacagctgccttccatgctcagtgtccttaaaactcaacctagtaagaaccatccattgtggccctgtaaatatgcttacaatatatttttctttctttgtattatctgaaattctgacttaaaactaaccatagaatttagaaatttaatattactggcg

SEQ ID NO: 10011 - DNA, 452 bp, Homo sapiens
  misc_feature (1)...(452): n = A,T,C or G
cccccatcgtagacattagatagagcgctggaattcgtaaccgaaaatggtttaagagccaacatttagagtatgacaatggagctgaacagtttttaatgcgcaagcagttctgttcttgtgtatgacttgtaaccttaatttactgtgtaaagatggttacattatttccttagctttgtttgttggagacaaatagagaatgcttgttaagtatgtcaaaacaatcttatcttgtgaatttttgttaatgtattatacgagctatatttttcatttgcccagaaagacagcttgtataacgcttttggaagtttctgctctgtaatgtctttagagctgacagtctgttaggtttgtttttttcttcatgctaaagtgtcagttggtggttttgtgaactggtcaaaaattcacaggtcttanatgttttgggggaaatttatattgga

SEQ ID NO: 10012 - DNA, 429 bp, Homo sapiens
gtcagcttttctgaaccattaaggtatttcatcacaagttatattttataatatcagtttaagaggcttttattcatgtgaacaccagtcccctttcaggggcatggtctttttgaaaaaaaaaaacaaaaaaacgaacagttttagccacatatcaaatatttctatatctaattatcctttatggctaacattctgcctccattgttaaggaataattgttcctgaatttaaagggggtttggcctctaatttaattctgattcaaactctcctgtcaggactcaagaaaatttaattaattaccaaggattaagtcttctggttaaggtttctgggaaaaaaaaatagcaaagatgttgatttcttggaatccttttacaggttcataacagaaaaatcttcattccctgtaggcatttaattaaa

SEQ ID NO: 10013 - DNA, 479 bp, Homo sapiens
  misc_feature (1)...(479): n = A,T,C or G
tggggcanncnngggtttggagaccattagtagatccctagtcagtgtggtggaattcatttttttgtatttttagtagagacagggttttaccgtgttggccaggcggcaaactgggattacaggcctgtgctaccaagcccagctaattgttgtatttttagtagagacagggtttcaccatgttggccaggccggtctcaaactcctgagctccaccttactggctaacggtaagtaaaatctttaacatgtgtttgctttatatgagtataaaagaattgtatttcctttgttttggtctagggcactgtttttgaaactgcttagtcattggtcctaaaatcattaggttccagtcagcaatttttaaaattacatgggctggtcgcggtggttcacgcctgtaatcccagcactttgagaggccaaggtgggcggatcacgggaggcagaggcaccagaatggcttgagcctg

SEQ ID NO: 10014 - DNA, 479 bp, Homo sapiens
  misc_feature (1)...(479): n = A,T,C or G
actgagaccntggccaggcgggattgaagcgttagcaccatgcccgctcctattttttctaaaataattataaattctaaaattacctatctaaatggaggagggtcttctgacacctttaaaataaaatccagctgagtactgtaaatgtgtttacagaacttgtttaaagttcttacagttgtttaaatcagactagttaactaccctcactacttagatgcttccatttcttagagctcttttttaagcttatctgaagaaaagcccttccaatttaagggttatttccaattgcacattccaaattgagccttccatcttcagcattcaatatagatatttacaggcccctcttttaaaattttattatagttaacttgtattaaagttgcttttatttttcattacgtatttgtagaacattagctatatatatattgcaggctacataggttttcaaactgtacaacaggaat

SEQ ID NO: 10015 - DNA, 481 bp, Homo sapiens
  misc_feature (1)...(481): n = A,T,C or G
cctgaaaactagagcntcngcagagngcnggaantccatccatgatgcatcgtcaggagactgtggagtgtttgcgcaagttcaatgcccggagattactgaagggtgccatcctcacgaccatgcttgtctgcaggaacttctcagctgccaaaagcctattgaacaagaagtcggatggcggtgtcaagccacagagcaacaacaaaaacagtctcgtaagcccagcccaagagcccgcgcccttgcagacggccatggagccacaaaccactgtggtacacaacgctacagatgggatcaagggctccacagagagctgcaacaccaccacagaagatgaggacctcaaagtgcgaaaacaggagatcattaagattacagaacagctgattgaagccatcaacaatggggactttgaggcctacacgaagatttgtgatccaggcctcacttcctttgagcctgaggcccttggtan

SEQ ID NO: 10016 - DNA, 488 bp, Homo sapiens
  misc_feature (1)...(488): n = A,T,C or G
agcgttgagacaacctggactctcgaagngccnggaanncctcatacccagcctctctcttctagagggctctgaggcttctactacttccgggcctgtaagtgggatttgcgctgaactctccaaggctgaacccacctccctttctgagaaccttctccctgaagaagtgaagctgaacaagaatgctgatcagatggattcctaagtagcagcagcacttcttaccctgggcagaagatgtcctgaacacagtagttcagctccctttggtgctcatggcatgatctggccttttgggtggtctagaagtttaacagttgatctttttctaaagcatttttgcatctccaagcatgatgttcatacccactatattagggagagcacacttgtgtgctcctctgtgccagtattgacagatctgcaattctcaggccctttattagcccaggcacaccagtgtgagaaaagccacaccctcagcg

SEQ ID NO: 10017 - DNA, 490 bp, Homo sapiens
  misc_feature (1)...(490): n = A,T,C or G
ggcgttggccataccgagaccctgcgaagngccgnggaattcagntggcgagcccctgaaacaaccgccaaaaccccccaaaagagaattataaacgctgttgccttcgagaacggttgtttcggctcctgttctgtgggcggctgaggaccgccggctgcccggctcggagaagaacaggacggtgtggacctgcgcccctcttccccgtagcgaccgtgttggagaaactcgctcggaggaccagtgtgctgcgggggccaaaactcacgctgcccagccttgaagagctggagaacggagccgggccccgccgaacctgcgctcgcagagaatgttatcttcacagcaacttagcaagccccacagaacaaaagttaaagcgtgattgcactataccttgccccgggttactcaggcgcctgtctcccattttggacatgcaggaaatgttggatttggggaggtttgatttggctgggtttggttg

SEQ ID NO: 10018 - DNA, 458 bp, Homo sapiens
  misc_feature (1)...(458): n = A,T,C or G
nctgaagtacactagcactagtgagggcggtggaattcctgatggagcctcatctagttagacacgcacaagtttctctttcgctcttcgcgctactcacccagattggctttcagcgcgcacggctcaagcctgctggagaaccgagccccctcagagaaaatggatccaggagatgaagatggagaaactgggtgctgctgacctttgagctgtttttggagctagactgatcactggactttcaaatcatatgagtaaatttgttctcttttaggtgaagttagcttggattgaattttctgtcctttgaaatacaatcctaattgatacacttgtctccaatacctgttcgaagccttagtgaggcctagctcaagagatgctgcagcctcggtctccagtccaagtagctgtacctacaggtgtgcaccactgcattagacttacaccctttt

SEQ ID NO: 10019 - DNA, 482 bp, Homo sapiens
  misc_feature (1)...(482): n = A,T,C or G
agagatgcccgnnnagcggcccctgagaccataggaatgatggccatagcccggccaacagcaccgacctgcctctgtagggacttcccggtcctcaccaccctctgccccaccatgatccagcctctgcctcacactcctgtcctctgaacccaccctccccagggttcagggttgctttgcagaaggcatggaggtgggaccagatgcttccctgtgctggctggagtccccagagatatcagccaccgagtctcctggtctgtctccaggctgggaagagaagggtgaccaggcgaggagggagccgagacgtcaactgtgaagggttcctgtgattgcgtttagcgccctcccgttctgtccatttgtcttgtctgccgactgtccgtgtgtgttttttttggttggaattttgaaacattttgtacctgttgattttatttatcagnttatttttctatttattggtttaaatggaa

SEQ ID NO: 10020 - DNA, 439 bp, Homo sapiens
  misc_feature (1)...(439): n = A,T,C or G
ggggcnntttgaaccctttgagaccatagtacangcggnggaattcctcctctcccagtcggcaccacagcggtggctgccgggcgtggtgtcggtgggttgtttggtttttgtctcaccgttggtgtccgtgccgttcagttgcccgccatggctgagctggatccgttcggcgcccctgccggcgcccctggcggtcccgcgctggggaacggagtggccggcgccggcgaaaaagacccggccgcggccttcttggcgcagcaagagagcgagattgcgggcatcgagaacgacgaggccttcgccatcctggacggcggcgcccccgggccccagccgcacggcgagccgccggggggtccggatgctgttgatggagtaatgaatggtgaatactaccaggaaagtaatggtccaacagacagttatgcagcta

SEQ ID NO: 10021 - DNA, 484 bp, Homo sapiens
  misc_feature (1)...(484): n = A,T,C or G
acgcttgaaccattgtaggcgtcggaaacggcngnctaatatttttctcatggttagattggagctaataccacagaagcgaagtattctcattacctcatataatagtacatattattaacatgttttatcactgatgtttaccttgatcacctacccaacattgtacttgccaggtttctttgttgtgaagttacatttttttccctttccatactactcttttctttgaaagtaggtctttaagcactgggggtctcctgtgaccctggaaaactacctcaatagtcctcgtagctttttgtagattctttgagattttctacatagacagtcatgtcatttgcaagaaagaggcagttttatttcttccttttcaaatatttacctttaatttctttttcttgatttcccctggcctgagtttatactggttatctgcaggagaatttgttaggagctactcttccatcattggaaaccn

SEQ ID NO: 10022 - DNA, 492 bp, Homo sapiens
  misc_feature (1)...(492): n = A,T,C or G
ctcgaccccttnnnnnatagagaccactgtccatgtggtggaattccctttttactccagctgtgaaaaatatgcgggctttaattggaggaagtatgttgagcaaacctggtagggactgcaattttattaagatttgcaaaagggcgtctcagctcgaggcccactctgggactagcatgaatactaacatgtcaattgttttgtggagataagagtgaacgtttcccagggctggatggcactgtatttagtctgtatggaaatgacaatttacatatttaaagcagcgacctcgtagcaccatccctaattgaattaattgccccggaacatctaatttccttactggtcagagagaggtttaattgttataaaaacctggctcccctattagaaacggggttagcaatttcacgggttatatattttagagaacctcattaagtgctttttaaaatgaaattccagttccaggcgaaccctgactat

SEQ ID NO: 10023 - DNA, 487 bp, Homo sapiens
  misc_feature (1)...(487): n = A,T,C or G
aatgagacccttnccanatggaggaccctcgngagctgcgcagcgtcgcgcgcgctaccgcacccaggttcggcccgtaggcgtctggcagcccggcgccatcttcatcgagcgccatggccgcagcctgcgggccgggagcggccgggtactgcttgctcctcggcttgcatttgtttctgctgaccgcgggccctgccctgggctggaacgaccctgacagaatgttgctgcgggatgtaaaagctcttaccctccactatgaccgctataccacctcccgcaggctggatcccatcccacagttgaaatgtgttggaggcacagctggttgtgattcttataccccaaaagtcatacagtgtcagaacaaaggctgggatgggtatgatgtacagtgggaatgtaagacggacttagatattgcatacaaatttggaaaaactgtggtgagctgtgaaggctatgagtcctctgagaccagttn

SEQ ID NO: 10024 - DNA, 481 bp, Homo sapiens
  misc_feature (1)...(481): n = A,T,C or G
tagtaccannnnanagaaagcctgatgnccntnggnnnnactgagtcactagtacatgcggtggaattcggagatctgaaatctcggtcttccaaggaagaaaatcgagctgggaataaaagagaagacctgtgatggggcagcagtgacgcgctgtggggggacaggtggacgtggagagctctttgcccagctcctggggtgggagtggtctcaggcaactgcacaccggatgacattctagtgtcttctagaaagggtctgccacatgaccagtttgtggtcaaagaattactgcttaataggcttcaagtaagaagacagatgttttctaattaatactggacactgacaaattcatgtttactataaaatctccttacatggaanaaaaaaaaaaaaaaaaaaaaaaaaaaaaaaaaaaaaaaaaaaaaaaaaaaaaaaaaaannnnaaaanannnnnanaaaaaaaaaaaggngg

SEQ ID NO: 10025 - DNA, 490 bp, Homo sapiens
  misc_feature (1)...(490): n = A,T,C or G
ntcgagatcgctagcccagtgcgaggaattcgtcttctagcagaaaacacacaatgcccctctcatgaatctatggagatgaaggcttctctccttatattcatgagaggggcattgtgtgtcttctagcataaaacaaactggtggcgtatgaaacattttatatttcttactggtttttctatactgtatgtgtatgaataatttcccaacgcatacctagaaaagtctttgacctaatattagtctagaaaaaaatatatatatatgtgtgtgtgtgtttatgtgtgtatgaaaacttaagaacattgacaataacatgctcttttctgtttttttcatacaaactgccaaattatacaaaatatgacaaaaatttcttagaattttgaagccatgtatatttcattcatgttatatttcatttgtagaatttatgatgtctatctataattattaagaagtaacagtttatcccaggataaatatn

SEQ ID NO: 10026 - DNA, 492 bp, Homo sapiens
  misc_feature (1)...(492): n = A,T,C or G
aggaggggccnnnnnnagcnggncgattgagnccntngnaatgatgaccattagtacagngcggtggaattcctgaaatacttttggtctgccaatgacccagtatgtttctaactcaggtgacactgtttcttattacatagtgaaatggggattgctgacccctgggtcttcaagcagagaaaacttaagctgatgtgtttctgtagttggaactggacaggtctttgctactgtgttaattagatcatacaggctgaagacaatgatagaggaatgtggcaataaaacctttggtgtacatggagtcaggattttattttctgcttgaatacatgggtatcatttaagcaaaattaatattttaactgcttgccttataaagaggtaagtgagagacatgattatttgctttgaaaaagaattcttttcgtaattcatttattaatttaaatgcagtgtttgcttagtatggtataattgatatatcaa

SEQ ID NO: 10027 - DNA, 458 bp, Homo sapiens
  misc_feature (1)...(458): n = A,T,C or G
ccccaatagaattgcatctcatcgngcggngcaattcgagtgaacaagtgttcattcctcaccttgaagggtaaaccttctcagaactttccgtgctccctctggttcttatttctgtttttgttttttgtttttttccagaaaaaatcaaatcagactgtaggtaaaatagggtgtccagagaaggggactgttttctaaattatgaaaacaagtaacaacagagggacatctgtgtcaatatggctcagcatataaagaacccaatttttgctgtattgcttttaaactactctatagacaacatacaaatatatatttagagagctaactgaaaacagtttattagagcatttattgaaatgtcatggtggctcacacctgtaatcccagtactttgggataccaaggcagatggatcangaattcgagaccagcctagccaacatggtgaaacn

SEQ ID NO: 10028 - DNA, 460 bp, Homo sapiens
  misc_feature (1)...(460): n = A,T,C or G
cttcccactgaanccttttcgatggcgtaatnccaatgaagccatcaggccttgagcttttctttgataggagatttttgattcctgattcaatctccttacttgttattggtctgttcagattttctgtctcttcataattcagtcttggtaggtgtcatgttattaggaatgtatgcatttcttccaagttttccattcctcttgcaatattctttccccaatgacttttcacctaattattttagcatctattgatgatccttacctaagttggttatttcactggggactggaaattgaggattttctaattttcacattttttgtacacttattagccagcattgctctattttttttaaaaaaaagctttgtctcatcatctggattgaacaaaagtttctcctaaagaggcaaaaaaatgcttaattatttccctttaattacagctttcaan

SEQ ID NO: 10029 - DNA, 457 bp, Homo sapiens
  misc_feature (1)...(457): n = A,T,C or G
aaatgagaccatcganatgagggcattgccagantctctgcataagaaggggaacgaaagatggcggcggaaacgctgctgtccagtttgttaggactgctgcttctgggactcctgttacccgcaagtctgaccggcggtgtcgggagcctgaacctggaggagctgagtgagatgcgttatgggatcgagatcctgccgttgcctgtcatgggagggcagagccaatcttcggacgtggtgattgtctcctctaagtacaaacagcgctatgagtgtcgcctgccagctggagctattcacttccagcgtgaaagggaggaggaaacacctgcttaccaagggcctgggatccctgagttgttgagcccaatgagagatgctccctgcttgctgaagacaaaggactggtggacatatgaattctgttatggacgccacatccagcaataccaca

SEQ ID NO: 10030 - DNA, 489 bp, Homo sapiens
  misc_feature (1)...(489): n = A,T,C or G
aggagttcgcggnnnnagccngccaactgagaccactaggaattgacggcggtaggagaggacactctgttcgtaagctcccggtgaattttgttccacagactcggaagaaaggttggataagagttcactggagattgacaagtactcgggatagtgaaaagccggagttggaacatggatagccgcttgcaggagatccgggagcggcagaagttacggcgacagctcctcgcgcagcagttgggagctgaaagtgccgacagcattggtgccgtgttaaatagcaaagatgagcagagagaaattgctgaaacaagagaaacttgcagggcttcctatgatacctctgctccaaatgcaaaacgtaagtatctggatgaaggagagacagatgaagacaaaatggaagaatataaggatgaactagaaatgcaacaggatgaagaaaatttgccatatgaagaagagatttacaaagattctagt

SEQ ID NO: 10031 - DNA, 455 bp, Homo sapiens
  misc_feature (1)...(455): n = A,T,C or G
gaaaataaattggaggcccctnggnattgtacgtccatagtccgtgtggtggaattcgtttatttcacaagtagcctacaaactcagttatttcatccagggcctgaattttaccatttttgaaagtacgtcacattcatctaagtgagggggcctggtttgttccaaattttcatgaccatcggagcgggtctgacggtgagaccagacattttgcttgtatttctggttcagctccagctagggctgaactcagggggccccctggaaatggggcatttctgggaccaatctgaggatttgcaaagaattttaagtaagcacaaaacttttgattaaaaaggagggcacaaactgaagcccagcctttgtttctaacacactttgacaaaatggtcattttgaattagatatgattagaaacctcttaagaaataaaaatgaaaactcgccaa

SEQ ID NO: 10032 - DNA, 550 bp, Homo sapiens
  misc_feature (1)...(550): n = A,T,C or G
ngttcgatcacagtcagngtgggtagttatactatctacgcacacgagaacatgcctctagcagaggatctccttcatccctctccagaagaggagaagaggaaacacaagaagaaacgcctggtgcagagccccaattcctacttcatggatgtgaaatgcccaggatgctataaaatcaccacggtctttagccatgcacaaacggtagttttgtgtgttggctgctccactgtcctctgccagcctacaggaggaaaagcaaggcttacagaaggatgttccttcaggaggaagcagcactaaaagcactctgagtcaagatgagtgggaaaccatctcaataaacacattttggataaganaaannnaaaaaaaaaaaaaaaaaaaaaaaaaaaaaaaaaaaaaaaacgccccctttattaaaaaggggccgttaaaacccctttaaacccccggggggggcttttttattgcacaccctttttgggttgccccccccccgggtttttttttaacttggaggggggccctcccttttgctttttat

SEQ ID NO: 10033 - DNA, 556 bp, Homo sapiens
  misc_feature (1)...(556): n = A,T,C or G
ngctcgaaaacagtccgagaggnctagatcgacacttccgagaggncgactccgggcataggagtctgactggaagaaaagtagatatgataagctggaagaattctgtaacttaataggagaggattgcctgggtctgtttatcatctttggtatgccaggaaagcctaaagacatcaggggagttgtcctggacagtgtcaaaagtcagatggtgaggagccatctgccaggagggaaggctgtggctcagtttgtcctggaaactgaagattgtgtgttcatcaaagagctgctcagaaattgtctgagtaagaaagacgggctgagagaggtgggcaaggtttatatcagcattctctgacttggatatgtattatgtgagtggcctgtaagaggaaaagaaaaaaagattctaataagcaagctcacctatttgcatcattccagcatgggattttttttcatttgttttcccattgattgaaaatgattactgggatcacagtacattcatgtcgcaattacagagagagagagaaaaaaagaatacccn

SEQ ID NO: 10034 - DNA, 456 bp, Homo sapiens
  misc_feature (1)...(456): n = A,T,C or G
atcgaacccccttnatagtagacactagtcagngtcgtggaattccctgggtcttcacctgcggagccttacggcagctgagcggtgcgagggacctgagccgcggcgctaggatgggaaacagtgcgctccgcgctcatgtggaaacggcgcanaaaactggtgtctttcagcttaaggaccgagggctgaccgagttccccgcagacttgcagaagctgacgagcaatctcaggaccatcgacttgtccaacaacaagatcgaaagcctaccgcctttgctgataggaaagttcactctgctgaagagcctctccctgaacaacaacaaactgactgttctgcctgatgagatatgcaatctgaaaaaactagagacgctaagcctaaacaacaatcaccttagagagctgccgtctacctttgggcaactctctgccctcaagaccctgagcc

SEQ ID NO: 10035 - DNA, 466 bp, Homo sapiens
  misc_feature (1)...(466): n = A,T,C or G
tggtaccnnttctgaaactccgtgaccctcgaaagngcgnggaancattccggcctgcgcggggttctctggagcagcgttcttttatctccgtccgccttctctcctacctaagtgcgtgccgccggccgatggaggattcgatggacatggacatgagccccctgaggccccagaactatcttttcggttgtgaactaaaggccgacaaacattatcactttaaggtggataatgatgaaaatgagcaccagttatctttaagaacggtcagtttaggggctggtgcaaaggacgtttctcgcattgctgaaacctaggcagtgaattacgaacgcagtccaattaaagtaacactggcttctttgaaaatgtctgtacagccaacggtttcccttgggggctttgaaataacaccaccagtggtcttaaggttgaagtgtggttcagggccagtgcatattac

SEQ ID NO: 10036 - DNA, 474 bp, Homo sapiens
  misc_feature (1)...(474): n = A,T,C or G
cggcgttataaaaactgatgacactagtacagcgcggtggaattccaaaccttcagtgtatgggccaaaatagaattctgctcagaaagcatttaggcgacttatgaataacagaagcatgcagagaggctgcacatctctggaagatttgctgtcagagttcgtgccatcctgagaagtgcctggactgggatgcctggtgcccaggccatggcggatgctctgaggtgctcataatgcacaagcggtgccccgttgagctgcatatcattcaagactaatttcactactcccgcttttcaccatttcttgtcgtgctaatatctgtcatgtaaaatccatactccatcctgttgaacccaccctcactttttagatactcactgcgactcaatagatgggacaccctcaagttttagaggatgttgtgggaagttacaagtacagttggccctgtgtatccgtggattccan

SEQ ID NO: 10037 - DNA, 455 bp, Homo sapiens
  misc_feature (1)...(455): n = A,T,C or G
ggggnttnnnttcgtcgaccactagttcgtgtgctggaattcaggcataaatcatcatcatcttcctcctcctcatctagtgactcagatagctcaagtgattctcagtcctcttctgattcctctgattccgaaagtgctactgaagagaaatcaaagaaaagaaaaaagaaacatcggaaaaattcccgaaaacacaagaaagaaaagaaaaagcgaaagaaaagcaagaagagtgcatctagtgagagtgaagctgaaaatcttgaagcacaaccccagtctactgtccgtccagaagagatccctcctatacctgaaaatagattcctaatgagaaaaagtcctcctaaagctgatgagaaggaaaggaaaaacagagagagagaaagggaaagagagtgtaatccacctaactcccagcctgcttcataccagagacgacttttagttan

SEQ ID NO: 10038 - DNA, 551 bp, Homo sapiens
  misc_feature (1)...(551): n = A,T,C or G
atttcgatcactgtccgtgtggtttcgatcaccagtgcaagcggtgcaattcctcagccatttctcatgctgttttgtttcttgcggtggccacttaaccccaaagaatgaagggaggatccacagtgaaagtgcctgagtttctctatgagaccagatgctgtcgaaaccaaacatcttttcctttgctctatgggaacattttagggtttgttgtgcacagctggtttccagactagaagattaacaagtttgggtccacccctaagaatcagtggctgtcttttaaggtgaggagtgtgggcttaactgaggtcctttgagggagctataaaggagaaacaacctgggacatcccagttttcctattcctccactgttaatatctcatctaaaataattcatgagtttaaatggtaaatatatgctttaagctctacctttatacttgtatgttattcaggcatctcttattaagatactgggtctctggatacccaaaggaatgttggctttntattcttatgggntccaaatttacttnctctcaa

SEQ ID NO: 10039 - DNA, 544 bp, Homo sapiens
ggttagaacactgtccgtgtggtgtagtatcactagtgcaaacatggagaaatctactgaattggcttccagattttaaattttatgtcatagaaatattgactcaaaccatattttttatgatggagcaactgaaaggtgattgcagcttttggttaatatgtctttttttttctttttccagtgttctatttgctttaatgagaatagaaacgtaaactatgacctaggggtttctgttggataattagcagtttagaatggaggaagaacaacaaagacatgctttccatttttttctttacttatctctcaaaacaatattactttgtcttttcaatcttctacttttaactaataaaataagtggattttgtattttaagatccagaaatacttaacacgtgaatattttgctaaaaaagcatatataactattttaaatatccatttatcttttgtatatctaagactcatcctgatttttactatcacacatgaataaagcctttgatctttctttctctaatggtgatcatactct

SEQ ID NO: 10040 - DNA, 446 bp, Homo sapiens
tagatttgtagatccctagtctttgtggtcgaattcgctgctacaaagaagacatgttttagacaaatactcatgtgtatgggcaaaaaactcgaggactgtatttgtgactaattgtataacaggttattttagtttctgttctgtggaaagtgtaaagcattccaacaaagggttttaatgtagatttttttttttgcaccccatgctgttgattgctaaatgtaacagtctgatcgtgacgctgaataaatgtcttttttttaaaaaaaaaaaaaaacaaaaaaaaaaaaaaaaaaaaaatataaaaaaaaaaaaaaatttaagaataaaaaaagaaggcacaaactgaagcccaacctttgataataacacactttgcccaaatgggcattttgaattagatatgattagaaacctcttaagaactcttatgattctttcat

SEQ ID NO: 10041 - DNA, 547 bp, Homo sapiens
  misc_feature (1)...(547): n = A,T,C or G
nttcgattactagtcagggggtagatcacagtccgaagaggcaattcctctcacttagtcttgtggatgccgtgcgacttttgagcagcgaagaatgtcacaggtagactaatggttggcctacgttgggggaatcacattgatgaagatggaaagagccattgggtgtttgaatctagaaaggagtcctctcaagagaataaaactgtgtcagaggctgaatcaagaatcttttggttgggacttattgcctgttcagtactgtgggtgatatttgcctttagtgcactcttctccttcacagtaaagtggctggtgagtatcagtgtagaactttcaaataatccattatgatgtctgatggtaatcataggaagcatcaactgcaactgagtccttatcattagggacctatcttgaataggcagcttcatcatgtaattcccaagttttgcttcccaacttacctttctctataatactggagaagaaatcctaacanaccccctcccacccagttttcaaggatattaggggtcttttctgg

SEQ ID NO: 10042 - DNA, 543 bp, Homo sapiens
  misc_feature (1)...(543): n = A,T,C or G
nttcgatcactgtccgtgtgggtaagttcacggtcctgagatcctcatttctcttccttgtttgaggtatccatgctatcattcattttctgcttttgcattcgtgttcgagtagaagctggaaaaaggatgaagaactgttaacagcattgatggtactgggtaagttggcaagtggctgccatatatattatgctcatgtcaaactgatggcgctcaggaccttgcaaaagcagtggtcttcattctagtatttgacagtaccgtagggagttacagttaatttactgcatatttcaaaatagctagaattgtaatgttcccaatgcaaagaaaaatgtttgaggtgatatatatcccaataaccctgatttgatcattacacattgtgtacacgtatcaaaacatcacatgtacccctaaaatatgtataactatgatatatcaattaaaaaaaaaattccctccccaccccccaaaaaaacagtggctccaaatctttaaaaatcatatatcccttggagtaaattttttcccagcctg

SEQ ID NO: 10043 - DNA, 482 bp, Homo sapiens
  misc_feature (1)...(482): n = A,T,C or G
gggagacccnaatcgagacctntagatcgagagctgtaagacgagncgtggatctcctacatacaaagcattcttatatgttgtatgggggcatgatgcccctgcttccaaccattgctccaggctttctgactgtgaggaacggtatgatccaaaaggtgattcatggtcaactgtggcacctctgagtgttcctcgagatgctgttgctgtgtgccctcttggagacaaactctacgtggttggaggatatgacggacatacttatttgaacacagttgagtcatatgatgcacagagaaatgaatggaaagaggaagttcctgttaacattggaagagctggtgcatgtgttgtagtggtgaagctaccctaaagctatctatctttatcaaatggaatgaaactagataatttcaagaaactgagtaggacaaagggagaaagaaatacatgttctttttcctgcaattaataatcan

SEQ ID NO: 10044 - DNA, 336 bp, Homo sapiens
  misc_feature (1)...(336): n = A,T,C or G
atcgactggaccaccaacgagctgagaaataacctccggagcatagagtgggatctagaggaccttgatgaaaccatcagcatagttgaagcaaatcctagaaaatttaaccttgatgcaactgaattgagtataagaaaagccttcattacaagtactcggcaagttgtcagggacatgaaagatcagatgtcaacttcatctgtgcaggcattagctgaaagaaaaaatagacaggcactgctgggagacagtggcagccagaactggagcactggaacaacagataaatatgggcgtctggaccgagagctccagagagccaattctcatttn

SEQ ID NO: 10045 - DNA, 479 bp, Homo sapiens
  misc_feature (1)...(479): n = A,T,C or G
cgcccccccccccccgcccccccatcgacgaccattagnatagagcgccgttagtcgagggaggaggaacctgcaattgaagatgttggttctgatgaggaagaagaaaagaaggatggtgactagaagaagaagaagaagattaaggaaaagtacatcgatcaagaagagctcaacaaaacaaagcccatctggaccagaaatcccgacgatattactaatgaggagtacggagaattctataagagcttgaccaatgactgggaagatcacttggcagtgaagcatttttcagttgaaggacagttggaattcagagcccttctatttgtcccacgacgtgctccttttgatctgtttgaaaacagaaagaaaaagaacaatatcaaattgtatgtacgcagagttttcatcatggataactgtgaggagctaatccctgaatatctgaacttcattagaggggtggtagactcgga

SEQ ID NO: 10046 - DNA, 467 bp, Homo sapiens
  misc_feature (1)...(467): n = A,T,C or G
aggcgcgccggntcctactgatagcntncntacgccgngncgnggaattcaaatctttagtggaacaattcagaggaacagattcagacattcccagtagtaaagattctgaagattcaaatgaggatgaagaggaagatgatgaacaagaagatgaggaagatgatgaagatgatgaatctgatgacagccaatcagaatcagatagtaattcagaatcagatacagaaggatcagaagaagaagatgatgatgataaagaccaagatgaatcagatagtgatactgaaggagagaaaacttcaatgaaactgaataaaacaacttcctctgtcaaaagcccttccatgagtctcacaggtcactcaacacctcgtaacctccacatagcaaaagccccaggctctgctcctgctgccttatgttctgaatcccagtcacctgcttttcttggtacatcttcttcc

SEQ ID NO: 10047 - DNA, 537 bp, Homo sapiens
  misc_feature (1)...(537): n = A,T,C or G
ngtcgacactatcagggggtattgactcacctccgggcccccaccgaggttcccagggctggagacttcctctggtaaacattcctccagcctcccctcccctggggacgccaaggaggtgggccacacccaggaagggaaagcgggcagccccgttttggggacgtgaacgttttaataatttttgctgaattcctttacaactaaataacacagatattgttataaataaaattgtaaaaaaaaaaaaaaaaaagggccaaaaaaaaaaaaggaaagaaaaaaaaaaaaaaaaaaaaaaaaaaaaaannnnnnnnangggggcggggggttttttagggccccttttaacccccgggaaccccctttggggggccttttttttgcaacctttttttttgggccccccccccccccctttttttggcctgggggggggccccctccttttttttttataaaaaaaaggaaaaaattttcccttattgggggnnnnnnnnttttttcccnccttggnnnnnnnannngtccttcnct

SEQ ID NO: 10048 - DNA, 470 bp, Homo sapiens
  misc_feature (1)...(470): n = A,T,C or G
cgtcacaaccccgggcncgtccaatgagaccatcgattgnacccctcgcagngncgnggaantcgatccacccacctcggcttcccaaagtgctgggattacaggtgtgattcactgtgcccatcctcattttctaacctttgatctcatgtccagccctgtcacttcatttcttgttagagaatttgaccgcctaacacatgattccatttccttgtatatgtcatctgtataggaagaaaacctcttttttattttcattcaacacttctggccaccaaacaggtgtgggagtgttttctaagcaattctccagttatctggggacaccaactgggtgtcctacaattgaatccaattctaacactctacctggaaataacatcagatcccgtgcagtttaagtgctccgccccagcaaatttccccccgtttccaatgtcagttacaagactgggttgtcacctgtg

SEQ ID NO: 10049 - DNA, 505 bp, Homo sapiens
  misc_feature (1)...(505): n = A,T,C or G
gcggntnnnnnnnaacttaacgacatctctacgccacngccgnggaattcaattggaagtttggattaggatttgttagctcaaaatggcttatagcggtttggtttgcttcatcccatcaccatcccgagaaagtatactttctgtttttctcttacctggaatgtgctcttcttccaagtccacctgtcactctcttattgtaggcttagggcccccctttcccaaaaccatgatgtggccagtgtactgggtttagcctcttgcagtctgtgctcacatggctcccagcacactgccttaaaatgcagcatttgtcttttcatcccaagtgcctagcaccatgcctggcctattggaagtgaagtgatctaacatggaactcagaaatattttacttcctgtgtgatgaacatcataagcatcatagtgccacatcaaggagcagtctaatctacctttttcactcacttcccaacaacttctttgtatagttagggagttg

SEQ ID NO: 10050 - DNA, 461 bp, Homo sapiens
  misc_feature (1)...(461): n = A,T,C or G
tcagcccgattccctttcagttggaggaacttcagaaaacctcacccagtggcaaacctgccacactcaagatctgctcttggaatgtggatgggcttcgagcctggattaagaagaaaggattagattgggtaaaggaagaagccccagatatactgtgccttcaagagaccaaatgttcagagaacaaactaccagctgaacttcaggagctgcctggactctctcatcaatactggtcagctccttcggacaaggaagggtacagtggcgtgggcctgctttcccgccagtgcccactcaaagtttcttacggcataggcgaggaggagcatgatcaggaaggccgggtgattgtggctgaatttgactcgtttgtgctggtaacagcatatgtacctaatgcaggccgaggtctggtacgactggagtaccggcagcgctgggatgaagcctttcgn

SEQ ID NO: 10051 - DNA, 467 bp, Homo sapiens
  misc_feature (1)...(467): n = A,T,C or G
nggccgtgcnnctcccatagatagctatacatagngncgnggcattctgaatgagggaaaacttttggtcagaagcccaccctcatagatcatcacagaattcacacaggggagaaatcctttcaatgcaatcaatgtggaaaaacatttggccagaagtcaaacctcacaatacatcagagaactcacactggggagaaaacttaccagtgtagtgaatgtgaaaaatccttctggcgaaaagatcatctcattcaacatcagaaaactcacacgggagagaaaccattcaaatgtaacgaatgtgggaaaacttttgcccggacatcaaccctcagagtgcatcaaagaattcacactggggagaaaccatttaaatgtaatgaatgtgggaagaaatttgtccggaaagcactccttagtgatcatcagagaattcacacaggggagaaaccctctcagtgtaa

SEQ ID NO: 10052 - DNA, 471 bp, Homo sapiens
  misc_feature (1)...(471): n = A,T,C or G
aaatcgatttgatcccctatnanattgataaccntttcaagtgtgctggaattcggaaaatgcaccccctcaggcaggtggccaattagaaaaatatgtccttttggcagctgctgccctgggttaatatgtgagacttggcaagtgagagcctgggcaggatctcagatccactcccactcccgggatctggcatccaagtgtctgacacagccatacgtggcagtgggtgtaggagcctgcctggggtgctgaccccactggaccgtcttcctagttccaggagctggggctgccccactttgggaaggaagatgctggggatgtacagcagttctacgacctgctctccggttctctggaggtcatccgcaagtgggcggagaagatccctggctttgctgagctgtcaccggctgaccaggacctgttgctggagtcggccttcctggagctcttcatcctccgcct

SEQ ID NO: 10053 - DNA, 554 bp, Homo sapiens
  misc_feature (1)...(554): n = A,T,C or G
agttagatcacantccannnnnntttcgatcaccagtccatgtggtggaattcctgctggtctcttctgttagggcagcagtgtcctgagaaggtggagctagagtatggagaacaaaactaacaagcaccaaggcagcaagcaaggcaacccccaaatgacagcagttgccaaatccaaagcaatctgtgcttcagaagacagaggctctgcacagtccctgtctcagacattgtctcctccttagaagatacctaacaacagcactgtgggaggctgaggtgggtggatcaccaggtcaggagatcaagaccatccttgatctttagtagagacggtgaaacactgtctctactaaaaaatacaaaaaaaattagctagccgtggcggcgggcacctgtagtcccaactatttgggaggctgaggcaggagaatggcctgaacccgggaggcagagcttgcagtgagctgagattgcgccactgcactccagcctgggcaacagagtgagactccatctcannnnnnnnnnnnnnnnnnnnnnnnnnnnnnn

SEQ ID NO: 10054 - DNA, 331 bp, Homo sapiens
catctaatcaaagctgcacttgaaatatgaatacttcagtaggactttcactaggcaggattatcgagtaggtggcctctgtatttaatacctacgtatcttctcttccactcctttccattctatagcttcccatgtctccaatatatgcttctactccataataggatccatgtgttttcttagctggctatcagaaacttctctccaagatgtgaagtgacgataataaaattaactgatagcaatgctttgatgtgatcctttatcagagtgcctgtaggggatgactggagaaatgaagaaaagagtaaagaaatgaagttatgcc

SEQ ID NO: 10055 - DNA, 548 bp, Homo sapiens
  misc_feature (1)...(548): n = A,T,C or G
ggtcgatcactctcagngngcctcgatctcctatcagagaggngcaattcgcttgtgagttaggttgtttgccggcgtagcggccagcgcctgagcccgcccttgatcttcgctgtggcatggcggacgaggggaagtcgtacagcgaacacgatgatgaacgcgttaatttccctcaaagaaagaagaaaggccggggtcccttccggtggaaatatggtgaaggaaaccgtaggtctggaagaggcggttctggtattcggtcttcccgccttgaggaagatgatggagatgtggcaatgagtgatgcccaggatggtccccgagtacgatacaacccctataccacccgacctaaccgtcggggtgatacttggcatgatcgagatcgcattcatgttactgtgcggagagacagagctcctccagagagaggaggggctggcaccagccaggatgggacctcaaagaactggttcaagattacaattccttatggcagaaagtatgacaaggcatggctcctgagcatgattcagagcaagtgn

SEQ ID NO: 10056 - DNA, 447 bp, Homo sapiens
  misc_feature (1)...(447): n = A,T,C or G
ttccaatgagaccctggatgangccgtcgacanggcaannangaaaggcagcttattagaaaagcattgtcaccctagtgccatttccatctaaaagctgtgctaattgccactgtgaaataaggagagccagcattagaactcgatagcactcggtgttaggaagcacagaggaaaatggccaagtcttggcttttcctgcacctcttcgagcagagaggcttatgttacaggtttgcctgacaggaagctaaggcagtgcatgttgtattgagagtgaagggttaggggtcgcaaccttcctttcagctccccagtcccctcaaaccacccctcccttcccctcttcacccctgccctcaggtatccctgttgatccgccgggagctgacagagagggccaaggacttcagcctcatcctggatgatgtggccatcacagagctg

SEQ ID NO: 10057 - DNA, 467 bp, Homo sapiens
  misc_feature (1)...(467): n = A,T,C or G
ggtggccnnttttctttgagtccctggccatgtgcgggaattcccgaggtgggaggatcacttgagcccaggagtttgaggctagcctgggcaacaggagagactctgtctctgcaaaacacaaaaaccaaccaaacaaaaaattatcctagaatagatggaaaatcatactaaggaacaaagacaactttcctttcatttttcctttgcatatcttacacagtcatatcactatgacttaaagaaaacaaattatcacgtatatacacagattcacataagtgacagaagcaaatgtattagtcaaaggatatcttcatctatattgaagtacaagctagaaagtaaacttcttgaaggcagagattttttttttaagttgtgtggctctaccacctaacataggttatgtacagaatagacatcaatagtgaatgaacagatgaattagttaatgagttaatgat

SEQ ID NO: 10058 - DNA, 461 bp, Homo sapiens
  misc_feature (1)...(461): n = A,T,C or G
aatggagacatattgaagngcggtggaattccatcacagtcacctccaaggctgctcgccctgacagtggggatgtgatgggcatgctgtcaaatatattgtgagtgcattagcaggattagcagtgaaggctaatattgtagcatttccaaagttcattcacggcagctgcttggctgccaaattgggcaggcgcaggcttcagaattaatgtcacatctgggatggccctgatgtggtcagaggcacaacagtcccattgtgtttgacttgtgtttatgtatttttattctataacagagtttaatttgtaacattagtagaaagataccgcctaagtgttcttttccatcttattgatgaactagctgaaatacttctgccacccttcaaaaccagatgctttgtttttggtagttcttggagtattgttgattttatttctgctagtgaaagtaatt

SEQ ID NO: 10059 - DNA, 468 bp, Homo sapiens
  misc_feature (1)...(468): n = A,T,C or G
atagtagacattagnccangcgatagaagtccttagaccangcggtggaattcctgaactgtaagttctaggtagactaattgggagcagacacggagttttagatgccttagccaaacccagcagaaacctttcacacagccactcatcgtaagaaacgcagatttttctcttctcatgcttgtctctggttccctgcatttgtagtgacagaactttcactagcaggatataaagaaagtaattatgcttggagtccctctttactgggtttgagttaggtgcataacatggaaaggagtggtgccttcaaatgaatgtgaccactccgtattgtggagtgacttccctagggcatcctatacatcctaccacagaaggccaagggacagagcaccaacttcagtatccaagaaattagatccacaactcttgattttccacactgaggactgtcgcgagtaagtt

SEQ ID NO: 10060 - DNA, 471 bp, Homo sapiens
  misc_feature (1)...(471): n = A,T,C or G
tggcgcgtgnnncttcnccatagatttagantaccntagngacgnggcantcaagacactttgggaggaaagaagactaccttttccccctgccattggtatagctggtgccccaaaacttccacctccctccctggccacctctaaaatgactggtataggtgctgccccaccccttatctcccctatcctgggctaggaggccacaggggctgtcctctagaattcttccttccctcccccacaccattcattcaattcatgaaacaaatctttgccaagagcagtttatgtgccaggaacatcattctgtccttgcaacctggaacaagaccagctaccagcctagcttcatccgctacttgcaccaaccagtcccgggttagatcccaaatgctagaagccagggatgcccaactctgggtggccccagtcagaacctctgggatctcagtgaagctggcctggcct

SEQ ID NO: 10061 - DNA, 465 bp, Homo sapiens
  misc_feature (1)...(465): n = A,T,C or G
ggcgcgccggnngntattgatagcctccctaggccgngncgnggaattcgccaaaaatttttttttgtagaaacaaggtcttgctatgttgcccaggatggtcttgaactcctggcctcaagtgatgctcccagcctttccataagtgttggaattataggcctgagccactttccctgacctaggattgctgctgtttaaatgcagaaaagtagaaaaggaccctttgaggagacagcatgagcaagacacatgaaagaagagagtacacaaaacttgccctaatacccatgaaagctcctataataggggagccctgagaatgggaatggctgtgtctttcaggtgtgccttaaaaaaaatttattgctaagggagatggagatgggaagtaatcagtgtttgtatcaaagggtggttagatttgtgttttagaaagttagaaagagaaaaaaatttttcttt

SEQ ID NO: 10062 - DNA, 542 bp, Homo sapiens
  misc_feature (1)...(542): n = A,T,C or G
gttcgatcactgtccgtgtggtgtagttcctcagatgagagacgccaactgcacccttgccacttccaaagcaatagaggcagagtggtcccctctttgccacctatgccagttttgaccctggcattaactggccttagaagaaactggatcctggtagggggtggcattttgtttgtttcttccaatctgctgaatcttttgactgcaccttacaaacagcagtctgctcccatgaccctctgcccacttccattggtctccaggccccaataatctggggttgaaactttgaggaaatgccagtgacttattccagagtgcctcagttaggggaacttctctgtaaagaaccctgggtattgagcaaaaaccttattatcgntaatgacctataattggaagcttcctgcctttntctttggttgctcctgtggaaaatactgaaaagattactttgntttattttggtgnctttntataaaaaggggaggtggagagaccccttcacagcanggattgtgccgggagagtgcctctgc

SEQ ID NO: 10063 - DNA, 464 bp, Homo sapiens
  misc_feature (1)...(464): n = A,T,C or G
atcgagcnccntnnattgaggaccattagtccgtgcggtggaattccacacaaagaaaggactgagggaacatggaagatgaatttaattttgttcgaagggattggggatgacatgcaaaatgaagaaaaatggcttgaataagtggggaagagtatatcaagtaaaatagcaaaagcagaggcattgaaggatatgccaaagtcagacatggcaagtcatgctgtgacgattcaccagaaaggtgccgggctgggagaagggggatgtggcaagaaatatggcagaaaaggacaggctggggccatattatggagagccttgaatgatgagccaagagttagaatttaacttgccagatagtgtggagcccttagggctttctgagctggggaatacgtgattagatttgtgtgaaatagagaacaatggaagaaaaatgtgaaggtgtgaaagattttaat

SEQ ID NO: 10064 - DNA, 446 bp, Homo sapiens
tagaatttgaagaccattagtcttggacggcgtattcctgggcacagagaagacttgcttctctaggaagacaatgggctcataagaagaatgacggaatcataaacaacagaaatgtattctctcatagttttggagaccacaaatctgaaatcagggtgtgggcagagctgcactccctctagagattctagggggagacttcattctttccccatgtgcgacaaggaagggagggatgccaggcacagacctatgcacctaatgagagaaacagatacaggatgcagtgggatgaatggtggcccccaaaagacatgcccatgcgcttgtgcccagaaactgtgaatgtgacctcatttggaaaaagggtcttcacacacagattaccttcaggaccctgagatgagatgatcctggtttatccaggtgggccctgaatccaa

SEQ ID NO: 10065 - DNA, 552 bp, Homo sapiens
  misc_feature (1)...(552): n = A,T,C or G
cgttagatcacccctcagagnnntttcgatccactatccgtgtggtggaattcggcgggttctacagagacgtaggctgtcagggagtgtttatttcgcgtccgcttctgttcctccgcgcccctgtgctgctccgactcacatactcgtccagaaccggcctcagcctctccgcgcagaagttgcccggagccatggccgagtactcctatgtgaagtctaccaagctcgtgctcaagggaaccaagacgaagagtaagaagaaaaagagcaaagataagaaaagaaaaagagaagaagatgaagaaacccagcttgatattgttggaatctggtggacagtaacaaactttggtgaaatttcaggaaccatagccattgaaatggataagggaacctatatacatgcactcgacaatggtctttttaccctgggagctccacacaaagaagttgatgagggccctagtcctccagagcagtttacggctggcaaattatctgattccagaattggcctgaagtctggctatggaanatatcttgtataan

SEQ ID NO: 10066 - DNA, 461 bp, Homo sapiens
  misc_feature (1)...(461): n = A,T,C or G
gcgggtttaaatcagaggttcgactgagaccgtaaaaanncccaaaaanaaattctaacacttgcccaagatcaaatccataaactgaataatcctataactattaaagaagttgcattcataggttaaaacacttcaaaaaagaagtcttcaggcctacatgatttcacaggtaaattttatcaaatatttgaaaaaagaataacactatttccacacaatctcttccagaaaacagaagaggaatgagtaatttcttttcttttttaatttttcttttcttttttttttgagacagtgtctcgctctgttgcccaggctggagtgtgcaggggtgcagtcttggctcactgcaacctctgcctcccgggttcgagcagttctcctccctcagcctccttggtggctgggattgcaggcgtgtgccaccacgcccagctaatttttttttttgtattttg

SEQ ID NO: 10067 - DNA, 485 bp, Homo sapiens
  misc_feature (1)...(485): n = A,T,C or G
gatgttganaaagtaaaaaaacctgagaccctagttgatgacattaaaaagngcggnggaattcctgccagattccctgcctccatcacccgaccgccactcccctctctggaacccaaataaagagtatgaagatctgcttgactatacttacccactgaggcccgggcctcagctcccaaagcaccttgatagccgtgtgccagctgaccctgtcctgcaggactccggggtagacctggatagcttctctgtctctccagcaagcaccctcaaatcacctactaatgtctcccccaactgcccaccagcagaggccactgccctgccattttctgggcccagagagccaagccttaagcagtggccctccagagtaccccagaaacagggtggcatgggcttggcatcttggagccaacttgcatctacccccagagccccaggcagtagggatgctcgttgggagcgcagagagccagccc

SEQ ID NO: 10068 - DNA, 455 bp, Homo sapiens
  misc_feature (1)...(455): n = A,T,C or G
naatcgatgaccactaggccagngcggnggaattcctgagggagagcgaagggggtcaaaggatgacttgaagcacagagggctagggatgtggggtacatttgtctgagcaggcagggtgggaagaaagaatgcaagagtggactgaatgtgcctaatggagaaaacccacgtgctaagggatgaggggcttcctgggtcctgttccctaccccatttgtgggcacagccatgaagccaccgggatgaacctatccttccagtggctcgctccctgtagctctgcctccctctccatatctccttaccctacacctagctccccacacctgcctactcccctgggcatcttctggcttgactggatggaaggagacttatgaacctaccagttggccatgaagtcttttcttctttttcttttttttaaccaaacagaacaaaaccgaggaatg

SEQ ID NO: 10069 - DNA, 471 bp, Homo sapiens
  misc_feature (1)...(471): n = A,T,C or G
agcccccccnnntttgagcccatagacagngcgatgagttcatcgaacgaatccctacattctaaggagaatgaagggggccatccttctaaccctggcatctgtgagctttggcctagctgaacatcctcaactaaaaggctgcccctctttgctcaggcatctgtgctatgtcataacaggaaactgaaattatagttccctgttgcagattcttattgccaagtgaggaaattccaccaggaaggattcaaatatttgctttgtaccacttcctctacctcaagagcaagccttgatcctagcacggctaacacgaggtgagattcgtgagacctaactcccgggctgactctgaactgtcgttttagagggagttctctggactggcaaggaacaggggattctaaactcaatggaactcttccttggtggccctcgagaactgctccctcaagaacacagagccct

SEQ ID NO: 10070 - DNA, 443 bp, Homo sapiens
  misc_feature (1)...(443): n = A,T,C or G
nttgaggaccatagnnattgatgacccttagtccgtctggnggaattctatgctttttatccttctttgtttaatgtgatgtatcacattttattgatttacatgtattagactatccttacctccccgggtaaataccacttgattatggcgaataatctttttaatgtgcttttgaattatcattgctagaactgctggttttgaatgtttgcctctatgtttatcaatgatattggcctggagtttacaaagagttccctccttttcatttttttgaaatagtttgtaaataatttgtataagtttttaaaatgttttgtagaatttgtcagcaaaaaccaccaagtcatgaatttttctttcttcctctatttttttagagacagggtctcactctatcactgaggctggcatacagtggtgcagtcatagctgactgn

SEQ ID NO: 10071 - DNA, 465 bp, Homo sapiens
  misc_feature (1)...(465): n = A,T,C or G
ttaacattgaaaccctattgagnctggaggaactctagataatgagggagtgggttttttattactgttccattttgcaacatcctgcaacaccatcctgggagacaagagcattacccagcttggctttcacgggggagggttgtattcagtaaaaaagaatagtaaatataaggtcactgagattctaagtaagatagtaaatctaaggtcactgagccaaatccttttcaataggcatatattaacaggctgcttattttggcggaggttacatatggatgaaaatgaatcttagtcactgaatattcatatacatttcccccaaaaccttagacattcatagtagattttaattagttagctttctaactagtcagatttctgcccaaagtgcttagtcaatagtaattaagatatagcttcaaaaatggctttgcttttgatttctactcatattcgtat

SEQ ID NO: 10072 - DNA, 457 bp, Homo sapiens
  misc_feature (1)...(457): n = A,T,C or G
cttgagacctttgtcagngcgctggaattcccacgcacaggccttccaagtggatgtcccgttgccttattcccccagcccacataggcaccctggtcttggcctgctgaagtgttaggaagagggtgggtgccctccagacctggggactgagtggggaaaggagttacacccgtgagtggggaatgaggctggtcctgcagcctctccctccgctcagggcttgaaggtcggtggcggagggggtggctctcacagggcccaactctaaagtggaagaaccttgttagaccgagagcttgccatccagccaagctgctcgaggccctgcagtggccttggcaatgtctgtgccacctcctgagccctcccagcatgtcctcacatgctcatgcccacccgctcctccacaagcctagtccatcctgcctgagctccagcccccagccctcactgg

SEQ ID NO: 10073 - DNA, 474 bp, Homo sapiens
  misc_feature (1)...(474): n = A,T,C or G
tgagggcccnnnagtgnnatacgagactctagatgatggcntgaanacgccatgtctgtggcgtccacctcaacaggctgcattcctgcctctactgtgtcttcttcggctgtttcacaaagaagcatattcacgagcatgcgaaggcgaagcggcacaacctggccattgatctgatgtacggaggcatctactgttttctgtgccaggactacatctatgacaaagacatggaaataatcgccaaggaggagcagcgaaaagcttggaaaatgcaaggcgttggagagaagttttcaacttgggaaccaaccaaacgggagcttgaactgctgaagcacaacccgaaaaggagaaagatcacctcgaactgcaccataggtctgcgtgggctgatcaaccttgggaacacatgcttcatgaactgcatcgtgcaggccctgacccacacgccacttctgcgggacttcttcc

SEQ ID NO: 10074 - DNA, 428 bp, Homo sapiens
  misc_feature (1)...(428): n = A,T,C or G
cattttgctacagtccaaaagatgagggactgtgctctgccaatgtgactcgctattattttaatccaagatacagaacctgtgatgctttcacctatactggctgtggagggaatgacaataactttgttagcagggaggattgcaaacgtgcatgtgcaaaagctttgaaaaagaaaaagaagatgccaaagcttcgctttgccagtagaatccggaaaattcggaagaagcaattttaaacattcttaatatgtcatcttgtttgtctttatggcttatttgcctttatggttatatctgaagaataatatgacagcatgaggaaacaaatcattggtgatttattcaccagtttttattaatacaagtcactttttaaaaaatttggatttttttatatataactagctgctattcagatgtgn

SEQ ID NO: 10075 - DNA, 474 bp, Homo sapiens
  misc_feature (1)...(474): n = A,T,C or G
tgggcgattttattcgattgcctacattaggccgngcggtgtaattcaacacagcatatgtagcacattttagaaagacacaaagcttttattttactaatgttaaacacccacttcaaaatgatttgtattgctacataaggcaaaaaacaattcctgaactttgcagaaaggcaaaatatttcaactgccacatttactcttttaaaactgagagctttaaagcaggagctcccaatccccggtacccatccctggcctgttagaaactggaccacatatcaggaggtgagtggcacgcaagccatagaagctttatcactatttacagctgctcccaatggcttgtatggccacctgagctccgcattctatcagatcattggcagcattaaattctcataggagcatgaaccctattgtgaactgtgcaagccagggatctaagcagtgccttcttatgaaaatccaatg

SEQ ID NO: 10076 - DNA, 480 bp, Homo sapiens
  misc_feature (1)...(480): n = A,T,C or G
aggcnccccccccaatagaggccgtccgannncccatagangtccattaaaaagccggcggaattcgtggaagcagattgcttctgtcatgaagcaccggtttctgttccccttctttgactcagcctatcagggcttcgcatctggaaacctggagagagatgcctgggccattcgctattttgtgtctgaaggcttcgagttcttctgtgcccagtccttctccaagaacttcgggctctacaatgagagagtcgggaatctgactgtggttggaaaagaacctgagagcatcctgcaagtcctttcccagatggagaagatcgtgcggattacttggtccaatccccccgcccagggagcacgaattgtggccagcaccctctctaaccctgagctctttgaggaatggacaggtaatgtgaagacaatggctgaccggattctgaccatgagatctgaactcagggcacgactaga

SEQ ID NO: 10077 - DNA, 448 bp, Homo sapiens
  misc_feature (1)...(448): n = A,T,C or G
attgttgacctcnnttttgagaccatnggaaagngcggtggaattcatgttctctttataatgcagtggcaaaaggttctgaaagccttttaaactcgaaccagtgggggaaagatggatcttgaagctaatcctgcagagagttttatagaggccagggattgccttctaaattatgataaaacagaagtgaagagtttcagagcatcagattgagtgaaaagttgtcagattctgtattttttaacaatcttcaataatgtaaagattacttttaaaatatttaagttaaaactacttgaatagtattttgctgaagagcaagatatgcattaatcaccggttttatactgtccaaaatgaagcatccccgtgacaaaccagagtgggcagaagcatcgagagcgtgacaggaaatcccaagactgcttccgcctcagaggcgtcc

SEQ ID NO: 10078 - DNA, 444 bp, Homo sapiens
  misc_feature (1)...(444): n = A,T,C or G
actgagaacttngcctgatgacattantaagtgcggtggaattcgggacgagagggcctgacgtacagattataagcgccatggctatggctagtgttatattgcttgccggtgttttaagaaagccagatgcctggattggactctggggtgttctccgagggacaccttcatcatacaaactctgtacttcctggaatcgatacttgtatttttctagtaccaagttacgtgcaccaaattataaaacacttttttataatattttctcactgagactcccagggcttttactatctccagaatgtatttttcctttttccgtaagactcaaaagtagtataaggtctacaaaatctactaaaaagtctctgcaaaaagtagatgaagaggactctgatgaagaaagccatcatgatgagatgagtgagcacgaagaggagt

SEQ ID NO: 10079 - DNA, 468 bp, Homo sapiens
  misc_feature (1)...(468): n = A,T,C or G
ngatggcnnnttttnaattggctcgatggcatngtgcnggaattcatgagatggatattatacaaaactatgagaatgaatgaatgattttagcattgtggcaaaatataagatccaaaatgtaaaatacaaaatcagttatattttttacacctgcaacaagcagttgaaattgaaatgtgtaaagcaatacactgaaagctgtatattgaaaactgtaacacattgcctagagaaattaaagaactaaataaatggagagatacatcatggtcactggttggaaaactcattattgtcaagataccagttttcaccagattgatctatagactcaatgcaatcctaatcaaaatctcaacaggattttttggagaaattgacaaactgattccaaaatccatatggaaatgcaaaggacatagaataggtaaaacaactttcaaaaggaagaacaaagtanaaggc

SEQ ID NO: 10080 - DNA, 482 bp, Homo sapiens
  misc_feature (1)...(482): n = A,T,C or G
aggcgggnnnnnnnnaattgaagacacattgaagagcggtggaacagtgacaggggcacatccaggatttccgccaccctgaatttagtagagctagtaggccctggtcgtcactctgggcagggatgccgtcagccttgagggtcgccacccacctgtgtgttgccctctgtcctggcggggaaacatacaccccttgtctcaccaccaaccttgcttgtgtagtcagcagggctggccctgccccaaggactcactgcatgtacccggacccctaggcctggcctttgcagcatagttgggagcttctggattccatctgcacctgtgagccccatgctggctgtgcactgcgcgggcctgagactgctggatacaatgttgggcaacaactcagccagcctgatggcagcctcagaggcttactctaacccatcccagaataaatggagacttcatgtgaaaaaaaaaaaaaaaaaagg

SEQ ID NO: 10081 - DNA, 475 bp, Homo sapiens
  misc_feature (1)...(475): n = A,T,C or G
tgaggggcccccnagtggnnaaactgatgacatcactgatggcntgaanacgacatttttggttgtcacagctgggagaggggggtgccactggcatctggcaggtggagtctaaggatgctgctactcatactgcagtgcccaagaaagctggcctaaatgtaatatgtcaagctggagaaattctgctgactccgggataaataactgagttcctgaccatatgaaacttaccgtcttgcaggggaagtggacagataaacagggagattgtgctgatgctgctgttgaggtcataggtgtttgtggtcatttctcctttggagggtggttcagaaacaagtccattcatggatctgtgaaaaaattcttctctggagaggtccagtaggaattggaaagtgagggaaagaggctggatgaacaaagggtcacaggtgtaggtttgggacacattgtggggcctgaaatttgg

SEQ ID NO: 10082 - DNA, 469 bp, Homo sapiens
  misc_feature (1)...(469): n = A,T,C or G
tgatggcngnnntnnaccttgattcgataagcatcgnccgggaccngcaattcggagactggggtgtgcagcaccagggtgaaagtgtttagctcaagtatgcagtttgtcttccaagtggatacctttgggctgagcctctactttccctccaaaataactgcctccgctgtgacctttgatcaccagggaaatgtgattgttgcagatacatctggtccagctatcctttgcttaggaaaacctgaggagtttccagtaccgaagcccatggtcactcatggtctttcgcatcctgtggctcttaccttcaccaaggagaattctcttcttgtgctggacacagcatctcattctataaaagtctataaagttgactgggggtgatgggctggggtgggtccctggaatcagaagcactagtgctgccattaatgaattgtttaaccctggataagtcacttaaact

SEQ ID NO: 10083 - DNA, 474 bp, Homo sapiens
  misc_feature (1)...(474): n = A,T,C or G
gaaggcccgnnttngggggacctgagaccatngnaaactgagaccatcagaccangcggtggaattcgtctgtattaagaaaatataaggtttctaattgtcttattaatatggtaattcaagtgaattagaaatatttaactgcaatcttgaattataaagttgagatatatatatatatgtatcaagatctcaacttgatgtaaagtaaatgagcagttacctggcggatttttttttaaataactgatttaatccataatcccataacaaacatagcttcacctcagtattttctttctttctttgttcaacagtgctccgataagggaatgctagaaaatagatgagaagtactgaaagaccttttttttttaattgattagaaaagtaagtctctagggtctttgaatgctggaatttttttttttttttggcctttcccatcgggggcagctaaaacaaaaatcactc

SEQ ID NO: 10084 - DNA, 479 bp, Homo sapiens
  misc_feature (1)...(479): n = A,T,C or G
catagagacctctaggacaatggacggctataggaaagngcgacggaattcttatatccaggaagggatacagaatgctcttctttgagactcacccacgggaaggcttctggggtgagtgggggagattttgagacagagttctcttactgagtagtagtaataatcctccccagtagcctgtcttaacttaaaccacaggttactgaagttggcacctgtagtataagagatatacttctgatttcttcattggactccttgagctgtgtctcttcacagcttgttaactgcactttttcttcttcagaaatatctgtcactataagatggtttattcccttataggggaaatgtctagctgggctcattgaagtttaagcattggtcctaaagaaatatgtgggcatcatgattccaggcagttgaatgctcttgggattttattcagcctttaagttgcctctgtgggctcacta

SEQ ID NO: 10085 - DNA, 430 bp, Homo sapiens
  misc_feature (1)...(430): n = A,T,C or G
cgtcatctggccttttcactcagcaatctcctgaagcatggttctgtgtcagtaaatgttcttatccagcatggcaaaatgttaaggtaattgtagactcacataagttgcaggaaataatacagagatcccttataccctttgcccagtttcccgcaatggtaacagtgtgcaaagctccaggacgattttgccacccatgttggcatgtgtaaccgccccccacagtcacgacactgaacatggccaccaccacaagtgcctagtgttgtgctacccttttacagccagcgcccctccctcctgcccggcccccctgcgttgtatttatggctgcattttgtcctgtcttgtggatgttccatggcggacagacaggctgaacaaacaaagggtgtgcaaagaagcccagagcaggagagaaggctcn

SEQ ID NO: 10086 - DNA, 475 bp, Homo sapiens
  misc_feature (1)...(475): n = A,T,C or G
ggcactgggccctatgagacccgtagataccgtggccaggcgcggaagtgccagataacccagattatacaaggctataggaaattaaataatattttatcaccatatgaataaacagtagatcaattaagcaggaaaaaaccttaaacctatgtgtatttaaaagatatacaaagcagtggggaaagagttgctcactgagcaaatgatgctgggatattttaccacctatattgaaaaatacatgcttaatggatgacaaaatcacatccaaatggatttaagatctgtatgtgaaattcaaactttgaaacattttaggaaaaaatatctttttgatcatggggagagggatggatttgttataaattctcttaaaaattttctatttgttaaacaaaatttaaaagatggaatgtgtaagagaaataataaataagattcattaaaatgctagaaacacattnttaaaggg

SEQ ID NO: 10087 - DNA, 467 bp, Homo sapiens
  misc_feature (1)...(467): n = A,T,C or G
aaaagttagaaatccttatcgataccctttgcagngtgccggaattcctgtccccactgcgggctgcctccgatcccctgctctcttcagtgtcccctgctgtctccaaggccagcagccgccgcagcagcttcagcatggaagaggagtcctgatcaggcctcacccctcccctgggactttcccacccaggaaaggaggaccagtcaggatgaggccccgccttttcccccaccctcccatgagactgccctgcccaggtatcctgggggaagaggagatgtgatcaggccccacccctgtaatcaggcaaggaggaggagtcagatgaggccctgcaccttccccaaaggaaccgcccagtgcaggtatttcagaaggagaaggctggagaaggacatgagatcagggcctgccccctggggatcacagcctcacccctgcccctgtgggactcatccttgccc

SEQ ID NO: 10088 - DNA, 475 bp, Homo sapiens
  misc_feature (1)...(475): n = A,T,C or G
gacgtgcccnnnagtngcncccctgagaccctcgctagatngccntcagaacgcccaaccgagactttcaccagcccctctaattgctcaaaccgctttcacaatcctctctttctacatcattcctagtggttcttttctgatggaacctctgactggtaacatggcattaccagtcctttccctctcatgttttgctatttcctgatggaacctgggagtctgagtgatttgtatttcaagaagcagttatgctggatctctttgttggttaataccccatgacctatctggccgttatgggatatttcagggataggagttgtgaaagagcccttggctggacgtttctagccttaatctttggcaagccatttcatttccctgagcctcagtttccgccttcctacagcgtgagcaggtctgggtgggctctcaagcccctttcagctctaagattccaagtctgtgattc

SEQ ID NO: 10089 - DNA, 470 bp, Homo sapiens
  misc_feature (1)...(470): n = A,T,C or G
tggcccgggcnccgatgagacataatgatgccgtcacccggcgcgaaagcggcgttggcagtctcagtcctatttaatgatggccagagataccttctggtcagcctaagccctggctgactgccaggcagttgcgcagtagctcttcctgtagtgaaactgttcttcttatcattgttgactaaactctgttggaagttgtctcactagccatatgagccacagctgtctctatcctgaatagcttaatgagccataggttgctgactcctggactgcaggaaccttttagttgcctctcgccacagatgaatttccttctggacctccatctctcttcatcacaggtgtcaacacttgagccttctcccatgttacttcttatgcagcgtcccttctacttaactgtaagttttataaaagcaaaaaaccagcttattcagttttttgcttatgcagcaaacattgaa

SEQ ID NO: 10090 - DNA, 478 bp, Homo sapiens
  misc_feature (1)...(478): n = A,T,C or G
ggagttgccnnnnagtnnnnncaactgagactctgactgatggcntgaaaacctgcccttggaaaaagcgatacatatcatcttcactctcttccttgctttccaagttgttgcagcatttcttaccttaaggaaaatggttaatcagttggcagttcgtttccacctccaagactttgaccggctctctgcaaacagaggagacatgagaaggatgaggtcatgtatagaagagatctgatccagtgttgttgagtgaaaatctgacagatcattctagagactgtaagagttaggaaaatatcagagctctgagaaaagggacaaagcaagtgttttgaattgtatatgctctcactctgaaattccaaggttgggggcaatgatgaaactttgtacagtatatgaaacagtatattaaccctaaaacctagatgttgtccacctgatgccaaatttcttaatttttttgatggtg

SEQ ID NO: 10091 - DNA, 461 bp, Homo sapiens
  misc_feature (1)...(461): n = A,T,C or G
atcgagcccccnnattgaagacccctagtccgtgtggtggaattccttgaatagcagctcttgaggaatctatatttctctacctcatgcagaatcttagagctctggctttgtggctccatggctgggggagggagtggagacggaggaacttgtcactgctccatgccccattgttgaaatggaaaatgtggaaatgttaagccgtttctagaggattgtggaagactcagggtgacatgcagtggattctaaagtgctgagggctcagtgggccagcccaggcctggagtctgaatgaagaggcatcagtgtgccggaacttcatgactgggttcagtgccagacctgcagactttgaaagtgaatgtcatcatgaagcccacatggctggatgggtcaggttctcctcagttgtcacctgtccaggggcagtccagtgagaaaagctagaatgtggg

SEQ ID NO: 10092 - DNA, 459 bp, Homo sapiens
  misc_feature (1)...(459): n = A,T,C or G
nggaaaatgagcctctngaaatcgagaccattcagacagngcggtggaattcactgtaattcacactggagagaaaccttacaagtgtaatgagtgtggcaagacctttgttcaaaattcatctcttgtaatgcataaggtcattcatactggagagaaacgttacaagtgtaatgaatgtggcaaggtttttaatcacaaatcaaaccttgcatgtcatcatagacttcatactggagagaaaccttacaagtgtaatgaatgtggcaaggtttttaatcgaaaatcaaaccttgaacgtcatcatagacttcatactggaaagaaatcttagaagtgtaaatttgcaaggtttttaggcaacagtcaaaccttgcatgtcatcatagactttatactggagagaaaccttacaaatgtgaagaatgtgacaaaagttttcaatttcaaatcactcct

SEQ ID NO: 10093 - DNA, 477 bp, Homo sapiens
  misc_feature (1)...(477): n = A,T,C or G
tgccaagtgcccccatagagaccntattagagagccntgaanncggacctttatgttgggcttttctattttttaaatgttcacatttctttctgttaattataatgccatcataatgtcacatttacactgttgcctcttttaaaagcaaagccactttcttgttctaagattacatcaagacttgagcagtgtgtagtaattaaaatgtgtgcttaatgagcataatagattctggttttaggaaataacatatagcttttatatgaatattttcttttgctataatgaaagtcacagattttttttttcctggcttttatggaggaatgaaaagagttgtctccctctaagagtatactatttttgattctcatagcaataatgtcaccattcttatcagagggtaaataccccttgtataggaaaacagacataatttcctcttgggagttctctttatgacttagcattttc

SEQ ID NO: 10094 - DNA, 481 bp, Homo sapiens
  misc_feature (1)...(481): n = A,T,C or G
agcccaggtcnccttaagataccccattagaggaccctcgacagcgacgnggaagnccacgggcccactatgatcagctggtctgaacaaaatggtcagatggtttaaatgatattaaatacggcaagaattcctatgatctggaaccatggcggtgtagtggcacctcatcctctaatgatatggccctttgtaggagctaaacataaggacctgtggaaactgttaatagctcttaataagatcaaaagctgagagagaatattaaagcatcgagaaggactctctacaaacttgtctttggatattgcaagaatggaagaacagatatttgaagcatcccggcacacctgaccttaatgccaggaactggagtgctagaaggagctgcagacagattagcagctggtaacccattaaaatggataaaaacacttggaagctctgtgatttcaatgaagattgagcttttaatctgtgt

SEQ ID NO: 10095 - DNA, 482 bp, Homo sapiens
  misc_feature (1)...(482): n = A,T,C or G
nttgatagagacctgaaggctcgtggccggaanncgnaggnagaggaagagcctggcttcgtttggcattaatgcaaaagaaactttcagaatatatgaaagctttgatcaataagaaagaacttctcagtgaattctacgaacccaatgccctcatgatggaagaagaaggagccataattgctggtctgttggtgggtctgaatgtcattgatgccaatttctgtatgaaaggagaagacttggactctcaggttggagttatagatttttcaatgtatctcaaggacgggaacagcagtaaaggtactgaaggagacggtcagattactgcaattctggaccagaacaactatgttgaagaactgaacagacatttgaatgctactgtaaacaaccttcaggcgaaagtagatgcattagaaaaatccaacactaaactgacagaggagcttgcagttgccaacaacaggatcattacc

SEQ ID NO: 10096 - DNA, 472 bp, Homo sapiens
  misc_feature (1)...(472): n = A,T,C or G
ggggggcccgnnattnggnnaaactgagatctagaccngagacctatagaaagngcggtggaattccatttgtttctgtaagagtttccattgtatcctctttttggtagatgctgggctcatcttctagaatctcgtttctcctctttcctcctgcttcatgggaaaacagacctgtgtgtgcctccagcatttaaaaggactgctgatttgtttactacagcaaggctttggtttccaagtcccgggtctcaactttaagatagaggcggccataagaggtgatctctgggagttataggtcatgggaagagcgtagacaggtgttacttacagtcccagatacactaaagttacaaacagaccaccaccaggactgtgcctgaacaattttgtattgagagaataaaaacttccttcaatcttcattttggaggcagggctgngaagggagcgctctcttgattctggg

SEQ ID NO: 10097 - DNA, 444 bp, Homo sapiens
acccgaagaccatctgttcgagcgccgtaattcgattaacatcattactcaaatgccaggaccagtaaaatgcctgacaaacaatagcctctcattcagcagcatgtgtagctatgagatcgtagtcagtctatgtgtgccaacactatgaagcattgggatccagagttggaagacagaccatttctgccaattgttcacagcacatggaggagaggaatgtgtaaacagttacccagaaatatacatacacttctatggagaccaagattgagacgtgacctgtaacgcattaacttttaactcttatgcctcattttcttcatctgagaaatgattcagtcatcattaagtcatgacagcttctttgatggtccatggtttctggctcgtttattcatctgtttccatcacagcagtgaaaaggaggctgccaaccccaag

SEQ ID NO: 10098 - DNA, 473 bp, Homo sapiens
  misc_feature (1)...(473): n = A,T,C or G
tggatggcccggnnttnnngnnnaattgtagacattagncattgaggcctattgcaatgaactctggaagcccagccagggacaatgcaccttcacagagattctgcactaatctgagtgaaggtctaaggtttggaatctccccctcatggagagaagctttgtatggctgtcatgcttagacagtgattcctgcaacttgaccttcaggctgggagaggtggagagccatgcctgttctccttccttgctatggaatttgctgacacaatatcttccgcctggtgctgggcatatcctaagaacttacaactttcctgtattatcctgtgtgagcagctgtcaccttattgggggaaaaatgcctgaaaattagggggcacttcaagtagatagcttctatttcctatnatttgcttatatacaagtatttgcttttatcanaagtattcccataaagcattttaaagaaa

SEQ ID NO: 10099 - DNA, 466 bp, Homo sapiens
  misc_feature (1)...(466): n = A,T,C or G
tggatgccnggnataagnnaacctgagaccctaganatgagggcattgcgaantcnnatttttttattcataccactagctacttgttttctaatctgcttcattctaatgcttatattcatcttttccctaaatttgtgatgctgcagatcctacatcattcagatagaaacctttttttttttcagaattatagaattccacagctcctaccaagaccatgaggacaaatatctaacacttttcagttgctgaaggagaaaggagctttagttatgagggataaaaatatctgccaccctaggcttccaaattatacttaaatggtttacatagcttaccacaatgggagtatcagggccaaatacctatgtaataattggaggccatttctgctttaggaaaagtactttcggaaaattctttggccctgaccagtattcattatttcagataattccctggg

SEQ ID NO: 10100 - DNA, 455 bp, Homo sapiens
  misc_feature (1)...(455): n = A,T,C or G
tggcggcggattganncccattgtagaccattagacagtgcggtggaattcccaaaacatcaaaaggagcagttgcgttgtttacaagcgctcagttggctcaccagttctgaccttcttgctgcaataatcagttctatggctgaattacaagacgtcattggtaaagcagatccaaattccagaatttgtggacatttactcataggtgcagccaagaattcttttgcaaaactcatggataaaattagtctggtaatggaatgtatacctctgcacagtagcaggagtattacatatgtagaaaaagattccctggttcagaggctggcccatggacttcataaagtaaacacactggccctgaaatatggtttgcgtggccatgtgcccattacgaaaagcacagcatcgttgcagaagcaaatacttggatttacacaaagactgcatgc

SEQ ID NO: 10101 - DNA, 482 bp, Homo sapiens
  misc_feature (1)...(482): n = A,T,C or G
tggcggccnngnnatnnngnngaattgtagactactagnaccttgatgatcgattagtaccgngcggtggaattcctttgtttcaggttaaatagtgttttgaaaatataggaaggtacatcatgatacaaggttggtgcttagaaaacctagaagaatggatcttaaacccattaggctgcatgtctgacatgagatgtttcaggtggatcattcattggtgagggtcggactctgcttgcttcatggttgaatttcaactatatcaaaatggtgaattatctgaaatcttgattaaagatttgaactcagttttatatgtaggtctaaattaacaagacacatacttagttatccttattgttggagaagagcagagacactgtttgaaaatctgtcatcccaaatgcattttataaaattccagtttttattgcttcttatatttttcttgcataagttttgcttagtttagactaacn

SEQ ID NO: 10102 - DNA, 465 bp, Homo sapiens
  misc_feature (1)...(465): n = A,T,C or G
cgggccaggaanaaaaacccaggtngcatagcanggncgtggaaattgagagagctggaaggcatggtggctaagggctacggttatcaggtgaaatttgagatttgtaggctgactatattttcaagcttctgaacttttgcttatgcaaaatattcatcccaaagcctctagcgtcatagtttcctcacccaaattactatgtttccacaagatttatatagttggtctatctctgcggtccttgaaagtgaagttggtgttactaggctgtgggttttgggggctcagcagtgacctggagtgtgcaaataaatgttaagttgaaacctcccnccccaaaaaaaaacaaacgaacaaaaaaaaaaaaataaaangcgggcgccccccaaaaagggggcggccaaaaaccccgtggaaacacttttgggggtgattttaaaacccgccctttttgggcccccc

SEQ ID NO: 10103 - DNA, 444 bp, Homo sapiens
  misc_feature (1)...(444): n = A,T,C or G
atacgaggacccttngntttgtaggacccctagtccgtgtggtggaattcgtagcacaaaggctcagctggggatggtgtttgacttcggaggaaaaaagttgctattgcccgttaaaggcactagagttagtgttttatccctaaataatttcaatttttaaaaacatgcagcttccctctccccttttttatttttgaaagaatacatttggtcataaagtgaaacccgtattagcaagtacgtggcaatgttcattccaatcagatgcagctttctcctccgtctggtctcctgtttgcaattgcttccctcatctcagtagggaaaaaattgagtgggagtactgagatgtgtgggtttttgccattggacaaagaatgaggttagaagactgcagcttggagtctctctaggttttcaactatttcttcacaatttgaa

SEQ ID NO: 10104 - DNA, 446 bp, Homo sapiens
  misc_feature (1)...(446): n = A,T,C or G
ataaagtttgaangaccactagtcctgtgtggtcgaattcaaaaatacaaaaaattggccgggcgtggtggcgggcacctgtagtcccagctactcaaaaggctgaggcaggagaatggcgtgaacccaggaggcggagcttgcagtgagccgagatcacgccactgcactccagcctgggcaacagagcaagactccatctcaaagaaaaataaaggttctcgtttgtgtgataaatgtttaccccgctcataagggaaacaggcataatggaaagtgtcatacagactaaccctgtaaccaggatccattaatagaaattggaatggttggaaggaaaggctgtttgtagagtaaggtgcttttcatatgttgaattgaaggtgttgccaggacatctaagtcattattttctagtcggtaaaagtagctgagacgtcatttag

SEQ ID NO: 10105 - DNA, 506 bp, Homo sapiens
  misc_feature (1)...(506): n = A,T,C or G
gaggttnnnnnaattaggacgtcgtagagacggcaattctcgagcggcctctggccaacgcagtcccacccatctgtgggtaacaagggggtgtcggtgttctttgcagccttgctaaactgtctgaatcaaggatcacaaactacagcctgcaggccaaatccagcccacagcctgtgtttgtaaataaagttttattggaacaaaaaaaaaaaaaaaaaaaaaaaaaaaaaaaaaaaaaaaaaaaaaaaaaaaaaaaaaaaaaaaaaaaaaaaaaaaaaaaaaaaaaaaaaaanaaaaacccccccttaaaaataaagggccctaaaaaaccccggaaaaaactggtggtttttttttttaacaccccatttttggggtgccccccccccccctttttttttttggggggggggggcccccccccccttttttttaaaaaaaaaaaaaaaaaatctcccccttttgggggaagggggttttttttttgtgggnacnggcagaag

SEQ ID NO: 10106 - DNA, 477 bp, Homo sapiens
  misc_feature (1)...(477): n = A,T,C or G
catgagaccctaatgagngcgtggaannccgcgaatgaagactattcttagcaatcagactgtcgacattccagaaaatgtcgacattactctgaagggacgcacagttatcgtgaagggccccagaggaaccctgcggagggacttcaatcacatcaatgtagaactcagccttcttggaaagaaaaaaaagaggctccgggttgacaaatggtggggtaacagaaaggaactggctaccgttcggactatttgtagtcatgtacagaacatgatcaagggtgttacactgggcttccgttacaagatgaggtctgtgtatgctcacttccccatcaacgttgttatccaggagaatgggtctcttgttgaaatccgaaatttcttgggtgaaaaatacatccgcagggttcggatgagaccaggtatgtgcataccctcagacagaattaagaaatttttccttcatattttttt

SEQ ID NO: 10107 - DNA, 445 bp, Homo sapiens
atagagattcgtagacattaggcagtgtggtggaattcgtcaataaagagagtgccgtatttcgcagattggagctgagctgtggctgccagaagatagcgaacgaatggaaactgaaagtggaaatcaggaaaaggtaatggaagaagaaagcactgaaaagaaaaaagaagttgaaaaaaagaaacggtcacgagttaaacaggtgcttgcagatattgctaagcaagtggacttctggtttggggatgcaaatcttcacaaggatagatttcttcgagaacagatagaaaaatctagagatggatatgttgatatatcactacttgtgtcttttaacaaaatgaaaaaattgactactgatgggaagttaattgccagagcattgagaagttcagctgttgtagagcttgatttggaaggcaccagaatccggaggaaaaat

SEQ ID NO: 10108 - DNA, 482 bp, Homo sapiens
  misc_feature (1)...(482): n = A,T,C or G
catcgacnccctaattgagaccctaggacangcggtggaattcctggatggcttcgatatatccaaaggacaccatatagtgatggagtcctatatgggtccccaacagctgaaaatgtggggaagccaacaatgattgagataactgcctacaacaggcgcacctttgagactgcaaggcataatttgataattaatataatgtctgcagaagacttcccgttgccatatcaagcagaattcttcattaagaatatgaatgtagaagaaatgttggccagtgaggttcttggagactttcttggcgcagtgaaaaatgtgtggcagccagagcgcctgaacgccataaacatcacatcggccctagacaggggtggcagggtgccacttcccattaatgacctgaaggagggcgtttatgtcatggttggtgcagatgtcccgttttcttcttgtttacgagaagttgaaaatccacagag

SEQ ID NO: 10109 - DNA, 503 bp, Homo sapiens
  misc_feature (1)...(503): n = A,T,C or G
gaggtnnnnnnacctgngacatacgtagngacgngcaattcagcatttctggacggctgagagctaatttggcccaaggctgggggctgtgttttgtgtgtgtgtataaatttgcactgaagtcttgtttcagaaaccagaccactgaggagagcctgctgagctgaggccatggcctgcgtggcttggggaaatgagttggtggataccttctgggcttttgaacttgcccctcccccatttccctctcccccatgtgtctgaccctgtcttacccatttcaagttcaagcggtgcagcaccttcgaagcatcaatgcacacacctgctgttgcttttgatttctggaaggcatgtagtttcaacttgtaacaaaaatatttgtagtcttcaataaactgtggtatttctttagcttanaaaaaaaaaaaaaaaaaaaaaaaaaaaaaaaaaaaaaaaaaaaaaaaaaanaaanannnnnnnnnnnnnnnnnnnnaaannaa

SEQ ID NO: 10110 - DNA, 489 bp, Homo sapiens
acggcatagaaccatcgagaccactatcagtgtggtggaattcggcccctgcgctgctctgaaagggccagcatttgcagaaggaccacaactggtgacgtccaggtcctgggactcgttcacacgcacaagctgggtgtcataggtgacaaagctgttgtcacgtactccaaaggttatccgcgtggtggaaataacaccgcatcctccgcgatagaattgacctgtacaaagacggtgggcagacctgcattcacgaggtttgatatcgacagctgcacttactacttcagctgggactcccgggctgcctgcgccgtgaagcctcatgaggtgcagatggtgaatgggaccatcaccaaccctataaatggcaagagcttctgcctcggagatatttattttaagctgttcacagcctctggtgacatgaggaccaatggggacaactacctgtatgagatccaactttgctccatcacaagctcc

SEQ ID NO: 10111 - DNA, 485 bp, Homo sapiens
  misc_feature (1)...(485): n = A,T,C or G
ggcgcnaatgagactttagtcacngtggnggaantcctgacaaaaatattttcttcccttatattcatacttagcttttttctatttgaatttttttgtttttttactttttagatgtttttgttttgttgaaaactgatacacacactcatgtatttgcttaagtctatcaagacatcactaggcaataggaatttttcagcttgtttataatcttacgggaccaccgttgtatatatggtccatcattgactgaaatgtcatgctgcacatgactgtcgtttattaaaatttttatttaccaaattaactttttaacatacgttgtaaccagtaatttcaatgtatttcgatataattgacatatcctctttgaaatttatagaaattgatttttatgtaccctaatttctctttcagggagaagatgggtatagtttaaccctttcatatcatccatccatccattcctactaggtctgcct

SEQ ID NO: 10112 - DNA, 487 bp, Homo sapiens
  misc_feature (1)...(487): n = A,T,C or G
gcggcnattgagacatggtcactgtcggggaanncgaagaanaccttcaccccaaatatcatcagtcggaagatcaaggaagagcccaaggaagaagtaactgtcaagaaggagaagcgtgaaagggacagagaccgacaacgagaggggcatggacgagggcgaggccgtccagaagtgatccagtctcactccatctttgagcagggcccagccgaaatgatgaagaaaaaagggaactgggataagacagtggatgtgtcagacatgggaccttctcatatcatcaacatcaaaaaagagaagagagagacagacgaagaaactaaacagatcttgcgtatgctggagaaggacgatttcctcgatgaccccggcctgaggaacgacactcgaaatatgcctgtgcagctgccgctggctcactcaggatggctttttaaggaagaaaatgacgaaccagatgttaaaccttggctggctggcc

SEQ ID NO: 10113 - DNA, 489 bp, Homo sapiens
  misc_feature (1)...(489): n = A,T,C or G
tggcggannncccnataatggaccacattgagagcgtggaaancgncngaaaagagcaatataattgcttctatttttctgatacaaaaaagcatttaggatttatttatttatttatttatctatctatttattttttgagagagggtatcactcctttggcccaggctgctggagtgtggcggcgtgatttcgactcatcgcacgctcacctaggctcagatgccttattggaggaactggaacgctccacccttcaagacagagatgaatattccaacccagctcctcttcccctggatcatcattccagaaaggagactaaccttgatgagacttcggagatcctttctattcaggataacacatgtcccttgccggcgcagctcgtgtatactaccaatatccaggagctcaatgtctacagtgcagcccaccagccaaaggaatcaccaccaccttctataacgtcatcagctgctcagttgg

SEQ ID NO: 10114 - DNA, 486 bp, Homo sapiens
  misc_feature (1)...(486): n = A,T,C or G
gcgccccttganccatgatgacattagncagngcggnggaattcatcttagaagtgactacacctgaaattaaatataaagcccagaacagcaaaagaacctcaaaccacagccttatggcaagggttagacaataaatgtaactcctcaggacacagaaatgtcaaattaggagagtatggtaggtaacacacttccttaaaaacaccttccaggagtaacttgaaaagtattacttgctcaactaatttggtctttcaaaaaatctcttcctgtcctgttttatgctaatgtgtaatgatctccaccattttcaacatctatctgtcttaacccaacattatctgagatacttctggaaaagagctcacttaactgatgacagcatgtgtctgtcccacctctctgagccagctgcctctcctcattgagggaggagcagccaggccagtagaagagggagcatgaacgtggctccatggagtt

SEQ ID NO: 10115 - DNA, 474 bp, Homo sapiens
  misc_feature (1)...(474): n = A,T,C or G
tcgcgacctnnnaattgatnccnatcgagantcctagcnagngtgcnggaattcgtgattgcctatgaagtgtttttcccccttgagataatggatatttgctatgcagcaccatgaagaagagagactatcgatcggccaggtgtataattatgaaggagaaaactgttcaagaacaaaatctattttaatactttaaaaaatgtctataggcaacttgagattatagttttggctgtataaataaaactgtgagaagaaaaaaataatatgaaacaatgaggtatttaaagtgaatatagaaaaatagcatagaaatcatatatttatttcataaaataaatagaaactttgtctcctgtgttcctcttcaatgcttcacaatgaaaattcattgtattgatcagcatttttcctgaggtctagaaatgcttaaactattgaaaataaatcaaattattcaaagactggatt

SEQ ID NO: 10116 - DNA, 486 bp, Homo sapiens
  misc_feature (1)...(486): n = A,T,C or G
gattgacnnccnaaaactgagaccntaggccagngcggnggaattcccccacggctctgctagtgcttgctctcctcttctttggtgctgcagctggtcttggattttgctatgtcaaaaggtatgtgaaggccttcccttttacaaacaagaatcagcagaaggaaatgatcgaaaccaaagtagtaaaggaggagaaggccaatgatagcaaccctaatgaggaatcaaagaaaactgataaaaacccagaagagtccaagagtccaagcaaaactaccgtgcgatgcctggaagctgaagtttagatgagacagaaatgaggagacacacctgaggctggtttctttcatgctccttaccctgccccagctggggaaatcaaaagggccaaagaaccaaagaagaaagtccacccttggttcctaactggaatcagctcaggactgccattggactatggagtgcaccaaagagaatgccctt

SEQ ID NO: 10117 - DNA, 471 bp, Homo sapiens
  misc_feature (1)...(471): n = A,T,C or G
tggagggcttttaattgagacccattcgagtgtcgtggaattcccctgctgcacccaggcactgtgtggcctggccctgcggcatcacagccacctgcagcagatcaggtccagccagcttcttttgagatttcaagtctggggtttcttgccaagaaccaaaatttgaaattagacttaggaaacaactcagaattgctgtgcctcccgactgggtggttttcctctgggcagatgggtgagtgccaaaagaacaggtcctggcatgaggattctggctctgaatttaaaatatacattggatcatgggccatgaagctgttcactgtgtagaaacagcccagtgttctgtaccctctgcctcagccgtgcccggcagcaacattgcctccatcgctcagagacacccgcttctccagggccaggcagggtagcatgtggggagatggagaaaggcctgaagccctgaan

SEQ ID NO: 10118 - DNA, 479 bp, Homo sapiens
  misc_feature (1)...(479): n = A,T,C or G
gggcgcccaattgagacccttactgagaccactagacanngcgnggaantccttggnaagatagagatgggggtttatcagctaccttttgggttggggagcacactgccttacagttttggtgccaatcccttttttttcttttctctcttttccctttttacctggctttcattcaacaggtggtggagacactgccacttgctgtgccaaatggaacacggaggataaagtcagccatgtgagcactgggggtggtgccagtttggagctcctggaaggtgagggtcttctgttttttggcttgtttgggataagggtggactgtgcagtgagaggtgggtagaatggagtggagaaagttagaaggtagtgttgtcattagcagtcattactacctgggcagtacagaggaacttcagataaagctcctggcatccactgaggcggggagggacagatagaaacttggtctgagn

SEQ ID NO: 10119 - DNA, 462 bp, Homo sapiens
  misc_feature (1)...(462): n = A,T,C or G
ccccaatcgatgacattagacagcgctgcggaanncctaaaacctgcattcatcaagccctacggcacagtgacagctgcaaattcttctttcttgactgatggtgcatctgcaatgttaatcatggcggaggaaaaggctctggccatgggttataagccgaaggcatatttgagggattttatgtatgtgtctcaggatccaaaagatcaactattacttggaccaacatatgctactccaaaagttctagaaaaggcaggattgaccatgaatgatattgatgcttttgaatttcatgaagctttctcgggtcagattttggcaaattttaaagccatggattctgattggtttgcagaaaactacatgggtagaaaaaccaaggttggattgcctcctttggagaagtttaataactggggtggatctctgtccctgggacacccatttggagccact

SEQ ID NO: 10120 - DNA, 446 bp, Homo sapiens
  misc_feature (1)...(446): n = A,T,C or G
gggtaatgagacatatcagtggaggcattcgccaaggccgcaaggtgttgagcggcatgtccttcccatcctctggcacttcctgaacaccgccaccaggaatggcaccctgcctggacccagcgggaacatccgcggggtggtgtgccggctgtccaggagcctccaggagcacatgggctcccgcctgctggactttgccgccagccagccaaagcacgtcctcaagacgctccaggaactcttagactcagagtccttgggaggcagccgcaaggccactgacagaggggtggcccctgacagcaagacaactggcagctcatacccttttcagctggattaaagatggatctgaaatgggcaattattatttatcttatttttttgatggactattctcctggttactttcccccttagagttccagatgtacatggtatan

SEQ ID NO: 10121 - DNA, 557 bp, Homo sapiens
  misc_feature (1)...(557): n = A,T,C or G
cccgtgtgagtatttaatctcatctttcttgggatatcaaatgaaaagtttatggcgtctccatnnnnnnagggggaaatgagacttgatcacgttgnggaannccaannctatccagggnggagcacgccaatatcatcaagggattggatatatttgaaaaccaagggttcttccagcttgtgatggagaagcacggctccggcctagacctcttcgctttcatcgaccgccaccccaggctggatgagcccctggcgagctacatcttccgacaactagtgtcagcagtgggatacctgcgcttgaaggacatcatccaccgtgacatcaaggatgagaacatcgtgatcgccgaggacttcacaatcaagctgatagactttggctcggccgcctacttggaaaggggaaaattattttatactttttgtgggaccatcgagtactgcgcaccggaagttctcatggggaatccctacagagggccggagctggagatgtggtctctgggagtcactctgtacacgctggtctttgaggagaaccccttctgg

SEQ ID NO: 10122 - DNA, 484 bp, Homo sapiens
  misc_feature (1)...(484): n = A,T,C or G
gggtcctcnaactgagaccctattgagngccgtggaattcgggagttacatattatttacttttcagtgtttgaaaattttcttaataaaaatttgtataggtttaagaaagaaaaagtgaatagctgattatcatttttcttcacttaagaactttaaacacagaatttaaatttttcatattttttgaaaattaacatatatttattacagtgccaaatctcatgagtccctgtctcataatctaagaccaggctactctgaaagaggacagagttcactgcctaatccaacactggctgtagtgtaaatgcaacacaggtgatttttgccccagttccaaggctacctaactagctatgtgggccttagtcacccttaaaggaagatggttgcaactatgccagttagaacatttttctgctctgcttccacagtggcactcacaagaggaggacttgattttatagcttgtgtacaggan

SEQ ID NO: 10123 - DNA, 605 bp, Homo sapiens
  misc_feature (1)...(605): n = A,T,C or G
agacgcnnnaagannnannnnttttgaaaacccctttgtatcccctatccgagnggncgaattctganatttatgtcaaaataacggctaggaataattctgtcaatatggagttgagcttatttctttggaaactccttttaagttgccttgctggctgtgagaattttatatgtggataacaaagatagatagatagcatgtaaattgggttgtggtttggggtcagtttttaaatgaaatagtagcgaggaggattttctgttttggaaaacaccattagaaccagaccagctttgttttgggttagagagagtaagatttgagaactcagtttgctttaatgaaatcacagagaaacttggtacttgtttttcttcatttggaggctaaaatgtaatgttttttcattcatacaaaataatggacactccctaattccattattaaatcttgaaggggaagtagcaggataattaatttgctaagcccatcctctgcagaaacagaaaaatctatcttcccatctcctanaactcagaatgcacagtaatacttaaggcttgtacaagtgtcttcagacccactttttcatacacttgctn

SEQ ID NO: 10124 - DNA, 488 bp, Homo sapiens
  misc_feature (1)...(488): n = A,T,C or G
cggcgccattgantttttgagactctagncagngcggtggaattcgtccaaaagagggataaattatgtcagtgtaagagatcatggatggctttattaacgaaatcacacttgagctgaacccctagatagagttatacctgataggcagaagtaaggaaggagagagcattccaggcaggaggagtggcatagacaacagtgagatgatgggaggagatagagagaacatgtctggagaatggtaagagtaatccggtttggctggaacaaagggaacttgtcatagagcattggatctccaccgtcagtgtttattcccgagacaatgcagtgttgttgaggctttttgaatccggcgacaggacaggagccacgcttcacaaatatacaattgtggactcttagattggttagactgggagagactggaggcgggaatgccctaaagtcaagagacttcacagagtctctccaaggtaattgga

SEQ ID NO: 10125 - DNA, 475 bp, Homo sapiens
  misc_feature (1)...(475): n = A,T,C or G
cggggcgcaatcgagaccttcatcgtaggcgtaagacnngcaccgccngcccgcatggagaaactccgtctctacgaaaaaatacaaaattagctgggtgtggtggcacatgcctgtaatcccagctactcgggaggctgaggcaggagaatcacttgagcccgggaggtggaggttgcagtgagcccagatcatgccattgcactccagcctgggcagcaagagtgaaactctgtctcaaaaaaacaaacaaacaaacaaaaaaacattgaatgaaccgtctgtaataaacaaaacaaagacagctagtgcagagttggtgctacacaggaagaaggtcttccacattctgacctttaaggatccccaagtttaattgccaactttttgtctgctcacctaaagcaattggctaaaacaaattacttagaattctgtacttagccaaactatcagttaagtgtgaggatagaan

SEQ ID NO: 10126 - DNA, 483 bp, Homo sapiens
  misc_feature (1)...(483): n = A,T,C or G
catgaccccccaattgagaccctaggccagngcggnggaattcggcacactgcgtctaatattggcttgtggcccacatagcagaacagtgtgggtttctggcttcagttgccacactgtccagggagctttggcctcacaaaggtccaggaaatattcagaagtcgggtcaggtatagaggtgaatacagcaagtaagacctccctcttgccagaatccatccctaagacaagccaaggagatgccggagatgacgcgtttccagtcctggaagagggcctctagaagattcaggaaaagggggagaacagtcacatttcgcctctcaaaagaagcattgccttgacagatccatgcaaattgtcgcatccgacgggtttacttctcagacagactctactcagaagatgagctgccggcagagttcaaactgtatctcccagttcagaacaaggcaaaggtaagccagtcttccccagagg

SEQ ID NO: 10127 - DNA, 477 bp, Homo sapiens
  misc_feature (1)...(477): n = A,T,C or G
catgagacctnnattgagngcgttgaaancncgcgccgctctgcgttgggccagcccctcacagctggtttcttaccacgtattgcgcaagcggaatctatgcctgttacccacactccctgcgcccccgcaccccgctcctgtgcgcaagtcggaatataaaaccgcggaggagtgagctcttggggtgtccagttggttgccgcggcagtctctccgagcagcgcatttgtcttctaggctgcttggttcgtgcctccgagaaaggggtctcctgctgccagctaagtgtgggagaacttgtgcacgtatctcccctccgaatcccaacgatgggtaacgccagctttggctccaaggaacagaagctgctgaagcggttgcggcttctgcccgccctgcttatcctccgcgccttcaagccccacaggaagatcagagattaccgcgtcgtggtagtcggcaccgctggtgtgg

SEQ ID NO: 10128 - DNA, 475 bp, Homo sapiens
  misc_feature (1)...(475): n = A,T,C or G
agctgggctnnnaattgaaacccatcgaagagccgtagtacagtgtggtggaattccccagtcaacgctaacacattttgttaaatgatccctttccctgctcacattgtgtgtcatttctcatcatcagtagtcctccagcctgggcagctgtccccaccctttttcatgtaggtgcaggaagttaaatctcatttccaggatgcatgtgaacatttacaaagttgaactttgagtgcattctgctcatatgaattattgggattgttgatatatattgtattatgctaccaaagaaatattggttttattagaaggaaatggtcatcctctggaccatggagactagctcagaatacgctgatttccctctcctgactttgccaagcctttggctgcttttgcctgataaagggcagggccatctgaagacacttcccccagtcggctttggagtcacgggagctagtgcctg

SEQ ID NO: 10129 - DNA, 481 bp, Homo sapiens
  misc_feature (1)...(481): n = A,T,C or G
catgaccccccaaatgagaccctaggccanngcgnggaattcgcgcacagggagctgtcaccatgcctcactcgtacccagccctttctgctgagcagaagaaggagttgtctgacattgccctgcggattgtagccccgggcaaaggcattctggctgcggatgagtctgtaggcagcatggccaagcggctgagccaaattggggtggaaaacacagaggagaaccgccggctgtaccgccaggtcctgttcagtgctgatgaccgtgtgaaaaagtgcattggaggcgtcattttcttccatgagaccctctaccagaaagatgataatggtgttcccttcgtccgaaccatccaggataagggcatcgtcgtgggcatcaaggttgacaagggtgtggtgcctctagctgggactgatggagaaaccaccactcaagggctggatgggctctcagaacgctgtgcccaatacaagag

SEQ ID NO: 10130 - DNA, 489 bp, Homo sapiens
  misc_feature (1)...(489): n = A,T,C or G
cgcgccccnatttgagntcttganaatctacggccagagccgcggaanncaaagnnnttagcaattatgccttaaataagcatttattctattttatttctcttttcctctgagactccaataatgcaaaaagttagctcccttgatggtgtcccataaatcttgtacatatttcttcatttcttttctttgtggttttttttttttggcccccggccaaaaaaattttaaagaaggggctttggccttctttaattttttttgtgcctcaacccataatctggaaacccttcaatccccttttgggtcaaattaaggctttgcccctttcacccccaaaattggaagggctcggattggttttttttccccttgggaaaactcaaactttcggcttgggggggtttcccggagggcataaaatggttggggtgtctttgaacccaaatgactttattaaaaccattgggtttggatttttccgcccgc

SEQ ID NO: 10131 - DNA, 457 bp, Homo sapiens
  misc_feature (1)...(457): n = A,T,C or G
agggtnattcgagacattgnnaatttgaggaccttagtccgtgcggtggaattcgagtctccagaaaaacagcactaacgctggacctgtctactctcagaacccggcacagattctctcttgatctccttttggaatctgagattcttagaagacaggatagggttaaatttagtagcagctcagttctagctaaatcactagaggaagttaattaactttaagccttcatttctccagcactaaaatggagtggagagttggggtggaaataagacatccttaaaaggttaaattgtctgcaaagcacctagcccagtgccgagctcccagtaggtgttcagtaaagcttagtgcctgactttctgaacactgattcctcctgtttggagtcactgggatactctcattgccgttgggatgttcctcactccttcccagttcgtggctgaggcag

SEQ ID NO: 10132 - DNA, 456 bp, Homo sapiens
  misc_feature (1)...(456): n = A,T,C or G
ttttaatcgagaccctatttagagaggcgtaattcgngtggacagggaggctgcagagggacggggaggagagctgcagggaggcctcttagggccctggattccttggcctctgtcctgaggtgtgagctcaatggtcaggagtcacagagacatactttgctgctggggaacagagggagcacatacctgttgtcccatgttgcctgtgtatgaataaggcccaggaatctcctcagctttgagtccttactgccatttgaccttttataacagattcagccagacacaatcatacaggtgtggcgagaggatattccagtgaactatatgaaggagctggaactggtcaccaaggccggcttccgggcccttctctctgccccctggtacctgaaccgtatatcctatggccctgactggaaggatttctacgtagtggaaccccttgcattt

SEQ ID NO: 10133 - DNA, 484 bp, Homo sapiens
  misc_feature (1)...(484): n = A,T,C or G
gcgcggcctttgggccnttgaagacactcgaaggcggggaantatataaccctagggcaatgggatgggaatggaatttggtaagacctctgtgggactgtatgctccttttgctagaggttctggcttctgcctgtgggattttgcttggtgccaagcattaagggttcatgctatctggcctctctatacgtatcctaatttcatggggatattgcttttgggcttttatttgtttcagtattgtagtaaaacatagccagccttgattcttgcttcctctgtacagattcttacgtaataaggcttttcttcatgaaaagtttttacttttctctgggctgtctactcaattcattctcagattacttctaagctgtgaggtatcagtgaaaaattctgttttattagctcactatcttcccaacacctgtttcataggtaatctagccaaaataatcatctttgcaccctgcaccccctc

SEQ ID NO: 10134 - DNA, 448 bp, Homo sapiens
  misc_feature (1)...(448): n = A,T,C or G
atcgagaccctagtccacgtggtggaattcgggaaataaactggtgatatggcagctgggccatcttgaatagtgagaaccagtaagaatattgggtattgcctgaagagcatctgtaaaaacatatcagaacaaatgaaagaggaaagaatgaaggatttatatgtgtgcatagagtgaatatatgtgtgcatagagtgaaatattcaacttatacttatttctaataaaatctgaaaattatttttcataaatattcaaattccctttaaacagcttaaaatacagatttagtgactcagtacttcaaaccttgaatagaaacaaatatgattataaaatatttccaaacttatgttacatctaatctgaaacatattaatattataagcttaattcatgtcatcatttctttattttttattatatttcctggaggtataaggan

SEQ ID NO: 10135 - DNA, 489 bp, Homo sapiens
  misc_feature (1)...(489): n = A,T,C or G
ggtgcnnnttttgagacctgatggcgctncgnggaattcaacggcccatagccttggggttggacatctctagtgtagctgccacattgatttttctataatcacttggggtttgtacatttttggggggagagacacagatttttacactaatatatggacctagcttgaggcaattttaatcccctgcactaggcaggtaataataaaggttgagttttcctaanaaaaaaaaaaaaaaaaaaaaaaaaaaaaaaaaaaaaaaaaaaaaaaaaaaaaaaaaaaaataaataatatttttgggggccgtttattaaaagggggccccataaaacccctttaaaccccccagggggttttttttttccccccccttttggggggtgcccccccccccggttttttttttccggggggggggccccccctcttttcttcatttataaagaagagggatagccctgattctggccttccccagttttttgt

SEQ ID NO: 10136 - DNA, 492 bp, Homo sapiens
  misc_feature (1)...(492): n = A,T,C or G
ctgtgccnnttttgagatccgtagaacctacgccanngcgnggaantccctgatggctccaagccggngaaggtgcccgagaacccaccctccatggtcttcaagcttatggagcaggtggctcacttcctgaaggcggctgaggactatggggtcatcaagactgacatgttccagactgttgacctctttgaaggcaaagacatggcagcagtgcagaggaccctgatggctttgggcagcttggcagtgaccaagaatgatgggcactaccgtggagatcccaactggtttatgaagaaagcgcaggagcataagagggaattcacagagagccagctgcaggagggaaagcatgtcattggccttcagatgggcagcaacagaggggcctcccaggccggcatgacaggctacggacgacctcggcagatcatcagttagagcggagagggctagccctgagcccggaccttccgcagcttacttgan

SEQ ID NO: 10137 - DNA, 487 bp, Homo sapiens
  misc_feature (1)...(487): n = A,T,C or G
ggtgcaatgagacatagacagcgtcggggaanncgcaagtacaagtatataatatgtcacctggcacattcattttctcagttgaagaagagaaaatttgaaaatgtccttatgcttttagagttgcaacttaagtatatttggtagggtgagtgtttccactcaaaatatgtcaacttaaaaaaaaataggccctttcataaaaaccaaactctagcaagatgcaaatgcatggcaaatcctgtcggtctccagttggttatctgaatagtgtcaccaattccaccaagacagtgctgagattggaaaagggcactcatttggattgccttacttctcttgccttaaatatatcccatatatttaatatgtcaaaaagggcttgaggtgaatttcattaaatggaataatatgatgccactttgcaactaaaataagctcagtgatacctccttgttaaaaaaaaaaaaaaaaaaaaaaaaaaccg

SEQ ID NO: 10138 - DNA, 492 bp, Homo sapiens
  misc_feature (1)...(492): n = A,T,C or G
gggggtttttggaccaggtagacagtcgcacagngcggnggaantcatggaacacacacacacgcagacacacacacacacacaaatgcagacacacaacatcttgaaaacagcaaggcagagaaaggtgctggtccgggccagagcccagcgcgcctcgtcgccatgcctcggaaaattgaggaaatcaaggacttcctgctcacagcccgacgaaaggatgccaaatctgtcgcgatcaagaaaaatacggacaacgtgaagtttaaagttcgatgcagcagatacctttacaccctggtcatcactgacaaagagaaggcagagaaactgaagcagtccctgccccccggtttggcagtgaaggaactgaaatgaaccagacacactgagtggaactgtattatattaaaatactaaaaatcctttgcgactaaaaaaaacctaaggatacctccctggttaaaaaaaaaaaaataaaaaaaaagtccg

SEQ ID NO: 10139 - DNA, 462 bp, Homo sapiens
  misc_feature (1)...(462): n = A,T,C or G
tttaaatcgagacccttnttcgagagccctaatccgngnggcggaattcaaggaaagttcctggactgatactcgtctgtttagtaggcgtgggtcctggttgaagtctgtctaggaaaactcctaagtgaagaaatcttcttcgtattaccactgtctctgcactgagatttgggctgctttgcttccagcgtcacacatcataactgagcgacagggtctcgctacatttcccgggctgttctcaaactcctgggctcaagtgatcttcccatctcagcctcccaaagtgttgggattacagaaagataaaaactctccagatgtcttccagtaatgtcgaagtttttatcccaatgtcacaaggaaacaccaatggcttccccgcgacagcttccaatgacctgaaggcatttactgaaggagctgagntaagttttcataacatctgctatcgagtaa

SEQ ID NO: 10140 - DNA, 464 bp, Homo sapiens
  misc_feature (1)...(464): n = A,T,C or G
aggcgggnnttttaaactgagttcatggcattgtgcnggaattcctccttcctgctgccttgtgaagaaggtgccttgcttcccctttgccttctaccatgattgtaagtttccccaggcctccccagccatgatgaactgagtcaactaaaccttttttctttataaattgcccagtcttgggtggttctttatagcagtatgaacatggactaatacaatctaataaacaactttagcaatgcttcaggatacaaaatcaatgcacaaaagtcagtagcattcatatacataaacaacatccaagctgagagccaaatcaagaagcaatcccattcacaatagctgtgaaaagaataaaatacctaagaataaaactaactaggaaagtgaaagatctctacaatgataattacaaacactgctcgaagaaatcagaaatgacacaaacaaacggaaaaata

SEQ ID NO: 10141 - DNA, 444 bp, Homo sapiens
  misc_feature (1)...(444): n = A,T,C or G
cttgacttcgtagacccttagtccagngcggnggaattcaataaaacaaacaggcatctatgcaggaaaaaagcttttcaagtgtaatgaatgtaagaaaacttttacccagagctcatctcttactgttcatcagagaattcacactggagagaaaccttataaatgtaatgaatgtgggaaggcctttagtgacggctcatcctttgcccgacaccagagatgtcacactggcaagaagccctatgagtgcattgagtgtgggaaagctttcatacagaacacatcccttatccgtcactggagatactatcatactggggagaaaccctttgattgcatcgattgtgggaaagccttcagtgaccacatagggcttaatcaacacaggagaattcatactggagagaaaccttacaaatgtgatgtatgtcacaaatcctt

SEQ ID NO: 10142 - DNA, 492 bp, Homo sapiens
  misc_feature (1)...(492): n = A,T,C or G
ataccgaaaccttcgnannncntaccgagaccatggacangccnggaattcccaaggaaaaagggctgacaaagaagagaaccaaagtccagaagaagtcactgcttctcaagaaaccccttcgggttgacctcatcctcgagaacacatccaaagtccctgcccccaaagacgtcctcgcccaccaggtccccaacgccaagaagctcaggcggaaggagcagctatgggagaagctggccaagcagggcgagctgccccgggaggtgcgcagggcccaggcccggctcctcaacccttctgcaacaagggccaagcccgggccccaggacaccgtagagcggcccttctacgacctctgggcctcagacaaccccctggacaggccgttggttggccaggatgagtttttcctggagcagaccaagaagaaaggagtgaagcggccagcacgcctgcacaccaagccgtcccaggcacccgccgtggagg

SEQ ID NO: 10143 - DNA, 465 bp, Homo sapiens
  misc_feature (1)...(465): n = A,T,C or G
ggggcgttttnattgagaccatatatagagtggcgtaattccttagaatgtctagtatcctgtgtatgtctataagtacatgcatagcatataggctcacatggaagcataaactatacatgatattggctgatttcctattcaagcaaattacaaattgtttgcttatgtttacttacacaataacaaataaaacaccaacccaaaacatttaaataaccaggatccagtaactaccctccttagctaagagatttaagtaatcttggttttttggaaaaaccagtaatagctagtggctgtatggggggcgttgcatagtagccatacgcaaagccgcactcacatgcctgataacgtgcacttatttctgagccccaccccattcgttgtgggctctgcagagtggaaaccagccaaggctctgccctgctctgcaggcctgtccttttgcttgtcagagat

SEQ ID NO: 10144 - DNA, 486 bp, Homo sapiens
  misc_feature (1)...(486): n = A,T,C or G
ggggggnnnnngnnnncccccaatggannccccnnaattgtacgaccctagtccgtgtggtggaattcgggacattcacatcatttcactctggtctgagtggtggcctgagaaccatggtggcatggaccaccctcatccatgcaactccaggccccatgggaacggatgtggaaggaagaactgtcaccctcttaaggcccagggtcggagcccagggcctctcccttcctgtcgttcaatggacgtggtggtggctgttccacacccattttgttgcagttcctgtgagacaggagaggctgagccaagggaactgtgaaggggatgggcaggagggcttgtgcagggttttgtaagcagtgatctagtttcattaaaaaaagaaaacaataaccataaccacctccccgtgtctgtctgcaccaggagcacctgggactgggaaggtcaaggggagggagcacacactgngacactggcttt

SEQ ID NO: 10145 - DNA, 526 bp, Homo sapiens
  misc_feature (1)...(526): n = A,T,C or G
atgattaaagggtacccctcctatcgttacacactaatatctggtaccatacacttgatcaacactccctccccaggcanntttgancccttttgagtcgtccgaacaagcggnggaaatnnnctgtnggccaaccgngcagtcccgcctaccagtgccgggcgctccccacccttcccccggctcccccggtgtccgccatggccagggcctacgaccacctcttcaagtggctgctgatcggggactcgggggtgggcaagacttgcctgatcattcgctttgcagaggacaacttcaacaacacttacatctccaccatcggaattgatttcaagatccgcactgtggatatagaggggaagaagatcaaactacaagtctgggacacggctggccaagagcggttcaagacaataactactgcctactaccgnggagccatgggcattatcctagtatacgacatcacggatgagaaatctttcgagaatattcagaactggatgaaaagcatcaaggagag

SEQ ID NO: 10146 - DNA, 467 bp, Homo sapiens
  misc_feature (1)...(467): n = A,T,C or G
ggagggctttttttgagaactttgagtgtcgtggaattacaagagtggatattgcctctccagcaggctaaccctagctagtttcaagcaggtgccaaatgagtgagtggaggcatgtgaatcctctcatggctcactcttggcactggcacgcaactacttctgaagcattttcttggcccagtttcaaggaatgaggaaatagtctctattcttaatgagaggaactgaaaagtcaaggagagtggatatagaaaggcatggaaacaatgggaacacaactattctattatgaaaggtattatgtgcatacacttcaaaagttaagaaacttactcaaggtcataaagctagaaagcagcagagacaggatttgggccttaatcttctgaccgaaaatctcattctctttcaacacttctttctaatattgctgattgatctgtgcagtccagatgtcacagtgn

SEQ ID NO: 10147 - DNA, 425 bp, Homo sapiens
  misc_feature (1)...(425): n = A,T,C or G
gcatgctggtcccaggagcttccggggaagctctggcacagccgagagtcaaaagactacagcatccctgagagcagggagaggggccttttcctcgttttgcgttttcccctggagccagcaatgtgtcagtaacttgtctatgaaagaacctgaggtgtagccacatgtccagctgccttctgcgcacgcctggcctccctccaggctaccccttctatgggtgcgcatggtgctgctgttggttctgggcggggcctccactctgatggttccaccctgggaaagctggccttccatcctgccaaaccagatgacctcagtcccaccacctccaggaagcctctgtagatcttcattctgggttcttgtccattaaaaatacccaccatggcctgggcacagtggctcatgcctgtaatcan

SEQ ID NO: 10148 - DNA, 473 bp, Homo sapiens
  misc_feature (1)...(473): n = A,T,C or G
nttcgaagacccctagtccagtttggtggcattctcggcgcccctgccggcgcccctggcggtcccgcgctggggaacggagtggccggcgccggcgaagaagacccggctgcggccttcttggcgcagcaagagagcgagattgcgggcatcgagaacgacgaggccttcgccatcctggacggcggcgcccccgggccccagccgcacggcgagccgccggggggtccggatgctgttgatggagtaatgaatggtgaatactaccaggaaagtaatggtccaacagacagttatgcagctatttcacaagtggatcgattgcagtcagagcctgaaagtatccgtaaatggagagaagaacaaatggaacgcttggaagcccttgatgccaattctcggaagcaagaagcagagtggaaagaaaaggcaataaaggagctagaagaatggtatgcaagacaggacgagcn

SEQ ID NO: 10149 - DNA, 429 bp, Homo sapiens
  misc_feature (1)...(429): n = A,T,C or G
agcggnnnnnttttgtagccatcgtacgaacgcgnggaanngatcaaaccctgacgaagccaaggtggcagaagacatactgaacaccatgtgcgtttttttctacagcaagcaggttatcaacgaaagtgaggagcctgagaacttcttctgggtgggcattggggcacagaagccctatgatgacgatgccgagtacatgaaacacacacgtctcttccggtgctccagggagaagggctactttgcactgactgagaaatgctgcgacttttgccgagatgacctggcatatgatgacatcatgttgctacacaatggccaataggtctacatgtgtgtggtgacccagactagccacgtggagatcaagctgagcctgaaggcctgccaggtatatatccagcacatgcggcccaaggaacatga

SEQ ID NO: 10150 - DNA, 484 bp, Homo sapiens
  misc_feature (1)...(484): n = A,T,C or G
gggcgcccaattgagancctctatntgagagcatacggaagngccgnggaannctccttccccactccacccttacagntgattttacttgcttagtcacatacagagtttcatgagaatctagggcaccccatcccatggcagagcttttcctggtcatttatcacatggaagagaagttggagacacacataccccgcaagcaagagagagtggaggagaaggggccatgcatctgtaaggcactgtccccaaattctgttaatcaggtaggtctcttctcctctcaggcagagagagtcagttggagaaaatggtaggtattgtctcctctaggattccaaaaatggtggatgctttcacatgagccaggtgggcatacgggagagaaagagcatgaaaatgatttcctatcatccatctcctcactcccatccaaagtaaggactgccttagcaatttctggatggtcccccacacaggc

SEQ ID NO: 10151 - DNA, 492 bp, Homo sapiens
  misc_feature (1)...(492): n = A,T,C or G
atggcccnnaattgagaactgatgaacctacgccangncgnggaattccggagctggagaagaagcatcgcaacctgggcctcagcatgctgctgcagtgatggcgccaacccgtggcagtcccagagctggaggcaggaggatggatcctcatctccatgggaagtgtcagcgtgtggctgccagggaagcgtggcaggcgcctggccttgggtccatctacatagttgcgtgtttcaacaatgtccatttatccttcaccccgaggcgtgttttgggggctgcaaacacctcccggtagaggctggacctgaggacccttcccacctgtgcccgtcccttcctgaagtcctagccacagcccatcctccatgagtcccggcagctctgggtcatgcccttccctggtcacccatctgcccctcacccgtcatccagggacccagaccctgcaccttccatgtgggcccacagatccttggcaggtacctg

SEQ ID NO: 10152 - DNA, 449 bp, Homo sapiens
  misc_feature (1)...(449): n = A,T,C or G
gtggcctgaacctacnannccagttggacngnanaacnnngaantnnnnnttattngagcaattgtggctcactgagtgtagaggttggttaatacattaaatatatatgttgactattaggtagtcaggcgctatggcaggtgttatacatattttccttgtggagaagtaaatttaatcatgaaaagattaagtaatttgtctaatttaaacagtgagttttatccttggcagcatattggaatcaccaaagaagcattaaaaaatactgatttctgagccccatccccattgattctgattcaatgtctggggtacaatctgggtgtgggaatttttaaaagctttccaagtgactctaatatgtagtcaatgttgaggtccgcagggccagttggagatagagcccaggtgtgcatgctctccaaagccccaactctttaccacg

SEQ ID NO: 10153 - DNA, 466 bp, Homo sapiens
  misc_feature (1)...(466): n = A,T,C or G
ngccgtagagaccatagacagnatgaggacttcgcctggcacagccctgtggaatttcatcacacaagcccctctggattcagaagaatcacaaatgctgcctggttgctgttctcagccccctccccactgtgtccctgtcccaaacaccccctgaccctccgccaagcctgcaggcagcacctccctcgtctgctcctccctcaggaaacagcatttcccgcccagcctggggatttccaagctggaaattcaaacagctcagcacggaataggctccaacagggtcaggtaacggaaattacaagatggtaaattattccagggaaagggcaattttcctcatatgctgcctgactctgagaacactgtgatcatggtggaaattggagggtcagagctggtgtctagggaaagagaaaggaaggcactgtgcccgccgctgtcagtgaagccccaggtgtgn

SEQ ID NO: 10154 - DNA, 503 bp, Homo sapiens
  misc_feature (1)...(503): n = A,T,C or G
cgagcggnnnnntttatgaagacatacgtagaacngcgnggaannngngagaagagtggcacatactcccatagtaactccaggatatcagcgagatcattttgtttcgccgaaaagcggagcggaagaagcacagcctcaaagaaggcagtccgctggaggacctggccctcctggaggcactgagtgaagtggtgcagaacactgaaaacctgaaagatgaagtataccatatgttaaaggtactctttctctttgagtttgatgaacaaggaagggaattacagaaggcctttgaagatacgctgcagttgatggaaaggtcacttccagaaatttggactcttacttaccagcagaattcagctaccccggttctaggtcccaattctactgcaaatagtatcatggcatcttatcagcaacagaagacttcggttcctgttcttgatgctgagctttttataccaccaaagatcaacagaagaacccagtggaagctg

SEQ ID NO: 10155 - DNA, 469 bp, Homo sapiens
  misc_feature (1)...(469): n = A,T,C or G
natcgancccctnnnnattgtagaccttagtccagtgcggtggaattctggctttgcttgattatgtacaccggaaaagatgtgactatttaggcctgaaaagtcttggataaaaccagagtccaaacagatatttatttaatgacatttaaagagaaaatatttgggatttattacattaattgctgacctaaactataaactactatattccctttctcaagacgttattaacttagatgtcaagaaatttggatcttaaaatacggactgagattcccaactttgctaggataatactgtcaggaaattcaatactgaggacagaataatcttcattaaatgcatatctccaagcttaaaaggcattcctttacctaaatttttcaacagtcatctagttcttcaaggacaaaatccagaaaacttagctaagaccatgagccccttcattagccaacccttgccc

SEQ ID NO: 10156 - DNA, 478 bp, Homo sapiens
  misc_feature (1)...(478): n = A,T,C or G
catgagaccactattgagngccggtggannaaagaaatctccagcagcggaaatgtatgtagaactcattttggtcagtacttttccttgtacaggaagaaactgaggtcgcccggtgcaacgcccaacacaggttaagacaaagccgagactcaaaaccagaccccagcttccggtcccagcccatagattcttccatttccttcgccggaagtgatatacagcccctgttctccttcgcgtccgttgacgggacccaggttggggaggcggaagaatgggcgggaccatgggcggaagcaaccctcctaccaggacccggaaacagatggccaccccgagccggcctatccggaaactggctcgaagaagacggggattggccatcgcttccggaagttgtgagctttgtttcggagcgggagctcttccgagacgcactgggggccggatgtagaatcctgcttatctgtgaaat

SEQ ID NO: 10157 - DNA, 442 bp, Homo sapiens
  misc_feature (1)...(442): n = A,T,C or G
ntagtagttcgttagaccacgcggnggaattcggngaacacaccaagtccctggaggagatgaagctgcaatccttgatggattcaccagactttaacaagatcacaggcaaacccatcaagctgactcaggcggaacaccggactggctttgagtggaacgaggatggggcggcaaccacccccagcccagggctgcagcctgcccacctcaccttcccgctggactatcaccttaaccagcctttcatcttcgtactgagggacacagacacaggggcccttctcttcattggcaagattctggaccccaggggcccctaatatcccagtttaatattccaataccctataagaaaacccgagggacagcagattccacaggacacgaaggctgcccctgtaaggattcaatgcatacaataaaagagctatatccctag

SEQ ID NO: 10158 - DNA, 215 bp, Homo sapiens
  misc_feature (1)...(215): n = A,T,C or G
ccgccgagangagaatggctctgtggcttacgagagtgcctgtgctaccctgcctagaccagtggcaaaggaagaatgttctgtgacaccctgtgggcaatggaaggccttggactggagctcttgctctgtgacctgtgggcaaggtagggcaacccggcaagtgatgtgtggaactacagtgaccacgtgatcgatcggagcgagtgtgaccc

SEQ ID NO: 10159 - DNA, 529 bp, Homo sapiens
  misc_feature (1)...(529): n = A,T,C or G
gccctctggcgccctcagtcaaacgcaacacacctttaaaatgatattcataataccattataatccagaccgcgccccggannnnnnnnttcgagatcgtcacccttgcggnggcanncggaaacgncccctcatttgaatgctcctctaaaaaaaaaagaaaagaaaactgaattcattccctttaaaacgaaacattcctggtttatttgtccatgcctctaacctgggtgagcgaagctggctgtgatggcctgggtgattgttcaggttgtagaatgcgcattttacattgattatgataattgaagggtacttctgtctgctccaatttccattccttggcatactcagtatgtcctagcaaggaaggctttccactctactggctccttaagaagcaaaagtaggttaaattttatacttcactgactagggtcttctctctcccctgttctgaatggagtaaaagtctgatgccaagacaaatattgggagcgagccttcctcactagccatgtccaaata

SEQ ID NO: 10160 - DNA, 554 bp, Homo sapiens
  misc_feature (1)...(554): n = A,T,C or G
agagaaacacaaactttgaanaccccnctcgaagcaccacttcgngnggngcaattcctcttttgccttacaatatattaccttctggtatcacctcatcctatagaatcccttctagtttaatgtcctgccccaaacaatactaacccattgaagataactatgaaacctttaaatggacagtggttccttttaaaagcagccttactgaaaattttatatacacttaaatcaagtaacagttaccgtgagttttctaaacttttgtgttaacagaaatgccagttcagcagtgtgactgttacttttaaatgtctgtcttgccgccctagagtgacagacatcccagttaaacatattaggaataagaaatacataaatccaatgaagactgtagaaaaagaattttagcacttgaaggaacttcagtcatttaacccaacccattcatgttatagattgagaccatagaaataaaagtagcctataggatacaaaagttagcggcagatctgagataaaaatccagctctttggatccccgcgttnttcac

SEQ ID NO: 10161 - DNA, 411 bp, Homo sapiens
  misc_feature (1)...(411): n = A,T,C or G
ctaatccatccaccttgtgatatcgtgccttatgacttcccccaccttgtgactatgcaccttgtaacattcttcccctgcccaaaaaaactgcccctaactgtaactttccactacctaccccaaacctatagaaccagttccactcccaccacccttccctgactcctttctctgactcagcccacttgcacccaagtgaataaacagccttgttgctccacttnnaaaaaaaaaaaaaaaaaaaaaacataaaaaaaaaaaaaaaaaaaaaaaaaaaannnccggcccgtttaattaaaagggccccaaaaaaccccgttaaaaccccggggggggcttttttaggaccccccttttgggtgttccccccccccccggctttttttaagcggggggaggccccccccc

SEQ ID NO: 10162 - DNA, 429 bp, Homo sapiens
tgttgacctaaatgttatgtagcatgtgactagctgatgaatctttgattatggctgaatgttctcattcattgcaggaaaaaaatatcctccaaatcactaggtagtatgtaagtgaccaaaacttttttccattttatgttggagccaaatcattagtgttaggataaattacttctttatgtatgtgctctaaaatgaaaagttatttctgaatattaaagcatatgtattaagagtataaaaacaagatacagattttggtgtgaaatatatcttatgattcaagtcataatttaaatagaattgaagatgatgtgaaatcactgggctggaagtagcttataccttgattagtaagaggaagcccgggatcatcctgtgatggtaaacacttttatatgttttacttataactttgccaggaag

SEQ ID NO: 10163 - DNA, 464 bp, Homo sapiens
  misc_feature (1)...(464): n = A,T,C or G
cgagggcccccggggaaggaccttgaaacctttgaccctgcnggcttagtanaagcgangnaaatngnnctcagcacttttacgtgcttacctcatttaatctttacaatgaccctaggagataggttcaattgttattctcattttacaaatgataaaaatgactatgaatttggtccactcacagcctgtgaacctcattcctcacctgtaaaatgtgaataataaatagtatttgccatgtctacttcaaggaattgttataaaattcgtgtgaaaatgtatttgtgtactctttcaaaatttatgtggcagttattccatgatcacctctgtatcagtcagttcaattattaatgataacaggaaattggaataatgagggcttagctagcaagaagtaaagagaactctaaatactacagatgtagcaggtatataatagtagatatgatagccactac

SEQ ID NO: 10164 - DNA, 451 bp, Homo sapiens
  misc_feature (1)...(451): n = A,T,C or G
nattgtagacccctagtcgcagtgccgtggaattcgtgtgattacggaagagtgacatgtaacaccccaggctgaagaaccaggcatgtgtgagacatggtatggcttgtgctacaagaggaagaggaatggagtgaggtcaaaaagagggaaaagtatgtatctcatccatcaaactttaacaggagttagcctcctgcctcctgagttaaagcctccctcaccttctgagggttaggatcaccaaccatcttggcttgcctggaactgtactggttttagcactaaaacttccctatcctgggaaaacccttggtcctgggccaactggaatggttggttaccctgactgaatctttttttttaagagatggggtctgaggccaggcgcagnggctcatgcctgtaatcttagcactttgggaggctgaggtgggcagatcacctgaag

SEQ ID NO: 10165 - DNA, 486 bp, Homo sapiens
  misc_feature (1)...(486): n = A,T,C or G
ncctggagaccctcggccangcggcctgagtaccctttggagncccgngagagggactattaatttgtatgcatctcagtcatttctctttctccaaaggtaactgttataaaatcctggaatctctagaacctcaaattcttccagcccaattgtgaaactggagttaatttaattatgtattatcatgcatggtggcctttaaagaaaagaaatactttttcttgcattccccaaaacaaaactgagtcaaaaaattttttttataaaaaccgagtttaaatatgcctctaatatatcttgaatgtgcttcactataaacatccctagtgcttaaatccctgctatgtgccaagcatgctgcaagacttatggaatatgtgcgaaatcacagagacggagaaaacggaagagcagtgcgagaggcagccacacggctaaacagaggtggggtggcaaatgcaggctgttgtgagagcctgagan

SEQ ID NO: 10166 - DNA, 462 bp, Homo sapiens
ggcatgagactttagtcaggatgaggactttctggcacacagaccaaaacaaccaaatgccaccgctgccctgtgggtagcatctgtttctctcagctttgccttcttgctttttcatatctgtaaagaaaaaaattacatatcagttgtcctttaatgaaaattgggataatatagaagaaattgtgttaaaatagaagtgtttcatcctttcaaaaccatttcagtgatgtttataccaatctgtatatagtataatttacattcaagtttaattgtgcaacttttaacccctgttggctggttttttgttctgttttgctttgtattatttttaactaatactgagagatttggtcagaatttgaggccagtttcctagctcattgctagtcaggaaatgatatttataaaaaatatgagagactggcagctattaacattgcaaaactggaccatatt

SEQ ID NO: 10167 - DNA, 473 bp, Homo sapiens
  misc_feature (1)...(473): n = A,T,C or G
nggcgtagagngccttngnncnaatagaggacattagtccagcgtggaggaattcgaatcagagtagaatggtggtttccaggggatgacaggagaggaagatagggcattacaaatcaaagggcataaagttttaggtaaacaaaaatcagtgctacagatttgttatatatcattgtactacaaccaacaatagtgtattgtacacttaaaaattcgttaagagggtagatctcatgttaccttcttaccatatactcaaagaaagtaaacagtatagactaatgaacctcatagacctataggataatcaacactctacttttgtcattcttatttcacttctactcttacccattccctactgtacctcaagttataatatataatttttacagttattttttgttatgctttatatacattgaagtatatgtcttagctatataattntgacaaacgggataactcta

SEQ ID NO: 10168 - DNA, 451 bp, Homo sapiens
  misc_feature (1)...(451): n = A,T,C or G
nnnaattgtagaccctattgagtgtcgtggaattcgagcagtgtccccggctgctctgtcaaggcctccaaagttcccagtgtctgcaggcaacagacagtggcagacctgttctctgccacacaaacccgcttctgtgaggccctggtcagaccaggtctcattctggctgccctaatcaaaggccaattgagaccatccctagggaggtggcgacgaggagcctggctcggcttaattactgctggcggggcttggctgccatctcatcgctgccatctgttagttgcttgcttcagccagacacaagagcagtgaggactggccatccccaaaccactgaatagcagtgaccctttttccggggcttgctctgcggcaagaggagggagggattggaatgctggctgggctgggacatgggcagccggatgattcagatgaattagaa

SEQ ID NO: 10169 - DNA, 456 bp, Homo sapiens
atttgtagaccctttggaaggccccggttgattacccttcaaggatcccccgccttggcttcttaacctgctgtgattacaagcatgtttacaccattcctggcctagattcctatttttaaagaaactacaatctcccatggggactgtttccctgcctcttttgtgcagtcccatggaacttgcctacagcaagaggcctaagattgaatctttttggggaaaagtcattctaggatgaaaatcctatgttaaggccgggcgcagtggctcacgcctgtaatcccagtactttgggaagccgaggcaggtggatcacctgaggtgaggagtttgagaccagcctggccaacatggtgaaaccccgtctttactaaagctacaaaaattagctgggcgtggtgccaggcacttgtggtcccagctgctcaggaggctgaggcgggagaattgctt

SEQ ID NO: 10170 - DNA, 413 bp, Homo sapiens
aggcgtgagccaccgcgcccggccccattcatttctataagaagtcctctctagggtcaaatatggcagctgtttagctgacacagaggagtaataccaaagagttctcttttctgtttcctttcttttcctctttttcctaatcttccaaaggccaaagagaatgagaaggagcacttgggaaggtagatctaatataatcctgcctggctgttctaccctcctcagttcatgagtatcatgataatggacagctcctggtttaaatcattgttttattccatcaccccaccactagcaacccccagttaagattagctatagaaacataacacaaagggtgactgaagcgccaggtctttcagtgtgtgaggccagcaagagtccaacagcccctcaatgtcccagctgac

SEQ ID NO: 10171 - DNA, 471 bp, Homo sapiens
  misc_feature (1)...(471): n = A,T,C or G
gaagagcncgggntgggnaaaatcactgctcacacgaacngtcngnanaanctagngnaangngacaaaaaagattatagacattgtataatttggcttggaggctattaaatgtctttttttctttttggtattttacattattcacagtttagaataacaagaacaccaagaattacccctaaaacagagaccctgtatttaatctactttgatcagagaagtagaatttataacaggttagctaaaattgggagcatgccttaaaacttaaagattgtatgcatatatgtgtatatgttataaacgtgaaatatatttgacacacacattcacatataaattgttaaaaactgaaggcagaatggaactaatatatgtaacagagaaaaacaataaattttatgaacttgttttatatttgcatatcaagagtcaagtatgatgtttctttaagttgactttttttag

SEQ ID NO: 10172 - DNA, 464 bp, Homo sapiens
  misc_feature (1)...(464): n = A,T,C or G
gggctcccggnnagaaaattgtangcttgatacctaacgaagngcgtggaattcggcactagtcaatgttgactcactgcagcctacacagctcccaggatcaagcgaatctcgtgcctcagtctcccaagtagctggtactacaggcgcgagccaccatgcttggctaatttttgtatttctagtaaagatggggttttgccatgttggccaggctgggatcgaactcctggccttatgtaatctgcccgtctcagcctaccaaagtgtttggattgcaggcatgagccactgcacccaccctatttcactattaagtactctgttcctgtgatattaatgacttatttgtttcaaacttttttgtgccattgagctttttagtgatccagtgaagcctgtggaccccctctcatagtaatgttttcaaagcataaaactaaatataaaggatcgcaaaggaa

SEQ ID NO: 10173 - DNA, 479 bp, Homo sapiens
  misc_feature (1)...(479): n = A,T,C or G
tgccaggcanannaaanntttgaactgcgttcactaggccangnggnggaattcgcccctctctgaagagactgtccttgggcctcctctggaagcagcacccccagaggacagggctcctcctgcttgcctcatggctgcctgacttgaatggcgttggacctcggggattactggtagataatatgctctggtctcgcctggtggtgagttttgccagccatggccagggtttggctccactggtggcacacgtggcctccgtggtatggacctggtggcttctccatcccactgtggcctctgtggtatggacctggtggcttctccatcctacccaaggtaacagtgtcttgcttcatcccactgactgctgggagagagcctctgggacttttctttggggcatcattttgttttgtctttcgtagcanggaaaggatatgacaatggggaggacagttcttttggaggttgga

SEQ ID NO: 10174 - DNA, 450 bp, Homo sapiens
  misc_feature (1)...(450): n = A,T,C or G
nttgacgaccctagtgcatngcgtggaattcaaaagaaggaacaatggtcgtgccaaaaagggccgcggccacgtgcagcctattcgctgcactaactgtgcccgatgcgtgcccaaggacaaggccatgaagaaattcgtcattcgaaacatagtggaggccgcagcagtcagggacatttctgaagcgagcgtcttcgatgcctatgtgcttcccaagctgtatgtgaagctacattactgtgtgagttgtgcaattcacagcaaagtagtcaggaatcgatctcgtgaagcccgcaaggaccgaacacccccaccccgatttagacctgcgggtgctgccccacgtcccccaccaaagcccatgtaaggagctgagttcttatagactgaagacaggctattctctggagaaaaataaaaaggaaattgtacttaaaaaaaaaaaan

SEQ ID NO: 10175 - DNA, 471 bp, Homo sapiens
  misc_feature (1)...(471): n = A,T,C or G
atagaaaaccnctggagacactagtaagngcggtggaattccacctatgaagaggacgccattgttcgcatgattgagtccaggcaaaagcggaagaataaggcctattgccctcaaattggctgtagccacacggatataagaaagtcagatcttatccaggatgaagcacttagaagggcaattgagaaccataacaagaaaagacatcgtcattccgagtaggaaaagccacctgcctgcagggacaccagcagcctacctcctaccccagctgtctgttgagagcagtgctgaccccagcagttagggactggctgcatagcatacttgttgggggtaaaacttgttgcttttatgtgtgcttgaaaacatttttcaaagttacacaacagaaatgcaatcatattgtttatttttaagtgttctataatgttaaataaaactttgatcatctgcagtgtcctcccn

SEQ ID NO: 10176 - DNA, 465 bp, Homo sapiens
  misc_feature (1)...(465): n = A,T,C or G
gggcataggngctttagtccaaatagaggactttaatgaccaatattatactaagaaaagatacgactttattttctggtagatagaaataaatagctatatccatgtactgtagtttttcttcaacatcaatgttcattgtaatgttactgatcatgcattgttgaggtggtctgaatgttctgacattaacagttttccatgaaaacgttttattgtgtttttaatttatttattaagatggattctcagatatttatatttttattttatttttttctaccttgaggtcttttgacatgtggaaagtgaatttgaatgaaaaatttaagcattgtttgcttattgttccaagacattgtcaataaaagcatttaagttgaatgcgannaannngngnnatannnngntaaannnaaaaaacaccaacaaaacaanctactttgacaatcttggtatctccgc

SEQ ID NO: 10177 - DNA, 467 bp, Homo sapiens
  misc_feature (1)...(467): n = A,T,C or G
ggggncattgaattgcntncataggccangnggnggaattcagaaagcattctaaaatcttatgattaattctcactcttttagtgggcctgtgtaccttggctataggctattgaggtgggaaattaaggagaaataaaattaaaaagaaagagaaaaaagtttttctgtattaggctgatttgtcccaggggcagcaacaggcacagcccagacccaggaagaggcttgataatattatctaatgtgctctggagactctcccagcactctctcaacataaggagaagaaaaacaaattttcctttgttttatggaatgagttcacagattcctgttctctgtaactagtgacttcaagtaatctgttttatctaagcagtagagtgaaggtcatgagcgtctgagcagatctcagttacagtcacctgggcgccatagtgaaggttataggatacgcctgtgcn

SEQ ID NO: 10178 - DNA, 457 bp, Homo sapiens
  misc_feature (1)...(457): n = A,T,C or G
ntttgaggaccattatttgaggacccctagtccagtgtggaggaattcggaatctccgtgagcccctcacacgcgtgaaacagttgttctccatgccccacttctaaacgtgtagcaaaaaaaatgtgttttggtatttccctctttcagagaaatattgaaaagtacattttttttttgtttcaattattttaagggaggaaaaaaaagaaccagggagttcaaagacttttctaattactaaatggggtggtgataaaaggataataccaaatttcttcttttaataattggacatttcttccctgtaagctaatgcaggcacagcccgtgcatgcacaataagttatgcttttgaaagccataactagctaataacggctacagtgtcatcagaaagtaatggagtgctgattggcataattaatgacaaatggtggcgcggaattggtggatg

SEQ ID NO: 10179 - DNA, 454 bp, Homo sapiens
  misc_feature (1)...(454): n = A,T,C or G
nattganncccattgaagacccctagtccagtgcggtggaattcccttactctgagcccaggccgttccccttggcttcctccgtccacccaggctgcactgcagtgatggcgcgggaggcaccagctctgtggcctgtgtccagcagctgcgggtctgaaggaatagccagagaggagcacctgaaccccatgggcttggacttcctggggccccgctgggatttcttcgctgctctagctggcaggacacatcccggcctcttcttccacccattcccccatgtggctgaagacattccaacaatggggtgggcccataatagttagccctcagtcagttcccggagcacagccctgggagggggctatttctctccccactgaaaacatttcaaagctgagttacttgtctgaggcctcatccctcggaagccgtctgactccagagtctg

SEQ ID NO: 10180 - DNA, 487 bp, Homo sapiens
  misc_feature (1)...(487): n = A,T,C or G
aaattgaacccntnggaannnccccaggtaggcaacgcagngncgtggaattcccaggtgttgagcctaaatctgaaccttgtggagaggtcacaagaaagatccctaacagcactttggtttagtcagggctaggtgtcatcacctgtatgccctttggccaaggaaaccagaatttttcaggattttccccacctctggaaggctggaggaaggggaagacccactcagcagattcccatagtgcagggatcctcacaggcatgactttgccctttgtcatggatactgcagctcccagacagtcttctgggctttgatcagcctgcaatcatctgactagagcttgatttttggggcagggaaggtggtccttatatgagctgccacttaatgggccactggggatttttcaacatgaaaggtaccgagtctccaaatgcttgttgtagggcctaaaaacagggctcaactccaggttctgcca

SEQ ID NO: 10181 - DNA, 400 bp, Homo sapiens
  misc_feature (1)...(400): n = A,T,C or G
gacactttgacaaacacacctagggaacgagggattggatcaagctggggcgagatagagtggggaagtgatgagctaagaaaaattagcctgcaagcatgacgtgtcgcacgtcagcaaggctgcagccttggattctgatgtcttgagaagagcgattcacctgtgaattctcacagccctggcctcagaaagacggcccgggaccaggcccgatggcacccctcttcccagctctcagccagggcggaaggcacaagtgatggccctggcctccgcagtcacactcctcctgaaagctgactggctgaacctcacctcttggctagcttgccacccagctcttgagaacatgtttgtccaaggcctcttggcaggtctcgatgactccttcccctan

SEQ ID NO: 10182 - DNA, 442 bp, Homo sapiens
  misc_feature (1)...(442): n = A,T,C or G
cttgaagttgattacnccagggcggaggaattccccatcgctactaaaaatacaaaaaattagccgggcatggtggcgcacacctgcaatcccagcaactcaggaggctgaggcaggagaattgcttgaacctgggaggtggaggttgcagtgagccgggatcgtgcctttgcactccagcctgggcaactaaagcaaactccatcttaaaaaaaaaaaaaaaaaaaggccgatggggaaggatggtttgaccccaggagtttgaaactaacctgggcaaaaaaaaaaaaaaaaaaaaaggggccgttcaattttaaaggccccgttaaaccccgttgataaccctgaatggggctttttattggccacccttttgtggttggcccctccccgggcctttttttgacctgggagggggcccctcccattgtcttttcttaan

SEQ ID NO: 10183 - DNA, 454 bp, Homo sapiens
  misc_feature (1)...(454): n = A,T,C or G
gattgaaaaccatttgtagacattaggccangcggtggaattctataattctcccattcaagtttacagcaaacatctagccaccttcttaacaaagaatatacagaccatcatttagcaatactaatacatgattttccttggggatggcaggtttgagaatcctttagcaacaggacataattcccctaaattacagtgaattatttataacgagataaagctttcaggtacaagctgaaggtggggtgtctaacaactaaaaactatcactaaatctcaaagagaaagttcttgcaaaatatgtaaagttcacaaggtgcagacattttccttctttaggcttttatctaaggaagggctatgaaactgggcccatctgtatacaggctcaaatttacgttgttaaaggaagaatctatgcagctgaggcttattgcaggaaatacttcat

SEQ ID NO: 10184 - DNA, 445 bp, Homo sapiens
  misc_feature (1)...(445): n = A,T,C or G
cattgagcatcgatgaccctctgnccgngtggnggaattcagcagctcaactgcccagcgtgaccagtggccacctctgcaggggctttcacaacctggtcttgactcgtctgctgaacaaagcctctgacctcaggccggctgtgaacgtagttcctgagagatagcaaacatgcccaacagtgagcccgcatctctgctggagctgttcaacagcatcgccacacaaggggagctcgtaaggtccctcaaagcgggaaatgcgtcaaaggatgaaattgattctgcagtaaagatgttggtgtcattaaaaatgagctacaaagctgccgcgggggaggattacaaggctgactgtcctccagggaacccagcacctaccagtaatcatggcccagatgccacagaagctgaagaggattttgtggacccatggacagtacag

SEQ ID NO: 10185 - DNA, 442 bp, Homo sapiens
  misc_feature (1)...(442): n = A,T,C or G
ntagaacatagagaccttagtcagtgcggtggaattaaggatctctgacattaagagctgcctaggccgggcatggtagctcacacctgtaatcccagcactttgggaggctgaggcaggtggattaccggagcccaggagttcaagaccagcctggccaacatggtgaaaccctgtctctactaaaaatatgaaaaattaaccaggcatagtggtggtgcgtgcttgtgttcccagctcctcgggaggtagaggcgtgagacttgtttgaacttgcttgaaaatgtggaggttgcagtgagccaagatcccaccactgcactccagcctcggtgacagagtgaggctatgtcacttacacacacacacccccgagcttccttatagctgtgtagtggtagggctcaactctggaatcatatgtcaggagagtaatatggaa

SEQ ID NO: 10186 - DNA, 479 bp, Homo sapiens
  misc_feature (1)...(479): n = A,T,C or G
gcgccgcgggngggttttnaatcgaattgcgtgcgatngncgnggacttccttaaaagaacttttcaactttagtaaataccctgtcttaatcaaatctcattaaaagtaccccatatttatcaacaaaacatgaaaatccttggacggcttcaaagttcttacagaaaatattctgcctttcctttccatacaaaggcacagcttcgaaactggtaggtgaagggaaggaaaataaggaattctgttacgaaatcatacaggctgttatttggaaatacagaagggtgtatgtactatatgggatactgcatgctatttggaagaattttgtttatttaaacatttcagcaaattcctcagttttgatatggggtgcagtatttttaactcattgagaaatttctactaacttttttgaatgtgctcttttcccactagttgcactaaggaaagaggttagtcatgtggtaaaattaa

SEQ ID NO: 10187 - DNA, 457 bp, Homo sapiens
  misc_feature (1)...(457): n = A,T,C or G
nttgangcccttgatgacccttagtacagtgtggnggaattcccaaccttgaggccaaagcacatcatgtgcggcctctggcgggactcaggtctggtaagcgactgcagcttccctattttctagctctgcttccaactaagaaagtcagatattctccccaaaccaaccccataggatgcccgctgccaggtggcccacccccagcttccccctgacaacagcctccacccagggcatacccaaccagagccttcccatcttctaatgggaagcttcccctccccaccccaccttcaaggctctgccacgcgcagggacagtgtagccttcttggctacagcttcgagtgagcagcctctgccatcctcgctgatgtccccggttaccgtgaaggctcctccaggacactgtctgcactgcctgtcgtccagaccccacctctgcccaggcaccn

SEQ ID NO: 10188 - DNA, 394 bp, Homo sapiens
gtgcagccactatcacgatcaagatacatttattttcattgcccccaaaattctcataccccctttcccaatcaattcctctacccctagccctaggcagccacagatttgcttttggttaccgattagatctatccattgtagaattcatgtaaatagaatactgtagtatgtactttgccttcttcctctctgcagatttttgagattgatccctgtgtgtcagttgtgcattttttttgttgctgagtagtatgttctatcttatgtcagatcattcacgtgagactttggcatgaaatgttaagcatccgacatctaaatagcaatattttgaatactggaaactcaggttaaagattttgtttccaagtagaaatgaaatcttattatg

SEQ ID NO: 10189 - DNA, 215 bp, Homo sapiens
  misc_feature (1)...(215): n = A,T,C or G
cggncttggctgcagnccctgtacatttaatatatactgatttgtttgcccccagagaatttttaaggtatctgcctatatcgtgatcttttgaaatggtaaataaatctggtgcattaaaaattaaaaaaaaagaaaagaaataatataaaaaacatcacaaaaacaaattcgcccgtcttgtaaattaaagcgcccataaaaaccccttttat

SEQ ID NO: 10190 - DNA, 462 bp, Homo sapiens
  misc_feature (1)...(462): n = A,T,C or G
nattgactggactcccctcgacangncgnggaattcctgtttcatggttatgaggcacgacttctgaaacacgtgccaaaaattatccactctattttgcaaattgctgctggacttancggagaacaggccagtgatgatgaaggatgtgtccgaaggacctggtctctctgctgaaatagaaaagacaatgtctgagatggtcaccatgcagctggataaagagttactgaggcatgacagtgatgtgtccaacccgcctaaccccactgcagtggcagcagattttgacaatcgaggcatgattttctccaatgagcaacagtttgaccctctttggaaaaggcggaatgttgagtgccttcaacccctgactcatctgaaaaggcggctcagctacagtgactcagatttaaagagggccgagaacctcctggagcaaggggagactccacagacagn

SEQ ID NO: 10191 - DNA, 463 bp, Homo sapiens
  misc_feature (1)...(463): n = A,T,C or G
nnnaaatcgagttgcgtgcgcangngcnggaanncgtttccacttctatgctttaaaaaaaactgaaggagaacataatcaagcagttggttgatatataaaataatttttaatgtagaatcactgattttttggcacctatgagaaaggaattcaagtaatagagggatattgttataacaaacctccttttattcccatctacttatttatatgaacaaagtttctatgttaagataagttagagtgtgctgtggaaacaaaccctgtaatactagtggttaaaaacaaaactcagaagttaatttattgatcatgcgaagcctgctatggtcaggacacttgcctccaagcagtaactcacagatccaggctgtgtcctacctccagaacatggggcttccagtgctgctatggcactagagaactgttaagttcccaggtttaggaagaaacacgtggg

SEQ ID NO: 10192 - DNA, 459 bp, Homo sapiens
  misc_feature (1)...(459): n = A,T,C or G
ccccgccccccnnnnnaatagatgatcgtagtccatgcggnggaactccttatgatcaacaaattccatcatctccccactaagagaaagtactccaagatgatataatgattttaaagttatgggactacaacagcagccacaggaaccttgagtaagtaccatgaaccctgaccctcagcgttaatttgtaagcctttggcagagagatggaaagtcttccttcagtttgaaacaaaggaaacctattgcatcgcacgtaaatttgtatattgatgctatattgactttgtagctgccatgccttcatacagacacctcatccagcccccactgttccacttattgtgatgggttgtatatctttatttcaaagaagatctgtttgaaccgcgtttaatttcttctttgacctgctttcatcactgcccatgcctaccctggtgagattctcatcca

SEQ ID NO: 10193 - DNA, 443 bp, Homo sapiens
  misc_feature (1)...(443): n = A,T,C or G
nttgacatcgagactctagcccangcggtggaattccggccatcaccgaagcgggagcggccaaaatgaagtttaatccctttgtgacttccgaccgaagcaagaatcgcaaaaggcatttcaatgcaccttcccacattcgaaggaagattatgtcttcccctctttccaaagagctgagacagaaatacaacgtgcgatccatgcccatccgaaaggatgatgaagttcaggttgtacgtggacactataaaggtcagcaaattggcaaagtagtccaggtttacaggaagaaatatgttatctacattgaacgggtgcagcgggaaaaggctaatggcacaactgtccacgtaggcattcaccccagcaaggtggttatcactaggctaaaactggacaaagaccgcaaaaagatcctcgaacggaaagccaaatctcgc

SEQ ID NO: 10194 - DNA, 477 bp, Homo sapiens
  misc_feature (1)...(477): n = A,T,C or G
nnaaggcgcgccggcttttaaaannggattttcaganngncncnntcgctnnnntnagnngaacaaaacccattgaaaatggcccatggccttgtccatctaacatattcttgtaaaatcctgacaatggaatggggagagagagggtgagaaccaccaaactcagcacaaaacgactgagtttaaacctctgtgctaagagatgatcagagtctatcatggcttctagtagcatgagaccatgtctcacgaatgaccctaggctcccatgacaatgcctacctaagaaagctcaaggctgccaggggaacttactttagtctagccaatacttgatgatggcagtttcaggatctttctttcttatagcacttactaagaagggaatccttcctccatccctttgatatatgtgtgtatctcctagggacttcaatgtatctttgcccaggatctgaaaggcaatacttttgaggg

SEQ ID NO: 10195 - DNA, 442 bp, Homo sapiens
  misc_feature (1)...(442): n = A,T,C or G
cctagactttccataccctctacccangcggnggaattcgggaatggctgggtagatggctctaatccctgtaggcactggggatgttttctgttgcctgagaaccaggtgcctgggctgacaggtgttggcttggaagggtcttgttaacccacctgctttggccatgctgtctttattttttttattttataatatttattttaaatagcggagatagggtctcactctgttgtccacgctggtcttgcctcaagtagtcctcctgcctcagcctcccagagtgctgggattacagatgtcaaccacttcacccagcctgtgctgtctttattgaaaatagcaagcgatgattttccaaaccagaaggccaagcaggaaagcccagcgcgtcccttgccctcaaactcagctcttggggaggtgtccagtgacgtccttn

SEQ ID NO: 10196 - DNA, 510 bp, Homo sapiens
  misc_feature (1)...(510): n = A,T,C or G
agcccannnnnnnagnncctcgataccatcgnaanancctagntggctacgtagngcncgnaannnnagannnggncacggggaggngattttttgtattcagatcgtgaaattgaggtgatgaaggctgacattcgtcttgccaagctttatggtgctgatggtttggtttttggggcattgactgaagatggacacattgacaaagagctgtgtatgtcccttatggctatttgccgccctctgccagtcactttccaccgagcctttgacatggttcatgatccaatggcagctctggagaccctcttaaccttgggatttgaacgcgtgttgaccagtggatgtgacagttcagcattagaagggctacccctaataaagcgactcattgagcaggcanaaggcaagattgtggtaatgccaggaggtggttaacagacagaaatctacaaaggatccttgagggttcaggggctaccagaattcactgttctgctccggctaatg

SEQ ID NO: 10197 - DNA, 473 bp, Homo sapiens
  misc_feature (1)...(473): n = A,T,C or G
catagatattcgtgnngcntggcgggaactaaactggaaagcccaggtaaccccggactggtggtcaccatagtatggtttttcatttgtatcttctggggagcttttaaagagtactggtgaaaaacacatagtaaattaattttaaaaatgtaaaaaacaatgcctgtactgaagtaccaccaccgatttaaatgggctgagttgggggaggcatggggnctttttttttttttttttttttttgaaaaaaaaatttttttttttttcccgggggggggggcaaaaaattggtttatttaagctttttttttcggggtttaaagaatcccccccccttacccccccaaagagggggaaattttgggggggccccctggcccaaattttttttttttttttttggaaaaaggggatttccccttttttcttggggggggttaaaacccccaacctaaagggaatttcccccc

SEQ ID NO: 10198 - DNA, 456 bp, Homo sapiens
  misc_feature (1)...(456): n = A,T,C or G
ggacctcnntnnnaatggagattgaaggccatgcggaggaacncgacgacctgcagtcccagaacctctccatggacatgactgactcccctcctgccttgtctaataacagactggagaatggcatggctcagctgatcaccaccgaggcctggaacatcaactccactgacctggtaaagaaggccctggtgaccgtgccagccccatccattctgaacccccctgccgagtctcagagtggcatggctctgaaggtggcggccactgtgttgcagcccctgtgcctcggggagagcccagtggtgatgcccattcacatgcaggtggagggaagctccgcaccagagctcaatccgaatggcaatgccacctacgtcatgaccacccaaggccccgtgcaactgcccgtggtgctggagcagcacgtctttcagcacctcaactcccctctgg

SEQ ID NO: 10199 - DNA, 423 bp, Homo sapiens
  misc_feature (1)...(423): n = A,T,C or G
ccggaatttactgttttaaagaacttaattgaacttagtttagtcctggaaaagggcttacaaaagatgtagcagtccaagaggaactgtgtattcttcctttagtctgcctatgacatgcctaagtctttgcagtcctcaaaaggtgaccaaccattcgtagaaggaagggtccttagggtctctggccccatcacttcatgtgataggcaatgccttctcaccctttcctactctgctgatctcatttaagagaatgggaggccagaagaagcaaaccacagcttcccagagggacaggaataaattccagctggctaaattccagtttgcacatggagagcttcctgatggtagatgggtgcacaaggtgggtgggagctgcagcaccattcaggacagcgtttcccacagcagtgcagn

SEQ ID NO: 10200 - DNA, 447 bp, Homo sapiens
  misc_feature (1)...(447): n = A,T,C or G
ttttnttgatgacactagtcattgtggtgcaattcgtaggtagagagtagaatgatggttactggaggctaggaaggatggggtgggagatgaatatatgttgattaatgggtacaaacataaagttagatagaagaaatatattccagtgtttgatagcacactagggtgatgatagttgtaataatttattgcatatttaaaaatagctagaagatttgaaatgtttccaacacaaataaatgataaacgtttgaggtgatgggtatcataatcaatgtgatttgatcattgcacattgtattcgtgtgtaaatatcaaaatacgacatgtaccccatatataggtacaattattacatatccatcgatcaactaggggggcattctcacctcacgcacttctcctaactattggccgcttcccagaaccttatacttgtctctg

SEQ ID NO: 10201 - DNA, 451 bp, Homo sapiens
  misc_feature (1)...(451): n = A,T,C or G
attcgagacccctggnntttgatgacccttagtccagngnggnggaattcccgaccgcggagcagcaccatgtcggcgccggcggccaaagtcagtaaaaaggagctcaactccaaccacgacggggccgacgagacctcagaaaaagaacagcaagaagcgattgaacacattgatgaagtacaaaatgaaatagacagacttaatgaacaagccagtgaggagattttgaaagtagaacagaaatataacaaactccgccaaccattttttcagaagaggtcagaattgatcgccaaaatcccaaatttttgggtaacaacatttgtcaaccatccacaagtgtctgcactgcttggggaggaagatgaagaggcactgcattatttgaccagagttgaagtgacagaatttgaagatattaaatcaggttacagaatagatttttatt

SEQ ID NO: 10202 - DNA, 440 bp, Homo sapiens
  misc_feature (1)...(440): n = A,T,C or G
ctagacttcgatacccttagcccangcggnggaattccgggattcctggtagccgactcgtcgtctgaccagggccgtgcccgcatcttcctaaggcactggttccggccctggggagactggaattgagacgacagggcctccgctgaccagtccttggacacaacgcggagcggggctgaggggccgccctgccaggcctgcgctgccgtgcttttagtgttccctgaagaatactaggaagaaatggaaatcagtgttctgaagaacggcacggactcttaggcagttccatcagcaagaacctgagtttgaagtgacaacgtgctgtggagaggcaaggttacagaattacagtacatcgtttgacttctgtgacaccggcattattttctggcgtgtgtgtgtgtgtgtgtggctaaggtcgtaaagaatgctan

SEQ ID NO: 10203 - DNA, 463 bp, Homo sapiens
attgacgacacttggaagagcggtggaattccattcatacttccatatgccatttatctaactacccacctatccatccatcccctcatccatccatccacgcatgcatatacctattgatacacccacctctccaaccactcatccattcatccatcatccatccttccaaggactcatctacttattccccccccccgctgcccccccgccatgtggcaaaggtatgacaagcaacatcaaccgcttcaggcacaggttgctggtgccctttggaaaaacacctccaaagcattctgtgctgagatccagttgctaacacagattcaactttaatctcttaacctaaagatacttaaatgatcagttccttcctcagggatacttttacattcaacattaagcattgaattttctccattctcaggagaaagggctttggagtgaggggaatggagatggt

SEQ ID NO: 10204 - DNA, 445 bp, Homo sapiens
  misc_feature (1)...(445): n = A,T,C or G
cttgacaactgagaccatagcgccgngcggtggaattcaggttgaaccattatagcctcagattcgatcttttcctaactaaaaatattaaagcctcatgtgtgaaataaatttttaaaaagatttatctggatttagagaattttagatcaacagatacctctcagtgtgtttgctaattaataaaaatcagtttcttacaaataaagtttgtaagaaaatgttcattttaagtgatagatagtggagaaaatttatcacctaaaatatacccatcagtataaggcaagcaaaagtcttaacatggcagccattctgcctttgccgtggccctgtcctgtttagttcttagtgggttaatttttgtacttttgcagaagaaacttcagcaagctagaactggaaggtactttaatttttcatatatatttggtttttttttttn

SEQ ID NO: 10205 - DNA, 475 bp, Homo sapiens
  misc_feature (1)...(475): n = A,T,C or G
catagagatcgtacgccactngcaggaatccagnggatttgtctgttcttcatttgtcagtttttgtttcatttattttgaatctcttttgttagatgcgtatgcacttaagattatgctgtcttgatgaattgaccttttttatcattatgtaatagccctcttttatttattttattttatgttttttagagacagggtcttgctatgtcacccaggctggagcacggtgatgtgatcaaaactcactgcagctttgaactcctgagctccagtgattctcctgcctccgtcttctgaggagctgggaccacaggcacatgccaccatgcttatttaaattttttttttttttttggaaaagacagggtctccctatgttgcccatgctggtctgaaactcctaccctcaagggatcctcccatgttggccaagggctgaaactacaggcgtgagccactgcccccagccttt

SEQ ID NO: 10206 - DNA, 470 bp, Homo sapiens
  misc_feature (1)...(470): n = A,T,C or G
gaggcnnnnnnnncnnaattgaaactcaactcaatnngcccgnananncnnnggaantaatcaaccattcatcgatttattttattgggtgacactattgactgtgttccaaaatgcccatagtgttaggaaatgtggggtgagttttatttgtgggctaaggataaaataatcatatgctaatataccttttattataaatgactaaaaatttggatataaaactgatgttttactacacaaattacagagagagataatataattatataattattaaataattagaaaatgcaaataagcaaaagtcacccatgttcccagttctcatctcctgaagatagttataactaacatattattttgtactcttcctgttaattagtttctagtgtactttctcctgtagctgaaattaagctgagaaaaaaggaagagatagttcctccctcctctttctctctcccact

SEQ ID NO: 10207 - DNA, 444 bp, Homo sapiens
  misc_feature (1)...(444): n = A,T,C or G
nttagagattcgtaggccatgcggaggaactcggtttttttgtcattttcatcttgcgaacaaccacgcaatttagatagtatcatttctgtcgtgttattgaaaaatacacagagagtcagaaatggcaaactcctaagtacacaacaaagcagaaacagaggcaggactataagctttttaccataactctgcttgctaaaatgtctgtctggtttgtttttattttagaaacagtttgctagatgatgctaaggcccgcttaagaaagtatgatattggaggcaaatattctcacttgccatataacaaatactccgtccttttgccattggtggctaaagaaggaaaactccatttgttgttcaccgtccggtcagagaaggtaggtggacaaaaaatttcctgcccttaaacctcaggacatcagaagacctcacgaga

SEQ ID NO: 10208 - DNA, 482 bp, Homo sapiens
  misc_feature (1)...(482): n = A,T,C or G
ggcgtatggacctccgagaccctgcgaaggcgngaattcctggagtgcccctcagtcccttccttccctcagatcatcaagaagctgattgagctcaaacaggcccagatccgcaaggtctacccggggctcagctgcttcaaggagggcgtgaggcagatccctgtggagagcgttcctggcattcgagagacaggctggaagccattggggaaggagaaggggtgagtgtcaaaggagccgggttgggggtggggcagagggacttggagcctcagacttggtgtctctcgccccaggaaggagctgaaggaccccgaccagctctacacaaccctcaaaaacctgctggcccaaatcaaggtggggagaccaggtttcctttccagggcccctgcaccaatggctgtggcctcttgatgcagtgtggggtgggtagtggtctcgggctggcgtgggcgcagcagggctgtccccagccc

SEQ ID NO: 10209 - DNA, 493 bp, Homo sapiens
  misc_feature (1)...(493): n = A,T,C or G
agcatgccnnnnnnncctagaatactagatgcntgcgcagaaacccggaactttaggataggaacacgactatgaagacttcatgtgacattttatcttttcttggtgtcatttttatgttgcccacaatcccttgaacatgtagcacaacttcctttcctttcagttctgccaaatgctacaatcagaagtgcagcatcttttgtgctggatatttaaccccttgacacttatgtgctaatgtgcaaatgagggaacttggatcttgctgccaaggggttaaaattgggaacctaagttgctactaaatcatagttcaaaacctaataatgttgtcgttgttgctatctgatttcatagcagcagtcactaaattggaaacaaaaggttgcaacgtgacaaaaaaaattgtgtagtatttaccagcaccattcagtaatacagccttaaccatacctccttgaactacttcataacttgtcaagaaaagcag

SEQ ID NO: 10210 - DNA, 487 bp, Homo sapiens
  misc_feature (1)...(487): n = A,T,C or G
gcntggccnnnnnnnttagagatcgagtgcgtgngcaggaacngntcctttggaaaggaaagctaaggccatggaaaatgagctatttgagagtttgtcgctccaaggaagaacatgctggcctaattgtcccccaagtcaggagagagaattgtaaaaaacacttaaacaggcctaagtaaaggtccagcacattatttatttaagactgaattagaactgagtcattccgactctgaaaaaagagagttgttggattcttatgtatttaatgggtctgccctattgaaaaccattgtgaagtatggtttcccaagcaagaaatgacactttcactgtcagtctttctaggagtctggcagaatccaggaccgggattacccttatttatgaagcgaccttagactaacagtggctctctgggtctccagacaattggccagggactctaaaaaccagaaacaaagttgagagaactccatgctgg

SEQ ID NO: 10211 - DNA, 484 bp, Homo sapiens
  misc_feature (1)...(484): n = A,T,C or G
tgggtcctgaacagcangancactcaaaattgataccccatttagaggccgtaatnacaacctcaatgataccctctttggagagatgctacatggttacaacaaccggacccagcttgtgaaccatggccaagtcttccagatgacctttagggagaacaacttcatcaaggactttccccagctggccgatgggctgttggtgatcccgctgccggtggaggagcagtgccggggggtcctctccgagccccttccggacctccaactgctcactggagatatcaggtatgatgaggccatgggttaccccatggtgcagcagtggcgggtccggagcaacctctaccgtgtgaagctcagcaccatcaccctcgcagcaggcttcactaatgttctcaagatcctgaccaaggagagcagtcgggaggagctgctgtccttcatccagcactatggctcccactacatcgcagaggccctc

SEQ ID NO: 10212 - DNA, 424 bp, Homo sapiens
  misc_feature (1)...(424): n = A,T,C or G
tcttaggaatgactaaacaagataatggcagtttaggctgcacaactggtaaaatgactgtagataaatgttgtaattagtgtacacgtttgtatttttgttaatatagccgctgccatagttttctaacaaaaaaaaaaaaaaaaaaaaaaaaaaaaaaaaaaaaaaaaaaaaaaaaaaaaaaaaaaaaaaaaaaaaaaaaaaaaaaaaaaaaaaaaaaaaaaaaaaagggggcccttaaaaaaaaaaaaaagngggccccgggggggaaaagggggggggggtttttttttgccccccccccgggggggtccccccccccccccctttttttttggggggggggccccccctttttttttttttaaaaaaaaaaaaaaaacacctttttttttattaaagaaagagggcctttttctggcgg

SEQ ID NO: 10213 - DNA, 471 bp, Homo sapiens
  misc_feature (1)...(471): n = A,T,C or G
cggcgcnnnggnngccnccttgaaaccccccttganaggctnagcnaangcggnggaattcgntagcttatctgcttcttgtgacagggccgttgctaccagggcccttggacatgggggccagcctttggaaaccccatctaattgttttgagagctaggccactggccttggccagggccctacagtctgggttaaaactctaactgccattttttttgtttctgacacatagagcgtaaagagttttgtcaggtcaggtagcctcagggctggggccgacatgagtttttctttttaactcatgaaaagctcgttgctgttggttgtaatagatgtagtttatctaatctacatttttattgactgtcatctaccaaaatattgacttaaatcctgtaactatttgatttcaagctttaaattgatctgggactccttgcggggcttcagttgcatctaaatagatgg

SEQ ID NO: 10214 - DNA, 464 bp, Homo sapiens
  misc_feature (1)...(464): n = A,T,C or G
ggcgcgnnnnnnnnaactgagacccttcngagagtctgcgaaanacgngtngaatgtgtgactgttgtaaatctcaaggaactcttaaagagcgagttcagtggcgtggggaaatgaaacatttctgtgatcaacattgcttactgcgtttctactgtcaacaaaatgagcccaacatgacaactcagaaaggacctgaaaacttacattatgatcagggttgtcagacatctcgaaccaaaatgacaggttcagcaccacccccttctccaacacctaacaaagagatgaagaacaaagcagttctttgcaaacctttaacaatgacaaaagctacttactgtaaacctcacatgcagaccaaatcttgtcagacagatgatacttggaggacagaatatgttccagtgcctatccctgtgcctgtgtatatcccagttcctatgcacatgtacagtcagaat

SEQ ID NO: 10215 - DNA, 463 bp, Homo sapiens
  misc_feature (1)...(463): n = A,T,C or G
cattcgagnacccctaatcgagnacccctagaccacgcggtggaattcgaaaatgcattcagcctgtgtgcagtgtttctgcccagggaagcccagtagggcctccatgcccggggtgtttactgggatctggttatgtagacaccacctgcctagcacgcaccaaaattccagactttcaggaaaacaggtgcctgtgccacattatttgcacggagagactgtgtccagtgaacggttctgatcagtaaactgttgactaggaacatcccgagagccaagttcccagatgccagccaagggccatctgacctgttttgaatctcaatttcctgatacagaaaacaaaggtagggcataattgatttttacagacgtgaccccatgatcctgctctctagtccccagatttttccagggcttttgtcagaggtggttcccctttgatccccttgtnggtagg

SEQ ID NO: 10216 - DNA, 480 bp, Homo sapiens
  misc_feature (1)...(480): n = A,T,C or G
ggggatgccgggacnnnnnnaatgaaatgattacatctagccaggcggtggaattcggagcctcaaggaacccagccagcacagcagcagcagccttgcctttatgagatcaaacagtttctggagtgtgcccagaaccagggtgacatcaagctctgtgagggtttcaatgaggtgctgaaacagtgccgacttgcaaacggattggcctaatgaagaagttcaacctggagagatggaaaatcagctctcataactaagttaatttagtataaaaatagaattgatagtgagggtataaagtgtaaccatcagttaaacctctcctgtcattcctagcttccttgcttcagaattgaaatggaagtgggggtgtccctactctgtagaatctgggactgggcaaatgtttgtgtggcctccttaaactagctgttatgttatgattttattctttgtgagttaattagaataaagtcn

SEQ ID NO: 10217 - DNA, 475 bp, Homo sapiens
  misc_feature (1)...(475): n = A,T,C or G
catagatattccctcgccagngngcnggaattcaaaacagcataacatgacatcatcaccagtaatagttgcattgatactgctggcaccagttaattctgggatacagtaagaattcatatggagaaagtccctttgtcttatgcccaaatttcaacaggaataattggcttgtataatctagcagtctgttgatttatccttccacctcataaaaaatgcataggtggcagtataattattttcagggatatgctagaattacttccacatatttatccctttttaaaaaagctaatctataaataccgtttttccaaaggtattttacaatatttcaacagcagaccttctgctcttcgagtagtttgatttggtttagtaaccagattgcattatgaaatgggccttttgtaaatgtaattgtttctgcaaaatacctagaaaagtgatgctgaggtaggatcagcagata

SEQ ID NO: 10218 - DNA, 471 bp, Homo sapiens
  misc_feature (1)...(471): n = A,T,C or G
nggcgcgngggggccnaactgaaaccccaactcgnnaggctntgcanangcggnggaattntttgtgtattatcctggcttcttaaccacttctttttatttattttggnttatcttaaatattgctgtttttccataggtgtaagtacgtggcttgggtttcctttcattttaaagaccctttccccaagttgtcctctctcctgactgggagactccatttatgtctggctaagtggagagggtgtactaacaggcagcttgtatggactgaagatgggaggtctgggggctcatacaattgccacagtaagactttattttctgagtggaaacaacttctttcctttttcagatttgctgtttacttttatccctcctccctcccctttttctgcttggtattgtgaaagcttgggattttcatgctctacttctctccagccccaacatcttcataatgtgctcttc

SEQ ID NO: 10219 - DNA, 454 bp, Homo sapiens
  misc_feature (1)...(454): n = A,T,C or G
ggatgaatgtcagtgactntatgacttactgaaanncnannnanagangaaagtttctgggtgacttcgtaactgagtatgtatttatatatattttttaatttgangaaagctggggactgtcaatagacagctttatgcctttgtaagttatttcttgtatgtttgtttgggtatcctgcccagtgttgtttgtaaataatagatttggagcactctgagtttaccatttgtaataaagtatataatttttttatgttttgtttctgaaaattccagaaaggatatttaagaaaatacaataaactattggaaagtactcccctaacctcttttttgcatcatctgtagatactagctatctatgtggagttgaaagagttaagaatgtcgattaaaatcactctcagtgcttcttactattaagcagtaaaaactgttctctattagactg

SEQ ID NO: 10220 - DNA, 465 bp, Homo sapiens
  misc_feature (1)...(465): n = A,T,C or G
cggcgggnnnnntnnaaactgaaaccattacgagagcgtgggannaccacagnattgcagcaaattcccagtcaaaagagagtgatgaacctcaccattctaagaatgaaaggccagcacggccaccaccacctatcatgacagatggtgaagatgcggattacactcattttacaaaccagcagagttccacacggcatttctcaaaatcagagtcctctcataaaggttttcattacaaacattaaaaacctaggaatctgccttgaaaatggactcactatagcaaatattactgggtgatacagaatgaattctacacttactttttttctcctgtgtttgcattcctgggatttatcctcaagtgcatttctgaccataagtaattttaattcatttcaaatgttttggttattcatgatcacttgggcagtataagaaaatgtagcttctgaatattgg

SEQ ID NO: 10221 - DNA, 453 bp, Homo sapiens
  misc_feature (1)...(453): n = A,T,C or G
ggcggnngnnnntttaaatccatcgatagcttgtaaaccnncaaatntggaaagttcagcccttagnnggngcattctcgtaaaatttgtattgagtttttgaataaaacaattctatagctaaacattggatccattgtgcataagaacttatttcaaacttgtattttgtggagaagccaaaagtttggcaattatacgtgcttttctttttctttttctttttttctttttgagatggagattcgctctgtcaccagcctggagtgcagtggcgctatctcggctcactaccagctccatctcccgggttcacgccattctcctgtgtcagcctcccgagtggctggtactacaggtgcctgccaccacacccagctaattttttgtatttttagtagagacggggtttcactatgttagccaggatggtctctatctcctgacctcatg

SEQ ID NO: 10222 - DNA, 558 bp, Homo sapiens
  misc_feature (1)...(558): n = A,T,C or G
gtttgaattagagattcctagtccagagnggngcaattcgtagaatggaaaaaacccagagagcaaagtgcattacttaaagatgcacgatatacttttctcatttttaaacagcacatatttattaagagaaaaaaagtaatttatgactatttaaaataaaatttaaaagtagagtgactgtcaggtaaagaaccttcaatgtagctatcttccagggggagggccctgcagcctcgctcctcagatgtctgcactgagccagttcagtcactagtgcgccagccaggccaggagggagtgcagagcatgtctgccaagcacagagcatctcagttggactggaccacagtgctcccgagagcctgcctttcctgcccttcccaccaccctgctgccccccacattctcccagccccccccaaggaccccctctccttgacccncagtgctgtaagtaatagagtcactaaaatgcaggactganagagacctcagaggtctctatcccatcccttcctgttactgcgggccaaggacaggaaactacttttccaa

SEQ ID NO: 10223 - DNA, 428 bp, Homo sapiens
aaaaacaaaaccagaaaataactgttgaagaggatgtggaaaaattggagccctcatttgctgatgtagctagctgctgctgtgagaaacagtttggtggttcttcaaaaagctaatcataaagttaccataaacttagcaattccactgctagctgtgtgctgaaaagatttgtacagggactgaaatgggtatttgtacagcagtgtttattgcagcactgttcacagtagccaagaatggaaaccaagtgtccactagcagaagaatggataaacaaaatgtggtatatacatataatattcagtcatacaaataattgaagctctgggccaggcgtggtggctcacatctgcaatcccagcactttgggaggctgaggcaggcggatcttgaggtcaagagatcgagaccatccttgccaacat

SEQ ID NO: 10224 - DNA, 458 bp, Homo sapiens
  misc_feature (1)...(458): n = A,T,C or G
nactggatgaccactagnacagngcggttgaattccgttaaaacaagccaaggccatcattgtattctctgcaaaattttgaggagatggttacagaagattgtgagaagttgatcaatatgggaactttgaactcttccatgctgcacaggagtgcagagtccttaaagagtctaagttcagagttgtgtccagagaaaatcctgcctgaagagaagccagtacatctgccagtgctcagaaggtccaagtctcaatccagaccccagcaggtcaagttctccgatgatgtcattgacaatgggaactatgacattgaaatccggcagcctccgatgagtgaaaggactcggagacgcgtctacaattttgaagagaggggatccaggtctcatcaccaccgccgccggagaagtagaaagtcccgctccgacaatgccctgaatcttggtacagaa

SEQ ID NO: 10225 - DNA, 457 bp, Homo sapiens
  misc_feature (1)...(457): n = A,T,C or G
attgacgaccattaatccagngcgctggaattcgaaagcgcaggcctacgggatacacgggaaagataaaccctactggaaccctgttgtgtgcaatctaaccacacagcgtatgtgggatgaaccgacagcactcattatgctatgcttactggtggaacacgctctgtgcgtaacgaagatattgaggagattgtcttaacgtgtggaaataaatggccttttgaaaggtaattagaaagctttctagcagatgtgaataaaaatgttgctttaggtaaaccctatttctgggaaacctggcttaagtactggtaatctttataaatagtcttttgcatttcacaaggcaatgtaagcctttttcttttctttctttttttttttaaaagaagggattttcactcaaacctttgaaaaaaattttgcgaacccctaccttgttttaaccggaatn

SEQ ID NO: 10226 - DNA, 468 bp, Homo sapiens
  misc_feature (1)...(468): n = A,T,C or G
tgggtacaaaanactgatgacactgattaccgtgtggaanncgangngagtgggtattgcgggctagtatccgagcaaaagatggtggcgcaggccgagttaagagctttaatcctgtgaagacatcttagtgaagagtttagagtgctgagagttgaaagcttgcacgtgggaaacgtgcggccggactgccacatgtactgaggttgagtcgtgacggccacaggctccgaattttggcgtgaggaaccgctgatcgggcacgggcgccgaacttgctggcctccggcatgtgcctgagcggcggcggaaaaaccaccttaattggggcggagggttagttttaagagcaaagggcctttactaaaatggcgaaggccttccgacggcgttgttttaaaatgggaagcctcgaccctgtattgaaactgagctgttcgaaggcggcgttgtgtgcaattcggatta

SEQ ID NO: 10227 - DNA, 491 bp, Homo sapiens
  misc_feature (1)...(491): n = A,T,C or G
cggcgggcccanaanaatggagacctattganancatacgaagngcggnggaattctttctgtatttctccttttctctgcaggtgctagttcttggagttttgtggaggtgtttggtaacagcacaatatctttgaactatatacatccttgatgtataatttgtcaggagcttgacttgattgtatattcatatttacacgagaacctaatataactgccttgtctttttcaggtaatagcctgcagctggtgttttgagaagccctactgctgaaaacttaacaattttgtgtaataaaaatggagaagctctaagaaaaataaaaaaaagataaaaaaaaaaaaaaaaaaaaaaaaaaaaaacagactcatgtgagagataaaaaagagggtggggcgcaaaaaaggagggggtctttttttcacgctcttctaataaaaaaatgtgcctcttttcctcctacacgggggggagccacccctcctcc

SEQ ID NO: 10228 - DNA, 444 bp, Homo sapiens
  misc_feature (1)...(444): n = A,T,C or G
atgggggccccnnnttttgaggatccctagtccgtgtggtggaattcctttactctcaggacacacacttcagtaacacaaaaggaacagaatcttattacattttaaacaaatattcacaaaagaaaagaatataatcttaaaactgctgggaacttcagaccagcgtattgaatttgatgaaatttagatttttatcacaggtatatacatgtactgaacagttttatgaaacatgtagatggtttgtattatatgattcagaagatgtattttctattggttttaattttttttaagtcttcatttgcagctaagttaagccatgcttagaagtaattttattttgataggcttatgtagatgatcagtaaattaatttcactatttttaaactatcagaactggaaaacatttcagcaatgcttttgaattaatttagat

SEQ ID NO: 10229 - DNA, 419 bp, Homo sapiens
  misc_feature (1)...(419): n = A,T,C or G
ctaaaaatacagaaattagctgggtgtggtggcacgtgcctgtaatcccagctactcgggaagctgaggcagaattgcttgaacctgggaggtggaggttgcagtgggccaagactgcgtcactgcactccagcctgggcaacagagtaagactccatctcannaaaaaaaaaaagaaattaaaaattaattaaaaaaaaaaaaccggttcccaaaattttatagcaaattcaaattttccacctatagacatcaaattattcccaattttttttaccttttgggcctccgtgaaaaaaagctcggtttttgggggggccaccaacttaaattattttggccccagccaaaagttgcattatagggccaaacgtgacaataggagagatccctagctccatcaaggggccttgaggaaa

SEQ ID NO: 10230 - DNA, 463 bp, Homo sapiens
  misc_feature (1)...(463): n = A,T,C or G
nattgtagnccntnggnnnnnncnactgcatgtcattcagacangcggtggaattccagaacctgaaggaccctgtggctgtgcagactgctaaaacaaatctgttggactttctcccccagtcagtgcttaaatgggctccttctggaagcagttgctgtgaaatagcccaatttttggtatgtgctcatagtttagcatatgatgaaaagccaaactatcaagccctcaagaaaattttgaaccctcatggaatacctttaggaccactggacttttccacaaaaggacagagtataaatgtccatactccaaacagtcaaaaagttgattcacaaaaggctgcaacaaagcaagtcaacaaggcacacaataggttaatcgaaaaaaaagtccacagtgagagaagcgctgagtcctgtgcaacatggaaagtgcagaaagaggagaaactgattggatn

SEQ ID NO: 10231 - DNA, 473 bp, Homo sapiens
  misc_feature (1)...(473): n = A,T,C or G
natcgagaccactagnccgatcgtagatcactagtcagtgcggtggaattcttcagggtaacatggaaatactataaagttggatgtcaaactttaatatgttttcagtgttctctaattttttggaatttttgtagactttacacctggaaaaaaagatttgtaaaatcaccggaacaattgtgtgctttattttataggtagtggttattagtattacatccccattttaaaaacaaaaacataataatggttacaacacgtggagttttactaacatacatattaaatcaaagtatattcttaaaagtacttgtgaagtaaaatctttcttgtgcattttcaatacttgtaaactggaaatcagaaaatatttactatgaacaggaaaatctgacatatagccctttttgatatgtttattaataatgattcttaatggggctcataataagtttaatatgcacagcatn

SEQ ID NO: 10232 - DNA, 510 bp, Homo sapiens
  misc_feature (1)...(510): n = A,T,C or G
gagcggnnnnnnnntttgattgacntacgctacgaagngccgnggaanncaagccggccgcccactgtcagggttggggggacagagaaagtgatgtgcgccttctaattcctcgcccagcgccgccgaagcagcttcacctctccaactttctcccaccgactgcttgtcttgaccctgccctccaccctccccagagccacttcgggtgcgcgctcttgggtaaagggggggtcaccggctgtctgggatggcttccaattttaatgacatagtgaagcaagggtacgtgaggatccggagcagacgcctcgggatttatcagcgatgctggttagtattcaagaaagcttcaagcaaaggtccaaaaagactggagaaattttctgatgaacgtgctgcatatttcaggtgttatcataaggttacagaactcaataatgtgaagaacgtagctcgattgccaaaaagcaccaagaaacatgccatagggatttatttcaatgacgg

SEQ ID NO: 10233 - DNA, 503 bp, Homo sapiens
  misc_feature (1)...(503): n = A,T,C or G
gaggttnnnnttccgttgacctacgtagngacgngcaannctgcaaatcaccaagtcctcatcattgaaggcgagacaggctcagggaagaccacccagatccttcagtatctctttgaggagggttatacaaacaagggtatgaagattgcctgcacccaaccccggagagtggctgccatgagtgtggccgcccgagtggcccgggagatgggtgtgaagcttgggaatgaggttggctacagcatccgctttgaggactgcacatcagagcgaactgtcctccgctacatgacagatgggatgcttctccgggagttcctctctgagcctgacctggcgagttacagcgtggtgatggtggatgaggcacacgaaaggaccctacacacagacattctctttggattgatcaaggatgttgctcgcttccgacctgagctcaaggtcctggtggcttcagccacaatggacactgcccgtttttccaccttctttgatgg

SEQ ID NO: 10234 - DNA, 471 bp, Homo sapiens
  misc_feature (1)...(471): n = A,T,C or G
agggaccnnncctgagcccactgagaacctagtaagngcggtggaattcagttgctggaagagcaagagaagaccctcactagtaaacttcaggaacaggcccgagtactaaaggagagatgccaaggtgaaagtacccagcttcaaaatgagatacaaaagctacagaagaccctgaaaaaaaaaaccaagagatatatgtcgcataagctaaagatctaaacaacagagcttttctgtcatcctaacccaaggcataactgaaacaattttagaatttggaacaagtgtcactatatttgataataattagatcttgcatcataacactaaaagtttacaagaacatgcagttcaatgatcaaaatcatgttttttccttaaaaagattgtaaattgtgcaacaaagatgcatttacctctgtaccaacagaggagggatcatgagttgccgccactcagaagtttatt

SEQ ID NO: 10235 - DNA, 494 bp, Homo sapiens
  misc_feature (1)...(494): n = A,T,C or G
tggggttgaccnnagggnangnnnnnnnatttgaaaaccccctttgatgnacccctagtccagtgcggtggaattcatttgaaagctcattcttccccagacttggactctgggtcagaggaagatgggaaagaaaggacagattttcaggaagaaaatcacatttgtacctttaaacagactttagaaaactacaggactccaaattttcagtcttatgacttggacacatagactgaatgagaccaaaggaaaagcttaacatactacctcgagtgaacctttatttaaaagagagagaatcttatgttttttaaatggaggtatgaattttaaaaggataaaaatgctttatttatacagatgaaccaaaattacaaaaagttatgaaaatttttatactgggaatgatgctcatataagaatacctttgtaaactattttttaactttgttttatgcaaaaaagtatcttacgtanattaatgatataaa

SEQ ID NO: 10236 - DNA, 414 bp, Homo sapiens
catggcatctaaaatcaaattgtttggtttaagattttttttcatatttataagagcttttcacagtcattgtatttgataaattaaagttgagaaaatgataatggatattcattggaggaggatctgctatgttgcaattatggcactttgccctgcaatttttttttttttttttttggaaaggcaaaacccattttcaaattttaattttggcccccaattcctttttttttttttccctttttttgaagggatttttttttttccccccagggtgggagggggggggcacatttccattaaagggaacctcccctccccgggttacccccattttccgccctgacccttaaaaagagggggaaaaaacgggccttccccccccccccggttatttttttattatttgaa

SEQ ID NO: 10237 - DNA, 453 bp, Homo sapiens
  misc_feature (1)...(453): n = A,T,C or G
nctggagacatctagncagngcggtggaattcatccgtgggctctatcaagcacttaaatggaagtctcccgcaaaaacttgattttgcttgaggggacttgaagttccttaccactagtggtcattgagcacaatccgggaggaaataggcctagtggaggttcgaagagatgcgcacccagaagtgctcattccgaggagtggcaggtgcacgggtctttctaaatcattcaaaaagccagttcttcctcaggaattaatttttgcctttactgatgaaatatctttggcagcccacttccttctggccagccattacatggagttaattcctttattcctctcttccacgctcacaccttgctctcctacctccttcctttcttcttccttcctccctctctcccttgctttcttttcagaagaattgatggttcagtgtaaaagctagt

SEQ ID NO: 10238 - DNA, 469 bp, Homo sapiens
  misc_feature (1)...(469): n = A,T,C or G
natagaagatagtaggccatgcggnggaattccccgtctcgacaggtcttctctgttggttgaaatgtctatgattttatctgcctcagtcattcgtgtcagagatggactgccactttctgcttctactgattatgaacaaagcacaggaatgcaggagtgcagaaagtattttaaaatgctttcgaggaaacttgctcaacttcctgatagatgtacactgaaaactggacattataacattaattttattagctctctgggagtgagctacatgatgttgtgcactgaaaattacccaaatgttctcgccttctctttcctggatgagcttcagaaggagttcattactacttataacatgatgaagacaaatactgctgtcagaccatactgtttcattgaatttgataacttcattcagaggaccaagcagcgatataataatcccaggtctctttcaacaaag

SEQ ID NO: 10239 - DNA, 448 bp, Homo sapiens
  misc_feature (1)...(448): n = A,T,C or G
ctagacnttttgagacattagacagngcggnggaattcaattatgtgtacaggccatgaatccaaacaggaagttcccataggtacagatcctatatccaagcaagaagactccatgtgtacacacgctgaaatcaatcaaaaattacctgtagcaacagattttgaatttaagctagaagctctcatgtgtacaaaccctgaaattaaacaagaagaccccacaaatgtggggcctgaagtaaagcaacaagtaaccatggtttcagacactgaaatcttaaaggttgctagaacacatcacgtccaagcagaaagctacctggtgtacaacatcatgagcagtggagagattgaatgcagcaacaccctagaagatgagcttgaccaggccttacccagccaggccttcatttaccgtcccattcgacagcgggtctactcactct

SEQ ID NO: 10240 - DNA, 472 bp, Homo sapiens
  misc_feature (1)...(472): n = A,T,C or G
ggcgttcnnnnaaactgagaccactgangagcgctgtggaantcacttttacttcactttttcctctcagcttccctgctgcttcaccctccattcctccttttccatgcctcctcaccgttccctgaaccctccattcttttccttctccctccttgagcccccattcctattctcccttatcaccgctattcatccccccaacctggcctccttgcaggtgccagctgacgaggcatgcggctgcccccttgtacgtgatgtctttgagctcacgggtgacttctgccgcctgcccaagcgccagtgcaaacgccattactgctgggagaagctgcggcgtgcggaaatggacttggagcgcgtgcgtgtggtatgtttctgtgcggttttggtgctgcatgtggtaggtttccatgtcggacgtggccggggcaggcggcgctgcaggtgttcctgcttatgactcctg

SEQ ID NO: 10241 - DNA, 454 bp, Homo sapiens
  misc_feature (1)...(454): n = A,T,C or G
ttgaaatgaaccttttcagatggatgactntggcctaaccggngtccggcggtctggcctagggatcttccccgttgccccttggggcgggatggctgcggaagaagaagacgaggtggagtgggtagtggagagcatcgcggggttcctgcgaggcccagactggtccatccccatcttggactttgtggaacagaaatgtgaagtttttgatgatgaagaagaaagcaaattgacctatacagagattcatcaggaatacaaagaactagttgaaaagctgttagaaggttacctcaaagaaattggaattaatgaagatcaatttcaagaagcatgcacttctcctcttgcaaagacccatacatcacaggccattttgcaacctgtgttggcagcagaagattttactatctttaaagcaatgatggtccagaaaaacattgaaatgcag

SEQ ID NO: 10242 - DNA, 427 bp, Homo sapiens
  misc_feature (1)...(427): n = A,T,C or G
acgacctacacacacgagaacatgcctctcgcaaaggatctccttcatccctctccagaagaggagaagaggaaacacaagaagaaacgcctggtgcagagccccaattcctacttcatggatgtgaaatgcccaggatgctataaaatcaccacggtctttagccatgcacaaacggtagttttgtgtgttggctgctccactgtcctctgccagcctacaggaggaaaagcaaggcttacagaaggatgttccttcaggaggaagcagcactaaaagcactctgagtcaagatgagtgggaaaccatctcaataaacacattttggatnanaaaaaaaaaaaaaaaaaaaaaaaaaaaaaaaaaaaaaaaaaannnnaaaanaaaaaaaaaaaaaaaaaannnnnnnnacaaaaactctacacca

SEQ ID NO: 10243 - DNA, 533 bp, Homo sapiens
  misc_feature (1)...(533): n = A,T,C or G
aacttgaccatcgtctgtgtggtcgaattcanaatatgcatttaaatttttggtgtgttcacataaagggatgtagctaaaatgttttcataggctattatatattctcgcagcatttccagttaagaggatattacgtatataattctcttcttaaccgaatgtcagatggtcttacgccacagggtgcaggtaacccttggtctgtaagcaccaccgatccagggatcattgtctaaataggttactattgtttgtttcatcttgcttttgcatttttattttttaatttccaaattttaagtgttccctctttggggcaaattcttataaaaatgtttattggaaagatatatattttgtctacgatgggattatgcacttcccaattgggattttacatctggatttttagtcattctaaaaaacacctaattattaaaacatttatagagtgcctactgtatgcatgagttgagttgcttctgagtacattntgaatgacagcatattgtaagaaaaaaaaaggtgaa

SEQ ID NO: 10244 - DNA, 409 bp, Homo sapiens
tccgctggctcttctgcctggttttccaatgcttgcctttgcccatttccactccaccatccctgcctctcctgcatgggatagctttccatctctccatttgttgaggtacttttcagtttcttttataacattcttcaaaaagagctgctgtattacttttgttaggattattcttacataccttattttttgttgctattgtaaatggtatcctttaaaaaattacattttctcattgttactggtgtatacaaatgtaacagactttgtatattaactttgtgtgtgtgtccagccaccttttaaattcttgctaattctgctaattctagtgatttgtgaagtctcaggttttttaattaaaataatactttaaaaaatcactgccttcctgcttttttgcctt

SEQ ID NO: 10245 - DNA, 490 bp, Homo sapiens
  misc_feature (1)...(490): n = A,T,C or G
natagaganccntagccagtgttgaggaactcgacaggtaaccatgactatccatttttttggccaatgaaaaatgccatcaaattcctgtatcagccaggcatatagtggctcatgcctgtaatctctgatgtagcaggccgaggtgggaggatcacttgagcctagaagttttgataccagcctgggcaacatagcaagaccccatctctgaaatttttttaattcctatgtcataagtcatttttatttttgtagagatagggatctcacaatattgcccaggctggtctcaaactcttggcctcaagcagtcctcctgcctcagcctcccaaaatgttgggattactggtatgtgctgctggacccagccaagtagcacttttaatttgaaaaatagttctatcagttttcagtcaggcgcggtggctcagcctgtaatcccagcactttgggaggccgagcgggggtgatcacctgaggtcgggn

SEQ ID NO: 10246 - DNA, 477 bp, Homo sapiens
  misc_feature (1)...(477): n = A,T,C or G
gctcgagnannnnnaatcgtagactctagtcattgcggtgtatttcgggagtcgggggaggggaggatacagttcacgataccccagcctggagtcagggccagggaggcatggctccacttgtatccagaagttcccaggggtgattgtgatggtggttgggactggaggttgtataaggtgttcttggaaggaatgggcaggagttggaattagttggtccctactgtcccccatgaggttgtgaacccctccccccaactttttatgtttcttaaaggcattttggttttttaaaatctgtacagcaagagcaactttttctgtcaaataaaaatgagaaatgctccccaaaattgttttttatgctaagcttataaaaactgaccggcacctgtgtgtacactgatcatacctttagttgggtccggctatgcgatccgcctaattcctgtggtggacgttttatttttcttt

SEQ ID NO: 10247 - DNA, 466 bp, Homo sapiens
  misc_feature (1)...(466): n = A,T,C or G
gggttaanaactgagacactgaccacgtcgtggaattcgctggaaatgggcataccaaaatatgtcaaggaagtggaattgcgttcattagatttcaccagtaattattttagttagcttcacagatctctcttccttgcttgttcttgagagcgaggctttttagtaggaagagaaattgtctaaaacgattaataaccacaaattcaccaaactattttgggtaagtccctctatttctctaggtctaaagctaggaataagagtcattctcatataatgtactgtcccagaaagggcattatattagtctgttttcacgctgctgataaagacatatccgggattgggtgatgtatttaaaaaaagaggtttaatggactcacagttccacatgcctggggaggcttcacaatcatggaggaaggtgaaaggcacatcttacatggtggcagacaagacagaa

SEQ ID NO: 10248 - DNA, 472 bp, Homo sapiens
  misc_feature (1)...(472): n = A,T,C or G
atttgagaccatagtccangcggtggaattccgaattcaagttccccaaccgcctcaacctggaggccatcaactacatggcagctgacggtgacttcaagatcaaatgtgtggcctttgactgaaatcagccagcccatggcccccaataaaggcagctgcctctgctccctctgaaaaaaaaaaaaaaaaaaaaaaaaaaaaaaaaaaaaaaaaaaaaaaaaatanggcccccctcattataaaaggccccgtaaaaaacccgggaagccccctgaaggggcccttaaatccccaacccttttggggtgcccccccccccccctctttttagaaccggaggggggcccccccccttttttttttaaaaaaaaaaaaaaaaaagccccccccctggggaaaagaggggaattttattcggggtccnnntcaacccaaaaatggggtcgttataccttttttggcaaactcc

SEQ ID NO: 10249 - DNA, 475 bp, Homo sapiens
  misc_feature (1)...(475): n = A,T,C or G
attgaggcccctngnaannncattgtagaccattagacagtgcggtggaattccaagaccaccctcaggctcagtgattcgctagaagaactcacaggacccagaaaagctgttattcccttggtgttcaaggtttttattgtgggtcagtcacataggcatggagcacccatgtgagtgaccttagctgccgagtctccagccctcctttttcccttcccctccagaggtcaaactaatatggcgtagcccaaggccccagacaaagacaggtattcaccgtatatcatattgttagcataaactatctggcatgcccagggccccaggtatactaagatactattgtcaggtggatattgcagtggcccagaggttatttcctagaagtcaggggccagtcttgaagactttcggaatgtgcagggtttggacagcccaggtctgctgagttaaccctttactgcacataggg

SEQ ID NO: 10250 - DNA, 475 bp, Homo sapiens
  misc_feature (1)...(475): n = A,T,C or G
ggggttccnnnnactgagancactcgagatcctaggaagngcggnggaantcccgagtggccatcatggtatctgggaggttgagatgtatcggttccatccaacacctgtaaaagcaaatttggcaaagattacctgctggagaggaaggtgaagaacctggcacaagtggagcccctccatgcagagatcctgaggcttttcccccaggctgctcggcaggaaaggtactcctctctgatggtttataagttgccagtggaagatgtgcaacctttagcccaagctttcttcaaattagagaaggttaaacagagctttgacctagaggagtacagcctctcacagtctaccctggagcaggttttcctggagctctccaaggagcacgagctgggtgattttgaggaggatgttgatccctcagtgaagtggaagctcctcccccaggaagagccttcaaaccccacattct

SEQ ID NO: 10251 - DNA, 474 bp, Homo sapiens
  misc_feature (1)...(474): n = A,T,C or G
nggcgttannnnaactgagacaactgaatagcgctgtggaanncgnctgggcagccacggccgggggcgtctttcagagcattacgccaatagaaatagatatgattgtacgaaaagaccgggaaggtttctttaccaacggattgactcttggcgcgaagaaatgctcagtgatcagagatagtctatacgtcgatggtgactgcacaatggacatccggacaaagagtcaaggtggggagccaacatacaatgtggctgtcggcagagctggtagagtcttggtctttgtaatgggaaaagaaggggtccatggaggcggattgaataagaaggcatactcaatggcaaaatacttgagagactctgggttctagctgctaggcagactgctaagtattaagggaaaattgctcttatactttcctagctataagcttaagtcttaattctggaaattatattagcaatgcg

SEQ ID NO: 10252 - DNA, 459 bp, Homo sapiens
  misc_feature (1)...(459): n = A,T,C or G
ntttgtagaccacttngaagagcggtggaattcatattgttttgtctcagcctaaaagttacgttcagcatggcaattcacctattttaggaaaaatactcttttcataatatgaaatgcataaagcagttcaaaaagcagtctgtattccatcatcttcctttttcattccagtccttatttttgtaagtattacttttcctcctccggctacctggactcaaaatctcagttgtctttgacagtttttttcttgtccctgaccaaaaaagaatgatcatacccagaattcaatgtttgatattttaagaatgtatgttctagtgtttttcagagtgagtctaccatctgtataaaaacaccttgggggcaggcaggggcatttaaaaatgtaggacctatcgtccagactcacagagtggggctccagaatctccatttttaacaaactctcttaag

SEQ ID NO: 10253 - DNA, 479 bp, Homo sapiens
  misc_feature (1)...(479): n = A,T,C or G
ngggaggcgcgccggctgnnaaccccggatttcanganagacagngcggnggaattcggacctgggaagcatggtccatccatcatgggatgaagctaaccttgttttcatttgctgcaaatgtgtagaaattgtttaacggttggcagatcatgaaaaaaaagccagaacaatagtttcaattaggatgaacggggcacctatgcctctgtctgcccttaaattcttgcagaacctgtatatatttgttgaggggtagtttctttctttctttttttttttttcccaaaagggggtttgtttttgccccccaggttgaagggaaggggggaaatttggtttaattgaaaaccccccttccaaggttatggcatttttctggcttaaccctcttgagaactgggaataaggggggctggccccattcccgggttattttttggtttttttaaaaaaaaagggggtttccccgtgtggcn

SEQ ID NO: 10254 - DNA, 482 bp, Homo sapiens
  misc_feature (1)...(482): n = A,T,C or G
ggagcggccnnnnncctgagaactgagaccctacgaagngccgnggaantcgacttaaggcccagtatttttgaatacaatactcatctaggatgtaacagtgaagctgagtaaactataactgttaaacttaagttccagcttttctcaagttagttataggatgtacttaagcagtaagcgtatttaggtaaaagcagttgaattatgttaaatgttgccctttgccacgttaaattgaacactgttttggatgcatgttgaaagacatgcttttatttttttgtaaaacaatataggagctgtgtctactattaaaagtgaaacattttggcatgtttgttaattctagtttcatttaataacctgtaaggcacgtaagtttaagcttttttttttttttaagttaaggggaaaaatttgaaacacaatgccaattcttaggattttggccttggagctcgaatgaaattctaaggcct

SEQ ID NO: 10255 - DNA, 452 bp, Homo sapiens
  misc_feature (1)...(452): n = A,T,C or G
attgatagggatagcatagcccangcggnggaattcgttcgntcaccatccgtgggcgccaggtctgtgccaagcacagggactccttgggctgctgccattcgctccagtgatgtatttggggccttctcaggtgaggaagccaaggtggccaaggccctcggtcccctgccctgatagggcttacctgtgggtgggggagggagaccacacatgtcacaggtagtgaaggccgctccaaatagtgactggggccaggcaggcggaaaagagaacagaagagaatccagatgtgttcagacagaactagggacaacagaggggccttcatggtggcatgggtcagcagagcatggagcaggcagaggaagcctatctgtggggctgggtacatttctctgagactcacggaatgtaagtgtagaggtttctgcaaagagggcgcaggccct

SEQ ID NO: 10256 - DNA, 455 bp, Homo sapiens
  misc_feature (1)...(455): n = A,T,C or G
cttttgatacgatgcgctcgcccgngcggnggaantcggncatcatgctggccccggaggccgttagcttagtcatggctctaaatatttacctgcaatcggatgttgaggatcaccgagcccgcgacgtataagtacgggaagttcatgcgcagctgccaggccagctcgaagaaggcgagcagggtgcgggagagccccttgcagaagacgccgtacgaggttctccagcatttggctcaaggccccaagggcacatgtgacaagaaggcgccggctttttaaacattggaagttcttctgtgtcagttctgtgacagaacatttacttaacacatcatgaaggctagtttggatgtggaggggaatagactccatctatccatatgagctgctgcagaagaatattttgcctgctggaacctgctgtatctactcaagagtggaagttttca

SEQ ID NO: 10257 - DNA, 453 bp, Homo sapiens
  misc_feature (1)...(453): n = A,T,C or G
tttgataggttgcgacagcacgngcggnggaantccaggaatgtttgtttttgttgccgagtctaggtttatgtttgatgggcatgtatcattatacaagtgcatgtggtgatggtggtcatgtatctggtggtcaggagtgtgctttcatagagacagaatggtattgcagaaaaacgtgtaactttggatctaaataccagttctacaatttactaattatataaatctgtgcctcagacttctaatctataaaatggacgttataacatcttctggagagggttattgtggagattaactaggtagttccctagcaaggtccacccatatatctattttcttctcctttacctgattattgggttactggttttgcttcttttattatttttgcttcccttttttggagcacacagtaaaactggatgtaaacgtggcattgtcgatgcg

SEQ ID NO: 10258 - DNA, 452 bp, Homo sapiens
  misc_feature (1)...(452): n = A,T,C or G
attgagatcgattaccactcgcggnggcattcctgtttttctaccattcataatagttatcactgtatcctataacttactgtgatgtgatttttgctgctcgggctcctgagtagtggggattacaggtgcctgctaccacatttggctgatttttgttattttcagtagagacagggtttcaccatcttggccaggctggtctcgaactcctgacctcgtgatccacctgcctgggccttgcaaagtgccgggattacaggcctgagtcaccacgcccggccaggccaacagtttattaagaaggtaaacggatatggacaagtataattaatagaaaatagcctaaactgtctcagatacttcctgtcttaatttgatcaaaaattgctaggaagcaaaaaaaaaacaaaaaaacacaaaaaccaaaccagattacttagggagtcctn

SEQ ID NO: 10259 - DNA, 473 bp, Homo sapiens
  misc_feature (1)...(473): n = A,T,C or G
agataaaagttgatncccctntnancctgagtnccntgtgnagtgtgcnggaattcgcgaagaaatatattgatcagaagtttgtattgcagcttttagagctctttgacagtgaagatcctcgggagagagattgtcttaaaaccacccttcacagaatctatgggaaattcctaggcttgagagcttacatcagaaaacagataaataatatattttataggtttatttatgaaacagagcatcataatggcatagcagagttactggaaatattgggaagtataattaatggatttgccttaccactaaaagaagagcacaagattttcttattgaaggtgttactacctttgcacaaagtgaaatctctgagtgtctaccatccccagctggcatactgtgtagtgcagtttttagaaaaggacagcaccctcacggaaccagtggtgatggcacttctcaaatactgg

SEQ ID NO: 10260 - DNA, 465 bp, Homo sapiens
  misc_feature (1)...(465): n = A,T,C or G
cggtaactcgagccccttgnnnttttcgagacaatctatccatgcggtggaattcctgcatgctactgtctagagcttgtctcaatggatctagaacttcatcgccctctgatcgccgatcacctctgagacccaccttgctcataaacaaaatgcccatgttggtcctctgccctggacctgtgacattctggactatttctgtgtttatttgtggccgagtgtaacaaccatataataaatcacctcttccgctgttttagctgaagaattaaaaaaaaaaaaaaaaaaaaaaaaaaaaaaaaaaaaaaaaaaaaaaaaaaaaaaaaaaaaaaaaaaaaaaaaaaaaaaannnnngggcgccccttttaataaaagggccccaaaaaaccccggaaaaacccccgggggtgtttttttaaaccccccccttttttttttcccccccccccgcgttttttttta

SEQ ID NO: 10261 - DNA, 465 bp, Homo sapiens
  misc_feature (1)...(465): n = A,T,C or G
natcgagatcgatngcattngcaggaagcccacagaggagtcataaagtaaatatgagttcctgccattgttaggaaatgagatagatatgtcatgttatccagagaattcacttaggcaggtcttgcataagcaacatgacttgactcaagtaatctcaatctagtctctgggttcttagctttttaacttctggacttcaggccttgtcagagcacctagaagagatcaaattcaagggactgactcactaaactctgaggcttatgtatgaaccagaatatttattctcactaagggctattcatttccattattcggaattttcacttttgccaaccagggcacctcttcttcatatgagtcgagcaactaaatgtgctgtggtttaaagaggtttacattgagaacaaatggaggtagctaatctccatgagcaattcacttacaaagatgaaatagctc

SEQ ID NO: 10262 - DNA, 468 bp, Homo sapiens
  misc_feature (1)...(468): n = A,T,C or G
gatttaaccttgataaccctctcagnctgcaggaccctcgaagtgaaccggaaatctatctatttggagaataacacgtccacaggacgaggaatcatgagaagagagagggaatcactcttggaacttgggtaaaattagtacagggaacttcttccagcatttactgtttttatttgccattcgctataaaaattggatctttattttacacaaaaggtactttacaaacagtgaagtttaccaaaagctactgaatctgtggcaaagggatttaccaccaataatgcagatttacacagtaaacctgagggccaaaaacactgaacaaaatcttccattttctaataattcattaccagaagcacaaacaattgtacacagataaatatgtgaaggttaacaaatgctagctttcactcttgcactaaccaaataaaatgtctctattccagattggcccattan

SEQ ID NO: 10263 - DNA, 439 bp, Homo sapiens
  misc_feature (1)...(439): n = A,T,C or G
ctagacttgatgacccttagcccangcggnggaattcccagaggtggtcaccccagggacagccaggcacctgctcctcttgcccttcctggtggaagggagctgccttctgtccctgtaactgctttccttatggcccagcccggccactcagacttgtttgaagctgcactggcagcttttttgtctcctttgggtattcacaacagccagggacttgattttgatgtattttaaaccacattaaataaagagtctgttgccttaaaaaaaaaaaaaaaaaaaaaaaaaaaaaaaaaaaaaaaaaaatagnntttaaaatatatgagggggaaaaaaaaaccgtggaaaaagaccgtccggcccttcaaacttccacacgcttgtatggtggcccccccccctttcttttttttcccataaaagggccacccctctt

SEQ ID NO: 10264 - DNA, 457 bp, Homo sapiens
  misc_feature (1)...(457): n = A,T,C or G
nttggggttgaggacccatttggacagctggtggaattcgtctggcaccccggtggggactgtattggaaggcagcccagaatgggcagcggcgaggagtgaacacctggctgcaggtgacggcctgcaggaaggaggcgaagatggccccagggaaccaaagaggctttgccgacccccgggagaggaggaggtggactgggaacccctggccaaattccgagcagcctgcgggccagagctggcagacctggtggctgaggagttggcctttgctaggcagcatgggacccggggtttccactggaccggagctggctttgcccttaaggacggcacctcggacttcttcctggatggggccctgacacgctgcagctgctcaattcacgccgcccgccgtctgccctgcagacacctctttgcagcgcgcctcctcactggggctggcttattc

SEQ ID NO: 10265 - DNA, 457 bp, Homo sapiens
  misc_feature (1)...(457): n = A,T,C or G
nttttgatagccgaccattagaccangcggtggaattcctcacacgggagagaaaccctatgcatgtaaggaatgtggaaaaccatttagtaatttctctttctttcaaatacatgaaaggatgcacagagaagagaagccgtatgaatgtaagggttatgggaaaacattcagtttgcccagtttatttcatagacatgaaaggactcacactggaggaaaaacctatgaatgcaagcagtgtggcagatccttcaactgttcgagctcctttcgatatcatggaaggactcacactggagagaaaccctatgaatgcaagcaatgtggaaaagccttcagatctgcctcacagcttcaaattcatggaaggactcacactggagagaaaccttatgaatgtaagcagtgtgggaaagcctttggatctgcctcacaccttcaaatgcatggaagg

SEQ ID NO: 10266 - DNA, 459 bp, Homo sapiens
  misc_feature (1)...(459): n = A,T,C or G
gtttgaagtaccatttagatgnacgcttagtacagtgcggtggaattcccgtaatattagagtgagcttcctgagaacgggcccttaattgttcttttcctcttcctccctttgtaacagaggcccaaattccctccacactgtgtccagcctagtagtgaacctcactcaggaggaacaaactgacacacaacttctgggtgggggcccagcctacactttccttctgctttggtttcaggcatttttgacaacatctaaaacatccaatcaattcagagggtgaaaaaaaaggaattggcaggcaggtggggatgaacagatgtgcctgtgtcatagtgaaagacagatttgagttatggtccgttaaaaaaatttgtgacattcattgagaagttattgtatgtcaagcatcttggagttcaaatgtattatctcattcatctagttggcaagccn

SEQ ID NO: 10267 - DNA, 461 bp, Homo sapiens
  misc_feature (1)...(461): n = A,T,C or G
ttggaatagaagnaccacttggacagcgtggtggaattcggctgccaggcactgcttgtatccctgctgataagaggagggagtcactccaggaataagacaaaaggagaggaggaggccatcacctctggcctcttccatcgtacacttcctgtctctggtttaatcatgatgcatggagctacaacagccatcttaggtccccgaggtgcccagcatcacgtaaaacatcgatatgctaagaagaacaaaaagagcccaatctctgatgttattgagctcctgcatgaactctggacctgcctgcctcagacttctgtgaaagaataaaatttctttttgcctaannaaaaaaaaaaaaaaaacaaaaaaaaaaaaaaaaaaaataaaaaaaaaaaaaaaanaaannnaaanannnnnnnnnnggggggccctctatttaaaaagggccccttaaaccc

SEQ ID NO: 10268 - DNA, 472 bp, Homo sapiens
  misc_feature (1)...(472): n = A,T,C or G
ntttgtagactcgtagtcagtgcggnggaattccgcgggctgagagtccggggatcccgggggccagtcgcggccgggacatcgggcgctgcggccggggacccgctgctgagatagacagaatatgacagagctttctgagccagagggaccagtagattggaaggaacgatgtgtagctctggagtcccaactcatgaaatttagagttcaagcaagcaagatacgagagcttttagcagagaagatgcaacagcttgagagacaagttattgatgctgaacgtcaagcagaaaaagcttttcaacagacggaatcttgctctgtggcccaggctggagtgcagtggcgcgatcttggcttactgcaacctccgcctcccgggttcaagtgattctcctgcctcaatctcctgaataactgggattacaggtgcgcaccaccatacccggctaatttttatattggtagt

SEQ ID NO: 10269 - DNA, 429 bp, Homo sapiens
  misc_feature (1)...(429): n = A,T,C or G
ctaaattcttcaggttctcttgtgatcctgggaaatgctagaccgtgagcatcttgatggaggatgtgaactgccacttcctcacaggcagcaggcaggtgctgaataagtgcttgctgaatgaatgaatgaatcacgccaaggggcatgttacctgttccgccaaaatctgctgctgctgctgctgctgctgcctttgctcccgcaggaactgttgcttctgctgctctatcaactgggcccgctgatcaatgagcatctgcttcatgatggctgcttggggctggctgcccaggaagccggggcctgcgggactggctcctgagaccatgccacctgagcctggnggcacggaggactgcatggngcctgtggttcgngaangccaactggatgctgctcctgggaagaacagagagaggagatgca

SEQ ID NO: 10270 - DNA, 468 bp, Homo sapiens
  misc_feature (1)...(468): n = A,T,C or G
catcgacatcgattgcatacgcagngngcnggaattcgttgaatgcagattactttgctttatggaatttcataacttttaataataaagcagttggtattggattttttctgtagacttgaatactaaatgggatagataccagacctctttttggtttatgacgtaaaagtatttgtacagtagtttctcttcacaaaagactgaattttaaaggattatagaaacaggaacatgttcatttccaaaatgagtgcaacagaatgaagatagtcacttaaaccatctatttaacacatcacctttatgtaatatgtagctagttttagtgttttaataagtcccaactaaagactgagtgttttcagtgaagatggaaatggagacccgggcacttgcttagagttatcgtgagtccgatgttcctgaacttcaggtgtacaattaagggcatactctaagaacttg

SEQ ID NO: 10271 - DNA, 511 bp, Homo sapiens
  misc_feature (1)...(511): n = A,T,C or G
ccnaagattggacacctctggcgtagagcctctctatacccctggcccgtgtctgtcttctacatgtagccaatgaaaggaatctaaagctggaagggcaggggacctttctgatgctcttgtgaggcaaagggattgagatcactgcagagaagctggcaacaggaggcccatcattttttcagtgggcaggacatctccattctgggtggaggaagacgcaaggctttggcaaatactaaaatgcttgtttgtctattgctctttctttatgtccatcacagtctgggaaccagtaccttgaagcactatccttgattaatttataattttctgccctatactgactgcctanganagaggtggtcagaggtacgagagggtgaaaatactgttcttaattatgaaaacctatatctgttctgtgtatgcatggataatttagtctttctaaatgatttgtattttccaagcttatttttataanaagcattttcagtaacatatacat

SEQ ID NO: 10272 - DNA, 445 bp, Homo sapiens
gttgatccccttgtagacactagtccgtgtggtggaattcgaactcttcagtcgtacacactgaaaacctatttcttctaaattacatgatttggattggttttagggttttagggttgtagggtttcttttggagaggtagggggctaattgctatgttctcatggataaactttgccagcaaaaatcaggcttttgaacaattttaattttttgcctcataaattttgtgaatgctattcattatagggcttgtatatataatctaaaatgtcagcaaggcatcggagatgggttaacatctcaaaacaaaatagcctacaaatgttccttgtgggagactttggcgagggtctgtgggtaaaagcaccagggggttaatcttggctcagtttcctaaaaagcattgattaatttaactggcttttaaatatccccttccgcg

SEQ ID NO: 10273 - DNA, 472 bp, Homo sapiens
  misc_feature (1)...(472): n = A,T,C or G
gtggagcttttttttgataccatacgacagngcggnggaattcccaataccccgaggataccatgggacaactgtagtacatgtgtagtccatgtatgcatgtgtgaatccaagcaaacattgtataaaaataataatggaaagaacaggcttggtgcggtggctcacacctgcaatcccagcactttggaattgcaggccaacacgggaggatcacttgaggcctggagtttgaaatcggcctgggagatgtaccaagaccccatctgtacaaaaaaaaaatttagccagatgcgatggtatatgcctgtgaggcccacctacccacgaaattgaggggggagattgcttgagcttaggagttcaaggctgagacgggccatgatcacaccactacattccagcctggttgacaaaatgagaccccatctctaaaaaaagaaaagaaaaaaagaacagtctactaacaaaa

SEQ ID NO: 10274 - DNA, 474 bp, Homo sapiens
  misc_feature (1)...(474): n = A,T,C or G
tgtgggatnnnnattgatcgacgttncattagtccagngcggtggaattatagtcccccactacccttcccattctctggtaaccacccttttactatctatgtccattgaagtaatattttggatatattgggtcaaataaattagagcgttaaagttaatttgacccatttctttgtgcttttcttaaggtggcatccagaaaatttcaaattacatatgtggctcacatttttatatttctgttagacagcactgctctagaggtgggtgatatctcatccttatatcatgtacatgagactaaaggctgaggaagccaaaaaattaaatacattggattaaagtttgctgttgtagccattaagtctctaaggtgacattaggcctattctctaatgtttgcattattaaggggtaaggaacaaggaagcttttaaacttaggtacattctagagttttagtcccatacn

SEQ ID NO: 10275 - DNA, 443 bp, Homo sapiens
  misc_feature (1)...(443): n = A,T,C or G
aattgtagacatctgntttggaggccgttttaatcgcgataagaataatcacttgtcagggtagctgcgggcatcccattcgttcctttcatcagcgccgggcatatggggcgtcagaggctgagaacgttgccgtgaagaggcctaaaagcaagacccggagtggcgaccttaaagaggacggactgaagaaacgcgggaatgagctccagacgcgggagtttcctctctacaaagttacactgcagcagctgtctaccctgccccttgtcttttgagaagttcaaaccttcagaaaagttgcaagaacacgaggctaaaggcagcagttcactatactgtgggttgtctttgcgaggaagttgcattggacaaagagatgcagttcagcaaacagaccattgcggccatttcggagctgactttccgacagtgtgaaaatt

SEQ ID NO: 10276 - DNA, 475 bp, Homo sapiens
  misc_feature (1)...(475): n = A,T,C or G
gcggcattttattgatagcattactccagngcggnggaattcgtagctctgacatctggatttgaactccaccctcatcacccacactccctattttgggccctcacttccttggggacctggcttcattctgctctctcttggcacccgacccttggcagcatgtaccacacagccaagctgagactgtggcaatgtgttgagtcatatacatttactgaccactgttgcttgttgctcactgtgctgcttttccatgagctcttggaggcaccaagaaataaactcgtaaccctgtccttcanaaaaaaaaaaaaaaaaaaaaaaaataaaaaaaaaaaaaagatagatgaaaaaaaaaataaataaataaagagaacagacgacatactaacgaatgcattaattaagtaggaaggaacaaacaaangcnnnaggcggccgtacgtacaaacggcgcgcgtcccacccaccg

SEQ ID NO: 10277 - DNA, 476 bp, Homo sapiens
  misc_feature (1)...(476): n = A,T,C or G
ccccccccccccccccccccttcgagaccactanatagagggcgttagtccatgtggtggaattcggagtatccaacccttacaaccttcttcgaaggagaaataatcagcaaaaaacaccctttcttaactcgcaagtgggatgcatatgaagatgttgatcggaaacactggggcaagtttctggctttttatcagtatgcaaaatcatttaactcagatgactttgattatgaagagctgaagaatggagactacgtcttcatgaggtggaaggaacagtttctggtcccagatcacacgatcaaagacatcagtggtgcttcttttgccgggttctactacatctgctttcagaagtcagcagcctccatagagggctactactaccataggagttcagaatggtatcagtccctcaatctaacccatgttcctgaacacagtgcacccatctatgaattccggtgacaacg

SEQ ID NO: 10278 - DNA, 415 bp, Homo sapiens
agacaggttttttttcttgctattgaaaatcttgtgtgtctcctgaagacttcccttaaaattagctctgagcgaaaaatcaaaagagacaaaagacatcttcgaatccatatttcaagcctgggagaattggcttttctagcacaacctttccaaaagttgtatattgagattcataacaacaccaagaattgattttgtagccaacattcattcaatactgttatatcagaggagtaggagagaggaaacatttgacttatctggaaaagcaaaatgtacttaagaataagaataacatggtccattcacctttatgtgatagatatgtctttggagaaatcatgtgttttgagatttcaaagaatagcccattgttcattcttgtgctgtacaatgaccactggtattgtaa

SEQ ID NO: 10279 - DNA, 452 bp, Homo sapiens
ttttgaattgatgaccatttggacagtctggtggaattcgcgaacagcacagagagacgctccctgtgggacgcagcagccccgtggccccggtccagttcccagtcaccctccctggctctgctcacaccagagatttccatagcaggagcggttggtgcagaagtaggttcagatgaacctcagttaacgtcgccacccctcctcccaccatggtaccctgtaggagccctgtatgacatctgagcgtggtggaggtaggagggttgccagctgcagtgaccctgccacagaggcagggtcagtgcagaggtcgctttggttccgcttccctgggccacagaacggaacacagcataggttctgcagcaggagccgcagtggcaggatggagggtgcgaagggcaaggagtgcactgctgggcattcctggccagccccggccctctggg

SEQ ID NO: 10280 - DNA, 451 bp, Homo sapiens
  misc_feature (1)...(451): n = A,T,C or G
aataggagacccctggncctggtagacattagtacagtgcggtggaattcggcaaactgagttattttccacgaagaagcagtgggtcacaaatatatatatgatacacatttcatgcaaagacagaaaagtgtgtgttttccatcaaccgcgaatacttttaatagtagaaaagtaagtgtattctagcttattgtttaaaaagatttgtattgttctcgtgttatatcaatggtgaatagcaattatcttttatattaaacttcaggagataagaatgtagtagtgctaaaaacaagaactattaaagcaaataattccaaactgactatggtgttttatgaaatatttaccattacagaaaaaaaattctgaagcgtatgtaggggagaagtgacttaaaaatcaaataaattaatttgaaatgttttttggtaaaatcaatttggcn

SEQ ID NO: 10281 - DNA, 408 bp, Homo sapiens
gaagaacaagagcctgagaaagcagcaagaggacatgatgaaaaatacgtggagttgatgagaaaggggagccaaggctttatacgtctaaagaaaatattcagtagctgaatccgcccagtgatagcctgtgggcaccagcagcaagggctgccatgggatacagcacccatctacaaagacctctattacataaacactgcttcttacaggaaacaaacctcttctggggtctccttttgtgaaaaccagtttgatgtgctaaaagtaaaaagtctattttccagtgtggtcttgttcagaagcagccagatttccaatgttgtttttcccctccactcagaaacccctgccctttcccttcagaaaacgatggcaggcattcctctgagtttacaagcagagact

SEQ ID NO: 10282 - DNA, 519 bp, Homo sapiens
  misc_feature (1)...(519): n = A,T,C or G
ctctggatgaggatccatttggttctctccctccagacagtctttagaatatgaagtaagtagcttgtctgggattatattttccccctggttcttaggaggaaaatataagggtgaacccctgcttacttgttttgtgaggagcatccctgcagtctagagggagcgtcttaaggaagagggctgctggtcgtgccccaggctttcccaaggactgcagctcccagtaagtgggtaaatgggctcatgggttgaatcaagtctctcaaaaagatacggcaaagtccttactcacgacacctcagaatatgacctaatttggaaataggtttgttgcaaatgtaaccaatcaagatgatgtcatgctggaatagggtgggcccttaatcctctgtgactgactgatatccttataagaagaggagaagagatgcanagacagagagggaagacggctgtgannagctgtagacagagactggagtgatgctgccctangccaggtacaccttgggctac

SEQ ID NO: 10283 - DNA, 489 bp, Homo sapiens
  misc_feature (1)...(489): n = A,T,C or G
nttggtaccnnnaatggagacctttgatgnctgtggaanncccgctcctagaccaccatttagtactatgagaccagcttcttcacaggttccacgagtcatgtcaacacagcgtgttgctaacacatcaacacagacaatgggtccacgtcctgcagctgcagccgctgcagctactcctgctgtccgcaccgttccacagtataaatatgctgcaggagttcgcaatcctcagcaacatcttaatgcacagccacaagttacaatgcaacagcctgctgttcatgtacaaggtcaggaacctttgactgcttccatgttggcatctgcccctcctcaagagcaaaagcaaatgttgggtgaacggctgtttcctcttattcaagccatgcaccctactcttgctggtaaaatcactggcatgttgttggagattgataattcagaacttcttcatatgctcgagtctccagagtcactccgttctag

SEQ ID NO: 10284 - DNA, 441 bp, Homo sapiens
  misc_feature (1)...(441): n = A,T,C or G
atttgacgacatctgnctgggcggcgtattcgctctcttagaaggcaaatctgtctctgagaggcagcaagactgagaagttataaacccaagcgccacagccaggctagtcgggtctgtatctcactgctgctgtgtgctagttcttcagctctctcaggcactacgtctttatgtagaaatggagtaggactcggtttagagggcagtgtgaggaataaatgagtccatatgaggaaataaccttgcacagtgcctaagttgagatcagggctcaataactacaagctaggttttttttttctatttctatcagtttctatgaggggccatagttttatttgttcttcctgtgggggcttgttttgatttgccattattgaacattttgttattgttattatggctgttacccaaataaatgtataattatgaggctat

SEQ ID NO: 10285 - DNA, 472 bp, Homo sapiens
  misc_feature (1)...(472): n = A,T,C or G
tgctgggnattttaattgatttgcatacgctagngcggngcaattcgntatgtgtgttccaatccatagagaagtgggggaaagggcgagaaaggatcagattgatctgggatcagctttgagcctgagttcagtgaatagcctcatgggcatctcatggaattgatgcatttgctgtggcatatttaaattttgttcaaaagatttgaagcaagaccttgcaaagactcttaacattactgttcagcttgcttagattgtgttaacagttcatttaacaaagatccgttttaactctgaacaaaagcaacccagagcggccattctctattcccatgctggtcaatacgctttcattaccaattggcccttaccaaacttttcttatatatatatttgtattttactatgatagttgagaaatttagcctcttagtcatttttagctgttattgtggaagacctcacatat

SEQ ID NO: 10286 - DNA, 463 bp, Homo sapiens
  misc_feature (1)...(463): n = A,T,C or G
nttgatnccattggnannaactaaannttgaggaccttagtacagngcggnggaattcctgtcacctgcctggcccctgtaagcttttctgctgtgcttttggaaatctttcaaccacaatagcatgctttgttgcaaactcttagggacctaagccaggcatggtggcatgcacttgtaatcccagctacttggggaggctgaggcgggaggatcacttgagcccaggagttcaagaccagcctgggcaacatagcgagaacatgtctcaaaaaggaaaaaaatgggggaaaaaaccctcccagggacagatatccacagccagtcttgataagctccatcattttaaagtgcaaggcggtgcctcccatgtggatgattatttaatcctcttgtactttgttagtcctttgggaaatgcccatcttataaattaatagaattctagaatctaattaaaatg

SEQ ID NO: 10287 - DNA, 451 bp, Homo sapiens
  misc_feature (1)...(451): n = A,T,C or G
ngttaagattgagacctctgtaagnactgatgaccntgngaagnggattcgacaggctgccagaagactgcaaggtcattgggagttttaatctgtgactgtgtcatgaatgacatttgtactcgaattcatggagtgccactcctgatgggagaggaggcccatgacagtgacagtcatgctagtgatcgcggacaccacaccatgctgcctttgccagctggctccttcagcgagtcctcgcaccaagcctgggaggtagagatgctgatcgcgtggacagcaccacattattgggtaatgcatgccaggactgtgcaaagaggaagttagaagagaatggaattgaagtttcaaaaaaacgcacacaatcagatactgatgatgctggagggtcttgaaatctttacagtaaaacctgcaacttgaaaactagccttctgtaaccaca

SEQ ID NO: 10288 - DNA, 448 bp, Homo sapiens
  misc_feature (1)...(448): n = A,T,C or G
gttgantacccattgatgacccttatacagngcggtggaattcggggcagccaacactacagtgatcggacctgtgcccggtgccaggagagcctggtccgtttgagtcccaaaaccaatacttgtcggggttgtaatcacctggtgtgtcgggactgccgcatacaggaaagcaatggtacctggaggtgcaaggtgtgcgccaaggaaatgtgagtgtcacctatggctgagtagagagggggcgaggccttggccgtggtgagaatttctttcctcagcctttattagacaagaaccattctttatccatctgtcattttcttttatttcttcccagagagttgaagaaagcaactggggactggttttatgaccagaaagtgaatcgctttgcttaccgcacaggtagtgagataatcaggatgtccctgcgccacaaacctgc

SEQ ID NO: 10289 - DNA, 449 bp, Homo sapiens
attcgagttcgatgacccctaggccagtgaggtggaattccgatttccgtcctctgcctcccaaggagctgggattgcaggcatgatctactatgcctggcatatcctattcttacttttattgcggcacataattaaagctactccacaattcccttgatttctgcttgcctggtatatcttttttccattttttaactgtcagccttttttgcgcctgctaatctaaaggatgtgtttcgtagataagatggagctggatcatattttaaaaaaatttattctgccaagctctgtcttttgattggagaattctttcatttatgctttgaatcactgaggaggggggcactaatgtctgctgttttgctatttgtgcccccatgtcttatgtcttcattactgacttttttattaaacaactattcccttgggtaccactgtaagac

SEQ ID NO: 10290 - DNA, 476 bp, Homo sapiens
  misc_feature (1)...(476): n = A,T,C or G
nttgagaccctatcattgaggagcaattcgcttgtacagcctgcagagccgtgagccaagtaaacctctttaattacccagcctcagggccagacccgagggtttctgagccgtgactctggctaagcccttcactgctctgggctgcaaaaggaggatcacagcacctcccgtgggtgggcaggattacttaagatgacgcaggacagcgcccagagcagcttggtgctccgggaacgccttccgcggaatgaagcggcccatgcccttgttgacgttgatgtttccgtcttcaaagacgatcttgccctggctgatgaccactagtggggagccgtggcactccataccctcgaagatgttgtactccaccgcctgcaccaacagcctcagcgttacttcccaggatttgctctgccccaaacgagctgttcataacagcgattttgcctaacattatatcataagcgtgttcc

SEQ ID NO: 10291 - DNA, 491 bp, Homo sapiens
  misc_feature (1)...(491): n = A,T,C or G
nggggagggcgccggnnnnnnnnaaactgagatcgtaggcagtgcggnggaattcgacctggtatgtgtgggtgatgaatagaagaacactttaccccaattcttctgaagcacagtaaagaggaggagaaatgaaccagtttgcaaaagtgggtctacgttagctgaaaatatgcagcccttgagtttatatggagttctagacagatggacacatgtaggtactgccgctgagtgggcaggtgtattacaccttgctgggagtgaatgatggcttatttgtcagcgatttacaaatcctaagatggagaggtagcacgggagtacaaaggccaatgcagcctcaggttcacgtgcttttgagatgattaagagatgcaaagttaggctgggcaaggtggctcatgcctatgatcgtagcacttggggagatcaatcctagcactttgggaggcttaggttagaggattgcttaggctaaggtgggagga

SEQ ID NO: 10292 - DNA, 448 bp, Homo sapiens
  misc_feature (1)...(448): n = A,T,C or G
atagagttccagaccctaggccangnggtggaattcgtgataaatttacagatatatcattttgcaacgtttatgcaataacagattcaggtaaaaatcatcaatgataaattgctaatagagagcagagtattatccatacatctcaaagtgttacatcacagatagctatcaattacaaatggaaaaggcatattccaaatggagacattcagcagatgccacctaaataaatgattaacacttagcattaccaatgggacaaactgatgttaggtgtattggctgggatgaaatgggaagtgtacaacatcacttatgtagtatacttgctgaaatatttaacctgcatccaaacagcaataaccagtcagacaaatccagattgttgagcactctttaagactacagatatgggcttttgaaaaatgtccatgtcataaagtga

SEQ ID NO: 10293 - DNA, 588 bp, Homo sapiens
  misc_feature (1)...(588): n = A,T,C or G
caatagagcnccgntcgagagggcanncatagatcactatngcagagtggngcaattcgagtactcttactgcctcttttctaaatgttcaggaaaagcattgccagttcagtcttttcaaaatgagggagaaacatttgcctgccttgtaataacaagactcagtgcttattttttaaactgcattttaaaaattggatagtataataacaataaggagtaagccaccttttataggcaccctgtagttttatagttcttaatctaaacattttatatttccttcttttggaaaaaacctacatgctacaagccaccatatgcacagactatacagtgagttgagttggctctcccacagtctttgaggtgaattacaaaagtccagccattatcatcctcctgagttatttgaaatgatttttttttgtacattttggctgcagtattggtggagaatatactataatatggatcatctctacttctgtatttatttatttattactagacctcaaccacagtcttctttttccccttccacctctctttgcctgtaggatgtactgtatgtagtcatgcactttg

SEQ ID NO: 10294 - DNA, 460 bp, Homo sapiens
  misc_feature (1)...(460): n = A,T,C or G
gccaccccccnnnnnnnatcgagatcgttgtccatgcggggactctccgctgtccccacaagcagagccctgaggggtggggaccagctggccacatggtgctgcttttcaggttaggggagaggtggccctgagggacagcccagctctgagtctcagtcgctgatcactgccagggaggctcaggctgccatggctccaggctccctcccctgcctaggggcaaagtccatcgggtcctgggcctcagcttcccttcccacattcctccggccccaggagcaaccccttgggctaggtctgaccccaggtgtccctctggaaggggctggctggtgccctatttccagccaccccagcagctagggaggcaaagcaggctgcagtcagtccctcaagccagcgttgcatgtttgggatggtggctcctgttgtcttgcgctctgggaagtcagatgtn

SEQ ID NO: 10295 - DNA, 575 bp, Homo sapiens
  misc_feature (1)...(575): n = A,T,C or G
catagatcacgctcagggggcaatcatagataacgttncactctgaagctgcaagcagcgaccatgcgcagggttctgatgtgtctctcacggcttgtaaagtgtgagacagctgccttgtgtgggactgagaggcaagatttgttcacgccttccctttgtgacttcaaaaaccctgactctctttctgcaaaggcacctgaatgtgcctgtgttcctgtaggtataatatgaggaggtggggataccaacccacccccatgtccaccatgaccctcttccctcatgctgacctgtgttccctctccaataattaatcattcctgctccaaagaggtggagctgggatgtctccatctctgtctcaactttatgtgcactgagctgtaacttcttacttccctattaaaattagaatctgagtataannnnnnnnnnnnnnnnnnnnnnnnnaaaaaaaaaaaaaaannccgggccccttaaattaaaaagggccggtaaaaccccggtgaaaacccgaaggggccttttaaaatgccacaccttgggggttgccccctccccggccttttttg

SEQ ID NO: 10296 - DNA, 467 bp, Homo sapiens
  misc_feature (1)...(467): n = A,T,C or G
aggggggccngnnnttttgtaattcagtagaacattaggccagagcggtggaattcctgtgtaggttctgcaggcccagtgtagaggctcacacctgtaatcccagtactttgagacgctgaggtgggaggatcacttgagcccaggagttcaaaaccagcctgggcaatatagtgagaccgtatcactacaaaaaagtttttttagttcaccgagcatggtggcacatgcctgtagtcccacctactcgagaagctgagatagggtcacctgagcctggtaggctgaggctgcagtgagccaagatcgcactactgcactccagcctgggtgacagagtaagaccctgtctcaacaaaaaaataacaggttctgttgctgctgagctttcgtcaggaagataagactttcccaacagtccgaagcctaggatatgagggctgaggaggactcaaaccgttgcagtn

SEQ ID NO: 10297 - DNA, 591 bp, Homo sapiens
  misc_feature (1)...(591): n = A,T,C or G
caatagatcccctctnncnnnnnncnnnnaattgagnnccctatcggagaggngcaanncctcagatagagagagctactctgaagctgcaagcagcgaccatgcgcagggttctgatgtgtctctcacggcttgtaaagtgtgagacagctgccttgtgtgggactgagaggcaagatttgttcacgccttccctttgtgacttcaaaaaccctgactctctttctgcaaaggcacctgaatgagcctgtgttcctgtaggtataatatgaggaggtggggataccaacccacccccatgtccaccatgaccctcttccctcatgctgacctgtgttccctctccaataattaatcattcctgctccaaagaggtggtgctgggatgtctccatctctgtctcaactttatgtgcactgagctgtaacttcttacttccctattaaaattagaatctgagtntcnnnnananaganaaaccnnnnaaaaaactccanaannaaannagggggcgcggctgggttaagaggcgccgtaaacccccgtgaaacaccgcgggtggcgctttatggcccaccactttggtggtg

SEQ ID NO: 10298 - DNA, 445 bp, Homo sapiens
  misc_feature (1)...(445): n = A,T,C or G
attgatnaccctnnntttgtagacattagtccatgcggtggaattcctcccatagtatgaaggagatgattggaggctgttgcgtttgctcagacgagagaggctgggccgagaacccgctggtttattgcgacgggcacggctgcagcgtcgcggtgcatcaagcttgctatggcattgttcaagtacccactggaccgtggttttgcaggaaatgtgaatctcaggagagagcagccagagtgactctacttcatgaggctggaaccatgactgctggcagctcttgtttccagccccttttaccagaagaaggggctctctagaagaatcctggaaaggactctgattggcctgtcttggatcatgtgcccatcatctctgtggctggagtggggagggtactgtgaatggcaaccctcactagaactacatagttggagtc

SEQ ID NO: 10299 - DNA, 448 bp, Homo sapiens
  misc_feature (1)...(448): n = A,T,C or G
attaagatgagaacctatcagnctgatgaacctccggcaannccatattaatacccagagcttctcaaattgtttttatttgtatgcttttttttatagctgcatagaattctattgtgtaccaaagtttatttaaccaatctgctttaggcaaatatttgggttatttccaaacctttagcactaaaaacaatgctcaatgaataattacacatggaaacatatacagatgaatctgtggaatacaattctagatatgagattgcagaatcaaaagacaaatgcatttataataatgataaatattgacatattttatagggatttgtcccatttttgcatttctgccagcaacatagaagagcgtcagaacagggcttttctgaatgggttcccactattaacaggagctgtgataatttatacattaacaaaaaaagaacaaaat

SEQ ID NO: 10300 - DNA, 487 bp, Homo sapiens
  misc_feature (1)...(487): n = A,T,C or G
agtntgtaannnagggaagngatttganncccctnattgtagacactagtccangnggtggaattcctctcacacgtgggagcagctgggcacactgcagctactgtcacagaggggctaccgggccgtggcccttgaccttccagctcaccacgcgcagcgccatgaccagcaagggtcccgaggaggagcacccatcggtgacgctcttccgccagtacctgcgtatccgcactgtccagcccaagcctgactatggtgagaagacggtggttccagagcctgtgacggggcctaagggacggggactgtgctctaaaccagcctccaacccctgtcacccagctgagccccactctgctgtcccaaatggctccccaacccctccagccattccccaagtaaatagactgaggcagcccctccaggttagggaggaaccctttccccagagactctgctgctgaccaaggttactcctggcagc

SEQ ID NO: 10301 - DNA, 490 bp, Homo sapiens
  misc_feature (1)...(490): n = A,T,C or G
cgggtggtannnnaggggnnnnnnntttcgtagaccctagatcgatgtgccgtaattccatgaacaggctatcttgcggttgcaagtcaccaatgttctgtctcagcctctgactcatgccactgttaaactagaacatgctaaatctgttgcttccagagccactgtcctccagaagacatccttcacccctgtaggggatgtttttgaactaaatttcatgaacgtcaaattttccagtggttattatgacttccttgtcgaagttgaaggtgacaaccggtatattgcaaataccgtagagctcagagtcaagatctccactgaagttggcatcacaaatgttgatctttccaccgtggataaggatcagagcattgcacccaaaactacccgggtgacatacccagccaaagccaagggcacattcatcgcagacagccaccagaacttcgccttgttcttccagctggtagatgtgaacactggn

SEQ ID NO: 10302 - DNA, 447 bp, Homo sapiens
  misc_feature (1)...(447): n = A,T,C or G
ggtaagactggagcatatcaggctgagtactctctcaagaagccaggaggaaagagactgcctctccagagcaaggcccagctgggcagagggtgaaaaagagaaatgtgagcatccgctcccccaccaccccgcccagcccctagccccactccctgcctcctgaaatggttcccacccagaactaatttattttttattaaagatggtcctgaccaaaaaaaaaaaaaaaaaaaaaaacgggcccccctttatttaaaggggccctttaaacccccgttgaacccccggggggggccttttaatgccccccccttttgggttggccccccccccggcctttttttggccggggggggggcccccccccctggcttttcttaaaaaaaaggaaaaatcccctccccttgtcggaaggggggccttctctttgggnngaagantctn

SEQ ID NO: 10303 - DNA, 458 bp, Homo sapiens
  misc_feature (1)...(458): n = A,T,C or G
aggttaaaatgagagcccctttaannactgaggagtctctgaagaagcgnggaatgagaaagactgacaatatatttactgagacgttaaaggaagacagtattactgcacctctgtgtgcatgcgctaccccaccaacccgaccagtcgagaattccaatcagtgcttcctgaattgcaagtaacacaagaggaggagtggctacacaaacaagctgaggcacgaagagcaatgaatactgacatagctgaactttgcgatttaaaagaagaagaaaagaacccagaatggttgaaggataaaggaaacaaattgtttgcaacggaaaactatttggcagctatcaatgcatataatttagccataagactaaataataagatgccactattgtatttgaaccgggctgcttgccacctaaaactaaaaaacttacacaaggctattgaagattctt

SEQ ID NO: 10304 - DNA, 463 bp, Homo sapiens
  misc_feature (1)...(463): n = A,T,C or G
tgggatccgggagtgccaaacgatgactacaatgacgactgnanaaccncnnaaannnaannnnnattaaggctaatgaatgaatacatgtatagctttagttcgtatctgtcacctagcacgcgctcctaaaggaactataggtactgatatcattattaatactatattatgttaattacctgtcatcttggcaggcccacactaatgcacaagaacattacattgtctatacgtttatatcttcaccggcaatatgcattttagctgttctaattatcataagacaataataaaagcgtgatatagtttgtctctgtgtccccactcaaatctcatctggatttctaatccccacatttcaaaagagggaggtgattggatcatgggagtggttcccccatgctgttctcgcgatagcgagtgagttttcatgagatctgacggctttataaggcgctcg

SEQ ID NO: 10305 - DNA, 450 bp, Homo sapiens
  misc_feature (1)...(450): n = A,T,C or G
attagccgtaccactactccagtgtggnggaattcgagacacatgggccaaggaggggtcagcggcgaattctttcggcctgttggggacccctcgtgtccccacgccagactggacctcccgtatgaacttctcttcgcatcggcggcggcttccgtcacctccgctcccccgatcctattcccagtcgtatgccagcttggagagtcacgtgagagcaagagagtagctttctggttgtcctggtgccctgctcaggcaaactgactgccattctctgaggatggcagctctgtcccccacatttgccacgtccacccaggattccacctgtctccaggactcagaatttcctgtttcttcaaaagaccattcctgtccccagaatttggacctgttcgtgtgcagtggtctggagcctcacacacccagtgttggttcccaggaatc

SEQ ID NO: 10306 - DNA, 442 bp, Homo sapiens
  misc_feature (1)...(442): n = A,T,C or G
nttgagaccctatctgtgggcggattccttgttgggatgaatattgaggctaagcagcaaatacaaaagttcgagtgctctataacgttttctgacattttgagatatgacctcataatccattccagagtcacctcaaacatgtatatagagaacacttctcatataaaaagtttctctagggccaaagaccaggactgtgttactgaactttcagcaacaaatctgagtctccaccacctcaaactgaccaaatcttgggggctgttaaagcagtcacagctcagtgccagcctttggggatttctaggcctggagcaggcagctcagatccaggatctggtcagttttcttctgactccaagagttgtctcaggttgtaggaataggcatggcctgataatatagaaagagggaggcagagaagtaaagaggaactgcn

SEQ ID NO: 10307 - DNA, 445 bp, Homo sapiens
  misc_feature (1)...(445): n = A,T,C or G
nctcgtagacatctgnnctgggcggccgtatttnccaaaccttatcacacctttgccctatgaaatgttttaggcaaaggatgttttaacccaaaggaggactgtttgagtgcttgatgttgccagttactaggaaataagtttagagagttctaagccatgataaagatctgcacatcttaggagcagacttaaaaggacagtactattttattgtttccaaaggttgtgtgagccattttttaaaagtatgttcagggaactttctcaataatccagagatacttggttggctaaagagctacatataaacatagcatatgcaaccttcagctctttaagctttctcataacagacagctatgccttggacagtccgtgtgtaagtcagccctatggctttgcttaatgatgataaagtggaagcatcagcataattgaagtg

SEQ ID NO: 10308 - DNA, 464 bp, Homo sapiens
  misc_feature (1)...(464): n = A,T,C or G
ggagagcccggttgtccaaactttggtgcaaggagcgtcngganaaccacnannaananagngggaagggggaacccacagctaaaggctctagaaagatggtcagactgggcagcaccagcggtgaggaaagtggcttggagagggaggtaagtgacagcgaggcagggggaggcccccagggggagaggaagaaccgctcttccaagaagagctccaggaaaggcaggacacgaagctcctcttcctcctcagatggaagtccagaggccaaaggagggaaggctggctcaggtcgccgcggagaggaccacccggctgtgatgaggctgaagcgctacattcgggcctgtggtgcccatcgaaactacaagaagctgttgggctcctgttgctcacacaaggagcgcctgagtatcctccgggcagaactggaagcgctaggcatgaaaggtaccccttcn

SEQ ID NO: 10309 - DNA, 473 bp, Homo sapiens
ccccccccccccccccccaatagtagaccactattgcatgcggtggaattccttctgtctatccattgtttagaatagggtattgtgtcttccactgttattttagaacagtgtatttcttccttcatttctgtcagcttatttcatattttgaggttttaactgtttgttgcacatatgtttataataattatacattattaatgaattgacccttttatcaatatataatttcattctttgtttcttgtaacagtttgttttgtttgatacatatactgccacccagctatcttttggttactatttgcatggaatgctttttctccatccttttatgttcaacctatttgtgtctttgaatataaagcgagactgttgtagacagacaacatatagttggatcatgttttctaactatcctgccaatttctgccttttgattggatgatttaatcaatttacatttaaag

SEQ ID NO: 10310 - DNA, 483 bp, Homo sapiens
  misc_feature (1)...(483): n = A,T,C or G
agttgaaaccgtnggannnnccaactgataccataggaagngcgtggaattcctggttcttctctagttagtacagcatgtcatagtgtgggtctctggatgtgtggctttcagttcccctgctggtctgaggccctatccatgaggctgctgcaggtgctctctttttttctgattctgtagagccttggggctcaaaatgtgcttcatgggcagagaatggatagtatgcatttagaaactttgatggcattttgacattgccaaaaagtgtgggatttaaaggttcttttcaccaaacagaggatagactcatttggatgttatcaaattcaaggtcgccaaggagtggcccccacttgttctagtcatgtgtagcaggaccacatatccatcggcgacagatgagagaggccagaatggtccttcaccacagagagcttcagggcccctgatgcagggcgttggagatgtggtgtctga

SEQ ID NO: 10311 - DNA, 481 bp, Homo sapiens
  misc_feature (1)...(481): n = A,T,C or G
aactgtaccctggcagngncgactggataatcgtgcgcaggagcttgagaccagcctgggcaacatagcgaaaccctgtctccacaaaaaatgcaaaaaattagctgagcatggtggtacacacctgtagtcccagctacttgggaggctgaggtgggaggattgctttgagctggggaggcagaggttgcagtgagccgtggtcatgccactcaccctacgcaacagtgtgagaccctgtctcaaccaaaaaaaaaaaaaaaaaaaaaggggcccgttcggttttaagggcccggttaaaccccgttgataaccctaggggggccttttaagggcccacccttttgtggttgccccttccccggtgctttctttgacctgggaggggccccctccccttgccttttcttaataaaagggggaattggcttccattggcttgagggggggcttttcttatggggnggaaacagggggctcg

SEQ ID NO: 10312 - DNA, 492 bp, Homo sapiens
  misc_feature (1)...(492): n = A,T,C or G
aactggaaanccnntngnnannnnccaatagaatantcatacggaagngccgtggaattccccgatggggcttttcctgtagcctgcacatcgttggaaacgcctcatagagtaactctgtggttttactttactcacaggactattgttagatctgtgggaaggaattacaagacagttgctaaaagtttgaaaaagacggttgctaaacgttatgaaaaaccagataatctacttttttaccttaggtattggcatactccacacatctgtaccattcttgagtgatcgcttaggaatgaatgtgatttgaactcattcatgttgagagggtgtcaaattgagaaccaggtagatccccaccacctacagtaaaaaggaccctaaagtaaattggttgaagaaattagatcccaaagattcttggtgaattttgaagtcttcatcagtatatccatattaaaacgagatgacagaagccaaagtaattat

SEQ ID NO: 10313 - DNA, 494 bp, Homo sapiens
  misc_feature (1)...(494): n = A,T,C or G
cggggcggngccccggnnnagggatttancctagggangcanagttcagtncngcttcgnagngngcnggaannntcacagcacaggaccgttcatcgggggcctaaacgtttccctcggctctgtcaccaactcacttctctcggcttcgttggctgtaaattgggtgaaaagagctctaatgcctttcaggctcttagaagccatagatttggacaagcccagcaagatgggtgtccttccaggcctcttcccctttcctccatctctggcaacagttcttggggtttggcaattgtttggattttttttctttctgcagttgtgtgtatgtgtgtttgtgtgaagaaaaacagactctgtccaggtagaaatggtgaggagggggaagagaattacatttccagggtcagaaacttggcaacagttttcctagagtgactcagacacaccacagtaacaactctcgctgcaattttattttaatttgagag

SEQ ID NO: 10314 - DNA, 476 bp, Homo sapiens
  misc_feature (1)...(476): n = A,T,C or G
ggaggcgggccggnnggaattacctacnggttcgactgangctatcgnannaancgnangaaangcanggacctgaagggctacgngtacgtttttatgagtcagatgtaatgggaagaggccatgcacgcctggggcatgttgaagagcctcacacggagaccgtacgaaagtacttccctgagacatggatctgggatttggtggtggtaaactcagcaggtgtggctgaggtaggagtaacagtccctgacaccatcaccgagtggaaggcaggggccttctgcctgtctgaagatgctggacttggtatctcttccactgcctctctccgagccttccagcccttctttgtggagctcacaatgccttactctgtgattcgtggagaggccttcacactcaaggccacggtcctaaactaccttcccaaatgcatccgggtcagtgtgcagctggaagcctctcccgccttc

SEQ ID NO: 10315 - DNA, 472 bp, Homo sapiens
  misc_feature (1)...(472): n = A,T,C or G
ggagtagggccggnagaataacctacnngcccgccagnacctccgnaanaccannnngaagngggnggnagntncaaaggattggatgctggataaattgaccgttgtgtttgttttttgtccatacaccggtcccgcaagttgagagagtgtctccccctcatcattttcctgaggaacagacttaagtatgccctgacaggagatgaagtaaagaagatttgcatgcagcggttcattaaaatcgatggcaaggtccgaactgatataacctaccctgctggattcatggatgtcatcagcattgacaagacgggagagaatttccgtctgatctatgacaccaagggtcgctttgctgtacatcgtattacacctgaggaggccaagtacaagttgtgcaaagtgagaaagatctttgtgggcacaaaaggaatccctcatctggtgactcatgatgcccgcaccatcc

SEQ ID NO: 10316 - DNA, 591 bp, Homo sapiens
  misc_feature (1)...(591): n = A,T,C or G
aatagaaccactgtccagngngnnncnnnnnccattaggatgactatgtcagagtggtggaattccaccgaagcgggagcggccaaaatgaagtttaatccctttgtgacttccgaccgaagcaagaatcgcaaaaggcatttcaatgcaccttcccacattcgaaggaagattatgtcttcccctctttccaaagagctgagacagaagtacaacgtgcgatccatgcccatccgaaaggatgatgaagttcaggttgtacgtggacactataaaggtcagcaaattggcaaagtagtccaggtttacaggaagaaatatgttatctacattgaacgggtgcagcgggaaaaggctaatggcacaactgtccacgtaggcattcaccccagcaaggtggttatcactaggctaaaactggacaaagaccgcaaaaagatcctcgaacggaaagccaaatctcgccaagtaggaaaggaaaagggcaaatacaaggaagaaaccattgagaagatgcaggaataaaggaatcttatatacaagctttgattaanacttggaacanagaaaaaaaaaaaaaaaaagagccgg

SEQ ID NO: 10317 - DNA, 490 bp, Homo sapiens
  misc_feature (1)...(490): n = A,T,C or G
catcgacacccttantgagnaccntcggacangcggnggaattcgccagggtagggctgataaggcgctgatgcgttgatggcagccttgcagagctagacctgcacttaacttgcagctgcctcccgagcctcccaagatgtccacgccctgggtgacaggcggcagggcgctgccccgtgctcccccggctctgctcgacagcagcacgcagtgagagcctcgccgccgccgaggagcaactcatgtaacggcacagccaacaagatgaacggagctttggatcactcagaccaaccagacccagatgccattaagatgtttgtcggacagatcccccggtcatggtcggaaaaggagctgaaagaactttttgagccttacggagccgtctaccagatcaacgtcctccgggaccggagtcagaaccctccgcagagtaaagggtgttgtttcgtaacattttatacaagaaaagctgcacttgagg

SEQ ID NO: 10318 - DNA, 581 bp, Homo sapiens
  misc_feature (1)...(581): n = A,T,C or G
naatagaatcacctgtccagagaggngcaattcccatagtgacgcgctgccaagatgaagtttaatccctttgtgacttccgaccgaagcaagaatcgcaaaatgcatttcaatgcaccttcccacattcgaaggaagattatgtcttcccctctttccaaagagctgagacagaagtacaacgtgcgatccatgcccatccgaaaggatgatgaagttcaggttgtacgtggacactataaaggtcagcaaattggcaaagtagtccaggtttacaggaagaaatatgttatctacattgaacgggtgcagcgggaaaaggctaatggcacaactgtccacgtaggcattcaccccagcaaggtggttatcactaggctaaaactggacaaagaccgcaaaaagatcctcgaacggaaagccaaatctcgccaagtaggaaaggaaaagggcatatacaaggaagaaaccattgagaagatgcaggantaaagtaatcttatatcccagctttgattaaacttgaaacanagaanaaaaaaaaaaaaaagcggccgttcgagttagagggcccgttaacn

SEQ ID NO: 10319 - DNA, 593 bp, Homo sapiens
  misc_feature (1)...(593): n = A,T,C or G
caataggaancactnctncagngnggngcannnnccnaatagtatcccctattccgagaggacgaattcagaaaaataagcgattgaacactagttctttatggtcatgttaatattattcctttgatcagaatgctactattatgttatcaaaggatggttgacacagtatcatctttagatttttctaaactgcagagctttttctgttctatcttaaccctattccttcccctgaggacataccagagtgtcagaaagaaagaatgagaactaacagttatacccttaaaaagcttcacagtttatgcccaaacagcagcctgtttgataataactgctttaaaggatagtatattccaaaatatttatgaagtagcatatatttaatacccttttcttttagtttttcctccaaaaagctgaaatctccaaatatttcaaaagtaaaaagtagaaaatatgtttgattacatttttcttttagttgttccaaacatgagagaatatactccaaaagtataactgtagctaaaatatacaatgcttagaggaatatggtaggagataaatttggatataagtaaataccn

SEQ ID NO: 10320 - DNA, 475 bp, Homo sapiens
  misc_feature (1)...(475): n = A,T,C or G
aactgtaccctcgcangncgactgatatcatngtagaancacaactctaagaagataaggattttgtctgcttcatttattactgtattcccagctcctaaaagagtgtccagcacttagtatctgttggtaagtacctgttgaattaattaaccagtggtgagactttggaaagcagctagtccatctgtaagattgttttctcatctgtgagatgagtcagtcagattagatgttttctaagcttattctagttttaaaattgtatatttctataagaaatgataaatgaaaaatgtccattcctttttcatctccatcacccatctcacatcttccttcagtgcctatgtgatctgtttgagtataaccaggtgtacaaaagtactaagtgatatgagatgacttcagtagtccagggactctttcttcccccactctgtaaagagttatttgcttaatttaatgtacatta

SEQ ID NO: 10321 - DNA, 484 bp, Homo sapiens
  misc_feature (1)...(484): n = A,T,C or G
aatgatgacttcggannnccactgatacccctcggaagngccgcggaantcgggcaggggtgttaggggtggtacgggtgtttgaaggggacatggcatccctgggagtggtttgggaggaagggagctggggcttcgaggggacctgcacattcagtcctgtgctgggtgctggagactcgtccctccccactgccccctctgcccatcctcagtgctatgtggctatggctcctcggagactgtcctctgcctaccactcccaggtgctgtagactagcattggtggcaaagatgaaattaaacaggggcttcggacacctggagtcagtcaccaaaatgccctgaacccaaggtgtctcatctgtaaatgggattcgtaatccttgcagtgcttggtaggggacaaagaggattcattcaaaccctaggacagattcagggtaggccagctgatcgctccctcctagccccagaggggtgn

SEQ ID NO: 10322 - DNA, 502 bp, Homo sapiens
  misc_feature (1)...(502): n = A,T,C or G
ggtntnnnnnnnnaataagacatcgtaggacagcgcgnggaattcggatatttcagtgtcatggacttcctcaaaatgaagtgctattttcttatttttattcttataactagacatatatcagaaactttaaaatgtaaaagttgtacactttcaacattttattacgattattattcagcagcacattctgaggggggaacaattcacaccaccaataataacctggtaagatttcaggaggtaaagaaggtggaataattgacggggagatagcgcctgaaataaacaaaatatgggcatgcatgctaaagggaaaatgtgtgcaggtctactgcattaaatcctgtgtgctcctcttttggatttacagaaatgtgtcaaatgtaaatctttcaaagccatttaaaaatattcactttagttctctgtgaagaagaggagaaaagcaatcctcctgattgtattgttttaaactttaagaatttatcaaaatgccggt

SEQ ID NO: 10323 - DNA, 459 bp, Homo sapiens
  misc_feature (1)...(459): n = A,T,C or G
nattgaaatcgattaccatctagccagggcggtgcaaggcggaacctcaacacctagtgaggggtggctgattaataccacggctcacaacataacagagcggctcattccatgaacaaccccggggggatttcgaattctatcatctgggcaaaagatgtgatgagtgtaacttcctgttttctccaaactaaaacactacgcagattcctgtaccgctctgggacagaaatcctcagccagagcagaggccgtccccagagtccacactgtttcctgcataaagtgggttatctcagaagaaacatcccactggtctgtgtgatccttctattgaaatgtggtcttttatctacatctaagtatctctagaagtaatgcgtttgtatgtacttgtcactcagatatgtaatcccttaatttgtgcgggttttggggtgtaaaaattcttgtttatat

SEQ ID NO: 10324 - DNA, 486 bp, Homo sapiens
  misc_feature (1)...(486): n = A,T,C or G
aggacgggcccggnnaggaataanttagtnaccttaggctagncngctncgnagnagncgnggaannnaattngntcatcttccgtctgcatcttcatggaactcagggtcacagtcacgtggggaaggaagtggacaggcacgcggcctctctctgcagcttcgcggaacccaggttcacagttgcgtggaaaggaagtggagtggacacacggcctctcgagtccacacccactcaccgtccttgctgctgttttgcaacccgcttgatgattggtctagaagttttgagactgaggtaagttcttagcctcagattccatcttatttaaagttagaatgaatatttgtccctccttttctttgggcctcttctgggctttggtgtccgcgaattctcagctatcacctgcagttcacagttcgttctctgtcctgactcctttgtaacctgggaggcagtctgcttgggctcaggtctctgaa

SEQ ID NO: 10325 - DNA, 489 bp, Homo sapiens
  misc_feature (1)...(489): n = A,T,C or G
ntttggagatcactgtccanngcgnggaatattggaagaccatgggtaggtgtggctttgcctggggctgtggcagagaggagagacatgcagttatcaaaagagtcagctgcactgtccttttagctttgccctgtggacactggaactcagctatttggagtttccaacatctctcacatcaggtccaaggagaacctttcccttagtttcctcagctgcagaatgggctgctgacttctcagggactttgagggaataactttcatttcattcacccagcagtgccctcatgtttactgttttcaatgagtaacagttgtctccattagtttgtgtttgttgttttgtaattctgccttttttttttcctctctctctatccctactccaaacaggaacccggttggctggcattgctttcttagaaacacttggaggagtcactgcaggttctacttttaatggatttactcacccactgtggtg

SEQ ID NO: 10326 - DNA, 508 bp, Homo sapiens
  misc_feature (1)...(508): n = A,T,C or G
nattcggagaccctacganagngcgcgnggnanaattgatgnaccatctagtccgtgcggtggaattcttttcactaaataatagcaaaaagctaaagccaattcaaatactttcaaatccactgtctacatacaatcagcaactatggctgacatgtgttgttgagttggatcaatcaaaagaaacttctattaagacaagctttcccatgactgttaaagtcgatggtgtagctcaagatggaaccacgatgtacattcataacaaagttcacaaccggacaaggaccctcacatgtgcagggaaatgtgcggagattattgtggctcaccttggctacctgaactacactcagtatacagtgatagtgggatttgaacacctgaagctccccatcaagggaatgaacttcacaatccgttcttccccctctccttcctggtcaacagctggctcccagggatgctggatgacctctttcagtccatgttcctgtgcgccctgctg

SEQ ID NO: 10327 - DNA, 488 bp, Homo sapiens
  misc_feature (1)...(488): n = A,T,C or G
agtagggatnaccctccgaannncctcacgatactcctcggaagngccgnggaantcggcagggcaaatatccaagaagaggaagtttgtcgctgatggcatcttcaaagctgaactgaatgagtttcttactcgggagctggctgaagatggctactctggagttgaggtgcgagttacaccaaccaggacagaaatcattatcttagccaccagaacacagaatgttcttggtgagaagggccggcggattcgggaactgactgctgtagttcagaagaggtttggctttccagagggcagtgtatagctttatgctgaaaaggtggccactagaggtctgtgtgccattgcccaggcagagtctctgcgttacaaactcctaggagggcttgctgtgcggagggcctgctatggtgtgctgcggttcatcatggagagtggggccaaaggctgtgaggttgtggtgtctgggaaactccgaggac

SEQ ID NO: 10328 - DNA, 459 bp, Homo sapiens
  misc_feature (1)...(459): n = A,T,C or G
agcaacactgatacctaggacagctgatggccntcgtaaacccacctcagactgaaaatatctttttaaaatggatagttgcatctttaccaaacatgtacagacattttttctcctgtcattattcccaaaacaatacatggtaacaactacttacctagcatttccattgcattagctattacaagtaatctagaagtgatttaaagaataggggagaatgtgcttaggttttatgcaaattctgtgccatttcatataagtgactcaagcgtccgtgaattttggtagcctgggagtgtgggggaggggtcctggaaccagtcccccacgggtaccaagggatgactgtatatttatatttactttttaatctgaaaaaggacagaattaagttttgctaacatctattatattattacttaggttcacatatatacttcgtacataagttaattc

SEQ ID NO: 10329 - DNA, 443 bp, Homo sapiens
  misc_feature (1)...(443): n = A,T,C or G
gggacnnnatcgancccattgtagacatctgtccgngcggnggaattcgacggcccaggccctggttctctgcccagcgaagcaggagtagctgccgggccccacgagcctccatccgttctggttcgggtttctccgagttttgctaccagccgaggctgtgcgggcaactgggtcagcctcccgtcaggagagaagccgcgtctgtgggacgaagaccgggcacccgccagagaggggaaggtaccaggttgcgtcctttcaggccccgcgttgttacaggacactcgctgggggccctgtgcccttgccggcggcaggttgcagccaccgcggcccaatgtcaccttcactcacagtctgagttcttgtccgcctgtcacgccctcaccaccctccccttccagccaccaccctttccgttccgctcgggccttcccaga

SEQ ID NO: 10330 - DNA, 473 bp, Homo sapiens
  misc_feature (1)...(473): n = A,T,C or G
gcaatggccncggttggcacaaccttgaaaccncctagntggctnagcagaagctgcgnaannncggagggccccctaatacccagtggagtctggttcacaccctggggggtgtgtcactgtgatgggacacgtaggagtccacccttaaaagcagcaccctgtccctcgaggctgccgagtgggtgtgtggactggggtgccttcccacaaaactagcctccggctctgggcccgagacagccgcaggccccagccactgaatgatactggcagcggctggggttttatgaactcctttctggtattttttcccctctatgtacaaatgtatatgttacgtctcaatttttgtgcttaagtaaaaataaaaacattttcagacaaaaaaaaaaaaaaaaaaggggccgttcgaataaaaaggccccgttaaaccccgttgacaaacctcgagggggctttttaagtgcaag

SEQ ID NO: 10331 - DNA, 458 bp, Homo sapiens
  misc_feature (1)...(458): n = A,T,C or G
actcgatgacccctangttagaagcgccgtgaataannacagtaaaatctccaagatgtcctatattagagatacctgattaattttgtttatcataggatttcctgaatttattgaagccccaaacactttttgccagcatgctattgatatcacaagaagcagtattccatggaacacccactggggaagcactggattaaataatctctaaatttacttccagtgcaaaattctgtaactcaaaaacaagacatcctcactccatttttacattggtcactccctcaacaagaattgttaaagatattggatactcagggctgcattaggcattatggatatgggggtaaaaaggcaggagacaagtaccatataggcaattactatttaattattttatgtttatagtaaagcaaaagcaaaatacaaataaattgcattttattataagaaag

SEQ ID NO: 10332 - DNA, 483 bp, Homo sapiens
  misc_feature (1)...(483): n = A,T,C or G
gggaggggcccngnnnagggataancctagggngcttcgactngngactatcgnaggagcggggccccagngttggagcctcaggaagaaccagcaaaagacagtccaacgagacttatcgagatgctgttcgaagagtcatgtttgctcgatatagagaactcgattaagaaaggagacaagttccatgggatacaacctccctcttgttttgtttgtctctccttttcttttgttactgttcttgctgctagaacttttttaaataaactttttttcaatgtgagaaaaaaaaaaaaaaaaaaaaaaaaaaaaaaaaaaaaaaanngggccccttaaatttagggggccctttaaaacccggggaaaaacccccggggggtctttttattgccccccctttggggggcgcccccccccgggggttttttttgcccgggggggggcccccccccggggttttttttaaaaaaagggggaaaa

SEQ ID NO: 10333 - DNA, 470 bp, Homo sapiens
  misc_feature (1)...(470): n = A,T,C or G
gagcgggnnnnnnnnntattgaatagcgtaccntagtgccgaggcatgcagaaagccaatatggctcacttactttgccatttttaagttgtctttttattaatgatttgtagaaaaactatatgtcctggatagaagtcacttgtcaggtatgcatatagtacaaataatttttttctgtctctggctttttatttttttgatatttatttacttatttagagacttcgctctgttgccaggctggagagcagtggcgccatctcggctcactgcaagctctgcctcccatgttgaagcgattctcctgcctcagcctcccgagtagctgggactacaggcatctgccaccatgcccagctaaagatttttggttttggttttgcattttttgtattattagtagagacagggtttctccatgttggccaagatggtctcgatctcctgacttcatgatcccgccacct

SEQ ID NO: 10334 - DNA, 469 bp, Homo sapiens
  misc_feature (1)...(469): n = A,T,C or G
cttgaccccctcnnatttgagagccctaggccanngcgnggaattcattctttcacagaagataagaacattgaaaaaccacaagtgccatttgatgcaatagaaaataaaaaagctggagttccacaaattaaaaatgaaaataaagaaatacattgcagtgatgatgaaaacacaccatgtcatatcaagcagatcttcacacatccacatttggaactaaatcctgactttcatccaaagatcaaagattattactgtgaagtcccatttgatgtggtaacagtgacaattggagtggaaactcctaagtgtctgtgcaaggtgcacctgtacgagcaggcagggccaagctttgccagctaccctctgggcttaggaatgaacaaaatctcaatatttgttgtggatgaatctccagcacacggtgagactctgatcacgtacaaactcaccatctatagagaag

SEQ ID NO: 10335 - DNA, 486 bp, Homo sapiens
  misc_feature (1)...(486): n = A,T,C or G
cgtagtggccannnnaggattaaccctgggacctcnggcctacncngctncgnaganccnggaanngngaannnntgngaaaaatcagaacagggagtaatatgatcccaggtgattggcagggggtgggggtctggattcaactggagagggagctggcagggaaggcttcctggaggatgagagttcaacaaggggcaggtgtaggatgtgggtggccaagtgactgggcagaaggagctgcagaagtaagaccccaaatcaggaagacaagggcctgctgagaaacacgagctacaaagtgcaagtgcaggaagagttgggatgagattagaagggggtctggggccagactgtggaaggcccaaatgccgggctaaggagtttgtacttaattcagtggtcaacggggagtcattggaggctgttgagcaggagagttgctttccttacagctgtgccagactaaattaaacctaaacagtn

SEQ ID NO: 10336 - DNA, 442 bp, Homo sapiens
  misc_feature (1)...(442): n = A,T,C or G
nttgtagatccctagtctagtgtggcggaattccctgaagctgtccctacctttggaagcagaccagtgtgctgggcctgttttactctggcaccagagacccagactctccatcaccccatgagcataccctctctactttattaaccagaaggcctggaaatgcccaatatacccagagaaggaaactggaacagaggtctccggggtcccttgccctggagcaactctactttaggggtcattttggtccagctcaggaagcacagccctcctccaccccctcccccagcagaggggctgggaagatatggcctccctttgtcccttttggcccacaggattcctagctcacctctcctctactccagatctgtcactctgtcttggacatctaaactcaacctggcctctccaaagaggggtcaccaaagacactatg

SEQ ID NO: 10337 - DNA, 426 bp, Homo sapiens
  misc_feature (1)...(426): n = A,T,C or G
cacctacttgagactcaccaatttctggcctgttcaggagcctcagataagtatttgtacttgagaccacctcacacaatctgtatgggcccaaccctgatctcaaacctccttccctctgcccaaagctgtccttcctatggcaggaggggtgggggtcccaggacgtgcctcatacatgacttgagcttgtcagtccactgagtttccttctacaagatcaacgcgaggggcctgtatcttgaattaaaacctactcgcttcttttcnnaanaaaaaaaaaaaaaaaaaaaaaaaaaaaaaaaaaaaaaaaaaaaaaaaaaaaaaaaaaaaaaaaaaaaaaaaaaaaaaaaaaaaaaaaaaaaaaaaaaaaaaaaaaaaaaaaaaaaannaaaaaaaanncccccnnttataaaataaccccca

SEQ ID NO: 10338 - DNA, 464 bp, Homo sapiens
  misc_feature (1)...(464): n = A,T,C or G
ggaagtgaactgatncccctntttgtagtccttagtaagtgcggtggaattcgccagagaacttaaagtcttagaatggaaaaagtaaagaaatatctacttccaagttgtcaagtaactcccaatgatttagtttttttccccccagtttgaattgggaagctgggggaagttaaatatgagccactgggtgtaccagtgcattaatttgggcaaggaaagtgtcataatttgatactgtatctgttttccttcaaagtatagagcttttggggaaggaaagtattgaactgggggttggtctggcctactgggctgacattaactacaattatgggaaatgcaaaagttgtttggatatggtagtgtgtggttctcttttggaatttttttcaggtgatttaataataatttaaaactactatagaaactgcagagcaaaggaagtggcttaatgatcctgn

SEQ ID NO: 10339 - DNA, 469 bp, Homo sapiens
  misc_feature (1)...(469): n = A,T,C or G
ngaggccgtcctcttttcccggaaagtccagancgtcgnngcattnntgttatnngacagtccatgaacactgggaacccttccccgagaaaacaaatggacacattcaatattgcctaaaaattcagactggtaggaaacccaggttagtacttacttggcctaagtccagggagagcttacacttaatgttgggaaagaattcttaagggtaaggtgagagcgtgtttctgggtcttgcaatatttattctgctttcgggtagatgggaggcccggggacctggctgggtttctgccaagcttctccgatacccaggtttcataaatgtgtttgttgctttcctgcccttgccacccctctgcccacggacagtccatgtggattgagagaacctccttcgtgactgcatacaagctgccggggatcctgcgctggtttgagggtgtgcacatgtcgcagaccacan

SEQ ID NO: 10340 - DNA, 472 bp, Homo sapiens
  misc_feature (1)...(472): n = A,T,C or G
nggcgcgcgngnnnnttattgatagcgtaccctatgcagngncgtggaattctctactagcacaccaacgtgatcgtcatgggaagtaaagaagatgtctccgggacgccatgtgattccaagtccatcaacagatagaataaatgtaacatcaaatgctcgacgaagcttaaattttggaggttcaactggcacagtgccagctcctcgtctggctcccacaggtgtcagttgggctgacaaggtaaaggctcatcatacaggctctactgcttcttcagaaataacacccgcccagtcttgcccaccaatgacagtgcagaaggcctcacgcaaaaatgaacggaaagatgctgaaggatgggagaccgttcagagaggaaggcctattcgttctcgatcaacagcagtgatgccaaaagtttcattggcaacagaagccacaagatcaaaggatgacagtgataaagaa

SEQ ID NO: 10341 - DNA, 485 bp, Homo sapiens
  misc_feature (1)...(485): n = A,T,C or G
actactgacngtccgnanantcctattacctcggaangncgcnnngnggaanggngcggcaggactccgcactatgagcggtttcagcaccgaggagcgtgccgcgcccttctccctggagtaccgagccttcctcataaatgagaaaggacaatatatatctccatttcatgatattccaatttatgcagataaggatgtgtttcacatggtagttgaagtaccacgctggtctaatgcaaaaatggagattgctacaaaggaccctttataccctattaaacaagatgtgaaaaaaggaaaacttcgctatgttgcgaatttgttccccgataaaggatatatctggaactatggtgccattcctcagacttgggaagacccagggcccaatgattaacatactggctggtgtggtgacaatgacccaattgatgtgtgtgaaattggaagcaaggtatgtgcaacaggtgaaataattggcg

SEQ ID NO: 10342 - DNA, 452 bp, Homo sapiens
  misc_feature (1)...(452): n = A,T,C or G
accgaagacctttagtcacngtggtggaattcggctggtctcgaattcctgatctcatgatctgcccgcctcggcctcccaaagtgctgagattacaggcatgacccactgtgcccggccttacgttttaggtttacttcagtaaattaatagaggattaagtgtggatcattgtgttatatacatgccactgtgctggatgttacaaggaacacaagacctacttattattcttgctgcctgccaggatcacaatcatagaaagtagctgatgaataagaatatggtggaatcaatggattctttgccttagttcagcaaaatctatagtatggccactatggacaaattgaagccacattccttccagctattaccactgagaaagagacacttaaaacaagaaagctaactagttgttaagtaatcttgaagaacaattttttattttn

SEQ ID NO: 10343 - DNA, 479 bp, Homo sapiens
  misc_feature (1)...(479): n = A,T,C or G
cctagaaaactgagagccntagcnagngngcnggaattcaccatcctgaagatgatcgaggaggcaggcgccatcatcagcacccggcattgctacagccagaacggggagcgctgtgtggccgccctggctcgtgtcgagcgcaccgacttcctgtctcccatgtgcatcggtgaggtggcgcatgtcagcgcggagatcacctacacctccaagcactctgtggaggtgcaggtcaacgtgatgtccgaaaacatcctcacaggtgccaaaaagctgaccaataaggccaccctgtggtatgtgcccctgtcgctgaagaatgtggacaaggtcctcgaggtgcctcctgttgtgtattcccggcaggagcaggaggaggagggccggaagcggtatgaagcccagaagctggagcgcatggagaccaagtggaggaacggngacatcgtccagccagtcctcaacccagagccgaa

SEQ ID NO: 10344 - DNA, 545 bp, Homo sapiens
  misc_feature (1)...(545): n = A,T,C or G
aggaaaaanaattgaccatcatctgtgtggngcaattcanaccactctgattatcatgagatacctctttgccttcctcaatcatttatcacagttcagtgaagagaacatgatggacccctacaacctcgccatctgcttcgggccctcgctaatgtcagtgccagagggccacgaccaggtgtcctgccaagcccacgtgaatgagctgatcaaaaccatcatcatccagcatgagaacatcttcccaagccccagggagctggagggccctgtctacagcagaggaggaagcatggaggattactgtgatagccctcatggagagactacctcggttgaagactcaacccaggatgtgaccgcagagcaccacacgagcgatgacgaatgtgagcccatcgaggccattgccaagtttgactacgtgggccggacagcccgagagctgtcctttaagaagggagcatccctgctgctttaccagcgggcttccgacgactggtgggaaggccggcacaatggcatcgacggactcatccccn

SEQ ID NO: 10345 - DNA, 473 bp, Homo sapiens
  misc_feature (1)...(473): n = A,T,C or G
nattgatagcgtacactaggccagngncgtggaattcgaggattacaccaacgcttccacaatgaaccttcttgcttgccatgtacagtttgttgatcatatcaaaaacataaaagttgctgcaccatgactcacagacacactgtgttgacgcaaagaagggaccttccggaatgaaaactctccagagatgagccgaaagtgtagcatgggccctagaggggaaattcaattcaggaattgtacgtcctgggatgatatccagtgtgttgaagaatttggtgccaatgccactgtggaaaccccagctgctgaagagacaatgaacaccagcccggggactcctgccccagctgctgaagagacaatgaacaccagcccagggactcctgccccagctgctgaagagacaatgaccaccagcccggtgactcctgccccagctgctgaagagacaatgaccaccagcccag

SEQ ID NO: 10346 - DNA, 463 bp, Homo sapiens
  misc_feature (1)...(463): n = A,T,C or G
tttagattcanncccatttgagaccatagtacagngcggnggaattcgtgttggtcagagccacctgtatagaaatggcgacatcactggcatatactcatcatgggcgacaatatcttgctcaagaaggagtaattgaccaaatttctaatataattgttggggcagattcagaccctttctctagcttctatctgccaggattcgtgaagttttttggaaacctggctgtcatggatagtcctcaacagatctgtgagcgttatcctatctttgtggaaaaagtctttgaaatgatagaaagtcaggaccccactatgattggtgtagctgtagacacagttggaatcttgggatccaatgttgaaggaaaacaggttttacagaaaacaggaactcgctttgaacgcttgcttatgagaataggacatcaatcaaagaatgccccagtggagctaaaaat

SEQ ID NO: 10347 - DNA, 465 bp, Homo sapiens
  misc_feature (1)...(465): n = A,T,C or G
cttcgacccttnnaatggagaccctagtccgtgtcgtggaattcaacatggttagttgctagtacaaggaatcctttattggtaacatcttggtggctggctagctagtttctacagaacataatttgcctctatagaaggctattcttagatcatgtctcaatggaaacactcttctttcttagccttacttgaatcttgcctataataaagtagagcaacacacattgaaagcttctgatcaacggtcctgaaattttcatcttgaatgtctttgtattaaactgaattttcttttaagctaacaaagatcataattttccatgattagccgtgtaactcctgcaatgaatgtttatgtgattgaagcaaatgtgaatcgtattattttaaaaagtggcagagtgacttaactgatcatgcatgatccctcatccctgaaattgagtttatgtagtcattttn

SEQ ID NO: 10348 - DNA, 462 bp, Homo sapiens
  misc_feature (1)...(462): n = A,T,C or G
gaaagaaacctgagaccctngttgtagacactaggcagtgcggtggaattcgcagggtgtgcaaaatggtgattttcctattcaatcatttcttctacgttagctggtattcctctctaaatatacccctccccttttagtatcattatggattcatggattgagccttctttccttccttccttcccttccttccttccttccttccttacttacttacttacttncttccttccttccttctttccttacatccgttattaatccattaccttcattgttctttttggttttcaaattgtcccaattttggacataagagcccatttaagctgacatggacctaacagaatttccaaactcaccttttctttcctgtgtgggtattattgactttcaaaggcttgggatttccctctagcctgcatctacttgttctgtgaaatttaggtaggttataan

SEQ ID NO: 10349 - DNA, 445 bp, Homo sapiens
  misc_feature (1)...(445): n = A,T,C or G
nctcgagacccctgtctgggtggcggaattcgcgagcgctctggcccaggctgggccagactcccgcccaagcatgaacaggacttgaccatctttccaacccctggggaagacatttgcaactgacttggggaggacacagcttcagcacagcctctcctgcgggccagcccgctgcgaaccctccaccagctaccggagggaggagggaggatgcgctgtggggttgtttttgccataagcgaactttgtgcctgtcctagaagtgaaaattgttcagtccaagaaactgatgttatttgatttatttaaaggctaaaatttgtttttttattctttgcacaattgtttcattgtttgacacttaatgcactcgtcatttgcatacgacagtagcattctgaccacacttgtacgctgtaacctcatctacttctgatgtttt

SEQ ID NO: 10350 - DNA, 470 bp, Homo sapiens
  misc_feature (1)...(470): n = A,T,C or G
ctcgaccccntngnnnnattgatgtcccttagtccgtgcggtggaattcctggtgtaggctgcctcccccaagggcgcctcagtttccattaatgtcaacaccagccttgaagacatgaggagcaacaacgttgaggactgcaagatgatggtgagactggaggtgggaaaggaggtgacagctgtgagctgcagagatgcaggatccacatgtctcatgaggaatgccatggacccagcagctgtgggctcgagggtgttgcgccgatggcaggaggagtggggaggctgggtcagatattcttcagggagcgtcgtgatatgccacagaatctaggcttagattctcaggcctagatgaagaccttgaatttgtagatcccacaagacttcccccagagtctgctcatgggtagaggaaagggatggggtatatgggagaaaatcaaggggtcaaaggcaggcgtggt

SEQ ID NO: 10351 - DNA, 472 bp, Homo sapiens
  misc_feature (1)...(472): n = A,T,C or G
cggagganaccaggnaattaaaccttgagantcctaggctngagcggcgtaattagggactgttgagccaggacaacctcaccagcatgtccctctgacatgcccagggttctcatccacagcagctgggtcacctgatagggccgccctggacttggggtccctccacctgggggcccctggacactgtctacttggagaccactggcccccttcccccagggttgcccagatggggcctcctttgttctgcattcagcagctatttatcgagtacctactctgtcaggcactgtcataggcgtggggcaaagcaggaaccaagagacgaggttccctgatctcatgggacttaggttctggtgaagggagacaatcagtgcacatgcacacaccccacacgcatacacacatgaacacatgcacatgtgcacacacaagtaagatggcttcagagagggagaagcactgt

SEQ ID NO: 10352 - DNA, 468 bp, Homo sapiens
  misc_feature (1)...(468): n = A,T,C or G
aggcttacccntttttgagacccctttgatggcgtggaanacgacncactntanaaatattgccttgaaaatcacacctggaatggaagcacgtgggattcaatgtttattggcctaaaacatcaatgtatgtgagcatctcatctcctagtgagaaatgaggaaaaatacctctgggttaaatggcaggaatgagatgctctgtggactgaatgccaggaactggaagtttgccgaaatttcatcatcacatgagaaccttcctagaatagatccagtgtccctgccccctgggtcataggtagcggaattcagttaatccttggcattggcatagagaaacaagttactggggaggcctggggcatggcatccctgccagctggcaggaggaggtggcttgtgtgccttgcaggtgacaatgtgggcagctcatgaacgtaggcttgaagccccaggcaagcccag

SEQ ID NO: 10353 - DNA, 461 bp, Homo sapiens
  misc_feature (1)...(461): n = A,T,C or G
catcgacgaccctaatgagngcgctggaattcgttctttttgcaattccatgttaataaagacaaatactagcaattgcttgaattttaatgaatatttaaaagttcaagagccacgggaatcacttacagagataagagttccctttctaaatagaacacatttttaaaaaataagttatgtttgctactaaaacatttacactgttagactattatgcgcatgttgccaagactcttaagtaacttggatatcaactgtgaagggcctacctctaaaaagtaacaggtcatacaaatacaaatgtaactgtagaaattccactggattcttgcatatttgcaagagtagattattcaaaagaaatttcagtgctaaaattaaccagcaacataggttctatgggctttgaaaattgctctcatctttttaaagatgatgcattatccatcctgcttaca

SEQ ID NO: 10354 - DNA, 499 bp, Homo sapiens
  misc_feature (1)...(499): n = A,T,C or G
aggccggcnnnnnnncaatgactgcatacttcgtgcgggcaattcctcccagggcaaggagaaaggaccttacaaaattattgtattaaagtctgaaatgctttttaggatttacagcctaagtatgagcatggtgttcttgtaatagcaatccaaatctgttattttagttgttaagggagaaattctttaaaagtcttcaaagaaattagagataggcattaatttattaaacagtgataatagaggttattggaatctattttgggaaactttaagtcatttggtattgggaagagagtacttcaaggttaatttgtataaatttaattttgatataagaggctgtactctgtttgcactctataattaggaaggttactttcctgacttttgtatttctcaggaaaaaaaagaattggaagaaacttacgaggtctgttaatgccactacctacacgtgacatttaacatggcatggaagctatgctttgaataa

SEQ ID NO: 10355 - DNA, 505 bp, Homo sapiens
  misc_feature (1)...(505): n = A,T,C or G
ccgcccgccccatgagaaactgagaccctaggccangtcgtggaattctaagggaggtatctactcagagtattttggtcattatactttctgtgtttacttcaacatgtgtcacgtggccagcggctttttcttctcttccctctgcacctacctgcaccttctctgcctttcctggaggggatgtatttatgttatttattcccagtgtttctgctttcatgtcctcctcagtggagagatttggaaactcatcatgtggattcaccagccagctgctggaattgcctgaagagcgatttgtttgtaatgtctgcctcattcacgttcttatgaagtagaaaagactgtgtttctgcctcagttgcctctgtctttcccacattaaaaaaaaaaaatgctgtgagaaagctgctcccaaccatggttatcacagaagtagattattttaactcagagcttcaacgatcagtgcctggatcatttagaattcagttggagcctn

SEQ ID NO: 10356 - DNA, 469 bp, Homo sapiens
  misc_feature (1)...(469): n = A,T,C or G
gaaaataaacattgatancctttgctttgactgccattaagttaccgtatgtctttcacgagtgtgtgacatgaggattgaatagacagaattgcttgttagaaagaggaactaatttttgtatctattacaaattatatttgtaattcttccctaattataaattatcatgattatttttatttgggaaataccaaaaaatcataaataactaatctaaacttacagaatcctatcatccaaaaatggccattaatgacagtttgatagatttattgcagtttttttgtatccatttatctttcttgttcattttttcttctttcctaacaaattgaagtaatgccataaattctgtttcatactttgctttatgtacccttacagcatgaacatttttcatatctttattgcccaaacataattttaatgtatattaaatagttcatcatttgaatgatctatactt

SEQ ID NO: 10357 - DNA, 477 bp, Homo sapiens
  misc_feature (1)...(477): n = A,T,C or G
agaaaaaaaatttgataccctannnactgattgcctattccatgtgcnggaattcggaaagtgaagaagttgcaacagagttttgggctcacaccattgatacatttgatccttaaggcccaccccgcctcactcccaccctcttctacttaattcaggatgtgaatagcacatgccttccatcttcagacaaacactgaggcctggacaatgacctgcattaggtagatagaatctactgaaagctaaaagccttttcctgtgtcttagcagcacggaagccacgcctccttccccccaatgtttgtgcaaaccctagagaagaggagacagcccctatgatgtgtgaggttgaatttcctgccctcaacccatcaaatcaggcagaatgagggctcagtcagaactacaactacaaaagagaaaaattttaatgtgacttttcttgtctgctcagatttttgggttaaggttcat

SEQ ID NO: 10358 - DNA, 472 bp, Homo sapiens
  misc_feature (1)...(472): n = A,T,C or G
gcccccattgagaccattgnnnaatgtagacctattgaccgtgtggaggaattcggtaactcagcagcaatgtcaccttgtagcctatgcgctcaatggcccggaggggcagcaaccccccgcacacgtcagccaacagcagtgcctctgcaggcaccaagagagcgatgatggacttgagcgccgtgttcttcagcctcagctggaaggggaaaagtcagggccttcccggcgggggggaaggaggtgggcatcgggggcatggggcctggcctctggccgtgcatcctcactcccacccgcctccagcagccctctgtcggcctcctcccgacttgactcaccgtcacctggaagcagggcaccagctgctggggtgggacttgggtcttcagatcataaactacgtattccctcttgacactcacaatctcgttcaccacgtgggcctggaactctaactccatcgctg

SEQ ID NO: 10359 - DNA, 480 bp, Homo sapiens
  misc_feature (1)...(480): n = A,T,C or G
gccccccccgcnnnnnnnatcgagatccctagttagagtgctggaattcgtcaccaggcctgactgcatgtgtgacacctttgaccagtgcgccgagaacattatcaaaaagatcctggagtatcagagccaggcaaataagtaccacaactcctgcctcatagaattacggatccagatcaggagatttgaggagctgctgccccaagtgtgttggctggtgatggagaatttcaaggaacaccactggaaaaagtttttcacctctgtgaaggagatccgaggacagttcgaggaacagcagaagcggctggagaaaagaaaggacaaaaatgcccagaagctccatctaaatcttggacaccccgtacatttccaagaaatggagtctctacacttaagtgaagaggaaaggcaggaagagctggacagcatgattaggatgaacaaggagaagctggaggaatgtaccagaaggaa

SEQ ID NO: 10360 - DNA, 473 bp, Homo sapiens
  misc_feature (1)...(473): n = A,T,C or G
atcgagcgccctngnnnnnattgatgacccttagtccatgcggtggaattcgataaatagcactggcctctggagcttctagaacaaacttttgtggtaaaaggccagaaaggaaatatgtaaatatattttggctctccatcatatcgagaaagcagccacagatgctatgtaaatgaatgggtgttggttgtgttccaataaaactttatagacactggaatgtgaatttcacataattttcatatgccatgaaacattattattcttttgattttttccaacaacttaaaaatgttaaaaaacattcttagctcaacagctgtacagaaacaggcagtgggccatggtttgcagcctcctgtttagaagccgcctctgcagtggagggtgagtcttgcaggtttgagctagtcactcttctaagcatttcagttcttaagggcgtaggtctggccgggcacagtggctca

SEQ ID NO: 10361 - DNA, 465 bp, Homo sapiens
  misc_feature (1)...(465): n = A,T,C or G
aatcgangacccctagtccgtttagggcaattctggtcttgaactcctgatctcaggtgatccatccgcctcggcctcccaaagtgctgggattataggcgtgagccactatgcctggcctcctgtttaagctacctagtatgtgttattttcttagggcagcccaagccaactatatgactccaaaattctaccccccacaagaaataaaacccaacagaaagatacgtaaagacttgtactcaaattttcatagcattattatttaaaaaggagaagcaacccagatgtccatcagctggtgagtggataaataaaatgttgtatgcctgtacaattgaatattggttggcaataaaaaggtatgaaatactgatatatgccacagtatagatgtaccttgaaaagataatgcgaaataaaagccaggcacaaaatagcacatggtgtataatttcttttttt

SEQ ID NO: 10362 - DNA, 451 bp, Homo sapiens
  misc_feature (1)...(451): n = A,T,C or G
ggtacggttgaggccctntnnnaactgatgtacctagtcagtgtcgtggaattcgcaaggctctcattggcctgctggtcatcgcagtggccattgccacgggcatcgtcatcagcctggtgatgctgaggaagaggcagggtggcaccatcagccacggtatcgtggaggatgatccattgctcaccccaaaagagcgtcacctgaacaagatgcagaaccatggctatgagaaccccacctacaaatacctggagcatatgcagatttatgtggcagggagcgcggcatccctggcggagggatgcaggtgggccggaagatcccacgattccgatcgactgccaagcagcagccgctgccaggggctgcggctgacatcctgacctgctggactgtaggactatataaagtactactgtagaactgcaatttccattcttttagatgg

SEQ ID NO: 10363 - DNA, 570 bp, Homo sapiens
  misc_feature (1)...(570): n = A,T,C or G
nattgatnccccntnnnnnnnnnatttgaacacctatccgtgtggtggaattcgcttgatggtcgaggccatctcctgggccgcctggcggccatcgtggctaaacaggtactgctgggccggaaggtggtggtcgtacgctgtgaaggcatcaacatttctggcaatttctacagaaacaagttgaagtacctggctttcctccgcaagcggatgaacaccaacccttcccgaggcccctaccacttccgggcccccagccgcatcttctggcggaccgtgcgaggtatgctgccccacaaaaccaagcgaggccaggccgctctggaccgtctcaaggtgtttgacggcatcccaccgccctacgacaagaaaaagcggatggtggttcctgctgccctcaaggtcgtgcgtctgaagcctacaagaaaggttgcctatctggggcgcctggctcacgaggttggctgaagtaccangcagtgacagccaccctggaggagaagaggaaagagaaagccaagatccactaccggaagaagaacagctcatgaggctacggaaacaggg

SEQ ID NO: 10364 - DNA, 459 bp, Homo sapiens
  misc_feature (1)...(459): n = A,T,C or G
tggggcnannnttcgagaattgtagacattagtccatgcggtggaattcggactgttacccatttttttggtgtgtttatggaagtgcatgtagagcgtcctgccctttgaaatcagactgggtgcgtgtcttccctggacatcactgcctctccagggcattctcaggcccgggggtctccttccctcaggcagctccagaggcgggttctgaagggtgctttcaaaacggggcacatctggctgggaagtcacatggactcttccagggagagagaccagctgaggcgtctctctctgaggttgcgttgggtctaagcgggtgtgtgctgggctccaaggaggaggagcttgctgggaaaagacaggagaagtactgactcaactgcactgaccatgttgtcataattagaacaaagaagaagtggtcggaaatgcacattcctggataggaatcac

SEQ ID NO: 10365 - DNA, 459 bp, Homo sapiens
  misc_feature (1)...(459): n = A,T,C or G
ggagaaaannttcgtagactctagtacgtgcggtggaattctttaaatattaagaattctgatttattgagattgaattatgccaccacgtttatgtaaaaatgaaggtggcaccgtggtgagacctaatgagaaatagttactcagttgtaaaaattttgatttattctctttcttctgacctccttgcctcttgtcttgaaccatagcaaaaggatactgcatctctcattactgtagtgctgaggttattgaagttatacaaaacacatctcagtctctgtttcttggaaaggtatctattacatcctgctagctgactgacaaaactaagcagggagaataaagataattgtattttatgttttgcacacaaacgcagaatttgtataaccatatgacttcatagttgtgatctcaaaaaagaaggaatttctcctttgtttcttgcagttaatg

SEQ ID NO: 10366 - DNA, 471 bp, Homo sapiens
  misc_feature (1)...(471): n = A,T,C or G
natcgaagacactagnacagatcgatggcattccgtcagncgcagcatcccagctcacttgcttaggttgtcttgagcttattgctaattacagacaagaatatgaagacatagctgtgaagctgggaactgatctagaatacctgaagaaagttcgtggcaaagtctggaagcaaagaatatctagccctctgttcaacaccaaacaatacacaatggaactagagcggctctatctacagatgtgggagcattatgcagctggcaacaaacctgaccacatgattaagcctgttgaagtcactgagtcagcataaataaagactgcacaggagaattacccctaataaaaaaaaaaaaaaaaaaataataatctacaaaaaaaaaataantntggggtgtttgagttaagaagggccccgtaccattcccatttttacccttgtttttccttgctttcacccccctttt

SEQ ID NO: 10367 - DNA, 565 bp, Homo sapiens
  misc_feature (1)...(565): n = A,T,C or G
naattgatcactgtccgngnggngctagtacgactgtaggattacatcgccttgaacgaggacctgcgctcttggaccgcggcggacatggcggctcagatcacccagcgcaagtgggatgcggcccgtgtggcggagcagttgagagcctacctggagggcacgtgcgtggagtggctccgcagatacctggagaacgggaaggagacgctgcagcgcacggacccccccaagacgcatatgactcaccacgctgtctctgaccatgaggccaccctgaggtgctgggccctgagcttctaccctgcggagatcacactgacctggcagcgggatggggaggaccagacccaggacacggagctcgtggagaccaggcctgcaggggatggaaccttccagaagtgggcgtctgtggtggtgccttctggacaggagcagagatacacctgccatgtgcagcatgagggtctccccaagcccctcaccctgagatgggagccgtcttcccagcccaccatccccatcgtgggcatcatttgctggctaggtctctttggagctn

SEQ ID NO: 10368 - DNA, 455 bp, Homo sapiens
  misc_feature (1)...(455): n = A,T,C or G
attgtagaccattgtacagcgcggtggaattcctgtttttctaccattcataatagttatcactgtatcctataacttactgtgatgtgatttttgctgctcggcctcctgagtagcggggagtacaggtgcctgctaccacatttggctgatttttgatattttcaggaaagacagggattcaccatcttggccaggctggactccaactcctgacctcttgatccacctgcctgggccttgcaaagtgccgggattacaggcctgagtcaccacgcccggccaggccaacagtttattaataaggtaaacggatatggacaagtataattaatagaaaatagcctaaactgtctcagatacttcctgtcttaatttgatcaaaaattgctaggaagcaaaaagaaacctgaccaactcctgaaccaaaccatattacttagggagtcctattn

SEQ ID NO: 10369 - DNA, 460 bp, Homo sapiens
  misc_feature (1)...(460): n = A,T,C or G
tgtggaacnnntttcgagactctagtccatgcggaggaattcctcaggaagctgaggcaagaggattgcttgagcccaggaatacaaggctgcagtaagctatgaactgcaccactgcactccagcctgggcaacagagtgagactctgtctctaaaaaataaaaattaaaaaaaaaaaaattaaggaaaaaggacagaaaatccaggcactggctgtgcaggggagctaacagctaagtttgatgttatgatgggttatgggtgaatgatgttagggcctgcctggtccttctcatcctgatggaccaacatgcattttattttgttttctgtttctttaaaatttaggatcttctatttatttttttctgttcccaatgtgcaccctttttgttcctttttcaattgttcctgtccttccctttggatttccgtttcacagacttcacttcagttctt

SEQ ID NO: 10370 - DNA, 463 bp, Homo sapiens
  misc_feature (1)...(463): n = A,T,C or G
gtcgtcacgngnnnntttgaattcgatancntagtcagngngcnggaattccgccgacccatcgcgttcaccacttttacccctctctccccactcctcttctccgaccctccgggaggccttccccacgggatcgtgggactttaccagatcggtttgtaataacacctcgaagacgctatccgatccatcaggcccagtattcctgtccgggggtacttcccacagtgtgctggaatggttatcacaagaaggctgtgctgtcccctcgcaactccaggatggtgtgtagcccagtgactctgaggatcgcccctcctgacagaagattttcgcgttctgcgatgtgagtattatcgttggaagaatactctcccttttcgtgtccactttattcttctccagttgttcctatgacaacatgactacaacgcaaaaaagaaaggacgaatctgcttgtttg

SEQ ID NO: 10371 - DNA, 465 bp, Homo sapiens
  misc_feature (1)...(465): n = A,T,C or G
ttaacattgattcccttcgcttggacgcattcgaaggagcctttcctaatggcatatatttttgtcactaaagcatttaggggacttttcttaaattttagctagaccttggaaacagtaagcaggtatagtaggaagaacaaggcctctggagccaaacttctggaatcaaagcatgagtctgtcacttactacgtgtgtgaccttgggcaagtaacttgctttttttgtgcctcagtttcctcatcacaaaaataaagataggccagttgcggtggctcatgcctgtaatcctagtactctgggaggccaaggcaggtggatcacccgaggtcagcagttcaagaccagcttggacaacatggcaaaaccccacctctaataaaaatacaaaaaattagcctagtgtagtggcacacacctgtaatcccagctgcttgggaggctgaggcacaagaatcgctn

SEQ ID NO: 10372 - DNA, 468 bp, Homo sapiens
  misc_feature (1)...(468): n = A,T,C or G
naagaagaccatctgncaaatgacgatcatctagtccgtgtggtggaattcgttttggggtggcgtattttggtcttatacgctgtgtttcactggcaatgaaaagagttcttgtttttccttcagcaatttgtcatttttaaaagagtttagcaattctaacagatatagaccagctgtgctatctcattgtggttttcaattgtaaccacattgtggtttcagtgtgtttacttgccatctgtagatcttctttggtgaggtgtctgttcagatgtgtgtgcatttttagatgggctgtttaacttattgtttaggtttaataattttttatatattttgaagacaaattctttctcagatgtgtattttgcaaatattttcttcaatatgtggcttgtctttttgttctcttaacaaggtctcttccagagtataaactttaaatattaagaaatccacactgtc

SEQ ID NO: 10373 - DNA, 478 bp, Homo sapiens
  misc_feature (1)...(478): n = A,T,C or G
cccccccttgaacccctntnnnnattgatgactattagacagtgcggtggaattcaaaagaaaaggtaaaattgagagacttttgttagaggagctatttggaatgaaccaacatttcagattttccaaaatgtaagttaggaagtctccattgtctctgcattaacaaaatacactgttactatcttaatctcaagagtgtcattacagtgagaatctcatttaaaagcataccagtgaaattaatagcagtgcttatcaaagaacactgaaatctgtgagaatctttctaggagcattcttttcttcttttagttccaagttccagggtatttttcattcctagtaggtttatatgactcacagaatgtggacttttttcctgtttggagtatttttgtaatgtaagtatcggacagctgcaccacagcatgcataaattgcacattttgttttactttctttatagaatatttaa

SEQ ID NO: 10374 - DNA, 475 bp, Homo sapiens
  misc_feature (1)...(475): n = A,T,C or G
gggagtctcnnnnnngnnnnnnaattgtagaccactagtctcgggtggcggaattcgcgggcgcctgtagtcccagctactctggaggctgaggcaggagaatggcgtgaacctgggaggcggagcttgcagtgagccgagaccgcaccactgcactccagcctgggggacagagcgagactctgtctcanaaaaaaaatagaaaaagaaaaagaaaaaaactgcgcaaaaattacatcaaaatactaatcatatttctgagatgtagtattatggataaccttttttatgtttttctgcattaatattcaataactttattactaatattcaaatattactataatcgctgaaagacaaatgctgtatgattcaacttatataaggcatctaaaatagtcacattgatagaatcaaagagttgagcggtgggtgccaggggccggggaggaagaggaaatgttgaattactatt

SEQ ID NO: 10375 - DNA, 559 bp, Homo sapiens
  misc_feature (1)...(559): n = A,T,C or G
naatcgatcactgtccgaaggggctagattacatattgnttttctctggctaatttcatattttctctttagttgtggttttcattagtttgattatgatgtgtataggtgttgatttattcatatttttagagtggttgtctaaacttcttgagtcagtaaatttatttttttgtcaagtttgaggagttttctctcactatttctttaaatattatttttctgccttattctctaaactgttcttctaggactccagttgtctatatgtctgatgttctgaaattgtcccacatgtcccaaatactttgttcattttcttttggttttttttttttctaacctccaaatgggacgacttcatttcatctatccggaagttaattctttcctcagccatctccagttggttattaatcaaatcgtgggaatttttatcacagaaattttgattttccaggtataaaatttccatttttttggccttcctatttctctcttaaaaagcccctgttttttaaatcaaaatagaaataatttttcctcagagacatacttg

SEQ ID NO: 10376 - DNA, 459 bp, Homo sapiens
tggggcaaaaattcgagactcgtagaccttagtccaagtggtggaattccttttctctggcactccagtcccaggccttgggcctgaactactggaaaaggtctggcggctggggaggagtgccaacaatagttcataataaaaatctgttagctctcaaagctaattttttactaaagtttttatacagcctcaaattgttttattaaaaaaaagatttaaaatggtgatgcttacagcagtttgtacgagctcttaagtgttgattccatggaactgacggctttgcttgttttgattcttttccccctacttttcctaatggtttaaattctggaattacactggggttcttttgccttttttagcagaacatccgtccgtccatctgcatctctgtcccatgactcaggggcgcccactctgcttcgattctcctcctgtggaagaaaccatttt

SEQ ID NO: 10377 - DNA, 454 bp, Homo sapiens
  misc_feature (1)...(454): n = A,T,C or G
agcggcccccngaaataacctagggggtttgnactgacantctcgnannnnccnnnnangngnacnngaagnngaaatgatttttattgttcttggaaactaaggcattttaatagatcacttcagcctaaggggatgaaccaaaatttgtcgggaacccccaaagacctactaaaaacaacaggatattgccagcacctacaaacaagattttgtatttggcacaacttccaaggtttcatactgtcaaaaagccttttatcatgtttttattgctgcaggaactgctattatcaacttccatatttcttttatgattcattcacttgatgtagggggatgtagaactcatttttttctaattcatatagaccatgcagccctcctaaaatggnattccatttgttttctttatgcttgctgaaatgtaaagaatttgttttatggccctatn

SEQ ID NO: 10378 - DNA, 496 bp, Homo sapiens
  misc_feature (1)...(496): n = A,T,C or G
nattgagacccctattccagatagaaggacttctgagcagagaggcccccaatcctagtcccctgccctctggcacagctgcttcctgcaagaaagcaagtctttggtctccctgagaagccatgtccctcgtgctgtctcttgcctgtcccacctgtgccctgccctccagcttgtatttaagtccctgggctgcccccttggggtgccccccgctcccaggttcccctctggtgtcatgtcaggcattttgcaaggaaaagccacttggggaaagatggaaaaggacaaaaaaaattaataaatttccattggccctcgggtgagctgagggtttttgcnnggaaaaaaaannaaaaaaaaaaaaaaaaaaaaaangggggccccttaaattaaaagggcccctttaaacccccttaacaaccctaaatgggccttttaatggcccccccttgggtggtggccccccccccggccctttctttaaccgggaagg

SEQ ID NO: 10379 - DNA, 462 bp, Homo sapiens
  misc_feature (1)...(462): n = A,T,C or G
tggganccnnntttcgagatctctagtccgtgtggtggaattcggacaaatagctaatgcattttggccttaataccaggtgatgggttggtagatgcagcaaaccaccatggcacacattttcctatgtaacaaatttgcaaattgtgcacatgtacccagaacttaaagtgagacaaaaccaatgtccacgcctttgcagtttgattgaacgtataaaggagaaaaatcctgtaagtatgctgaacatgaaaggacctggaagcagtagtgtgtcttcagcctttaccaaattatccctacttgagagaaaacttggaaatgtaatcaatgtggcacaaatttcaaccagttttttaaacagactacacatctttgaaatcatactagggataaccaaatctgcttctccaagattggcctggaatattattacagaataactaccagacaacatttgtt

SEQ ID NO: 10380 - DNA, 462 bp, Homo sapiens
  misc_feature (1)...(462): n = A,T,C or G
agaaaaataanccctgtagactctgcctgatgacgttantacatgcggtggaattcgaagaggccaaagaacccgataagacaaataagaaagaaggagagaaaacagatagtgtaggagttgaagctagtgaggaaactccccagacctcatcatcatctgctagaccaggtactccttcagaccatcagtctcaggaagcatcacagtttgagaggaaagatgaaccaaaaactgagcaaacggaaaaagctgaagaggagactcggatggaaaatagtctaccagccaaagtgcccagcagaggggatgaaatggttgctgatgtccagcagcccctgtcgcagattccttcagatacagcctctcctcttctcatacttccacctcctgttaccaatcctagtcctactctccggccagttgaaacaccagttgtaggtgctcctggtatgggcagtg

SEQ ID NO: 10381 - DNA, 475 bp, Homo sapiens
  misc_feature (1)...(475): n = A,T,C or G
ccctagagnactgagagcagtngcaggaancccnnngccctctgttccagaagagaaaaagcccaggcataaaatcatctccatattctcatgcacagagaaaggaagtaaaaagaaagaaaaggaacggccagaaatttctcctccatctgattttgagcacaccatccatgttggctttgatgctgttactggagaattcactggcatgccagaacagtgggctcgattactacagacctccaatatcaccaaactagagcaaaagaagaatcctcaggctgtgctggatgtcctaaagttctacgactccaacacagtgaagcagaaatatctgagctttactcctcctgagaaagatggctttccttctggaacaccagcactgaatgccaagggaacagaagcacccgcagtagtgacagaggaggaggatgatgatgaagagactgctcctcccgttattgccccgcgn

SEQ ID NO: 10382 - DNA, 550 bp, Homo sapiens
  misc_feature (1)...(550): n = A,T,C or G
ncctcgaancactactccgngnggngctagaatgccagtggaagaagtgctgagggtctgagaggggagatgcatgcgtgtccaggctgaagatgcccctatattctgtcaaaggttggcggtgggaggtgttggggtcctttcatctggctccgtttctggtgcttctggaagtctctgctcagcacagggaagaactaacacgactaacctaggcctaccctgaatgcttcttgctaaccaggccgagaggccacacacttgcccccccatccccacaaaccaggtaatgccagtttgccagcagctatttgcctatagagatgagtctgtcctggtcataactgtgtgctcaaggtgtccaggcttttgggggtgggcctatctgggtgcattatggatggtttggtggattgaggtgtgngggggaggcctaagctagagggggatccctagtatactttgggaaccaccttcatgtttctggaacaggcaccgtcaataacaaatataacttggacagcaaaaaaaaaaaaaagcgcggctctac

SEQ ID NO: 10383 - DNA, 496 bp, Homo sapiens
  misc_feature (1)...(496): n = A,T,C or G
ggaaatggtccgggntngnnnnnnattgtagaccatattgaagagcggtggaataccttgagctgtgccttgaggacaggtggctggtggtatgaagacagcatttacagggcccctaactggtgcaggctctgtgaaggaggctttatagagatagatgtatttttcaccacggtccaatgcattaggtttcgttgtcttttgcacatgacaaatctgacaggctaaggacacattcaggtaggtgttggagcttggctttgagcttccagcctgtgctgtggggagaattccatcttatgaggttacggggtgtgagggacaaaggttgttggcactggggaaagccaaatggtggtgacttgggaacagcttgtggtggccccatttttctggagcctggagtagttgtgggggagcagggagcaggaaggctgcagaagaatagggtcatatggggaggtctctgagtgtcaggctagaatttgggagttaa

SEQ ID NO: 10384 - DNA, 490 bp, Homo sapiens
  misc_feature (1)...(490): n = A,T,C or G
ncctcgtagtccctagtcagtgtggtggatttgtaacaccatgggccacttggcccaggtggagcctccattaatcacggggctctctgtgttgtggccccaaggcgggcagccgatggcctctgcccgagccaatatgagctgcagcctaattacaggggacggtgaccccagggagcagagttcaagctccggtcacagctgcacccaggagccagctgcttcccaggcctgcatagccaggggagaggtttggaggaccggcactgaatgacatgatccaaagcgcgccaagctgggctggaggtgacggcagagccacagtggccacagagcccccacgtgaacctacacggatctgcctggtttaggttctgctgaactccagggtgaggaggacctggtctccattctcaaagacatgaagaggttgacaaagaagagtcacaggtttcagccaagttatccccagcatggctgcttgcgtggg

SEQ ID NO: 10385 - DNA, 493 bp, Homo sapiens
  misc_feature (1)...(493): n = A,T,C or G
nattgtagaccctggnagngccnggaactgagatcactagtccatgcggtggaattcgctgatgtacgggatgctcttatctatccgatcgtttgtcagcaagatgtgcccgctagacatgaaggatggcttcctggccttccaaactagccgttacaaactccattactacgagacgcccactgggaacaaaggcgtcatgaatactgacttgggcgtgggacccatccgagatgtgctgcaccacatctacagtgcgctgtatgtggagctggtggtgaaaaatcccctgtgcccgctgggccaaactgtgcaaagtgagctctttcgctcccgactggactcctatggtcgatctctgcccttcttctccgcccgggctggctgaaacaacctacctcgagtctcaggagaattcatgtctgcctggggcccttccgaacctgtgccaacntagggcccccactgtgagcccccgcacccccaccccctg

SEQ ID NO: 10386 - DNA, 475 bp, Homo sapiens
  misc_feature (1)...(475): n = A,T,C or G
ttatgagactctagacattgagngcccatcgaaagagcaagccctggccgacctgaactccgtggagaagtctctggccgacctctttagaagatatgagaagatgaaggaggtcctagaaggcttccgcaagaatgaagaggtgttgaagagatgtgcgcacgagtacctgtcccgggtgaagaaggaggagcagaggtaccaggccctgaaggtgcacgcggaggagaaactggacagggccaatgctgagattgctcaggttcgaggcaaggcccagcaggagcaagccgcccaccaggccagcctgcggaaggagcagctgcgagtggacgccctggaaaggacgctggagcagaagaataaagaaatagaagaactcaccaagatttgtgacgaactgattgccaaaatggggaaaagctaactctgaaccgaatgttttggacttaactgttgagtgcaatatgaccgg

SEQ ID NO: 10387 - DNA, 492 bp, Homo sapiens
  misc_feature (1)...(492): n = A,T,C or G
aaagcattnnnnnnnnnnatgaggaccgtaggcacgngcgttgaattcctaaggacangcataggcctttcacagaaaacaaaacctaaaatgaccagtaaacatattgtcaaatccactgcccaaatctactattaatatgggatgcttgttttctgtaaagagaatctagggattgttagacttttaaaaaccatcttgttcaaaaatagctaacaggttttctcttgggaagtgacttgagtagtcattagtggctgtctagatagagccttgttattcaacatgatctgcatcagtatcatttaggagcttgttagaaatacaaaatcttgagccccactccagacctattaaatcagaatctgcatttaaactagatcccagatgtatcttaagtacatctttagagtttgaggggcactggactagagtgtttatgttgagaatcttgagacgttgtctgggttcagcaggaaatggttccatgat

SEQ ID NO: 10388 - DNA, 471 bp, Homo sapiens
  misc_feature (1)...(471): n = A,T,C or G
aatcgagagcctnatagaggntcctccgaacancccacnngagngngcaggtttcctacccgagagaggaatancccgttttcctctttttacttagctggaattcactcaaagtacctctgactttgctctctcaaatcactgtttctagcccttcacagctgctcacacttaagcttggaagctggtcagttcagacagggctaaggcttagttgcatccttgtttttacagcactgcagtgaactgtactcctgctttgctgttaggactcttaagtttctatggcaaaaatttaggttaaattgaaaaagccaagtcagattccctatagaccagtagctttcaactttgcctgggcatgaaaggtacttggggagttttaaaaaaatctttgtgaccttgaataaacaaaggtttcttaaaatataaaaagcatgaaccataagattttataaaggattagtcagg

SEQ ID NO: 10389 - DNA, 464 bp, Homo sapiens
  misc_feature (1)...(464): n = A,T,C or G
ggcgcggnnctttccatagatagcctagcncangngcnggaattctcacgatggtctcgaactcctgaccttgtgatccgcccacctcggcctcccaaagtgctgggattacagatgtgagccaccgcgcccagtcctatgttaaattttaagagttttgtgatttttttgtaactggatttatcagttcggtgctactaaattgtagttttctttggccagaaacagttgtgtggcaataatttcatagggttcaaactaaacataaaaatcaccaagtcataaaatgttcctttcctgttacctcttagaaaataaaaattaaagtccctggtctttgttgcaggacattcaggtttttctcttttatgggaatttttgtccattcagggtctgtccgtgcagagctcttgctatctgggaaataatgtgagttccttgtctctgtgttacaggaagaatat

SEQ ID NO: 10390 - DNA, 423 bp, Homo sapiens
gttttgtggggttttttccaccatgtggaagtttgtttttacataatcaaattaatcaatcttgccttttatggcttctagattttgagttataggtagaaagcccttccctactcgaaggttataaagaaatttacctgttattttctgagtatttttacagttacatattttatacatgattttttcttatttgttgagagctcctcttgttgtatggtatgaaagaatgatctttttttcctaaatggctatccagtggtcccagtggcaattatttccttttttacacccctgatttaagatgctacttttatcatatgctaaatgccttgtatatatttggatttattccgaacttcctatgataaatagtactttggaagagagaaataatctgatgctcaaaagacatcctagcca

SEQ ID NO: 10391 - DNA, 465 bp, Homo sapiens
  misc_feature (1)...(465): n = A,T,C or G
gggcgcgcggnngntatagatagcctccctacgccgngncgnggaattcgagggaaataggattgacatgaacgagtcacgtaggggttagtaatcatcatcactgtcatcatactagacatttattaagtgcttactatatttgagggatcattgtaaattctttacaaatcttaattttcatagtcctcacactaccctgggaagcagctgttgttattttccccattttacagacaagggaacagagactggaacagtgaggtcagtttccccagatcacacagaaagcctgtgtcagagcagtggaagtttatcacacacagggaggcttgctccttccaatgatgatgtaagcgtataagcattgttgagagctctttaaaacagtggcagacatttcaccaaagaagatagaggaatagccaataagcacatggaaagatgctcacattatgggcacgg

SEQ ID NO: 10392 - DNA, 456 bp, Homo sapiens
  misc_feature (1)...(456): n = A,T,C or G
nttgaagacccctagtatagagtggcgctaagtcgcgtgtggtggaattatgcctttgaagaaaaggccaacatcggcatggtcctggagatcgagtcatgaggggagctgtttgagcgcatcattgacgaggactttgagctgacggagcgtgagtgcatcaagtacatgcggcagatctcggagggagtggagtacatccacaagcagggcattgtgcacctggacctcaagccggagaacatcatgtgtgtcaacaagacgggcaccatgatcaagctcatcgactttggtctggccaggaggctggagaatgcggggtctctgaaggtcctctttggcaccccagaatttgtggctcctgaagtgatcaactatgagcccatcggctacgccacagacatgtggagcatcggggtcatctgctacatcctagtcagtggcctttcccccttn

SEQ ID NO: 10393 - DNA, 486 bp, Homo sapiens
  misc_feature (1)...(486): n = A,T,C or G
natcgtagaccactgtcagngcggggattgtataccgtccttaacacacgcccaatatattttggaacctcaataaatagtggttttgctgattgtctttttaacaatttctaaaatattgaatactggttattataattaaatgtattctaaacatctattctttctgtctcatgccttgatctagcctgttccttccacctagaatgccttttccttccttttctcacatagcaatctttgacatatccttgaagactgagctctcccatcagcctgggaggcctggcctgatctggaagacggttcagcacgtctttctctgttgccatagtgcgggatttttgtctattttcagcaggtcgttccagactgcaagcctctggagggcagtgactcgatcccattcagctccatatccccactaccagcatggcatgcattgggggtgtccatacatatacagaacggaaactttcatggttt

SEQ ID NO: 10394 - DNA, 453 bp, Homo sapiens
  misc_feature (1)...(453): n = A,T,C or G
atcgagcccctattgacgaccctctgaacagnccggnggaattcttccctggacaactgccgtagcttcctacctggntttcatgtttctgttctttctttgctcattttctcttctccttactgcatcctgaatgttctattctgtaagcacacctgatctcatcccgctcctccctcgctgaaaacatcttactgactttcatttatgttgagggtaaatattaaaattcttaatttgcccaccggcctcagggggatctgacttatatctgtctctgcagcctcatctcacaccagacaccccctcactgtgaggatgtcagtcaggttgtctcctacctctgggcctttgcacaggccactctccctgactgtgctaacagctgaaaggaaagattcccataccctgcagacgaggtcaggacctggtattgtgcattcacagagcctg

SEQ ID NO: 10395 - DNA, 482 bp, Homo sapiens
ctttgagaccactagtgagagacgcggaattcgccttgaaggatgggtgagatttacagaaggttggaatgaggcactccaagcaaagaacagcagaggctcagcagcaagaatgcaaaaagggagttcactactgactcaaatacccggagccctggggtttagtctcctccctccacaagtcacatgtaaaagtccagtcatgctgggcgcggtgactcatgcctataatcctatcactttgggaggccgaggtgggcggatcatgaggtcagtagttcaagaacaacctggccaacacggtgaaaccctgtctctactaaaaatacaaaaattagtcgggcatggtggtgggcacctgcaatcccagctactcgagaggctgaggcaggagaatcacttgaaactggaaggcggaggttgcagtgagccgagatcatgccactgcattccagcctgggcgaaagagctaaactccgtct

SEQ ID NO: 10396 - DNA, 468 bp, Homo sapiens
  misc_feature (1)...(468): n = A,T,C or G
catcgagcaccantgatcganggctcgtaaaccaccgctacctctcctactcaagagcctcccactcaatgatatgcctgagatctttggcctgcatgacaatgccaacatcacctttgcccagaacgagacgttcgccctcctgggcaccatcatccagctgcaacccaaatcatcttctgcaggcagccagggccgggaggagatagtggaggacgtcacccaaaacattctgctcaaggtgcctgagcctatcaacttgcaatgggtgatggccaagtacccagtgctgtatgaggaatcaatgaacacagtactagtacaagaggtcattaggtacaatcggctgctgcaggtgatcacacagacactgcaagacctactcaaggcactcaaggggctggtagtgatgtcctctcagctggagctgatggctgccagcctgtacaacaatactgtgcctgagct

SEQ ID NO: 10397 - DNA, 461 bp, Homo sapiens
  misc_feature (1)...(461): n = A,T,C or G
attgtagactatagtccatgtggtggaattcgagggcttattccttacagtgaccttaaaggctctgtatgatatggccccattccatccttatcttttgcggtattggccctctggtagttcctacaacaaaccaactgctttttattcctctgagctttttttcacttgtttgtcttccattaatatttatgacaagggccatatcagacttataatgtagtttcttccatgcctggcacataacagatgcttaacaaatatttatcaatgaatgttgaatgctttcgagcacttagaatgggggtccgcagacatttttgtaaagggccagatagtattttaggcagtcccttttgcagtttctcagctgtgccagctgtaacacaaaagcagtcagacaatatgtaaataaactagtgtcactgtgttccagtanaactttatntgtgggcactgaa

SEQ ID NO: 10398 - DNA, 502 bp, Homo sapiens
  misc_feature (1)...(502): n = A,T,C or G
naatcgannncccctnnnnnnnnncnnnnaattgtagnaccattagtccagtgcggtggaattcctttagtctctcataagccaattatttatatctccacatagcccattattaccattgaaaaggcatgcaattcttctatttgaagcttgttccctttttacaaaagtactagtaaaaatctgagtcatacaaaagagcaggtcaggtgtcactaataacagtttacctcagcttcatctccatgaaggttttacttctaatcccagagtctcatgtttatgtattacaagagtgtatgaaagctgggcgtggtggcacacaccagtagtcccagctactcggtcgggggttgaggtgagaggatcgcttgaactcaggagtttgaatccagcctggtcaatgtagcgagatcctatctcttaaaaaaaaaaagggggggaaacagngtatgatcctattatttgggtttgtgtgtgatcgaatacatggtatatagtt

SEQ ID NO: 10399 - DNA, 396 bp, Homo sapiens
gcaagaacgaggagcctgtgaatccatttcctgttttagtccatattgcttctttgatatggaataagacagtaatgatgactccaggatttttttcttttgcatttctttttccaagactagagtaaatgctggaaacacattaaagttagaaatagagacttgaatttattctttaataaaaaatgttccttgaacatttaagtaaaaatgtatctatgatacaagcattttctaatttaagataatagcaagcagaagaaaacaagttaaatgtaaattttttttctgtttcctgctctgtatgtaaagtcaagaatctgacctttgagtaaatttcatcatatttcttatcgtaaaatagattacaaaataaatcctgagaataagtaaacc

SEQ ID NO: 10400 - DNA, 482 bp, Homo sapiens
  misc_feature (1)...(482): n = A,T,C or G
aggcagggccnaattgagnncttcactgagaccctaggccagngcgnggaanncggaagcgtcagtgccctggagatcccagctcgctctccccactgtcagcaacagcacttccttcgtggaggaagtggactcgaatcctggaggaggaaataaagggaaagggaagtcgtggagaggcagggaaaatggttaagcagcccggccctctggagtccccatgggggcggtagctgaagttggcgagcgcagcggtggatgcagagctggctgcacccagggctgggccagtgtgtcctgtaagacttcttgcattccttctgctgcttttttgggatgggggtatttttgttcatttgtttttgccctgttttgattttggtcccacagagcaggggatgtagtttgtacccaccatggcgcagacttccaaataaatagtactggtcatttctctctgcactaaaaaaaaaaaaaaaaaa

SEQ ID NO: 10401 - DNA, 479 bp, Homo sapiens
  misc_feature (1)...(479): n = A,T,C or G
catgatccctctcgganatagacgatcatagaacangcggaggaattcagcggtaatacttgaagattttgttcagtctgtttccaaggatcatgatatgcaaatgataaagagacttgggtcccattaaattttttaacatttcccaatactttgctaacagcttttcctccttacccttgcagctggtgctgccttatattttgtagtaacttgaaactgacatgtggggaattttaagtacatatgttatcaaaacatgtttcacagactttatagactatcaggaggtcatcttgtctttcaaaaagcagcctggaatttgaatttagttcctcttataatttcatgctccaaagtaactatatgagaaatttaaaatttattagcaactttctcttgttcttagattttagagagatggcaatttcattaaacctgaaaaaaaaatatatatgctatgttacctagaggcagan

SEQ ID NO: 10402 - DNA, 497 bp, Homo sapiens
  misc_feature (1)...(497): n = A,T,C or G
cgatgcggnnccnnaaatggagaccatattganagtctttcggaagngccgnggaantcgtattttcatcacagtttaaggagcatcagccgcttctcaagtgggttgggaaagcatataaacgtacgcaagaggacatggatccaaaatgatgatgaagcatctcccatggggaggtgatggtggggagatgatgggctaaacaggcaacttttcaaaaacacagctatcatagaaaagaaacttgcctcatgtaaactggattgagaaattctcagtgattctgcaatggatttttttttaatgcagaagtaatgtatactctagtattctggcgtttttatatttatgtaataatttcttaaaaccattcagacagataactatttaatttttttttaagaaagttggaaaggtctctcctcccaaggacagtggctggaagagttggggcacagccagttctgaatgttggtggagggtgtagtggctttttg

SEQ ID NO: 10403 - DNA, 466 bp, Homo sapiens
  misc_feature (1)...(466): n = A,T,C or G
caggggnnnnnnnntttgaatagcattacatagngcggnggaattctccggaatgaccagcatgatattttcagagtcttgtccccggggtattagcacctctttttgaacagggaattgattcaagattggacatggtctcctctgattatcaggtactggggctgagggcattaaaaatagtaagcctccctcctcgtcccctgcctcaagaaattgcctccttatttatcaacatctttttcctccctttccctgagagctcacagtacaatgtttcagaagccccatttgcacaggttttcagcaactcagaatgctctacttctttttctttgagaaaggattaagatacactcctgctgtgcccccatctttcctccaaactcctgcctgtgtttgtgtggatacccagtcccagaaccacactgttgagttggacacactgtaaacccctgggtaactg

SEQ ID NO: 10404 - DNA, 481 bp, Homo sapiens
ctttgagaccactggtgagagacgcggaattctggaagactctagacactatatgaagaaaaagatcaggaaagctctcctcttctttggtcttaagggatgttttgtttttagtgtttccatcctggtgaatgtctccatagccttcacttcttatgtttgttatacagagactcatgtttttctagatgcagagtttttatccacaaggaaacagttcttaacaccacacagtaaccactctcaatatttcttgcataagttcatgggatcagagactagagctaagtcaggctgttttgctacatgggattgttttggtcaccaagtgtacaagcagtggtggtctgtggtcgcctgcacataggccaggaggacagtgtgtgtcatgactgaaactctcctttgtctctgtgtgtggcaggtctggcagacccgtctgcgttaacacaagcggttgctgcctaccaaggctgtcatt

SEQ ID NO: 10405 - DNA, 461 bp, Homo sapiens
tttgagttcactccggccttcagtgagtgcagccagggatgctgcacactgcagggctcgggactgtccccatcccccacaacagggacctccctggtccgaagcatcagcagtgccactacggagaggctgtgggttcaatcccggaatcctgctgtttttgtgggtcaaaacgataaaataccagcagtgtcataggattcgacctaatacatgttgaatcttgatcaatgttagctattattggaaaatttggctttctctttcaaaaacgtttataaataactttccctaaaaccatatgatggttctcccctttcagtgtctcctttctattcggagcggctgaaggaggctcatgtcagactgtacccatccagccgctgcacatcacaacatttacttaacagaacagtcaccgacaacatgctgtgtgctggagacactcggagcggcgggcc

SEQ ID NO: 10406 - DNA, 462 bp, Homo sapiens
  misc_feature (1)...(462): n = A,T,C or G
nttcgtagatagtagtccgtgcggnggaattcccgganaacatttaaacgcaaagattaccttaagcaacacatgaaaactcatgccccagaaagggatgtatgtcgctgtccaagagaaggctgtggaagaacctatacaactgtgtttaatctccaaagccatatcctctccttccatgaggaaagccgcccttttgtgtgtgaacatgctggctgtggcaaaacatttgcaatgaaacaaagtctcactaggcatgctgttgtacatgatcctgacaagaagaaaatgaagctcaaagtaagttgaaactacttaggcaagcttagttttcaagtggaaattgtttaaggccagaaggagtctgtttggaattcttttcacctgctttactgtttgagtctgcactactgttgaagactttacttcctcataaagcaatgttgtacactatatctgctg

SEQ ID NO: 10407 - DNA, 462 bp, Homo sapiens
  misc_feature (1)...(462): n = A,T,C or G
aggcncnnnnnnnttcgcttgcattccatcgngcggngcaattcctcctgttgttgggcggctttgagcacagggctcaagggcagaggctgagttggaaaatttcttgcctctgcagaagggaagagctgggggaggttggggcctttttccccaaacgaggtcttattcttctgtggggttttctgggtttgttaggtggcttcctttctacttaaaaataagctgggagtggttaaaaaatgggaagaaatcaatgtttctggcgtatagaactgagcagatgtgttatctataataaggaggagaggttgttgtgactctagctcctggtacgagcccttcagttcaccctcctgccctgctcagaaccccctggacctgacatcgtggctttaacacccttgggtcatgtgagaaggaagagtgcccacccaggactttccgaggctcacagattct

SEQ ID NO: 10408 - DNA, 475 bp, Homo sapiens
  misc_feature (1)...(475): n = A,T,C or G
tggtacgaggcacannnnnntttgaatagaagaccattagacagngcggtggaattcatggcccacagcactggaagtcatgccttatctaatatcttttatttggtaggcacatcctagccttcttgtgtttagaatactaagcactacacttacaggccattttaaaaattaccaacaaaaagtacaaaattaccaacaaaaagtacaaaactggaaaaaatgcgacactaagtagaccatgaaaaggacatttgtttacagtatgagagctgtatcaaaaaggccgacgtcaccttctgtgaaattgcatgttggatgactcaaatttttcgctgctctgcacatgtccacaagtgattgcaaaagtgagtagtgattttgggattacaagtaaattgtgattaggtgaattcacaaatgtagaacctgtgaataatgagaatcaactgtacattttttggcccactactcg

SEQ ID NO: 10409 - DNA, 462 bp, Homo sapiens
  misc_feature (1)...(462): n = A,T,C or G
ggccgggcncctcccactgatagcatgcataagacgnggcatcaaacgttgcaaattccgatggcttgattgcttctttatggaaagaatatggcaaagctgttgctagatgggtttattttgatccaaccattgtgtctgtggaaattctgaccgtcgccctggatgggtctctggcattgttcctcatttatgccataggcaaagaaaaatattaccggcatttcctgcagatcaccctgtgcgtgtgcgagctgtatggctgctggatgaccttcctcccagagtggctcaccagaagccccaacctccacaccagcaactggctggactgccggctttacctgtttttttttaacggagtgtgggttctgatcccaggactgctactgtggcagtcatggctagaactcaagataatgcatcagaaagaaaccagttcagtgaagaagtttcagtgan

SEQ ID NO: 10410 - DNA, 463 bp, Homo sapiens
  misc_feature (1)...(463): n = A,T,C or G
nattgagatcgtatgacattacgccagngcggtggaattcctcatttgtatgttaaattccttgttaattttatgacaagattgttgatcttggatttcactttcattaccgtcttagaaacaaattggatttttctgctcccagatgccactagagtagctttgtaaagctcatttttcttatctttacttagtttctgtctctaactttagtttcctttttcagcttccctgactaattctcttaacctccaattatctttaacagaagttactaattctgcaattcatatattctggaactggaattatctttgttcctaagcaaccaagtatacatatgaaacggtctgtacattaatgcctcataatagcagctcttatttgggaaagggttatagtacatttaaaccatgtggttttccaagcaagttaagactggctatttgcgtttagtgtcaga

SEQ ID NO: 10411 - DNA, 459 bp, Homo sapiens
  misc_feature (1)...(459): n = A,T,C or G
nattgagattgtaggccatgcggnggaactcggacggtggccccgaggggacaagcgtggccgcattagctctttctgcctcccacgcagccttattttttttattgttgttttcttgttgctgttgttgttgttctcggagacggagtcttgctcttgctctgtcgccgcccacgatagagtacagtggcgtgatctctgctcactgcaacctccgcctcctgggttcaaacaattctgcctcagcctccggagtagctgggattacaggcgcgcgccactatgcccggctaatttttgtgtttttagtaaagacggggtttcaccatgtcggccaggctgttctcgaactcctgacctcgtgatccctccgtctcggcttcccaaagtgctgggattacgggcgtgagccaccgtgcccggccgcagccttgttttgactgagtcagtgggagccan

SEQ ID NO: 10412 - DNA, 465 bp, Homo sapiens
  misc_feature (1)...(465): n = A,T,C or G
nattgagnacctgagacattacgccagngcggtggaattcgaaagttcatgaccaaccgactacttcagaggaaacaaatggtcattgatgtccttcaccccgggaaggcgacagtgcctaagacagaaattcgggaaaaactagccaaaatgtacaagaccacaccggatgtcatctttgtatttggattcagaactcattttggtggtggcaagacaactggctttggcatgatttatgattccctggattatgcaaagaaaaatgaacccaaacatagacttgcaagacatggcctgtatgagaagaaaaagacctcaagaaagcaacgaaaggaacgcaagaacagaatgaagaaagtcagggggactgcaaaggccaatgttggtgctggcaaaaagtgagctggagattggatcacagccgaaggagtaaaggtgctgcaatgatgttagcttgggcca

SEQ ID NO: 10413 - DNA, 466 bp, Homo sapiens
  misc_feature (1)...(466): n = A,T,C or G
gggcgcgcggnngntaatgatagcctccctacgcagngncgnggaattcgcagggagctgttgtgtttcagggagagtacagagaagggagagatgaagtgagtgatccgataaagtgatatgtgaagtcattggcttgctgccaagctgcgcacagggctgaccctagatgcacattgcaggtcccagactgaccggtgtagatacaggactaatatgactagtagtgcaaacactttaaacagtcaacattctgcttaggatttaaacaaggtccagagtctcaacataatatttaaaatatccaggttatccaaaataacccagtgtatgaaaaccaggaaaatcttaacatgggagaaaagaagatgatcaatacatgcccatcctgagatgattcaactattggaatgatcagatacagacttcaaagcagctatttataaccagccttcagaaagtattg

SEQ ID NO: 10414 - DNA, 476 bp, Homo sapiens
  misc_feature (1)...(476): n = A,T,C or G
taatgagaccaatcgcacaatgcagngcantccnaggncncngagaaagaatggaagatggtaaacaatcactttttaaaacctgttaagtcaaaaccatcttggttaatatgtactggggaaataatccataagagatatcaccagactagaattaatatatttataaagaaagagaccaaaactgtctagaatttgaaagggtttacatattattatactaaagcagtactggactggccattggaccatttgttccaaaacccataaattgttgcctaaatttataatgatcatgaaaccctaggcagaggaggagaaattgaaggtccagggcaatgaaagaaaaatggcgccctctcaatttagtcttctctcattggccatgtttcagattttgacctagaaatgcgagctgtggttaggcttggttagagtgcagcaagcaacatgacagatggtggcacgctgttttt

SEQ ID NO: 10415 - DNA, 472 bp, Homo sapiens
  misc_feature (1)...(472): n = A,T,C or G
cttcgacgcctttaattgtnagctacggacagngccgcggaannccggcaaataggcaaggtcactgaggtatgaaatttgtctgcagctctgttctaggattcagtcatatttcacaggtgctgagtttgaaaggcaactgaatatgtggttttctgatttcagagtcctgaactgcagctttaaagattgctagggtctgaacgtttgtgtcctccctacattagtaaggtgaaacctaatcggcaatgcggtggtattaggagatgcggtctttgggagatgattagttcatgagggtggagccctcatgagttggattaatgtcattataaaagggctaccagagagcttccctgccttttccaccacatgaggatgcagggccctcaccaggcactggatctgctggagccttgatcttggacttcccagcctgtgagacagacatttctgttgtttataagcagtt

SEQ ID NO: 10416 - DNA, 451 bp, Homo sapiens
  misc_feature (1)...(451): n = A,T,C or G
agggttctccccctgaatacccgcctacnggngccagcanaagcggcggaantngggattccgggtacacctgggatcccaggtctggatggattcttaggagaaaaggtggaatgtctgagggaaagctttgaggagtcctggacacccaactacaagcagtgttcatggagttcattgaattatggcatagatcttgggaaaattgcggagtgtacatttacaaagatgcgttcaaatagtgctctaagagttttgttcagtggctcacttcggctaaaatgcagaaatgcatgctgtcagcgttggtatttcacattcaatggagctgaatgttcaggacctcttcccattgaagctataatttatttggaccaaggaagccctgaaatgaattcaacaattaatattcatcgcacttcttctgtggaaggactttgtgaaggaattg

SEQ ID NO: 10417 - DNA, 468 bp, Homo sapiens
  misc_feature (1)...(468): n = A,T,C or G
ggggggattcgaagaccattagnnnattgacgnaccactagtccatgcggtggaattcggttcatgtacctgctgagctggctgtcgctcttcatccaggtggccttcatcacgctggctgtcgcggctggactctattacctggcagaactgatagaagaatacacagtggccaccagcaggatcataaaatacatgatctgggactagtggtggtgaatcattacctagcatttcagttttttgcagaagaatattatcccttctcagaggtcctggcctatttcactttctgcctgtggataattccgtttgcgttttttgtgtcactttcggccggggagaacgtcctgccctctaccatgcagccaggagatgatgtcgtctccaattatttcaccaaaggcaagcggggcaaacgcttagggatcctggttgtcttctccttcatcaaagaggccattctan

SEQ ID NO: 10418 - DNA, 454 bp, Homo sapiens
  misc_feature (1)...(454): n = A,T,C or G
agtggttncttaacccctgggacccttagagatggtcgtggaaancccggaagngaggggtcctcatccaagctgccagtgccttccacaaattcttcataggtagatttttccgcaaatggtctggggcccaaaagttcaaccatatcattcttatctaatacttctttttctaacaacagaagagcaacctgaaatatgaacaattttcattaaatacagttactcagcaaagtctattcagaaatattaattttttatttacaggtgaccccattccaaaaaaggatttaagaccaatgaaaaagatgtctcatacataaggttgcatagttttagagtaagatgtgcaaaatatcaaagcaaccaatgtccatctgtaagggatacatttccatactagacatatttccacacatctgcacaatgaatgctgaccatctataatgaggag

SEQ ID NO: 10419 - DNA, 464 bp, Homo sapiens
  misc_feature (1)...(464): n = A,T,C or G
nattgaaaactgagacatctacgccgngcggtggaattcgacttaaaaggatggaagaaaaactacatggttggagtgtttttagatcagataaatatagaaaagtaaaatggaaaatgatactcaatacctagttaaactcatttcacttctcctgggagacgtattaagactggaagtcctattttatttaatcagtatcagtaaaaagacaaaaattacagtgtgaacaagagaaaaacaggaatagaagaaaaaagttgcaggttgaattatctatctggatattactagagttgtaaaacacaacttggaaactggaatttatgtgaagaaccaaacaacttaaaccagcatcacttttgtcttcaatttgccttccagtgattttagtttacaacctgcgttttgttatttgaaacacacacacttatatataaacacatgtaattttactattttat

SEQ ID NO: 10420 - DNA, 421 bp, Homo sapiens
  misc_feature (1)...(421): n = A,T,C or G
gtcaaagacttgttaatgtcaagggtccgtcacggtggtgataccactgtgtgacaggaagcgagagtcaacgcagggagcctgcaccctgcaaacagccacagcccttcactgaacggggagcataaatcccaccctagttagaaccatggcttttgtgcggaccagaagtgccagagccacaatataggggtgagatgtcttaccgttttgcggtgttgagtgtgtggattcccttttaagatagaaagtaggaaaactgccagtaagggagacgactcactaaaagaggattcagtctctggttgacatgttttgctgagtgtggttggttacttcaggtacagtatcacattaataggggccacagtctatatccctgtttagtttgttagttaccactcaagagcagacagatatn

SEQ ID NO: 10421 - DNA, 557 bp, Homo sapiens
  misc_feature (1)...(557): n = A,T,C or G
cgggtgcnnnnaattgagnccatcgatcactatccgtgtgggcgattccacaggatatctggcaaggaaaccagctgcttcttgacattaggtgtagcatgtctacttttaagtccctcacccccaacccccatgctgtttgtataagttttgcttatttgtttttgtgcttcagtttgtccagtgctctctgcttgaatggcaagatagatttataggcttaattcttggtcaggcagaactccagatgaaaaaaacttgcatcttcagtatacttcctaaagggcaatcagataatggatatgttttatgtaattaagagttcactttagtggctttcatttaatatggctgtctgggaagaacagggttgcctagccctgtacaatgtaatttaaacttacagcatttttactgtgtatgatatggtgtcctctgtgccagttttgtaccttatagaggcagattgcctccgatcgctgtgttcttattatncaaataagtttacttgtatccgaacaaccacaagagatttgattctgtaaagaatcttcttt

SEQ ID NO: 10422 - DNA, 452 bp, Homo sapiens
  misc_feature (1)...(452): n = A,T,C or G
attgaaattgagtaccactagaccangcggtggaattccccagtattaaggaattctggtcacatagtttattcatccatttaacaaatatttagtaaatgcttctgtgccaggcatttttctaggcctggtgatcatttaatcaaaagagactaacacctgctccctgatgcttacaatctgaaagacaataaagaaaaatataataacagtagtgaattatatggatgtgttccagcaattgattgctgagcaaaaaataatcttaacgcatacaaacgctgggcatggtggctcacgcctgtaattccagcactttgggaggctgaggtgggtagatcacaaggtcaagagttcgagaccagcctggccagcatgatgaaaccccgtttctactaaaaatacaaaaattaactgggcgtggtggtaggtgcctgtaatcccagctgctt

SEQ ID NO: 10423 - DNA, 462 bp, Homo sapiens
  misc_feature (1)...(462): n = A,T,C or G
attgacnatcgtagacattagtccangcggtggaattcggcctctgtggctcctgcaataaacctattgctgggcaagtggtgacggctctgggccgcgcctggcaccccgagcacttcgtttgcggaggctgttccaccgccctgggaggcagcagcttcttcgagaaggatggagcccccttctgccccgagtgctactttgagcgcttctcgccaagatgtggcttctgcaaccagcccatccgacacaagatggtgaccgccttgggcactcactggcacccagagcatttctgctgcgtcagttgcggggagcccttcggagatgagggtttccacgagcgcgagggccgcccctactgccgccgggacttcctgcagctgttcgccccgcgctgccagggctgccagggccccatcctggataactacatctcggcgctcagcgcgctctggcacn

SEQ ID NO: 10424 - DNA, 470 bp, Homo sapiens
  misc_feature (1)...(470): n = A,T,C or G
agatgaggnnccccatgagaccctggtttgagcgcgatatcggctacccaaaaagaaattgttaacaaggaatgttaacaagcctttaaaagctaataatcaacagactgtggtgtttgctttcagttactcctggcaagcacaagtaagagcgtaggtcatcaacttcctaggtggctgtagggaacacctcctacagtaagcctatagggacaaaaactggtatgggaatcacaagtgtgagcaccattatcattaccttcctccacatgctctcatttgtggaaaaattaatctaggcctctcgaaaaccctatggaatctgccttttcatgtccaggaaccctgtgggctttttctgattgctgcttgatagtgctaacctattttttgagtttttcaatttttaagcgtttgtattttatgtcaacctcctcagtgaaggtcatacagtataaacagccatacta

SEQ ID NO: 10425 - DNA, 554 bp, Homo sapiens
  misc_feature (1)...(554): n = A,T,C or G
naatcgaatcactattgcagngncgngcaattctggagctcccttctacccactaaaagataaccaatttttacattttttgagggggagcgagttttacgaaaggggaattaagattccagggagagctctggggatagaacagggcgcagattccatctctccccaagcccctttttagtgactaagtcaaggccccaactcccctcccccaccctacgctgagcttattcgagttcattcgtactaataatccctcctgcggcttcctcattgttgctgatttaggccaccccagctcagccaatgattcctttccctctgaatgacagatatgcttttaaaagtcacttgcttagttgatgtcagcgtatgtgtatacggtggggaaaacctaatttcggcgatttctgtggtacgtaataagagaagaaagggcactgggggctgntctccttccttccctgggctgcatccatggactcctggaggcacagagaagggagctataagaggatgtgaagctttacaacctgaattgtttttatagactt

SEQ ID NO: 10426 - DNA, 462 bp, Homo sapiens
  misc_feature (1)...(462): n = A,T,C or G
natcgagattcgtagtccatgcggnggaattcctagaaaaagtacccccctccccgcctttcatagtgacaaaaaaggaagcgttgaagctgatgggggaagagcccggaaggtggtggcagagtaaataccggctcccccaacgtcgtttttctgaaaataaaatactctgagccgaacgtttcgaagaaggaaagtccgcccttaagagagagacagagtcttggtctgttgaactctggtttgattgtataataatgatgatataatgctaatgacgatgatgacactgccttttatttttaccccagtgctgataaagcgtagttacagctggggatacagtccttgaaaatctgatgtgtgaggagggaatactgttgcttttggagttgagctatatttatctttttttaaaaaggatatgctttttagaattaaaatttggcaaaacgaatcctg

SEQ ID NO: 10427 - DNA, 473 bp, Homo sapiens
tgagcagagccccccatgataccctagcttggacgacgatttccaggccccagcggagggaccttcagtccagcccggtcccctcaggcccatggaggaagagctgccacctcccccggcagaacctgttgagaaaggggcatccacagacatctgtgccttctgccacaagaccgtgttcccccgagagctggctgtggaggccatgaagaggcagtaccatgcccagtgcttcacgtgccgcacctgccgccgccagctggctgggcagagcttctaccagaaggatgggcgacccctctgcgaaccctgctaccaggacacactggagaggtgcggcaagtgtggcgaggtggtccgggaccacatcatcagggccctgggccaggccttccacccctcctgcttcacgtgtgtgacctgcgcccggtgcattggggatgagagctttgccctgggcagccagaacgagg

SEQ ID NO: 10428 - DNA, 477 bp, Homo sapiens
  misc_feature (1)...(477): n = A,T,C or G
tgggcggnnnnnagnagcctgagaccctnggaaaactgagaccctagtacangcggtggaattcctgatattaaatgccttccctgggaggaagggtgctttccccctccctagaggtgcccattccataccctgggagactgaggagagcattggctgaagcccagttcctttcccatccatccccaactccaataatcccccactcctcgcaggtctcagtgtcatgctgtcttggggcagggtgaaagggtagtggcagcagggcgcccactctggagatcctcaaaaaaggccctcctctgtggctggcagcctctgacctttccctgggcttcaaaggaaggctatggagtttgctgtgggccctgcaaccttcccagccactcctgctgcactaaggacttaggatccttttatcacaaatcgggattctctcccccaccccgaattctgtctgcttaaactggaatacan

SEQ ID NO: 10429 - DNA, 472 bp, Homo sapiens
  misc_feature (1)...(472): n = A,T,C or G
tgggcngnnnnnagnaggctgagaccctaggaagattgatggccttcgaattaacctgcgtctttaaaggactgtaatgaaagatcattgcatatttattgaattgtttatatctactgtcaagttgttttgacatggaagattttcaagtaacattggcagagaggtacagtatgttatccctatggtgaaaataaattaatttgttgtatatagttcctcaatctctgaagtaaaggtatgagtaatatagggtatgaatggtttaatcaaggctttattttggaagtaagaaaaatggcagtgatgattaaattgctgcagtccataatttgggcttgttatttgtacattaaagattttttccaagtaagttacactctgttaacttcctgctagccatcagcatgagccctactgcctaaacactatttcatttatttatgtttggaaaccccgtaaacatttttgn

SEQ ID NO: 10430 - DNA, 458 bp, Homo sapiens
aactgagaccataggcttggacggcatattcccgccgcttgtgctgcagccatgtctctagtgatccctgaaaagttccagcatattttgcgagtactcaacaccaacatcgatgggcggcggaaaatagcctttgccatcactgccattaagggtgtgggccgaagatatgctcatgtggtgttgaggaaagcagacattgacctcaccaagagggcgggagaactcactgaggatgaggtggaacgtgtgatcaccattatgcagaatccacgccagtacaagatcccagactggttcttgaacagacagaaggatgtaaaggatggaaaatacagccaggtcctagccaatggtctggacaacaagctccgtgaagacctggagcgactgaagaagattcgggcccatagagggctgcgtcacttctggggccttcgtgtccgaggccaacacaa

SEQ ID NO: 10431 - DNA, 459 bp, Homo sapiens
  misc_feature (1)...(459): n = A,T,C or G
gaagaaaaaanctcgagaccttagtccgtgcggtggaattcttgggaaccaatgaatagttgttcagtaaatggtttatattttacagatgatgaaactgaaacacaaaaaatttagattaactcttaggtgacaaagccaggattgaagctcatgcggtctggctccagaacaactcttcttcatagttacgttatactgcccctgcattgttggtattgaaaaatttcctttcatctctggtaaaagtcagctctctaactactgcatctcacagctgaacagataactgataccgtggttccagaagatttttctaacagtgtttgcaagctataaaatagtgctttcacttagaaaaggctagacgtggtggttcatgcctgtaatcccagcactttgagaggccgaggcaccatgctgggagataaggatccaacataagacaaacagtgctgn

SEQ ID NO: 10432 - DNA, 449 bp, Homo sapiens
  misc_feature (1)...(449): n = A,T,C or G
ncttgangttcactagcccatgcggnggaattctttttttttaacatataaaattttttttaatttgcaaaagtaaatatttttaatgcattatgggaatatgctatttaaggaaaccttattagcatatgtgacaatagcaatctgtagtttcctcaaggagcttctctgttttggttatcttttctcagatacggcatttattgatgataatctttgggtttttctttttcttttaatttttgatgctttcagaagtgaccaaagttcgaagaaatcttttcaaccaggaattgctttccccttcaaagagatcactaaagcgggggttgcctagaaaccattctgtgtcagctgtggatggtctataggataaacttgacaacttcaagaagaacaaaggtaccacatttcagaatagctgttggagcttttcactacgtattttt

SEQ ID NO: 10433 - DNA, 474 bp, Homo sapiens
  misc_feature (1)...(474): n = A,T,C or G
gattgataccaaactgagaccctaggccagngcggnggaattcgaatttttctgtttgtcatggaaatgtaagagtggaatattaatacatttcagtttagttctgtaatgtcaggaatttttcaaaaaaattaaaagatggactggagctttttctttgtgaatagaaactggatgccacagtgattcatgtgggttttattcctcttgtcttgctgttatttttgtaccttttatccctcaaaggacccttcttgggttttgaatggaagcctttattccggttaagatgttttcttctattttaccacttccatctttttttgtggccctcgatcctatttttccctgactccatgcttggttggcccttataaaacttgtgcccaaaagattgaggattagactttccgaggacttacctgtcctaggggagtaggcaagcacttccactatggagggggtgggggaaag

SEQ ID NO: 10434 - DNA, 474 bp, Homo sapiens
  misc_feature (1)...(474): n = A,T,C or G
tgagcagagcccccttatgagaccctacgattgaacgccgattncaacaggaggaaaattcctggtacagtttaacgtaaggcttcactgatcactggtgtttttgatattgtgcttgtttttttgagacagagtctcactcttgcccaggctggagtgcaatggcacggtcttggctcactgcaacctccacctcccaggttccagcaattctcctgcctcagcctccccagtagctgggattacagacatgcaccaccacacctggctaatttttgtatttttagtaaagacagatctcaccatgttgtccaggctggtctcaactcctgacctcaggcgaaccacccaccttgcccttccaaagtgctatgattacaggcgtgagccactgcacctagcccactgatcactcttctgcttacagaatatcagaagtcattctagaggcatatttgaagagtggaaaaatca

SEQ ID NO: 10435 - DNA, 456 bp, Homo sapiens
  misc_feature (1)...(456): n = A,T,C or G
atagagatcgttagcccgtgcggnggaattcctcttgaatagcagagtatgggaggaacacacttatgaagaatagcgtcgctttgtctttttaagaaacactagtaagcaagatgggcgcggtggctcgcgcctgtaatcccagcactttgggaggccgacgcgggcggatcacgaggtcaggagatcgagagcatcctggctaacacggtgaaaccccatctctactaaacatacaaaaaaattagccgggcgtggtggtgggcgcctgttgtcccagctactcacgaggctgaggcatgagaatggcgtgaacgtgggaggctgaggttgcagtgagccagagatcacgccactgcacaccagcctgggcaacagagcgagactctctcacaaaaacaaacaagcaaaaatgctagtaagctacctctgcactgtcaatgagacaccctcaga

SEQ ID NO: 10436 - DNA, 453 bp, Homo sapiens
  misc_feature (1)...(453): n = A,T,C or G
ggcggtccccccctgattacccgctagngangctnagcacagnccggcggaattctaaatattctctaaaatactatttgtttagcacaccatttattttgaaaaacaggacaaaagaaaactcaatcagcccgtgtttgattcactttgaatttcaaattgaagaattccaaataaaactttattacctctcagtttaactatggtttgtctaatagttcattttaggacaaaatggggagtaaacttctccaactctgaggtgaaatacaccatcttcatgaccaaacacggtgaatcacgttgccatttttcattcttcacatctctcctgtcttaacctcctttccacttccagctgtgcttggtttttgtgtatttttgtaataggatgaatgttgttttcattttctttctcagaggtgcaaaatgcaggagcagagagtgtggatt

SEQ ID NO: 10437 - DNA, 459 bp, Homo sapiens
  misc_feature (1)...(459): n = A,T,C or G
nattgtagatcgatgacccctaggccgagcggnggaattcaaggagtgctatgcggaattctctgcatagcagaaaagctcccaccattttcttttgatgtggttttaaagtctcacgttctctataatagaaacagcaggtcttgtcagctccttgtgtggctgatgtgtctggaaatgatgtagttcaggaaagcattttttttttctttgaaccttaaaggttctattattaaaagcagcacagattccacatttttatacatgaggatcttctttgtggtgaataccaggattgactgcatccctttaaagaagttttatgtccctgactctggctaaaattatctaatttccagatgcttttgtagatgactgaagtatttgtgagccacatattgggagttctagatttgagtgaatggcaggaaagggccatctccattgagatgattaagn

SEQ ID NO: 10438 - DNA, 449 bp, Homo sapiens
  misc_feature (1)...(449): n = A,T,C or G
gttgaaaccctactgatgaccatctgaccangcggtggaattcggaggaaccagatgctttttaagatttgtcaccaggtcttatttttgcattgtctatattgaaattttttgatgtgtttcaacaattccttctttttgttctctggaaatttttaacgaagaatgattgtttctatcaagagtatacgctataatggactttgctgtgttaaagactgatgtaaatatgtctgaagtgtttggtgatataaattagcagatttcacccgataagtcagaaattacactatcatctgtgggtacttttagaataactgatgttttaacaggggatgtaatacgtttggtgaaaagggatgagatagccaactctatgtgtttgattataaaatgctgacagtgcttcacagctctccatttttattcatatcagtgtaccattaaan

SEQ ID NO: 10439 - DNA, 444 bp, Homo sapiens
  misc_feature (1)...(444): n = A,T,C or G
nctgagaccttttgaaggcgttggaattcccattccatggagaccctcatgccatgtttgctgagttcttcggtggcagaaatccctttgacaccttttttgggcagcggaacggggaggaaggcatggacattgatgacccattctctggcttccctatgggcatgggtggcttcaccaacgtgaactttggccgctcccgctctgcccaagagcccgcccgaaagaagcaagatcccccagtcacccacgaccttcgagtctcccttgaagagatctacagcggctgtaccaagaagatgaaaatctcccacaagcggctaaaccccgacggaaagagcattcgaaacgaagacaaaatattgaccatcgaagtgaagaaggggtggaaagaaggaaccaaaatcactttccccaaggaaggagaccagacctccaacaaca

SEQ ID NO: 10440 - DNA, 471 bp, Homo sapiens
  misc_feature (1)...(471): n = A,T,C or G
ggagcgtccccggntnnnnnnnnaactgagtgcatagcccgngcggnggaattccactgggtcagaacccaacagaagctgaattgcaggatatgatcaatgaagtggatgctgatggtaatggcaccattgacttccccgaatttttgactatgatggctagaaaaatgaaagatacagatagtgaagaagaaatccgtgaggcattccgagtctttgacaaggatggcaatggttatatcagtgcagcagaactacgtcacgtcatgacaaacttaggagaaaaactaacagatgaagaagtagatgaaatgatcagagaagcagatattgatggagacggacaagtcaactatgaagaattcgtacagatgatgactgcaaaatgaagacctactttcaactcctttttcccccctctagaagaatcaaattgaatcttttacttacctcttgcaaaaaaaagaaaaa

SEQ ID NO: 10441 - DNA, 467 bp, Homo sapiens
  misc_feature (1)...(467): n = A,T,C or G
ggaaattggncctcgtagaccactagcttggtgtgctgtgaattaaaaaaactggcgtagctttcttttgctagcttcaactcacactgattatagctatatgaccatttctggccagcgagcggttgttttttaaggagacgtgcctaacttgcttatgactggagacaatacgactgtcctgtgctatttctgcgacgaacttgcaataccatgcttgtgaatgggctaccagatcgtgctctttgttagagatctaatcaagttttctatttaatttttccttaatagatatgtttagaaatcttgttttgttttgttttgaggcaaagtcttgctctgttgcccaggctggagtacagtggtgtgatctcggctcactgcaaccttcacctcccaggttcaagtgatccttcctctcagcctcccaagtagctgggactataggcacaccacgatgcccagct

SEQ ID NO: 10442 - DNA, 552 bp, Homo sapiens
  misc_feature (1)...(552): n = A,T,C or G
nggttcggaacaccagtccagtgtggnctagatcgacattctgatcaggtgctgcttccttcctctaaggacctagtgaatattgagatgttcctgacggccaaagaggtggaggagtccctggagaggcgtgagacggccacctgcctggcctggtgccatgacaacaagtcccggctccggaagatgaagagctgcctggagttcagcctcagaatccaggagttcattgaactcatccggcagaataagagactggacgctgtgagacatgcaagaaagcacttcagccaagcagaagggagccagctggacgaggtgcgccaggccatgggcatgctggccttcccgcccgacacgcacatctccccgtacaaggaccttctggaccctgcacggtggcggatgctgatccagcagttccggtacgacaactaccgactacaccagctgggaatacaatttgtgttcaccctcaccctgcaggccggcctctcagccatcaagacaccacagtgcttacaagaggacggcagctccaagagccctgaa

SEQ ID NO: 10443 - DNA, 461 bp, Homo sapiens
actcgtagaacactagctcggtgtgccgtaattcggacatactgggccctgctgaggactctgctaacgctggcagctttctccacagccatcgctgccctcaaactttggaatgaagatttccgatatggctactcttattacaacagtgcctgccgcatctccagctcgagtgactggaacactccagcccccactcagagtccagaagaagtcagaaggctacacctatgtacctccttcatggacatgctgaaggccttgttcagaacccttcaggccatgctcttgggtgtctggattctgctgcttctggcatctctgacccctctgtggctgtactgctggagaatgttcccaaccaaaggggtgagtccctaagaaaagagaccagaaggaaatgttggaagtgagtggaatctagccatgcctctcctgattattagtgcctggtgcttctg

SEQ ID NO: 10444 - DNA, 483 bp, Homo sapiens
  misc_feature (1)...(483): n = A,T,C or G
tgggtacacnnaaatgatgacacttgaagngcgtggaannccacctgtaatcctagctactcaggaggctgaggcaggagaatagcttgaaccaaggaggtggaggttgcagtgagctgagattgtgccaccactgcattccagtctgggtgacagagcgagtctctgtctcaaaaaaaaaaaaaaaaaattttaaaaaaaaatctccaaaattcaatcttttaattttttttttaaaaaaaaaaaaaaaggactccgggccacttttaactttttttttccaactgtttggacaatattttaatatggggttttaaaagcctaaagaaataggttttaaaaccctcacctgaaaaaggtataaaaataaggttaaacctttttaaagacaaaccccaaaaatcagctcccttttctttaataactttggcaggggggtgggctttaatttctccatcaagtaaggcagccttttgttttttt

SEQ ID NO: 10445 - DNA, 478 bp, Homo sapiens
  misc_feature (1)...(478): n = A,T,C or G
catcgacgnccntatcgtagactctagtccagngcggtggaattcaggaaacagagttctttcatgtatgtaagtagttaataggacataacatcagatgtctagatgaattatagctatggcttaattacacaataatctgccttcttagtagaaattgcttatttccagcatttgctgtaaaaaaaaaaagacagtcagtttacaaaaatatacaatcctatggatttaatttatttaaattttgttcattctaattttttttggggcgggttaatagcaagttatcttagttgaaaatagagattcattcattaaagaatattaaatcttttgtgcccaagtgccttaataaataagtagaatcttaacttttctgataagcattccagtaaaagctaatgtacatagatatgccttgagccactgtttctactttcacccttctctccacacatattgccacgtctgctgtgan

SEQ ID NO: 10446 - DNA, 452 bp, Homo sapiens
  misc_feature (1)...(452): n = A,T,C or G
nctagatgaccattagnccagncnggngnnntnagtgggagaagagtccccatgaaataagatgaaactgattccatgcactagtacatgtaggcttctcccttgtgcaaagcttagcaatttgtaggaaactttgatctttttgtccaagaaaaggaatgtctgacaggcttaagctttcgtccccttgcacttagactcgaagttagtaaatccttaaaggctttttaatagcagacttccaaaagattgcatttaggatttctagcatgcttttaatttcagattttcagctgacattagctatagtatacagtaggttaagactcatgtctatgactttcactctaagactggcaaaaggacagcagtcttctatgtttagtcaatattcatttcagtagaagataatcttatctaatttttgagaccagaataagccttttaaggta

SEQ ID NO: 10447 - DNA, 491 bp, Homo sapiens
  misc_feature (1)...(491): n = A,T,C or G
ccagtgctatgataccatagatgtccgctggaaancacatcatccaactattggatgattatccgaaatgtttcattgtgggagcagacaatgtgggctccaagcttatgcagcagatccgcatgtcccttcgcgggaaggctgtggtgctgatgggcaagaacaccatgatgcgcaaggccatccgagggcacctggaaaacaacccagctctggagaaactgctgcctcatatccgggggaatgtgggctttgtgttcaccaaggaggacctcactgagatcagggacatgttgctggccaataaggtgccagctgctgcccgtgctggtgccattgccccatgtgaagtcactgtgccagcccagaacactggtctcgggcccgagaagacctcctttttccaggctttaggtatcaccactaaaatctccaggggcaccattgaaatcctgagtgatgtgcagctgatcaagactggagacaaagtg

SEQ ID NO: 10448 - DNA, 450 bp, Homo sapiens
  misc_feature (1)...(450): n = A,T,C or G
cgcgtcccgatccccatcatgacacgatacctactganancncnnaannnnnaanagnaacggccctggcagtttcagagatattggacagatcaagtttattctgctcaactgcttgtgaggctcgagggagcctaatccatcaaaacatgttcccacatcccattcccctcaccactgtgcagtgtgtatgcagtttgtgcgaaaggaaaacctactctctctggcctgtcagcaccagttttgccgcagctgctgggagcagcactgctcagttctcgtcaaggacggcgtgggcgtgggtgagtctgccacagaacttataaaaagctggcatgaagcggttatctttgactctgccttttcatgtactcaacgaaactgagtattttcttctgaacctgattggggtttttatcatcacaactagtgactgtcacatacctcccg

SEQ ID NO: 10449 - DNA, 414 bp, Homo sapiens
aaaatctccaggtcctgatgaagttgtagggccagaaggaatggaaaaattttgtgaagacattggtgttgaacctgaaaatattattatgttagttttagcgtggaaattggaggctgaaagcatgggattttttaccaaggaagaatggttaaagggaatgacttcattacagtgtgactgcacagaaaagttacaaaacaaatttgactttttgcgctcacagttgaatgatatttcgtcatttaagaatatctacagatatgcctttgattttgcaagggataaagatcagagaagccttgatattgatactgctaaatctatgttagctcttctgcttgggaggacatggccactgttttcagtattttaccagtacctggagcaatcaaagtatcgtgttatgaacaa

SEQ ID NO: 10450 - DNA, 467 bp, Homo sapiens
  misc_feature (1)...(467): n = A,T,C or G
tcgcggggnnncctcccatcggtagcctagcncagtgtggaggaattcctctaatcaatagtggtttagctttcttttctatttcactcgtttctagggttttttatttgcagtttaggaactattaggaatgtcaggactttatcagcaggggtaaaactaccacctggcctagcctaagtaggaagtgaaaagataattcaccaaacaatgattaatcagatagaagttctagtcaagagggatattgttgaagttacctcttttagcctagatacatggattcttttcaaatcaggaaagattagaaaaggaacccaaaaaaccctttaacagtgtgaatctttatagtatttgaaaatgagaagaagcagcagattgtaatttggtttattggatgtgatggacgttctgtaatagaaaacctgaaacgatgattgaatgggaaaaagagactacaaaatttg

SEQ ID NO: 10451 - DNA, 479 bp, Homo sapiens
  misc_feature (1)...(479): n = A,T,C or G
ctcgaccccccatcgtagactctaggccagngcggnggaattcaaataagaacatttaagagacgaggccaggcgtggtggctcacgcctgtaatctcagcactttgggaggccgaggtgggtggatcacgaggtcaggagttcaagaccagcctggccaagatggtgaaaccctgtctctactaaaaatacaaaaattagccaggtgtggtggcgggtgcctgtaatcccagctacctgggacactgaggcagagaattgcttgaacccagtaggcggaggttgcagtaagccgagatcatgtcactgcactccagcctgggaaacagagtgagactctgtctcanaaaaaaaaaaaaaaaaaaaaaaaaaaaaaaaaaaaaaaaaaaaaaaaaaaaannggggggcccctttaaaaaaaggggccccttaaaacccccgggaaacccccgggggggctttttaaaggcccccccttg

SEQ ID NO: 10452 - DNA, 486 bp, Homo sapiens
  misc_feature (1)...(486): n = A,T,C or G
gaagtttannaagaangnnnncctggagaccctagctgatgtccctagtacatgcggtggaattcggctcctgcactggccccgggaaattcgaacgcacactgggctttctcttcatcttgttatccacaaatgagtcatctgtgggcatgtgaacttttatgcttattttagggagggggaaaaggccatcttgtcagcccacatgagtgggcatgtgtgaattttagtagctgccatttgatggaaatcggtaaatgctgtgatcgataagaaaaaaagctgcattgggtggtacagaccagtgttatcagaatatctgcctaagctcaaacataaacagcctttctcccccaggggaatcaaatcgtgtatgataaacacgcgaaaagatgtagcataaagtaggtctcagaacgtctgcagcaccatactttagagctgtctgcatctttaaataaaaggaggtggactcaatcttagcag

SEQ ID NO: 10453 - DNA, 454 bp, Homo sapiens
  misc_feature (1)...(454): n = A,T,C or G
cattgacctgcattagcatctagaccangcggtggaattcaaacttcacattttcttttggcagtgcatcaggttgttggcatattactggtttgagtgcttctagtatactgaactttcagaagtttacctacttcttaatcctgtgtcttagctagatgtttacaatctgattcactttcagcaatctattatccatgaataataatcttatattactattttcccccaacattcagtagaaaaagttgatgcccttgctagtccccaaatctaaacttgaatggtttcacttaaaagttactcatttgaggctgggtgtagtggcgcatgcctgtgatctcagcactctgggaggccaaggcaggcggatcacttgaggtcaggagtttgagaccaggccaacatggtgaaaccccgtctctacaaaaaatataaaaattagctgggcgtn

SEQ ID NO: 10454 - DNA, 468 bp, Homo sapiens
  misc_feature (1)...(468): n = A,T,C or G
aggcgancccgggggngcnaaaactttaactactctaacngtcngnananncnannanannnannaccctagaaaaggaatcgaaaataataaaggtcttaacataatttactctttataaattacctgttcatattttgtggacccatagttttagcacattaaaaatgaatgtttgatattacagaatattcataacaaaatggaagaattataggaattaacttgaatttggcatttttaattttgtgatttatcattttattttttcttgaaatttcaaacacaaggaaagcatagaatagcttttaaaagtagctatgccttcttccaaatgttattttattcaaaaaggtaaccaggttgtgtattaaacctgtgaaatattgtgatgcattttattactgaaagttatttaactgcctttacttgcacataaaaactctcatttacggccaggtgctgggg

SEQ ID NO: 10455 - DNA, 481 bp, Homo sapiens
  misc_feature (1)...(481): n = A,T,C or G
tggggcggnnnnaggaagaactgagaccctcggaagactgangactctcgcgaagggcggtggaattccagctactcatgactgtgagatgggaggatcattctagctcaagaggttaggactgccgtgagatgtgttcgagttactgtattccagcctgggtaacagagagagagagaccctttcttaaaaacaaaaaaacagttttctaaagtcatcaggaaactttttagatgagtcattcagtgatttagttttggtggctgttctttttattttctccctattctgaaactcactttcctaacttctttagtgtgcattttaatagaactttccaaaattctgttcgtacgctatactctcctggttcttaattttctgacagttttggcatttctatctttgtctccatggtctgtagttaccacaaagactttgtctttatcctttggcttttactgtcctgagtctctttcan

SEQ ID NO: 10456 - DNA, 450 bp, Homo sapiens
  misc_feature (1)...(450): n = A,T,C or G
cactgggtgcatagcacangcggnggaattcttgggagtctattccctgggatgttctattaataataaagtgataataaatgaaggttaaagtcaagtgttcaattactacaccaggaaagattgattatttctgaggaaaaggtccatttatttccaaactagtctgtagtggtttagagtaagcattattttatgaagtggtacaagattgcaaaggttagtaaagggacctgtctgtcaggtcaatcttcggtcttcacttttactggcaagggattatgtgaagagtaagtcatacaagggatatgattgtaaggaggtcctgaacaaagcatgataaatgttagtccatgtgtattattaaatggtctaaagaaaaatcatgactgatcgcataatttttaatgtaagtaaatgagctcactaagggtaattaaatactagctt

SEQ ID NO: 10457 - DNA, 453 bp, Homo sapiens
  misc_feature (1)...(453): n = A,T,C or G
atagatnttagatgacccttcnnnnnnnnnngaattcctggaatggaacaacctcacccaaccattgctgtggctttctccaggtcatttgttggctttaaataacagaagaagaaaataatatgtttcggtcaaagaaaaaggaaagtgtttccaaagatatgttttactttggctagtattagctttttttgtttttttttctgatattcgaaagatagtcaccaagaacatctcctccatcagatcatcaaagtccaaaagcttctctcacatattaaccaaagagtatcttgttctatttgggaaaaacaccttttccaagaacacatgggacgggaagaaagaatccagacaactcccaaatcaccagatattctacatcagtcctgattattagtgaggttccaagtatcacagccaaatttccccaacatccacaactaagttcta

SEQ ID NO: 10458 - DNA, 464 bp, Homo sapiens
actcgtagaacactagcttgatgtgcagtaattcgggatctcggccctgtgcagagcgagttaatgtgtccatctgcccaaccctgtcctgtgaaaggacctggttttggccaggacctgacaaatacccaatggcagcagtgtcaacagacgggagtccagccagggtgggtgcccttgtcattgaggttagggacagctatccccaggttatgcctggccccacccagcagggagttggggtccccccacaggctgtgagctctgtgggccctgggatgtgatctagctcagatgccttctcatccttgatgtcatagttgagtgcacccaagtggcacccactggcggccaggggcacagcctggtggtggtggcaatagaactgtgcccctcctcagctcctcgcttcccctcccacagccccagccttactccaccatgcggacaatcattttgtacgg

SEQ ID NO: 10459 - DNA, 469 bp, Homo sapiens
  misc_feature (1)...(469): n = A,T,C or G
ggtganccagggtgccggaaaagaaangcttgatangctaatgaagnccgnggaantctgagagagctggaaggcatggtggctaagggctacggttatcaggtgaaatttgagatttgtaggctgactatattttcaagcttctgaacttttgcttatgcaaaatattcatcccaaagcctctagcgtcatagtttcctcacccaaattactatgtttccacaagatttatatagttggtctatctctgcggtccttgaaagtgaagttggtgttactaggctgtgggttttgggggctcagcagtgacctggagtgtgcaaataaatgttaagttgaaacctcaaaaaaaaaaaaaaaaaaaaaaaaaaaaaaaaaaaaaaaaaaaaaaacccccctactaaaaaaaaggggccccaaaaaaccccgaagaaccccctggggggctcttttattgcccccacttttt

SEQ ID NO: 10460 - DNA, 468 bp, Homo sapiens
  misc_feature (1)...(468): n = A,T,C or G
natggcnccnnnntttgtagaatagtagtacagtgaggtggaattcgtttgtcattagcctgagtagaaaggcctttaaaatttttttagaaagcatttgaatgcattttgtttggtattgtatttattcaataaagtatttaattagtgctaagtgtgaactggaccctgttgctaagccccagcaagcaatcctaggtagggtttaatccccagtaaaattgccatattgcacatgtcttaatgaagtttgaatgttaaataaattgtatattcactttannaaaaaaaaaaaaaaaaaaaaaaaaaaaaaaatttaaataaaaattaaataaaaaaaaaaaaaaaaaaaaaaaaaaaaanaaaaaaaggcgcccttttatttaaaaggggccctaaaaaacccggtgaaccccgctgtgggtttttttttgaccaccccctttttggtgtcccccccccccccgc

SEQ ID NO: 10461 - DNA, 485 bp, Homo sapiens
  misc_feature (1)...(485): n = A,T,C or G
ggaatgtcnnnnangtnnnnnnaattgtagacactagctagtgcgccgtaattcctgaccagcaccatggcggttggcaagaacaagcgccttacgaaaggcggcaaaaagggagccaagaagaaagtggttgatccattttctaagaaagattggtatgatgtgaaagcacctgctatgttcaatataagaaatattggaaagacgctcgtcaccaggacccaaggaaccaaaattgcatctgatggtctcaagggtcgtgtgtttgaagtgagtcttgctgatttgcagaatgatgaagttgcatttagaaaattcaagctgattactgaagatgttcagggtaaaaactgcctgactaacttccatggcatggatcttacccgtgacaaaatgtgttccatggtcaaaaaatggcagacaatgattgaagctcacgttgatgtcaagactaccgatggttacttgcttcgtctgttctgtgt

SEQ ID NO: 10462 - DNA, 488 bp, Homo sapiens
  misc_feature (1)...(488): n = A,T,C or G
agggatgtccnnnnagtnaannnaaactgatgaacctagctcgaggccgtaggaagngcggnggaacatgttgagtgatgaggacaggctacctttataaagactttattatctttgacatgatatttctgggaggaacgctcatgttgagatatatagaatactagtatggctccgtatcagtattatcccatgtgctttcacacagatgaagaacaatatttgcagtgatttaccaagattttcagtagatgattctatttatttaaatatcttgaagtgaagcctttgatgaatctgtcctataaagtattagatagattttggtttgaatagttgtcataattagctatagtattgtattttgtaagctatggctcttttcttcagagcttcaggaagtaagtaacactaatatttatttttttcaatttattatcatattttaaagcaaaaacctttaaactaaggaaaaatcagtttagacg

SEQ ID NO: 10463 - DNA, 448 bp, Homo sapiens
  misc_feature (1)...(448): n = A,T,C or G
nctgaaattagataaccctngnggnggnnnncgtaccatccccaaggcttcaatacttcttttcttgtcaacattgccactatttttgaatcagagaatttcttttgcctgggattaaatggaatggaatacttggcctagcttatgccacacttgccaagccatcaagttctctggagaccttcttcgactccctggtgacacaagcaaacatccccaacgttttctccatgcagatgtgtggagccggcttgcccgttgctggatctgggaccaacggaggtagtcttgtcttgggtggaattgaaccaagtttgtataaaggagacatctggtatacccctattaaggaagagtggtactaccagatagaaattctgaaattggaaattggaggccaaagccttaatctggactgcagagagtataacgcagacaaggccatcgt

SEQ ID NO: 10464 - DNA, 485 bp, Homo sapiens
  misc_feature (1)...(485): n = A,T,C or G
cggagttnnnanaaganagnnnntttgtagacactgctggtgtgccttaattcccaccgttgacaccaaaaggcggaccgagacagtgcagaagctgtgcccaggggggcagctcccattcctgctgtatggcactgaagtgcacacagacaccaacaagattgaggaatttctggaggcagtgctgtgccctcccaggtaccccaagctggcagctctgaaccctgagtccaacacagctgggctggacatatttgccaaattttctgcctacatcaagaattcaaacccagcactcaatgacaatctggagaagggactcctgaaagccctgaaggttttagacaattacttaacatcccccctcccagaagaagtggatgaaaccagtgctgaagatgaaggtgtctctcagaggaagtttttggatggcaacgagctcaccctggctgactgcaacctgttgccaaagttacacatagtac

SEQ ID NO: 10465 - DNA, 470 bp, Homo sapiens
  misc_feature (1)...(470): n = A,T,C or G
gaaggtcccagggngccggttattggactacgatgactcgactgcagnancgnngnaannnnnggaganccgncggaacttaaagggaaattttcacaatgtccggagtccttgatgttctgcaaatgaaggaggaggatggccttaaggtgcttgcagcaggaacccacttaggtggcaccaatcttgacttccagatggaacagttcatctataaaaggaaaagtgatggcatctatattataaatctcaagaggacctgggagaagcttctgctggcagctcgtgcaattgttgccattgaaaaccctgctgatgtcagagttatatcctccaggaatactggccagagggctgagctgaagtttgctgctgccactggagccactccaattgctggccgcttcactcctggaaccttcactaaccagatccaggcagcctttcgggagccacggctttttgtggtg

SEQ ID NO: 10466 - DNA, 477 bp, Homo sapiens
cgcgcccgcccccccccttcgggccccatcgagatccatatccgtgtggtggaattcgaatgtgtgtgtgtgaagtcctcagctgtaaggtgctattcagtcctgtgacccttattttggaatgctcttcattactgttgctctgttttgtgacttcctgggaaaccgcctactttggtgtggtgtcaccttgagctgtgcacataggacaccagttttgacttaacctaacaggcagtttttatctctagctttttcaagccaggtattgagcagtttcttggccaatggcctgagaaaccacctgtccctgtcaaggggtgattttattggttttaagtggggaagtaatcccatgtacttatttcttaaatacctaggaagttcttcttggtggctcctcttggccctcccctctttctcccccaacccaccatcctgcaaggcaaggaatggcctctccctccacagaggcaa

SEQ ID NO: 10467 - DNA, 559 bp, Homo sapiens
  misc_feature (1)...(559): n = A,T,C or G
nattcgagccccatcgaacactagtccgtgtggtgcaattcgtcgctacatggatcaatgggttccagtgattaatctccctgaacggtgatggcatctgaatgaaaataactgaaccaaattgcactgaagtttttgaaatacctttgtagttactcaagcagttactccctacactgatgcaaggattacagaaactgatgccaaggggctgagtgagttcaactacatgttctgggggcccggagatagatgactttgcagatggaaagaggtgaaaatgaagaaggaagctgtgttgaaacagaaaaataagtcaaaaggaacaaaaattacaaagaaccatgcaggaaggaaaactatgtattaatttagaatggttgagttacattanaataaaccaaatatgttaaagtttaagtgtgcagccatagnttgggtatttttgtttatatgccctcaagtaaagagnagcccgaaggggttatcatattgaaaccatatttattgtatttgatgagatatannnatctcaagttattatnaatctactagtatt

SEQ ID NO: 10468 - DNA, 552 bp, Homo sapiens
  misc_feature (1)...(552): n = A,T,C or G
agaaaaaaaacctttganaccacnctcgaaccacagttcgtgtggtggaattccgctctctagatctgcaaattcatttattcattcaacaaatccctactgagcacctactatgtgcaaggcattgttttaggcttttaggtagatcagtgaacaagataaagatctctgcctgccaggcgcggtggctcatgcctgtaatcccagcactttgggagaccaaggtgaggggatcatgtgaggtcaggagttcgagaccagcctggccaacatggtggaaccccgtctctactaaaaaaagcacacaaaaaattatccaggcacggtggtgggcgtctgtaatcccagctacttgggaggtggagtcgggagaatcgcttgaaaccaggaggcagaggttgcagtgagccgagatcaccacgccactgcactccagcttgggcaacaagagagaaactctgtctcataacataacaaaacacacaataaaaaaaaaagggggcccctggatacaaggaggcccattaaatcccgatggcaaccctggatggg

SEQ ID NO: 10469 - DNA, 445 bp, Homo sapiens
  misc_feature (1)...(445): n = A,T,C or G
gggtgccnnnttcganncccattgtagatcattagtccatgcggtggaattctatggttctggcagctactaattttccctgggatatagatgaggctttaagacgacgccttgagaaacgaatctatattcctttgccgtcagcaaaaggcagggaggagctattacgaataagtctacgtgagttggaattggctgatgatgttgaccttgcaagtatagcagaaaacatggaaggttattcaggtgcggacattaccaacgtgtgcagggatgcgtccttgatggcaatgagaaggcgcattgaaggtttgactccagaggaaatccgaaatctttccaaagaagaaatgcacatgcctacaactatggaggatttcgagatggctttaaaaaaggtttctaagtcagtgtctgctgcagacattgaaagatacgagaaatg

SEQ ID NO: 10470 - DNA, 450 bp, Homo sapiens
  misc_feature (1)...(450): n = A,T,C or G
agtaaattgaggcctntnnncctgagtgtcctcgtcagngtcgnggaattcctattttcaagttataaaaactttcaagaagcatgaattcattatctaaactgaattaatatcttgtaaacattttttgtgagaaacggtttttgtgtttggtttttccagttgaatgaagactgttagacttcatggggacaaaattgttattggttaacattaaaataataaaattgtttaatatttatgaaaggcctttatattccaaagtgctcaaatttaaccacgactttaaattactatatcagacatggtatttttcttactggtttttgaaaaggacttgtaagttatgaatgcactattttaggctttgttcagcaggcagtgaaatctctttagttcataatgcatggttcagtgttctttaatattttgcaataaatcttagcagcn

SEQ ID NO: 10471 - DNA, 464 bp, Homo sapiens
  misc_feature (1)...(464): n = A,T,C or G
attgacccctntnaattgatgaccatctgaccaggcggnggaattcgtagtagtgattgtggtttgtatttttgtaatttacaactgattattgttaatttttgcttctatccctaaatttcctatattgtgtagtttcaatttagaaagaaattgatactctatgtgttgttctctaatattttccaaaatgggagatttggctgatcaggaaaaagttctagtcaattttgaagagttggttcccacatgctttaaaagacataaacactgccaaatcttactgagagataaatcagattaatttatctaacatatatatatttatatatatatatagagatgtgtaatatatatgtatgtacgtatgtgtgtgtatattcctataacgtttacataacatagaaacctacttcattgtatctacataaaatacaaacttaattatacactcatagcagaga

SEQ ID NO: 10472 - DNA, 452 bp, Homo sapiens
  misc_feature (1)...(452): n = A,T,C or G
cctgacctgcattagcattagaccangcggtggaattccaaaacctacaacaattagccaagcatggtggtgtgagcctgtagtcccagctacttgggagactcacgctggaggatctctcgagcccaggaggcagaagatgaataaataaatggatgcaactgaatgggatgaggtctctcttgaaggagagagcaaaagagatttaaatagtaacaattataataaggctgggcgcggtagctcacgcttgtaatcccagaactttgggaggccaaggcaggtggatcggttgaggtcaggagttcaagaccagcatggccaacacggtgaaaccctgtctctattaaaaatacaaaattagccggacatggtagtgcgtgcctgtggtctcggctactcaggtggctgagacaggagaatcgcttgaacctgggaggcacaggttgtag

SEQ ID NO: 10473 - DNA, 447 bp, Homo sapiens
atcgagaccctagccggtagtacattagtacatgcggtggaattcacagtcttgacttgttagcactctgtatttttgtgccgggtgtgtacttttagatttaaatcaacaacaaaagtaaaacatttcctacagatgcagagacaaatggggataaatgctatggttatacaaacccgtcattaaccgtgttcaatttatgttactcaagatgcagccatatatatcttcctgaactggagctcttatcatgcacttctcagatactttccaggactcctcatcacatgctagaaaaaatctatactctttggactacatttgaggtcctttattatataaccccattctaccttctccactgtctcttctgggactcctctcaccactcattcagtgcctcagcccagtgtctgttgttggttcctctcatataactcaggaagc

SEQ ID NO: 10474 - DNA, 482 bp, Homo sapiens
  misc_feature (1)...(482): n = A,T,C or G
cctgatagccctctttgagagcttagtcagngcgcgggantaatgctgattttttttaaaggcagctcctattatgtggtgaaattttgttaataaatgattatacaaaacagtcaccacctaaaactgggtagtctttgtacattgtcagatatctttcaaagtataaattatgaataaaaatgttccacatgatatgtgtacaaattctttttaagattgtcatcttgtacagcaaaatattatgttgggatattacttccttattaatttgcaaatgattggattaaaaaagctcactgtattccttactaacctgttgtgtgaaacataacattggcagtcgaggagtcagaactcggattcccagcctcactccctctgtgtgtgttgaccacgtctctgctgtgaatatgatttcatgcagaggtctgttatggggctttgcagcgtggggggctgcagaagattctcatacattn

SEQ ID NO: 10475 - DNA, 459 bp, Homo sapiens
  misc_feature (1)...(459): n = A,T,C or G
gctcgcccgggggcnaacctagctcacgaacgtcngnanaancaaanaaannnaanngaaaaagagaacactttatgccaactcagtcttacagccacttttctgattacctttccagagagggaaatgctaggcccattgtcttcactccaaaggacaatatgagtattcccctgtaagtgaaatgtttatttatgtataaatgggaaacttcttggagtatttttattaaggtgccttgttctgctccaactatttgtgtaaagtggctgctcaacttggccattttctctttgtaaaaatattccctaattgttgactctaccatcacctgaagttggatgtagttatatcctaggaatccttgactaatcatgaatagcagagtaaatactgggttcctccccattaagtgagaagcatttgtgaagggcagtacagtgcctataaacatagtag

SEQ ID NO: 10476 - DNA, 446 bp, Homo sapiens
  misc_feature (1)...(446): n = A,T,C or G
ggcgaccnnnnnaatcgagncccttgnnattgtagacattagacagngcggcggaattcgtagctgggaccacttgtgcttgctaggatgcctggctaatttttaatttttttgtacagatgaggtcccactgtgttgcctaggctagtctcaaactgccaggctcaagcaatcctcttgcttcagcctcccaaagtgttgggattacaggcatgagccactgcacctggcctaacggatttctgaagcattaatctgttctgttactttccagctaaaaaccaacaagtgtctgaggacacagtttaaactccaagatgatagggtcctccctcacctgggctcccacctaccctcatgacctccttttgtgaaatgctgaagggctctgcagctggttgtctggtactgctggcctttgctttctatttagcatgttccttctn

SEQ ID NO: 10477 - DNA, 443 bp, Homo sapiens
  misc_feature (1)...(443): n = A,T,C or G
ntttaactgtaacctgtcagnctgaggaccntcgagactagcctgggcaacaaagcaagaccctacctctaatttaagaaaataataataataatatgaacaactcttaccaaacaatagttttggcagcatttctggtgctgtctagtcatccatccttttacaagtataaaaataagataaaatgtcctagagccaatcctagcttaaatttgtcagtatttttatatgttattaagctttttcctccaaattttgtaactgaaattctgttcatctttgcatacttgatggcatctatgtcaatattgattgactatttatgagtagaattctgaaacctaatttaaaatttagtttgccctttttgttttaaaaaaaagtattgccttctgagtaaatgatggtagtaacatgaagtatagtttaaaactatagtatcg

SEQ ID NO: 10478 - DNA, 462 bp, Homo sapiens
  misc_feature (1)...(462): n = A,T,C or G
gggatcnnnnaatgagacctgagaacgtcggaaancgnnggcatagtacttttggtacattgtggcttcaaaagggccagtgtaaaactgcttccatgtctaagcaaagaaaactgcctacatactggtttgtcctggcggggaataaaagggatcattggttccagtcacaggtgtagtaattgtgggtactttaaggtttggagcacttacaaggctgtggtagaatcataccccatggataccacatattaaaccatgtatatctgtggaatactcaatgtgtacacctttgactacagctgcagaagtgttcctttagacaaagttgtgacccattttactctggataagggcagaaacgggtcacattccattatttgtaaagttacctgctgttagctttcattatttttgctacactcattttatttgtatttaaatgctttaggcaacctaaaa

SEQ ID NO: 10479 - DNA, 442 bp, Homo sapiens
  misc_feature (1)...(442): n = A,T,C or G
nttgaagtaccctacnccagagcggaggaattcgggggatattgggctgagtctacagcgtgtcttcacagatctgaagaacatggatgccacctggctggacagcctgctgaccccagtccggttgccctccatccaggccattccctgtgcaccgtagcagggcccctgggcccctcttattcctctaggcaagcaggacctggcatcatggtggatatggtgcagagaagctggacttctgtgggcccctcaacagccaagtgtgaccccactgccaagtggggatggggcctccctccttgggtcattgacctctcatggcctggcaggccagtgtctgggtttttcttgtggtgtaaagctggccctgcctcctgggaagatgaggttctgagaccagtgtatcaggtcagggacttggacaggagtcagtgtctgg

SEQ ID NO: 10480 - DNA, 454 bp, Homo sapiens
  misc_feature (1)...(454): n = A,T,C or G
cggggnnaattgagtccactacccgtgcggtggaattcctcaactattggttgtatcagtttgtgtatgtgcaaatgtcaaataatcttttgctttaattgctactgtacttgctttgaaagattacctactattttatgataaaatgtagttgtctccagagcttaaatataatttgtaaagcacttggtttaaatttctctctacctataaacagtttagcattaagggtttctattaatgacacagaattattggccaagtgtaatttcttaaaatttagcattactttaaatagccagcatgtaatacaagtaactacactacctcatatctacatgattttcaagttgtaatgcagatggacagataaaaaagattttacgtttgtcttttggccataagtgggaaagttttctgtatattgcatagcattacacatttatgcctattt

SEQ ID NO: 10481 - DNA, 462 bp, Homo sapiens
  misc_feature (1)...(462): n = A,T,C or G
atcgagccccctnattgatgaccttagtccgtgtggtggaattcagacccgagagcatgcccttctggcttacacactgggtgtgaaacaactaattgtcggtgttaacaaaatggattccactgagccaccctacagccagaagagatatgaggaaattgttaaggaagtcagcacttacattaagaaaattggctacaaccccgacacagtagcatttgtgccaatttctggttggaatggtgacaacatgctggagccaagtgctaacatgccttggttcaagggatggaaagccacccgtaaggatggcaatgccagcggaaccacgctgcttgaggctctggactgcatcctaccaccaactcgtacaactgacaagcccttgcgcctgcctctccaggatgtctacaaaagtggcggtattggtactgttcctgttggccgagaggagactggtgt

SEQ ID NO: 10482 - DNA, 489 bp, Homo sapiens
  misc_feature (1)...(489): n = A,T,C or G
catcgatagcgactacgctcgngcggngcaattccatttgtgctgcatcatatcggcccatctaccgtggaaagccagtagaaaagtgtccactcagtggggcctgctattcccctgagttcaaaggtcaaatctgcagggtcaccacagtgacagagattggcaaagatgtgattggtttaaggatcagtcctctgcagtttcgctaaggccccctttgtgtgcatgggtcagtcaccatatgttccccccagagaatgtgtctatatcctccttctaacagcaccttccccctgcagctactcttcagatctggctctctgtaccctaaaacctagtatctttttctcttctatggaaaatccgaaggtctaaacttgacttttttgaggtcttctcaacttgactacagntgtgctcataattgtccttgcctttccagcttaattattntaaggaacaaatgaaaactctgggctgcgtggagtg

SEQ ID NO: 10483 - DNA, 440 bp, Homo sapiens
  misc_feature (1)...(440): n = A,T,C or G
tgtggcttnnnnnaatcgtagacatctgtattggaggcgtttgcgntntggcctttatgacttcttttcatttttcttaaactaatttctcacaatttttatttttgtcctgagacttgaagggaaagtaagttttaatctagaccatattatttagttacatctaatctctctagacaaaagacagtctggagagtactctttagttctatttattaattttgtctctagattgagccagatttccccatgcatagctggcattttattggcctctgcagaattgctttttctggattggactttggtaatccatatgaaaatctctatgaaatttaattgctcgccaggtgtggtggctcacacttgtaatcccagcactttgggaggctgaggtgggcggatcaccaggggtcaggagttcgggaccggcctggcca

SEQ ID NO: 10484 - DNA, 479 bp, Homo sapiens
  misc_feature (1)...(479): n = A,T,C or G
agagctgtnnnnnaaatgagaacctgagaaccgtgaagaanccttgngctttgagaacagccatcggtcatgtgttgcaccgttctctgtatgtttacgttctttggactggcttctcccaggattcttttctgtgtttgtgtttttgatttgggctttatttttttctgtgtactgtactatattgtaaaagggattttagcagagactttagtctttggggcaagaggagaacaggaatgctgggctgtttactttaggtggagaatccatcttcagacctttggactattttctttcaactgcagtgtatagaaaaaccaaactacgacctcagagcagagtattaatgaaaagcacaaaaaaaggaactaagttcagcgaggggtggggggaggggggagatttttcttttgaaaaataatgactcttaggacatttgtttttcagttcaagtgctcttcagcactgtcttgtcn

SEQ ID NO: 10485 - DNA, 443 bp, Homo sapiens
  misc_feature (1)...(443): n = A,T,C or G
tgtggatnntnnaattgtagacattagtcagtgcggtggaattccgcatctaccctatggcctagcatttccactcttgcttacacatccaggagaaatgagtccttacatgcacaaaaggatgagtaccgtaatactcacatcagcaaataaacaatacagctgtgtgtcagtagtagaatgaataaattgtggtcgattcatacgttagaatacagcaatttaaaaacaactgctacacacaaaaatgttggtgaatctttcagacacaatgttgagcaaaaatagccacagaagagtgtaaggctgtacgattttatttaggtgaggttcaagaacagacaaaacacggtgatagtggtcagaagagcgggtacctctgagctgagggcattgaccagcagtgggcaaaagggaacattctgatcccagaaatgttctat

SEQ ID NO: 10486 - DNA, 444 bp, Homo sapiens
  misc_feature (1)...(444): n = A,T,C or G
cttcgagttcccctacnccagagcggnggaattcagcaccagcagcaccctctgccccgccgtgtgtcccgctgcgggacacaccctcaccccatacagagagggcaaggagggggacacaatcctgtttgcagaattccaggcctggagggaatcccccaccctggacaagacctgccccttcctggaaagggtgtaccgagaggacgtgggcccctgcctggacttcacaatgcaagagctctcggtgctggtacgggccgccgtggaagacaacacgctcaccattgagccggtggcttcgcaaacgctgcccacagtgaaggtggccgaagttgactgtagcagcaccaacacatgtgccctgagcgggctgacccgcacctgccgccaccgaatccggctcggggactccaaaagccattactacatctcgccatcttt

SEQ ID NO: 10487 - DNA, 476 bp, Homo sapiens
  misc_feature (1)...(476): n = A,T,C or G
nattcgaagaccactagtctagtgtggcggaattcctaaatttttcttgctgattttttttaacttccctattttagaaaactattgttgggctgttggtagtgctttccacagatgctggtcctcagtggattaggtcagaagctcatgttctgatagttcttcattatttcacaaaggtggacaacctgaaagagaaaaggctgcttgatgtcagcagaatctaaacccctacattaaagctttgcctcccattctgtggttgtgggggtggtaagaaggagatattggtaccaagaaaaatttccaaaactattgagagagagagagagaaagtattgaaattttgttctgccttgcaggatccatttatcattcattggtaaaggatatattccttgttcttaccaagtgtacatttaactcttgctgacatgttcagtgtattntattacttttaatggctgcttaaaagn

SEQ ID NO: 10488 - DNA, 452 bp, Homo sapiens
  misc_feature (1)...(452): n = A,T,C or G
attgacnccccattgatgaccattagaccangcggnggaattcgtggccacaccagccatcactgtcagcaactcctgcccagctgagctgcccaacatcaaacgggagatctctgagaccgaggcaaaggcccttttgaaggaacggcagaagaaagacaatcacaacctaattgagcgtcgcaggcgattcaacattaacgacaggatcaaggaactgggcactctcatccctaagtccagtgacccggagatgcgctggaacaagggcaccatcctgaaggcctctgtggattatatccgcaagctgcagaaggagcagcagcgctccaaagacctggagagccggcagcgatccctggagcaggccaaccgcagcctgcagctccgaattcaggaactagaactgcaggcccagatccatggcctgccagtgcctcccactccagggc

SEQ ID NO: 10489 - DNA, 475 bp, Homo sapiens
  misc_feature (1)...(475): n = A,T,C or G
cttgggcaccttngtttcgctgaccactatccatgtggtggaattcatccaagagtctacactggaaaaaagctttatgagtgtagcaaatgtgggaaagccttccgtggcaagtactcacttgttcagcaccagagagtccatactggagaaaggccttgggagtgcaatgaatgtggaaaattctttagccaaacctcccacctgaatgatcatcggagaatccacaccggagaaaggccttatgagtgcagcgaatgtggaaaattatttagacaaaactccagccttgttgaccaccagaaaatacacactggagcaaggccttatgagtgtagccagtgtgggaaatcctttagccaaaaagccacccttgttaaacaccaaagagttcacactggagaaaggccttataagtgtggtgaatgtgggaattcctttagtcaaagtgccattcttaatcaacaccgaagaa

SEQ ID NO: 10490 - DNA, 405 bp, Homo sapiens
cggctctccatgaagcagttcctggacttcggatcagtgaatgcttgcgaaaagacctcatttatgtttctgcggcaagagttgcctgtcagactggcaaatataatgaaagaaataagtctccttccagataatcttctcaggacaccatccgttcaattggtacaaagctggtatatccagagtcttcacgagcttcttgattttaaggacaaaagtgctgaggatgctaaagctatttatgactttacagatactgcgatacggatcagaaaccgacacaatgatgtcattcccacaatggcccagggtgtgattgaatacaaggagagctttggggtggatcctgtcaccagccagaatgttcagtactttttggatcgattctacatgagtcgcatttca

SEQ ID NO: 10491 - DNA, 450 bp, Homo sapiens
  misc_feature (1)...(450): n = A,T,C or G
nttgatnaccctnaattgtagacatctgtcagtgcggtggaattcgagataggagtgggctgtgatcttctacccagccaaacaggcaggactcgtgaaattgtgatgccttctaggaactacaccccatacacaagagtcctggagttaaccatgaagaaaactctgacttaggcactcagaggcatacactttttacagatggacaaaagctctggaaccctgtggcttcaaatcctttgggaagggtgactgttgtttcccctacacacagtgtaagccggaatgggaatcgctgaggctctgatccacttctaagacaggaaggaaagtgaaggcagagtgagcaggtaagagagggatatacaaggtcacatttcagacacccactcggcataccctgccgtactgcatcatcatttgttttctttgtagacactgaaatcctat

SEQ ID NO: 10492 - DNA, 458 bp, Homo sapiens
  misc_feature (1)...(458): n = A,T,C or G
cggatcggtatggaagccatangaataccgaaacngtacgnagngnctnggaanncagcagncccaaaaggacaacaaaacaatagataatgatctacgtactacttcgacactgtttttgagtgcagaggattcccaaagtaccgaggcgaatatgtcagtaccaaagaaaatgtgtaaaaggccatgtattcttatactagactccttgaaagctgcttctgtacaaaacacagttcagaatttacgagagtatttagaggtagagtgggaagttaaactaaaaactcatcgtcaattcagcaaaacaaacatggtggatctatgccctaaagttcctaaacaggacaatagcagtgattgtggagtatatttattgcagtatgtggaaagcttcttcaaggatcctattgttaactttgaacttccaattcatttggagaagtggtttcctcgtn

SEQ ID NO: 10493 - DNA, 482 bp, Homo sapiens
  misc_feature (1)...(482): n = A,T,C or G
aggaaagaaaaaaaccttgagaacatcnttatgagcgtcggaaanncaccatnattgttatttgtggactaaggagcagaatgactgatagtggacataggccttctgattttataatttaagaaagaactgatatcctgagtaaggagcatagagacaaatataaaatgaacgcactctacctgatttaattatagtcttctggagaagatcttgctgttatctctgtgaatcaggagagaagagattgataaggaatagacgagattggatttggtcatttccccaaggtgaagagcatggcgatttcttctgtggtaaggagcaataatgaagaccatggttgatttaatcagtctctgctgatgaagatcttggctggtacctttgtgtgtaaggaagctaatgacttaagtaaataacagtccaaaaacttgtcaattaggaatgaatgcgcaatgattcaattattctccagcgag

SEQ ID NO: 10494 - DNA, 444 bp, Homo sapiens
  misc_feature (1)...(444): n = A,T,C or G
ggcgggaannnaatggagacactagattttgagacatctgaccacgcggtggaattcgcaggctgatcacttgagcccaggaggttgaagctgcagtgagctgtgatcatatcactatactccagcctggataacagagcaagactcttgtttccaaaaacaaacaaaaaaaccagatcgcagactgtggatgccacattaccttgaagcatgcaatcgtaggctttcctgtctctccttcctaaggcatcccacaatccgagtggctcggagccttcatcacactcgtgtattgtgactttgctgctactatgcagtcctgcttccaggggacatctgcaagggagaaactccaagagttctttataagtctggagagtgctggtgacccaaaattattattactattatgataacagctttataatagctttattgagatat

SEQ ID NO: 10495 - DNA, 476 bp, Homo sapiens
catcgagaccccttgtttggtagaccactatccatgtggtggaattcggctgccctgcgcggggacactcagagcccggtgggcgggaggaaggcggcatgccccagacggtgatcctcccgggccctgcgccctggggcttcaggctctcagggggcatagacttcaaccagcctttggtcatcaccaggattacaccaggaagcaaggcggcagctgccaacctgtgtcctggagatgtcatcctggctattgacggctttgggacagagtccatgactcatgctgatgcgcaggacaggattaaagcagcagctcaccagctgtgtctcaaaattgacaggggagaaactcacttatggtctccacaagtatctgaagatgggaaagcccatcctttcaaaatcaacttagaatcagaaccacaggaattcaaacccattggtaccgcgcacaacagaagggcccagcctttt

SEQ ID NO: 10496 - DNA, 451 bp, Homo sapiens
  misc_feature (1)...(451): n = A,T,C or G
attgatnccccatgatgaccccttgaccagngcggnggaattcggtggagccaaagcagcagtaagaaaggctacgcagtctccagttaccttccaaaaaggctctaatgctccgtgtcatagtctgcagcatacaaaaaaacatggaagtgctgggcttgcacctcaaaccaagcaggtgtgtgtagagtatgaaagagaggagactgtggtgagtccctggacgataccttcagaaatccataagattcttcatgagagtcacaattcccttctacaagacttgtctccaactgaagaggaagagccagagcatccttttggggtgggcggtgtggacagcgtgtctgagagcactggcagcatcctcagcaagctggactggaatgccatcgaagacatggtggccagcgtggaggaccagggcctgtctgttcactgggccctggac

SEQ ID NO: 10497 - DNA, 450 bp, Homo sapiens
  misc_feature (1)...(450): n = A,T,C or G
nttcgtagacactagaccaccgcggtggaattcggaaaattctccttgataacataggacaattaatggaaaaaaaaattctcattatttgcaaagaatgaacaagttaatgaacaaacaaactagatttggtatgttttcagcttttgtatcatgtttaattgtttaatttggttgaaaaactgcagttgagaaatcagatagcaatatagacattcacagcagctctgtggataccatgtaattgtcaggtaatttcagaatgttgaaaattattcagtgcagccctcatagtatcatacttgaagaaattgattacagttccactaaattgttgaagataaattatttttaaaggttatgaaaactaagttatattaattcatatgtttgatttttaaatcccacctcctcaagctatccaattttctgactttgaaaataaccatg

SEQ ID NO: 10498 - DNA, 548 bp, Homo sapiens
  misc_feature (1)...(548): n = A,T,C or G
gggaaacaannncggatnaccccttcgaagcaccgttcgngaggngcaattcgntanaacaggagagaaatcaactctaccaccctctattcaacaaatttgggtatttctgatatactttttaccaccgctttgcctacacgaatagcctactatgcaatgggctttgactggagaatcggagacgccttgcgtaggataactgcgctagtgttttacatcaacacatatgcaggtgtgaactttatgacctgcctgagtattgaccgcttcattgctgtggtgcaccctctacgctacaacaagataaaaaggattgaacatgcaaaaggcgtgtgcatatttgtctggattctagtatttgctcagacactcccactcctcatcaaccctatgtcaaagcaggaggctgaaaggattacatgcatggagtatccaaactttgaagaaactaaatctcttccctggattctgcttgnggcatgtttcataggatatgtacttccacttataatcattctcatctgctattctcagatctgctgcaa

SEQ ID NO: 10499 - DNA, 466 bp, Homo sapiens
  misc_feature (1)...(466): n = A,T,C or G
natggagcccctngnnaatgtcgacccttagtccgtgtggtggaattcgagagaccaaatctactattcattggcatttttaagagagaaggagagagaataagcaacttggaaaatatatttgaggatatagtccatgaaaatttccctaatctcactacaaaaattgatatgcaaatccaggaaatacagagaaccctggttagatactatatgagacgaccatccccaaggcatgtactcatcagattcaccaaggtcaatgtaaaagaaaaaatcttaaaggcagctagagagaatggtcaagtcatatacagagagaacccaatcaggctagacaaccccattagcagcaggcctgtgagcacaaaccctacaagctaaaagagatttggggcctatattcagcatccttaaataaatttcaaccaagaatttcatatcccagcaaactaagctttataag

SEQ ID NO: 10500 - DNA, 450 bp, Homo sapiens
  misc_feature (1)...(450): n = A,T,C or G
ggggttngaattcgcggatccctagnctcgtgggcggaattcggaaaattagttattttctgatcctttcccctgcctggtctagctcctctccaaacagccatgccctccaaatgctagagacctgggccctgaaccctgtagacagatgccctcagaattggggcatgggaggggggctgggggaccccatgattcagccacggactccaatgcccagctcctctccccaaaacaatcccgacaatcccttatccctaccccaaccctttgcggctctgtacacatttttaaacctggcaaaagatgaagagaatattgtaaatataaaagtttaactgttaaaaaaaaaaaaaaaaaaaaaaaaaaaaaaaaaaaaaaaaaaaaaaaaaaaaaaaaannnnnnnnnnnnnnnnttgaaaggggnnnnnnaaaaccacttcttccttc

SEQ ID NO: 10501 - DNA, 457 bp, Homo sapiens
  misc_feature (1)...(457): n = A,T,C or G
cttgatagcatacgcacgcgcgggaattccgnttttgccagaatattatacctgcaagatctcacggggaggagactgcagcccacccgctggagatttttgcctacagaaagcttccctttttttccaacccaaagacagacttttatagcctctccaactccccttgaatttttaagagagagaaagaaaagccccaaagtgaaagatagtggtcatttatgccttggaaagataaatgggtgttttagttttgtttttaaatgaattttccttttctaaagaatttctttcaaaaaattagtgggagttgaggtgaggcatgtgttttatatttttatatccactttagtaggttttaatataacgtcttgagtcccttttgaatttctttatgacccaggtcaagctgccctgattcaggttccacgcagctaaaaattaaattggagcttcc

SEQ ID NO: 10502 - DNA, 449 bp, Homo sapiens
  misc_feature (1)...(449): n = A,T,C or G
nttcgtagaccctagtccagcgcggtggaattcccagttttgtttctcatagggaaatctgacccacctgtcatgttggctcctaaggaactgctgttgtaagcggctcatcaagagttgaacttcacgtagccttgttgggaatatggaaaaggaagaaagccacaggactgcccattcagtcttgggaagattgggatgattctgcacaagcaaaaatgactgaagtttatgtatagacacacctctaccaatccatcttcagctgactgaatgttgtatgatagcccttctccaaagcagaggtagaatgttcaggtttcaccatggattttctacttatttcgtttttggaatcaccttacagattccaggtcccttttgtatatattctttattcttttgcttttttaaaaaataattttgtttcatatttaaagcacttgtat

SEQ ID NO: 10503 - DNA, 450 bp, Homo sapiens
  misc_feature (1)...(450): n = A,T,C or G
attgaancccattgaagaccattataccangcggtggaattccccatgcagacaaagctccaacttacaaaatatggcatttagatccacataccgaatatgagatacgagctctacttacaagacctggggaaggtggaacggggctgccaggacctccactaatcaccagaacagaatgagcaggtaagactgagtagcagaccttttctaccttgtgaaggaatctagcataagacacattaatacatgcagtgttgaagggtctcattatttgatatatgatatagacacactattaagagttccaatgaattacataaatcatcaccttgattatgtcataatttgactgatttgaggacatgggagtgcttctctattctcaagccattattattatgaatctagagtccttttttggcatggtagctctggagagcctgctag

SEQ ID NO: 10504 - DNA, 443 bp, Homo sapiens
  misc_feature (1)...(443): n = A,T,C or G
attcgcgatccctagtcattgtggncgaattcctctccctcatttctctctccctctctctgtccctcttccctccattctctctccccccttctctctctgtgtgttcagagccatctgctggttttactttggtgccctttggtggacaactttcagaacagaatcttgggagcaccttcatgttgctgtttgctttatttcccccaaacatgtagatatgaacacactgattttaaagactcttatagactacctactagatgccaaacatttagaacaaaagcaaaagctttcagtggaatatatttctaaatactcacatatttagttttgggtgcatcatttgaatgctttgtcatccaaatgaatcctgaaaaacttagttaactaagatttcacttaagtgatagcacttgtctaaatgggcttgaaaatcgaag

SEQ ID NO: 10505 - DNA, 401 bp, Homo sapiens
atagggggcataacatgaagcacatgtaagagatgtgcttagaaggcgtcatatgacaggatatgatagatggccgaagtctagatgactggggccagatatggtgagcatcctccagttagtatcggaatctcatgcatggagataaaaatcaagagcccccgagccccacattcctcattattggacaacacgggcatatggctttgttgggacatagtctgtgagcttatatttcaactctggacctggagaggcttataaaacttacagctaggatactttcagatacgaccttatggctatgcagaattttcatatatgagagtgggcgtgcttatttccacgaagaggaaagagaaggacttgcgacgatatgtacgcttgccattcattctcga

SEQ ID NO: 10506 - DNA, 454 bp, Homo sapiens
  misc_feature (1)...(454): n = A,T,C or G
ntttgaaattgagtacccttagtccatgcggtggaattcgtagaaggatggccaacgcagcctgttgacccttcctggccatcacatgaaaatcagcgactcttccttcttacaaaactcggagcttctcaggataacttggtgaaacgtcccccgctgtgaacctcagtgagcccacctgtaatatacaggtgagggagaagaccagaaaagctcagtcagagtgacactgacccctgaaatgatgggcacaatggagtgtgtggcttttcctgtaggacagggaggtacttagttgtagtttgaactttaaaggattccagtcctccgaaaaacaggattagactcaaatcaccttgaaccttatcatctcacggctttgacccacctacatggctccgtgtcccctgcaggcctcgccccggagctctacaatcctgtgtgcagttgtctc

SEQ ID NO: 10507 - DNA, 445 bp, Homo sapiens
  misc_feature (1)...(445): n = A,T,C or G
tttttaatggaccctatgcagatgaggaccatggacagaactggnggggacagctagtggccctgctgggcttcacacacggtgtcctctttaggccagtgcctctggagtcagaactctggtggtatttccctcaatgaagtggagtaagctctctcattttgagatggtataatggaagccaccaagtggcttagaggatgcccaggtccttccatggagccactggggttccggtgcacattaaaaaaaaaatctaaccaggacattcaggaattgctagattctgggaaatcagttcaccatgttcaaaagagtcttttttttttttggaaattttatggcccaggcggaagggcaagggaatgatttgggttaattggaccctttgcctccgggtttaaggcaattttcttgtttaaccctcccggggggttggaataan

SEQ ID NO: 10508 - DNA, 450 bp, Homo sapiens
  misc_feature (1)...(450): n = A,T,C or G
attgannccctttgaggaccccttagacacccggnggaattcgaagaatttatgttacttgccaatatttctgttgcaaaaaaaattcatgaggaattttctgaacatgctctgcttcgaaaacatcctgctccacctccatcaaattatgaaattcttgttaaggcagccaggtcaaggaatttggaaattaagactgatacagccaagtctttggctgagtctttggatcaggccgaatctcctacttttccatatctaaacactctgttgagaatattagccactcgctgtatgatgcaagctgtgtacttctgttctggaatggataatgattttcatcactatggcttagcgtctccaatatacacacattttacttcacccattagaagatacgcagatgtcattgttcatcggcttttggctgtggctattgcggctgactgn

SEQ ID NO: 10509 - DNA, 445 bp, Homo sapiens
  misc_feature (1)...(445): n = A,T,C or G
ggggnnnnattcgtagtccctagtttgtgtggcggaattcgcacctcggaccagggcttctgctgcatctgcagccatgtcgggccgctcagtgccacatgcccacccggccaccgccgagtacgaatttgccaacccgagccgcctgggtgagcagcgcttcggagaaggcctcctgccagaagagatcctgacccccacactctaccatggctactatgtccggcctcgggccgccccagctggggagggcagcagggcaggggcctccgagcttaggctcagtgagggcaagttccaggcatttctggatgtgagccactttaccccagacgaggtgactgtgaggactgtggataacctgctggaggtgtctgcccggcacccccagcgcctggaccgccacggcttcgtgtcccgagagttctgccgcacctatgtcctg

SEQ ID NO: 10510 - DNA, 446 bp, Homo sapiens
  misc_feature (1)...(446): n = A,T,C or G
ggnagggtttcgagaccttagtttcgtagaccctagtccatgtggtggaattcgtaagtcttaataagtgacaggtaaatagatcattccagtagctaccatgtatgattcataaaggcagaacaggcgtcctgggaaggtgttaggagggaaagctcggatctagggagactgctctgaaaacaaggaaggatgtttatggaatgaactcttttgttcaaccatggcgatgtctggatcagggcagccttggaggatttatggcctccagtctggagaagagagcagagctgacatctgataaagacatgtaccttgacaacagctccattgaagaagcttcaggagtgtatcctattgatgacgatgactatgcttccgcgtctggctcgggagctgatgaggatgtanagagtccagagctgacaacaactcgaccactttca

SEQ ID NO: 10511 - DNA, 466 bp, Homo sapiens
  misc_feature (1)...(466): n = A,T,C or G
actggagaccnctgagagccgttggaattnccagaggggggtccccaagagactgcgggagggcaggctgagaacgtggaggaaaatgagccagatgttggctctcaactcgtgttgatcactgggtggctttttaaaatcccaatgcccagtgccccatcaccagttaaattattgttgctgggggtgcacccagagttcaagctctccaggtggttgtgcatggtggctcacgcctataatcctagtgccttgggaggctgaggcgggaggatcacttgaggacagaagttcaagaccagccttggcaacatagtgagaaccccatctctactaaaagcttaaaaatgcgcctgtggttccagctacttgggaggctgaggcaggagaatcacttgtcacttgagcctgggaggtcaaggctgcagtgagccaggatcacaccactccactccagcctgggtgg

SEQ ID NO: 10512 - DNA, 552 bp, Homo sapiens
gtttgaattcgaacactagtcagcgtggtgcgaattcggagtattttgagggagatatgattatattgtattttctcagataagagaaatgttttttaacaatattattttaatctgttttaagcatctcttagatttacattataactacataaagcagtgaagcaaaggcaaattaagataaagctagaaagtctgaacattttatttcaaaatcatatgaatcggggtcagttaagcctcagtattcttagcttttgttgattttggcactatctttatattattaaatatatttgttgtttggatatttcatataaagatggctataattacatatttcattcccaatttgtgtgtgttggggggtacttttaaaggtgactattgttttgtacatctaattttgggaaagcaagtctataagacatcttgtgatttcttaatgtttttggttggatggttttcaaagatatcactggcctttatcatgttttgaaaaatggttaaattcattttcctaaattaatgtgacagaatggtttgacgaat

SEQ ID NO: 10513 - DNA, 456 bp, Homo sapiens
  misc_feature (1)...(456): n = A,T,C or G
nttcgaagtacactagcccagtgcggtggaattccccgtacagcgttgatggccacagctcgaaggggggctttcgtgtccccctgtgcggtcagtgttttcagtaccacctctctcccgtgcccacttggctatttacttatttatttattgtgtgccagtgatggtgggtgggggctgggccttccccgccacctccacccctgttgtgacctgtccttccgtacttaataaagtgcgcgtgggagtgttaaaaaaaaccacctaaaaacaaatttgaaaatgaacctccataaatcccacatattataggaaggacccttggtggaggccccccccctcattgtgggagggcttccataaaccggtgccaaggcagtgggttggtttttttaaacccccccgtttgtgttaggccccccccccgttgcttttttatccctgggggggcccccc

SEQ ID NO: 10514 - DNA, 444 bp, Homo sapiens
  misc_feature (1)...(444): n = A,T,C or G
nggggcgnaatcgcgatccctagtctgtgtggcggaattcgtaaattgtgatgaaatcattaaaggagtaacttgaaaaaccttctatatcctggcataaaagtgattatagcacagaggacagaatattttatttcttgaccttgattatgagtattgttataggttcttgaattttccttaggtcagaatagagacattaattctaaagcagttagagaaattagtctctttatctctttccttatagttaatagcatagagaaataaatctctaaaccaatttgaaacaggatttaactgtcatttcacttatgtgtctcttcattttcttttactctataacagaagtttttaaaaataaaactattttgattttcttttcagttctaggcctgattcttcactacctgagacgtctaaaaaggagcacatctcagctga

SEQ ID NO: 10515 - DNA, 471 bp, Homo sapiens
  misc_feature (1)...(471): n = A,T,C or G
ggagaatgaagctacgcaattgtgaccatagnagggccgacctggactataatatgaggaaagtgtgtatcttaaactgtaagtgtagatatagaaattaaataattggtcttacttaacaactaaatactttaaaataagaaaaatttgctttgggtaattttgtaagcaaattgcttaattatacttaaaactgtcatctcagtatttctcaatttctctgcctttatattggcctttgaaataatattcatttcatctgaaatgtttctgaaacttacctgagcatgaaacaaagctaatccttttgcagtatgcataggaataagaaccttcattagaaattgtttatgttctgctttcagtggcaatgcaaagccattgataatactggagggaaaaaaaggcaggggaagggttaagtagttactactttgtttctaaaagctgtcatatccatgagtacataag

SEQ ID NO: 10516 - DNA, 468 bp, Homo sapiens
  misc_feature (1)...(468): n = A,T,C or G
cgcgcgcccccnntnnnaatagaatagcctaccnagngnggnggaattcggcaatatggtgagacccccatctctacaaaacaatacaaaaattagccagatgttgtggtgtgaccctgttgtcccagctacaagggaggccaaggtgggagaattgcttgagcctaggaggtcgagactgtagtgagctctgatcgcactgctgcactccagcctaggtgacagagcaagaccctgtctcaaaacgaaacaagaaacccattattcgtgaaaggctatcttgccccagagtctggagatacagtgatgagcaacagacattccttaccctcatggagccaatattttagttgtaaaaataagcagggcaggaaaattaagtaattatatttttaagaaattattttcatttatttattttttttttaaagatagagatgaggtcttattattgttgcccagggnctn

SEQ ID NO: 10517 - DNA, 444 bp, Homo sapiens
  misc_feature (1)...(444): n = A,T,C or G
atcntacgggacngctacganantgagaccactcgaaagaccgaggacagcttatggaaaaagttagggcgtggggccacatgtgtgaattttacaatgaaaaatttagtaacgtacaagtatattttctatcttctggtgacttgagcttgagctctgacaggcatgggcctctccgaccttcatcactattcttaggataatgctggcgggcagagatgatcaatcatcatattaaatcataatgagcttataatcctcccactggagctgctattgtctcctgcacattcattaggaccattatcttctctcttcctttttcaaatgtgttcagcaaacattcaacctgctcctactgcagagtagcagcaaaggagcccctcttttcctttgtggggctcttcgaggggtcattgggtctcttcctttgcccccagcttg

SEQ ID NO: 10518 - DNA, 465 bp, Homo sapiens
  misc_feature (1)...(465): n = A,T,C or G
gggcgcgcggnngntattgatagcgtnctctatgcagngnggnggaattcatctgattagcgtctggcatggctgagtatgtggcctttagtaattggacctctgcagcttttctcctccacctttgtctcggcttccacagagtgaggaatgtgatgcatgctggagacgggtaatgtgactgaccgagagccctgatggacaaggtgacgttggtgatagcccttggtgtggaacaggacctgaaagaacaggagcaggggaggttgaatagaatttagccagccttcttaggaacactcccagcaaacccttctctaaccctgaaggctttcacagctcactttgccgtgcatttagaaactcctcagcccaaccgctccctctttgttcatttgttttacattttacaaacatttgaggaaaggcactggttgtggngcatcangaaattgttgcggtatg

SEQ ID NO: 10519 - DNA, 526 bp, Homo sapiens
  misc_feature (1)...(526): n = A,T,C or G
ngtcgacactatcagngtgggtattcccttggctacccccactcccaagcattcttccaatgtgaaatcctggaagtaagattgcaccttcttcctctcctgatcaacatcggtatgatgtctcctgttgcctcaccctttgtctgcagtatcactggataggactggtggaaagggagcagcctgacagagctccaaatgtggagaatatggcatccctccacctatatttgatgtggacggtaaggctaggcctgcaggatcccttatcctgaccaaagactgtgttggggtgccatttgaaaatcgcagggttgcaaaagaatacaatcttacttgcaggtggatattctctatactctcttttaatgcatctaaaaatcccaaacatcccctgggtggtgatcacttacagttgtgccacctttatttatgtactttgattanaaaaaaaaactttttgttatataaaaannnnnnnnnnnnnnnnnnnnnnaaaaaaaaannattaaaaaaaaaaaaatta

SEQ ID NO: 10520 - DNA, 438 bp, Homo sapiens
attcgtagaccctagtctagtgtggcggaattcaagccagagaatttctgccagaggccaccttcgtatcctatacttgtcccgtattccatcccttaagaactttaaacacagtggagtgctacactgtatggtttatgtgccctgctgtctaccaaagggcctgtatcatcagattgttttggtttggacatgcttcaaatttgaacttaaatagctctttagaacattatcgaggcctttccccagaattaatatctattcctttatttcattcaccattttcagattgtctgctacgtgcaggccttttgttacgaggcaatattggtatacaaaaaagaattcaccaaggagcttgaagaacagttggggaattaaacataaaaccaactattgaaaggggacaaaatgaatactgtagcagtttacacttct

SEQ ID NO: 10521 - DNA, 394 bp, Homo sapiens
aggacatggccttccccgcgagtccatggccagtgactgtggcccgactcgaaaacaaccctcttctcaaaagggaccatcaccgccccgagcgtgcgcacacagaccggtcggaggcgagaactggtctctacagggcacagttcagctcctctgtggatgcgtccccagatcgcaggatttccaagaaatcgagcctgtcccttgtgcacttgggaataattccccaagacagcacttcgggattccgggttatcctgaggctgcccgggacttttccagctctccagccccaggtctcctgacattgtgttccaggctgcgggctaagccagacagtgtttgcctccggttctttccaccgtgggaagcgaacgccacccccacccgcctt

SEQ ID NO: 10522 - DNA, 456 bp, Homo sapiens
  misc_feature (1)...(456): n = A,T,C or G
agaataagatggaggaccttnnnntttgtcggaccactatccgtgtggtggaattccagctttgtggggagcatgctatggcatttagtgggtaaagaccagggatgctgccaaacctgccttgcacaggacagcccctgcaacaaagaattatccagacaaaaatatcaatggtgctgaggttgagaaaacctgacttaaggggctgggatgcttttgaactagcttaaggcccaggactgtggagtgtgtggaccaccccacagaggagggactcagatttatttactcttgctggatctgtagtgatggagttccttctggtgtcagccccacaggaggctcccaggcctccctcacttcccatacccagtctaggagctccttctggctcccaagcacccagagctttcctccgccttttagttttggttcctccactggaatgtaggctcc

SEQ ID NO: 10523 - DNA, 554 bp, Homo sapiens
  misc_feature (1)...(554): n = A,T,C or G
gtttgaatcgcacacctatccagagnggtgcaattcttgaagtgtgagggctttgtgtatagttgtttatccattaccacatttgtgtattttaatagtctacaggctatataaaagaacatggctttttgactgataaaagtgattacagatgttggctcaagttcagggccaccatcatatacctaacaagagttcatgattctttaggtaatgtcaaaacattttgtatttttccatcttaagctttataacattttgtgagtaagacaagtgttatttaaaattcttgttgtcagtccagcaattgaggctttcatagttcagtgttataatattcagtagggaccctcaacaaatatataaaaatatgttgctcactctataatcctcctatggctaacctctaggatagttctgccactatantttacttctttgccatcagcaagagtaggaattcatcaaggccaggtaggaatctanatgaaattgtatataaatgaattggatctaatgtaaaagcanatgaaaaattgcatgtgttttttctg

SEQ ID NO: 10524 - DNA, 536 bp, Homo sapiens
  misc_feature (1)...(536): n = A,T,C or G
nttcgaaaccatccatnggggtagttccacgcgtttgcaatattcccctggtagcctacttccttacccccgaatattggtaagatcgatcaatggcttcaggacatgggttctcttctcctgtgatcattcaagtgctcactgcatgaagactggcttgtctcagtgtttcaacctcaccagggctgtctcttggtccacacctcgctccctgttagtgccgtatgacagcccccatcaaatgaccttggccaagtcacggtttctctgtggtcaaggttggttggctgattggtggaaagtagggtggaccaaaggaggccacgtgagcagtcagcaccagttctgcaccagcagcgcctccgtcctagtgggtttcctgtttctcctggccctgngtgggctagggcctgattcgggaagatgcctttgcagggaggggaggataagtgggatctaccaattgattctggcaaaacaatttctaagatttttttgcttatgtgggaaacagatctanatctcattttatgctg

SEQ ID NO: 10525 - DNA, 449 bp, Homo sapiens
  misc_feature (1)...(449): n = A,T,C or G
nattgtagtgcatctacccangcggnggaattccaatcagcaggacatgggcggggacaaataagggaatacaagctggccaccccagccagcagcagcaacccgctcaggtggccttccatgctgtggaagctttgttcttttgctcttcacaataaatcttgctgttgctcactcttcgggtctgtgccacctttaagagctgtaacactcactgtgaagattcgcggcttcattcttgaagtcagtgaaaccacgaacccaccggaaggaacaaactctggacacactagaattgatggtagaggtgataaggcatgagacagaaataataggaaagactttggatccaaatttctgatcaggcaatttacaccaaaactcctcctctccacttagaaaaggcctgtgctctgtgggactattggctctgggagactcangaactn

SEQ ID NO: 10526 - DNA, 416 bp, Homo sapiens
agctgaagggagtcatctatttccaggccattgaggaagtgtactacgaccacctgctcagtgcagccaagagcccgaacccagccctcaccttctgcgtaaagacccatgaccggctgtactacatggtggccccatctgcagaggccatgcgtatctggatggatgtcattgtcacaggggctgagggctacactcagttcatgaactaactgccgtgggcctcctggcagagcacaactggggcttttgtataagaagactttaatattctgtaaggagcttggtcctgtgagtttctgggctctggcctcctgaagaaccagccagaagaagaaaagtagaggtggctttgctgcctcctgggagcccagaacttgcagtaaccctttagggtcctgccccaggcccagcca

SEQ ID NO: 10527 - DNA, 470 bp, Homo sapiens
  misc_feature (1)...(470): n = A,T,C or G
cgcgccaatgagagcttccannatgagaccctccgaannncnnnnnnnnaannanntannattgtattntaggaaaagacgggggctttctatcacctcttctaatcttttaatgtatttgggtgcaattttgggggaagactttttttatgagtactttttctttgaagttttagcggncaatttgcctttttaatgaacatgtgaagttatactgtggctatgcaacagctctcacctacgcgagtcttactttgagttagtgccataacagaccactgtatgtttacttctcaccatttgagttgcccatcttgtttcacactagtcacattcttgttttaagtgcctttagttttaacagttcactttttacagtgctatttactgaagttatttattaaatatgcctaaaatacttaaaannnngngaganagacccaaaaacaaaagacccggggagaataatt

SEQ ID NO: 10528 - DNA, 468 bp, Homo sapiens
  misc_feature (1)...(468): n = A,T,C or G
ggggccngtnnaactgagatcgtagtccattgcggaggaactcgaccaaattacttttatttataatttttgatttatatttcagctagatctaaaaagcttctgaaggaatttacaatgaaagatacctatgcaataacatttaggataatctttgacattttggaaaaataacaattgaggaaaaaaagtgtatctttcaagtacatgcaaagcattataatgactgacacttgtatctaactccagtcttacagataactaaggcaaaaagctaaataaacaatatgtaacctctaacatttggtaaaaggaagtatactggtctgttagcagagacaaactttttttagaattgaagtctgaaacaaacaaaagcaattcaatgtcaatagacattaagcaacataatagacaaacatctcctatgggaacatttgttacagctgctccttccctgaactgaga

SEQ ID NO: 10529 - DNA, 450 bp, Homo sapiens
  misc_feature (1)...(450): n = A,T,C or G
attgtagaccattggnntttgatgacccttagtccagtgcggnggaattcatttgattaataatacatttgaaataacttcccagaagttggattaatgggttagtgttgctggtaacttattgatacacattgtcaggttaccctccaaaaacattataccaatttccatttgtattaacagctcatgagtgaatcttataatatttaatcctggccgggcgcggtggctcatgcctgtaattttagcactctgggaggccgaggtgggtggatcacctgaggtcaggagtttgagaccagcctgaccaatatggggaaactccatctctactaaaattacaaaaattagctggacgtggtggcgtgcgcctgtagtcccagctacctgggaggcggagacaggagaactgcttgaacccgggaggtggaagttgcactgagttgagat

SEQ ID NO: 10530 - DNA, 454 bp, Homo sapiens
  misc_feature (1)...(454): n = A,T,C or G
ntatgcttggttgcgacagcacgnccgcggaantncttacttagaataaaagctgaaaaaggaacttgtactgaacattccatatttatattttatgataaatactcaccatttggatattgacaagatgattaaggtcacaaaaggtcaaaacccatcatattttccaaagccaatgatggggagaacttctgaagtggtggatcaagtacaattctaataagggaccagggtaagtgacttggcaacaatttccttgggaagctgccaaaatcttatcttcagtctcaaaactcctatccgcagtcatagctagtctagaaaggtaagtcttgatttcttagctaaatgagtaaagtttgtattctagaaagaaaatagaatacaaataaaaataataatggagaagcaaacttaaattcacggaattaagtctttagtgaaccaggttggg

SEQ ID NO: 10531 - DNA, 465 bp, Homo sapiens
  misc_feature (1)...(465): n = A,T,C or G
gcccgccgcgnnnnntattgatcgcctccactaggccgtgtggtggaattcgatccaggttataactactctggcccatacctttcctggttgtggtttttcatgccctctaccatgtgggccttccccaggagatgatcctgttaagtgttcggcagtaacctactttgttccttcgcctcagcagcaaatcttgctactggctctagatctgcggtttcccctctaccctgcctcccgtctccccagaatgggaatttcttttatgtttttatttttttcctggctcccttttatttttgtgcgcgatatttaaggtcgtctggatggggaagcaacctgcagctgaggtcgccggcgcctttttctttttagatgggaaggaggccaggaaagggtcagcttaaccatttcctatgtgccaagctgtgccagcagtccagggtaccctgactgtccctctgt

SEQ ID NO: 10532 - DNA, 498 bp, Homo sapiens
  misc_feature (1)...(498): n = A,T,C or G
agagggtggnnnnnttaatgagacttanatgaggccctaggacagngcggnggaantccgccttagtcctcctggctgccgccgtcagctgtgccgtcgcgcagttcgcgccgccgtggacagaggactgcagaaaatcaacctatcctccttcaggaccaacgtacagaggtgcagttccatggtacaccataaatcttgacttaccaccctacaaaagatggcatgaattgatgcttgacaaggcaccaatgctaaaggttatagtgaattctctgaagaatatgataaatacattcgtgccaagtggaaaagttatgcaggtggtggatgaaaaattgcctggcctacttggcaactttcctggcccttttgaagaggaaatgaagggtattgccgctgttactgatatacctttaggtaaagttcacttagaagctttaaaaaaaaaagtaattaaattcttttacaagtttccattgaggtgtgatatacaag

SEQ ID NO: 10533 - DNA, 437 bp, Homo sapiens
  misc_feature (1)...(437): n = A,T,C or G
attgtagacattagntttggcggcgtaattcggagaactggctgtctgagtggtggctcaagaccgcctacctccagtaccgccagcctgtggtcatctactcgagcccaggcgtgatgctacccaagcaggacttcgtggacctgcagggtcagctccgatttgctgccaaactcattgagggtgtgttggatttcaaggtcatgattgacaacgagaccctgcccgtggagtacctgggggggaagccactgtgcatgaaccagtactatcagatcttgtcctcctgccgagtgccgggccccaagcaggacacagtcagcaacttcagcaagaccaagaagcctcccacgcacatcaccgtggtacacaactaccagatttttgagctggatgtgtaccacagtgacgggacacccctcactgcggatcagatn

SEQ ID NO: 10534 - DNA, 441 bp, Homo sapiens
  misc_feature (1)...(441): n = A,T,C or G
nttgcgaccctatccgtgtgggcgattccaagtagtgattgagaaattctctgctacccagatcacctcaccttgtcttctcctgtctcctgggcaagggaggactgtgtgtaccatggatcccttcaacagctgggaaaaggctatggatccgatttcagaataatacttttaagtgcataaggttaaactcataagattacacaggaaaccaataacattaataaccgtatttcaatgagattaatttcctgtataatcttacgtgtctaattttatgtgctggtttaccagcacattaacaaggtgttgcagcatgtctaacagcagttgtaatcttgaaaatatgacgagtgtaaacaacatttcaggatattggcaataactggattacactatgaaattatcttaattctattagcggtaaaagtcacaggttct

SEQ ID NO: 10535 - DNA, 467 bp, Homo sapiens
  misc_feature (1)...(467): n = A,T,C or G
agggcgcggnncntccaatcgatagcctacccagngnggnggaattctgagcatacagggacaacaaacaactttcacattcagacaaggtcagatgttgccattttgtataatgatcgctctgtccttgagaatcaccacgtgagtgcagcttatcgacttatgcaagaagaagaaatgaatatcttgataaatttatccaaagatgactggagggatcttcggaacctagtgattgaaatggttttatctacagacatgtcaggtcacttccagcaaattaaaaatataagaaacagtttgcagcagcctgaagggattgacagagccaaaaccatgtccctgattctccacgcagcagacatcagccacccagccaaatcctggaagctgcattatcggtggaccatggccctaatggaggagtttttcctgcagggagataaagaagctgaattagggcttcn

SEQ ID NO: 10536 - DNA, 454 bp, Homo sapiens
  misc_feature (1)...(454): n = A,T,C or G
ntttgtagtacactagcccagngcggnggaattcttggaatgcttcttctcaggcatgaacatgtactgttctcttcttgaacactcatgctgaaagcccaagtagggggtctaaaatttttaaggactttccttcctccatctccaagaatgctgaaaccaagggggatgacatgtgactcctatgatctcaggttctccttgattgggactggggctgaaggttgaagaggtgagcacggccaacaaagctgttgatggtaggtggcacactgggtgcccaagctcagaaggctcttctgactactgggcaaagagtgtagatcagagcagcagtgaaaacaagtgctggcaccaccaggcacctcacagaaatgagatcaggctctgcctcaccttggggcttgacttttgtataggtagatgttcagattgctttgattaatccagaatn

SEQ ID NO: 10537 - DNA, 489 bp, Homo sapiens
  misc_feature (1)...(489): n = A,T,C or G
gggcccggaaatgagncccctggnnactgagacactagtccagngcggnggaattcgccatttcaagaggtgtacagaaggcctggaaattttcccagcaggaagtcaggagtattaggtctcagccacctgtgcattgggctaatttagaattatctgggccctgggcttctgcggcagggtcggtgctggcttggctgtgctggggagctcacctggcgcctcctcactgcactcttgtctcagttcttgtttcgttagcaggattgactcagtcttgcagcgaggctcggagcagcccagggtcgcaggtagaggtcacgcacgttgaaccatgggagaaaggaagcaggaaaacagcgggccagacagggatgtgcggaggggttcgaggtgttggaacaggaggaattgtttctacagcattttgcctgttatacaaattatttaccctgaagttaactcgaaagcaagtgatgggtcttatan

SEQ ID NO: 10538 - DNA, 542 bp, Homo sapiens
  misc_feature (1)...(542): n = A,T,C or G
gttcgatcacagtccgangggtttaggaactacaattcattctctgcttcctctatggtaaggaccctccacattttaagctaggcagatggctgcccagaataaagactaccaataaaggtgcaatcatgttcctaagttcttagtaacaggatgtagtagaaatatggcatggcagattccaagatctttcctaaagggacacactttgctttcctatctcccttcctcattgctgtgtataaacatatactgccatcttccaccttggggttgcggctcatacagtggccacaagacagaaggaacctgggccctgataaaatcaagtgttatatttaccttagactgcctatgcaggttttgacaagagctacaatggtttttctaccactcataactgacataaattataacatacaagttagtttccaatttttgatattgtacactatatagcagtgaacattgtgcaatatatctttattttttggaaatgtataatagnttactggtggaattcatttataacatgtgttgan

SEQ ID NO: 10539 - DNA, 451 bp, Homo sapiens
  misc_feature (1)...(451): n = A,T,C or G
natcgacgttcactagcccagtgcggnggaattccccgttttctcccaccctcttcagtgagttggtacacacattagtaacacacattcttttctcatatactgtattccatcctgggatctctctgactttctaaatgatttaaaaaatttgcgtacatcaagattcattctttgtgatgtaaagttccatggtctttgataaatgcattgtgccatgtcttcaccactacagaatcatacaaggtagcttccctgctctaaaagccccatgcttcacctagtcacttttccatgcctccattctgagtccctggcaaccactgatctgttcaccatctctcaagttctgcctttttcatatatcatataaatagaatcatatagtattttgacttttcgaactggcttctttcacttacaaaatacatatttaagagttatccatgcc

SEQ ID NO: 10540 - DNA, 492 bp, Homo sapiens
  misc_feature (1)...(492): n = A,T,C or G
ggacagggcggccggccnnnnnaaactgagaactagnagcatcagcacagngcggnggaantccagaggggtagcggaggaggacccaggctcatgataaggaagaccctagtagagaacagctctaccaggactgacatgtggactctcctctcaattctgattgcaaagaggagcccctcatcttggtaggtctcagttttttcaactcagcctcactgtaaatggcagttgggcaaggtagggggaaggagggagagggtggtggttattccactcaaaaggacttgccaataagaagtgaactctcggctaggcgcaatggctcatgcttgtaatcccagtgctttgggagggcgaggtgggcagatcacgaggtcaagcgatcaagaccatcctggccaatatggtgaaaccccatctctactagnaatacanaaattagctgggcgtggnggcgcacacctgtagccccagctactcaggaagctg

SEQ ID NO: 10541 - DNA, 469 bp, Homo sapiens
  misc_feature (1)...(469): n = A,T,C or G
agaaaagattgatncccntcngnanaactgatgacactagtccatgcggtggaattcgactctgtctcaaaaataaatacataaaatacagcgtccaaaagtgtgtcatcttctttctcttcacaattttataataagggggtaaaatgcctgtgagtctattcattatggaaaataaaaaagaaacaaccatttaaggctgaggcattttggttttctgctggcttttagattattaactgcattaagcccctcactacaacttcaccagtatcctagaaacaatttgggtttccttttaggcagggacaggaagtattcaaaggacagacatatggacagagttaggcccttcagggttgaagtctgtggtttcttgtgtctcaagactcaatgtcttgagaagttggtggaccctgtcctccatccaagaagtgctgccaaggaaaccaggggacctagcaaagag

SEQ ID NO: 10542 - DNA, 466 bp, Homo sapiens
  misc_feature (1)...(466): n = A,T,C or G
gggcgccggggggttattgatagagtccctaggccgngnggnggaattcgctgcgattactcacgatagcgagactaggcaagcactttgcacagggcctggcacatactagatgctcaacaaatactgctgtggtttgcctgcacaggcatcatattggtcttatgcctcctagacccctgtgccctgtggcactgggaggcaccctcctccatggaggggggcagagaagcctcacagatcctaccctaccaccaccagggctcctgctgaagctaccctttctggactccccccccagactcccagcactacgaggaccaagttcactggcaggtgcctggcgagcatgaggataaagcccagagacctctgagggtggaggaggcagacactcaggcctaacccactgccagcccctgagaggacacgctccttttcgaagatgctgactggctgctactan

SEQ ID NO: 10543 - DNA, 472 bp, Homo sapiens
  misc_feature (1)...(472): n = A,T,C or G
nggggtggccggnttnnnnnnaaactgagtgcatacactgngcggnggaattcttcaggccaggtgcagtggctcacgcctgtaatcccagcactttgggaggccaaggcgggtgaatcacttgaggtcaggagttcaagaccagcctggccaacatggtgaaaccctgtcttagccgggtgtggtggcaggcacctgtaatcccaactatttgggaggctgaggcaggagaatcgcttgaaccagggaggcggaggttgcagtgagccgagatcacaccactgcactccagcctgggcgacgagcgaaaccccatttcaaaaaaaaaatcaaagttcagagagctcaatttgagtagaagttgtaggataaggtagcagaaaagaggaagctgcccagaaagaaagccgtagagatatttagagagattcccatggatccttggcctaggagtgatctgtatatgtgtggn

SEQ ID NO: 10544 - DNA, 454 bp, Homo sapiens
  misc_feature (1)...(454): n = A,T,C or G
gttgantcccattgaagacccctagtcagtgtggtggaattcatttcgataaaatcagctaggaaaatctttaaaatacagatgtttccatttatacagtggatctgcctaatggacaaaggaatgtcagagctacccacgttcttagcaaaaactaggccctagtatttagctgtgttaccaaaacttccagaaacctggaagcaagcaaggtagttaatgtaatataataaatgtccaatgttctaggttcccgtctgccacagagtcacatcctttggactacaggacaatgtctatatacacaaagccataagtctgtgttccttgggcttctgctaccaaagttcagccaggtgacgtgtcaggattaggtacctgcagtttgccctgtatttgtgtttgcagttcctactccttggtatctgtagcttgcctaacttggtgtggnggg

SEQ ID NO: 10545 - DNA, 531 bp, Homo sapiens
  misc_feature (1)...(531): n = A,T,C or G
ngtcaanaccgtccgtgtgggtagttccactgttggatatccaattttcataacaccatttattgaagagattattctttctccactgtgttttcttgatgtccttgtcaaaaattagttgacttttatatgcttgggtttatttctgggctctattctgtttcattgctttacatctctgttttcatgccagtgccacagtgttttgattactatagctttgtaatataatttgaaatcagaatgtgtaatacctataactttgttttttgctctaaagatttatttatttatttatttatttttgccatttcaggtcttttgtggtttcatatgaatttcagaattggttttcctatttctgtgaaaaatgccattgacattntgatagggattgtgctgaatctatatattgctttggatagnaatgtgntntaacactattaattctcccaatccatgaacatganatatctttccattcacttgnngctcttcaaattcttcatcaatggttatagnttcattggg

SEQ ID NO: 10546 - DNA, 414 bp, Homo sapiens
  misc_feature (1)...(414): n = A,T,C or G
gtaaaatcacaggaattgcccaatctaagcagactttgccttttttcaaaggtggagcgtgaataccagaaggatccagtattcagtcacttaaatgaagtcttttggtcagaaattacctttttgacacaagcctactgaatgctgtgtatatatttatatataaatatatctatttgagtgaaaccttgtgaactctttaattagagttttcttgtatagtggcagagatgtctatttctgcattcaaaagtgtaatgatgtacttattcatgctaaactttttataaaagtttagttgtaaacttaacccttttatacaaaataaatcaagtgtgtttaanaaaaaaaaaaaaaaaaaaaaaaaaaaaaaaaaaaaaaaaaaaaaaaaaaaaaaaaaaaaaaaaaagaccc

SEQ ID NO: 10547 - DNA, 484 bp, Homo sapiens
  misc_feature (1)...(484): n = A,T,C or G
ggggcccacanaggcggccaattgannnccnnaatcgtagaccctagtccangncgtggaattcgcttgtgtcaagacctagtaagaccacctttaatgtgttcctggatatgacattaaaaactaacttgaaaattgttaggatatttccttgttccctacttttattgtaaaatctactacattcttaagaattaaaaaatgccatttcagaagagatgatagttttatcttgccaaggaattatcttcttagtagcctatattggcttattccaaaaaaggcgttaacctccatcaaaacatcttctgcgcctctctctcagcatatgctttgatatttgaagtgtgtaatagattggagctatcagtcacttatttctaaaaaatgtattcttttttcttcatagctgtgaagagggataccaaggaaagttctttctgctgtctttctctttggtaatgcttatcttatgaacactcaa

SEQ ID NO: 10548 - DNA, 471 bp, Homo sapiens
  misc_feature (1)...(471): n = A,T,C or G
tggggnccggnnnnttagaaaatagattatcattagcccagagcggaggaattccataattctttttagagaaggatttttaactgtttaaaagcaattgattccagttattgatctcttttctagacctgtgcacaatttggatttaataatctgtcttatgtaaattaaatgtggtggttttttttgttttgttttgtttttgtttttgtttttgttttttttgaggtgggatcttcctgtattgcccaggctggacttgaactgggctcatgtgatcctgcctcattctcccaagtagacaggattataggcacaggccactgtacctggctctaaatgtacacttttataactgctagtttggagtttttctctcattgagagattgctttgtaatgcttccaatgttaagaatttttttgtacttttcttatcctagtctcttatgaaagaaagatatagtaacta

SEQ ID NO: 10549 - DNA, 468 bp, Homo sapiens
  misc_feature (1)...(468): n = A,T,C or G
agggcgtgcnncctcccttagaatagccntacnagngnggnggaattcccgcgagggcggaggcgccgaaatcaaagcgagagcgcctcggcctctccagctgtccgcgggtcttgctctgttgcctaggctggagtgcagtggtacaagcacggctcactgcagccttgacctcctgggatcaagggcctctgagcccaagtctgcacgtattcatccagatggcctgaagtaactgaagattcacaaaagaagtgaaaatggcctgttcctgccttaactgatgacattccaccattgtgatttgttcctgccccaccttaactgagcgattaaccttgtgaaattccttctcctggctcagaacctcccccactgagcaccttgtgacccccaccccagcctgccagagaacaacaccctttgactgtaattttgctttacctacccaaatcctataaaacggcc

SEQ ID NO: 10550 - DNA, 546 bp, Homo sapiens
  misc_feature (1)...(546): n = A,T,C or G
agtagatcacantnannannntttcgaaccccagtccgtgtggtggaattcanataaagaacaacgttatttcttaacagactttctataggagttgtaagaaggtgcacatatttttttaaatctcactggcaatattcaaagttttcattgtgtcttaacaaaggtgtggtagacactcttgagctggacttagattttattcttccttgcagagtagtgttagaatagatggcctacagaaaaaaaaggttctgggatctacatggcagggagggctgcactgacattgatgcctgggggaccttttgcctcgaggctgagctggaaaatcttgaaaatattttttttttcctgtggcacattcaggttgaatacaagaactatttttgtgactagtttttgatgacctaagggaactgaccattgtaatttttgtaccagtgaaccaggagatttagtgcttttatattcatttccttgcatttaagaaaatatgaaagcttaaggaatatgtgagcttaaaactatgccagcagtttagaa

SEQ ID NO: 10551 - DNA, 460 bp, Homo sapiens
  misc_feature (1)...(460): n = A,T,C or G
nctgagaccctacctgagtcctagttcatgcacaggctatcttgcggttgcatgcaacccagggcattatttcatgctgtcccgtttgcctgctgctgtgcctatggggcatggggcagggatttaccctgccctttcctaacattattaggtgctcatcatatccctaattgttttctcattgtttcattacctcattgtttcattacctgtaggaaggcactgatcctgaaactgaagaccccaaccacctccctccagacagggatgtactagatggcgagcagaccagcccctactttatgagcacagcatggcttgtcttcaagactttctttgcctctcttcttccagaaggccccccagccatcgcaaactgatggtgtttgtgctgtagctgttggaggctttgacaggaatggactggatcacctgactccagctagattgcctctcctgg

SEQ ID NO: 10552 - DNA, 540 bp, Homo sapiens
  misc_feature (1)...(540): n = A,T,C or G
ngttcgaacaccgtccagangagggtaagttttctgctgtaggtggccagttttgtttctcatagggaaatctgacccacctgtcatgttggctcctaaggaactgctgttgtaagcggctcatcaagagttgaacttcacgtagccttgttgggaatatggaaaaggaagaaagccacaggactgcccattcagtcttgggaagattgggatgattctgcacaagcaaaaatgactgaagtttatgtatagacacacctctaccaatccatcttcagctgactgaatgttgtatgatagcccttctccaaagcagaggtagaatgttcaggtttcaccatggattttctacttatttcgtttttggaatcagcttacagattccagggcccttttgatatattctttattcttttgcttttttaaaanataattttggttcatatttaaagcacttgtattagtcaatggttcgtgttccgattatttgaaccatttgcccttacagaaagagaaatacttgtttgtgtttaaataaan

SEQ ID NO: 10553 - DNA, 476 bp, Homo sapiens
  misc_feature (1)...(476): n = A,T,C or G
tgaggggccnnnnaggggnnncattgtagacattaattgatgccgtggaanncgngcttcagntgctgcactccacgagcgacgtggtgcggcagtacatggccaggctcatcaatgcttttgcgtcactggcagaaggtcgcctctaccttgcccagaacacaaaggtgctgcagatgctggagggaaggctgaaggaggaggacaaggatatcatcaccagggagaatgttcttggggccctgcagaagttcagtctcaggcgcccgctgcagacagcgatgattcaagacggcctcatcttctggctggttgatgttctgaaggaccctgactgcctgtctgactacacgctggagtactcggtggctttgctcatgaacctctgcctccgcagcacagggaagaacatgtgtgccaaggtggcaggcctcgtgctcaaagtcctttcggatcttcttggccatgaaaaccat

SEQ ID NO: 10554 - DNA, 449 bp, Homo sapiens
  misc_feature (1)...(449): n = A,T,C or G
natcgacgttcactagcccagngcggnggaattccgcgagttgtataaagcacagagcagaatccctggcacactcttaagggctcttacacgcattcactgtcagggagcagacatgagactcttggcagcactgatgttgtgcagatgtgggatctgccgtggccccatgggcttcctgaacagcaggtacccacctgttgatgtggcttttccaggggccttcgtttaccttggggaagttgtatcctctctcctgggcctggtgttgcattctggagatttattttcccttttgtctttatcactcaaagctggagttcaggttcggtctgccgtgacactgtggttagactttttttggcaagatacctctcacatcagatgattgagcaagaaaggaaagatctgatgtcagcgtgtaaaggctggatatgggcaccaaggat

SEQ ID NO: 10555 - DNA, 408 bp, Homo sapiens
ctgagtgttaactgtgtgccaggccttgtcctaaaggcctgatgtgtcctacctgttttaatccccacagtgtctctaagagacaggagctattatatcccattccacaggtggggaaacaggcaccgagccttgaagctccagactgcacaactggtaggtggtgggatttgaacctggatggtaagaggcttgaggatcacactctgaagtgctctctgttgaggttagctgtgctggccctgccttgggggccacctcgactaattaaatcagcgtgtgcaaatggagtcttctcctccagccaatcctttacctacctacatgctgccatgttctaggccttgctgggattgttgctgcatttgacagtgtggaacctgaggctcagtgagaatcagggacacc

SEQ ID NO: 10556 - DNA, 465 bp, Homo sapiens
  misc_feature (1)...(465): n = A,T,C or G
ggggccngnnnttagagatcgatagtccatgcggaggaactccgtatgccctttccgtcttgcattgctcttccaaaacttccatctgtatttctcacaccctcagtaagcaaagctgagtgtgcatggacagagctgcatccactgctttctcccagcgggtgcagtctaatctgacacggggaacactaggagtttagcggaatcttcagccaccctattaatgtgttacgcattaggcattgtagtggaaactcctctgatggctcatgactatatgaacaggagcaatttggaatataacatgtcagctgtggactgggaagtgccgtgagagaaaacactacctgggtcataggcttgggtccctgaggcaacccagcagggacactgttgcccattcctctcatccagactgcaggtgtcttcctacacctccctgtcccatagcctccgtcctgtttt

SEQ ID NO: 10557 - DNA, 473 bp, Homo sapiens
  misc_feature (1)...(473): n = A,T,C or G
agggcctcctnnnaattgagaccgtagtacangcggtggaattctctctgccctctcgtagagatgtttatttgtccccaagagatgatgggtattctactaaagacagctattcaagcagagattacccaagttctcgtgatactagagattatgcaccaccaccacgagattatacttaccgtgattatggtcattccagttcacgtgatgactatccatcaagaggatatagcgatagagatggatatggtcgtgatcgtgactattcagatcatccaagtggaggttcctacagagattcatatgagagttatggttggtgattttgctcattatggtcgtggagtgctgattgattcacagtagataaagctggcagtaagaaatgctaagatggagtttcactcttgttgcccaggctggagtgcaatggcgtgacctcggctggctgcacctttcacctccgggtt

SEQ ID NO: 10558 - DNA, 471 bp, Homo sapiens
  misc_feature (1)...(471): n = A,T,C or G
tgaggtgccnnagggggggcctgagaccttactgagtctttaaccacccttgctgagatatgatattcctaatccttctataatttctattaccttcaccatagtcattctttccttacgcaaagcccaaggaatgagctgctgctactttaaagtgtggtcattatgatgaatgtgaaaagagttttggcttgttctaaataatttttacaagttatggtacagacagttgttacatatcaaaaaaaacctgtttattgaaacaggaaataaaaaagggatcttttacattatagaattaaaactaattttttcttgtatataaactaattggtttgattttaaatatttctggcttttattaatatgtcttaattttgagtttgaaaatgttaagtgcaataaaaacatactagtacagattttgttttgttccaattggcatactctggggatgatcacttaaaaaan

SEQ ID NO: 10559 - DNA, 417 bp, Homo sapiens
gagaccaaccagaagttcaaggttgcctgggcaacagagcaagactgtctcgagacaaaacaaaaagtcagcatcttctgcccacttttactttaacatacatttatggatctattgtctctttccctgttctaaaactttaaatttcacaagaatgaagattttgctgtcttgtttcctgctgtgtccccagcataaacagcataaagaagtgccataagatagaaatttttgttttctgttcaccagtatatccacagcacctagaacagcatctgctttagacttattagatgaagacttaaaaaaaaaaggaacagcacttctgcacatatttagcacttgatacatatttgtggaataatttctatcataactagcagctacttcctaatttgatatgtagcatcccgtatt

SEQ ID NO: 10560 - DNA, 457 bp, Homo sapiens
  misc_feature (1)...(457): n = A,T,C or G
cgcgtgcccgnnnggattcaacttggacctccgnactgcggtctcgaannnnctccagncctngnagnccctgagcaagtccagctcctctcccgagctgcagactctgcaggacattctcggggaccctggggacaaggccgacgtgggccggctgagccctgaggttaaggcccggtcacagtcagggaccctggacggggaaagtgctgcctggtcggcctcgggcgaagacagtcggggccagcccgagggtcccttgccttccagctccccccgctcgcccagtggcctccggccccgaggttacaccatctccgactcggccccatcacgcaggggcaagagagtagagagggacgccttaaagagcagagccacagcctccaatgcagagaaagtgccaggcatcaaccccagtttcgtgttcctgcagctctaccattcccccttcttt

SEQ ID NO: 10561 - DNA, 463 bp, Homo sapiens
  misc_feature (1)...(463): n = A,T,C or G
cgcgtgccnnnnnnattaaccttgatacctangnncttgncgggcttagnanaaccgnngnaaatnannnagggaaggacgctcatgaagaaattttgcatgctgcggtagaatgtgacctttactctggcctcttgaatgagactgaggagaggaactctgacaaccacaatcatgaggatgatgtgttggggtttcccagcaatcaggacttgtattggtcagaggacgatcaagagctcataatcccatgccttgcgctggtgagagcatccaaagcctgcctgaagaaaattcggatgttagtggcagagaatgggaagaaggatcaggtggcacagctggatgacattgtggatatttctgatgaaatcagccctagtgtggatgatttggctctgagcatatatccacctatgtgtcacctgaccgtgcgaatcaattctgcgaaacttgtatctgt

SEQ ID NO: 10562 - DNA, 412 bp, Homo sapiens
gtagagaaagtgaggttgggaaggaaggatgaggccagatacagtcctggaatgactgagaaagtatgtttaatggttaaggtttatttacatacataaaatatccacaacaatcataaaaattaaccagtaagggttaggatgcagccagagagcgtctcaaaggcatgtgtgcggcacagcggcctgcaggttgtaagtgcccactaaatggtggctgttgaggtaattaaccagcaaaactgagatcctgacattctcacttttcagtaagtatttgtcttgatctgtttcgtgtctaattacatattgaacttcggccattattttattggaatgggagagtgatgatccaaataggaaggcaccctatcagagggacagggggaagaaacggtaactcgtgttgggg

SEQ ID NO: 10563 - DNA, 456 bp, Homo sapiens
  misc_feature (1)...(456): n = A,T,C or G
tcgggattcgtagacctttagtccacngcggtggaattcgctcgagcggcgcttttttctgtgggaagggagaattggaaatcctataatataaaatatacaaatgagttattcatgagtataactggataagattaatacatacaaaaagggcaaatattaactgatgaaaactaaattacagactcctactttctagcagtattctgaagctaaaatactacaaaacagctaaatcctgcctgaaactggctttttaatgcatttctgggctcacagtaaggaaacaaaaacctctcagctccacccttccaccaaatccctttagcaaaaaccggggtgtgcagaaatggaatgtcagcactgcctttcaggagcctaacccttgggcagctgtagcagagggcgctgaagctaaaccaggactcttgagcgagggcgcgagacaagctaggg

SEQ ID NO: 10564 - DNA, 470 bp, Homo sapiens
  misc_feature (1)...(470): n = A,T,C or G
tggggctncnatcgattgcttacttagngcggnggaattcgtctttcttcattcagcccagcatttggtcacatcttctgtcactcagggcgtgagggcgagggatcttaaacgttaacaagtcagagacgctggcctgggaactgtccaatcaggcacgcggttggagcggaaagggcggcttccgggatgtggcggggtctttgtctctcgctgcagccggagttactggtctcgtcttcgcgcttctgtgtcctctgctcgtagaggcccagcctctgtggccctgtgacctgcaggtattgggaatccacagctaagatgccaggaccccttggaagcctagaaatggtgagagtgccgagtccgacatccctagagaggagaaggggctggttggaaccggtgggaagaggctgtggcgggactcatgcctccccgctgtcagctccacaatccgtgcccctagt

SEQ ID NO: 10565 - DNA, 462 bp, Homo sapiens
  misc_feature (1)...(462): n = A,T,C or G
natagagacctttgtccangcggtggaattccttagttgaaaatgctcgtgctgctaatggaattagagtgcgttcattttacaggctagtattttaaaagtagaaatcaaaatctggcaccgaagcatgctaattgtttactgtaccttgtgaggttttcactcataaatttaaaccagtgtatttttttagaactggtttgtgtatatatatagtgattatggatactaattcaatgtaatttataattttctatgtcaatacaaaaatacatcacagccttctcaaacagctcaagcaatatattgtatattgccatatcgtctggtgaaagggttaaattacttcacctcttgcacttttagatgcaaatcagtttttcatttctgtaatagaaaattattcacgtatttttacatcatttgtttttcctgaccagtatttaaaaccaaaaagatatt

SEQ ID NO: 10566 - DNA, 452 bp, Homo sapiens
  misc_feature (1)...(452): n = A,T,C or G
nagggctgatnnccatgatgacctctgaccancnggtggaattcggaaatcggggtgaaattagtactctaattgaggacctagggtaaagtactatttttcagagggaaaaaaaaacccacgcaaacacattgttttattctagcagtttgctctaatatacaggtgtctagtcttttggcttccctgggccacattggaagaagaattgtcttgggccacacataaaatacactaacactaatgatagctgatgagctaaagaaaaatgtcaccaaaaaaatctcataatgttttaagaaagtttacaaatttgttttgggctgcattcaaagctgtcctgggccacatgcagcctgcgggctgtgggttgaacaagcttgctctaatataaatggacaaatggtggtattgaagataaaaagtatagtagaggctgggtgcggtgcgtc

SEQ ID NO: 10567 - DNA, 482 bp, Homo sapiens
  misc_feature (1)...(482): n = A,T,C or G
ccccccccnnnngaattgagaccatattgtagacattagaccangcggtggaattcgaattccaccaaaggcaaatgaggattattagtattccattttgccctatggatattctcagtgctttctactggaaactcacaaccaattctgaatatgccacatactgtgtgatttgcccttgctgtccaaccctgttcttgctgccatttaaaaacaatcaggccgggtgtggtggctcatttctgtaatcccagcactttgggaggccgaggtgggtggatcatttgagctctggagttcgagaccagccagggccacatagcaagacctcgtctctactaaaaattaaaaaaaaaaaaaatcggctgggcatggcgggggttcatgcctgtagtcctggcactttgggtgccagggcgggaggatcgtttgagctcaccagttcaagaccagcctgggcatcatagtgagaccctgtcttn

SEQ ID NO: 10568 - DNA, 489 bp, Homo sapiens
  misc_feature (1)...(489): n = A,T,C or G
gggcggcnccgngattgannnccaatcgtagttcctagtccgtgtggtggaattcgcctaaagaagttatggtatcatatgttaaactaagctttcaaaaaccttagtgaaatagcaagtgactgctttcaagcagcagtcgacatgtaaatgaaggtgttcttagaattcgcattttgccagctcagcgcacctccacaacgaatgaaatgctccgtatgatttgcacaaatgacatagacctccccaaaagttaactggctctccttcctcacacagttcatcataacccaaccccccacccccgggtcatgaaaatcacagaacttataaacacattgaaccctagatctcaggcttcctgacctaccgccagtggccccttgctggccaccctataaggtcctccttccctggcagccccccatgtgggagaaatacctgattctcccaatctgcagtgggagagctttgctgaattccatccca

SEQ ID NO: 10569 - DNA, 485 bp, Homo sapiens
  misc_feature (1)...(485): n = A,T,C or G
agcgattggactctgttgaggccntggagaaccacagngcttggacggaacccgtcgctcgtgccccaccccggtcggcctggcataatttgccctccgttacctcttcaccgcaccctcggactgccccaagggccccgccgccgctccagcgccgcgcagccaccgccgccgccgccgcctctccttagtcgccgccatgacgaccgcgtccacctcgcaggtgcgccagaactaccaccaggactcagaggccggcatcaaccgccagatcaacctggagctctacgcctcctacgtttacctggccatgtcttactactttgaccgcgatgatgtggctttgaagaactttgccaaatactttcttcaccaatctcatgaggagagggaacatgctgagatactgatgaagctgcagaaccaacgaggtgggcgaatcttccttcaggatatcaagaaaccagactgtgatgactgtgaga

SEQ ID NO: 10570 - DNA, 420 bp, Homo sapiens
  misc_feature (1)...(420): n = A,T,C or G
ggaacacgcagatggtggagaagatcatcgaccgagccatcacctcgctgcgggccaacggtgtggagatcaaccgtgagcagtggatccaggatgccgaggaatgtgacagggctgggagtgtggccacctgccaggccgtcatgcgtgccgcgattgggattgggattgaggaggaagatcggaagcatacctggatggaggatgctgacagatgtgtaccccacaatgccctggagtgtgcacgagccatctacgcctacgccctgcatggtgttccccagcatgattagtgtgtggctgcgcgccgcgtacttcgagaagaaccatggcactcgggagtccctggaagcactcctgcagagggctgcgagccactgccccaaagcataggtgctgtggctcatgggcgccaagtcn

SEQ ID NO: 10571 - DNA, 468 bp, Homo sapiens
  misc_feature (1)...(468): n = A,T,C or G
cgagtgccnnnncgggagnaacattgaaacctanagcccatgcatccttcgtagagnctggnggaattcgaacaggacccgccgccatgggccgtgtgatccgtggacagaggaagggcgccgggtctgtgttccgcgcgcacgtgaagcaccgtaaaggcgctgcgcgcctgcgcgccgtggatttcgctgagcggcacggctacatcaagggcatcgtcaaggacatcatccacgacccgggccgcggcgcgcccctcgccaaggtggtcttccgggatccgtatcggtttaagaagcggacggagctgttcattgccgccgagggcattcacacgggccagtttgtgtattgcggcaagaaggcccagctcaacattggcaatgtgctccctgtgggcaccatgcctgagggtacaatcgtgtgctgcctggaggagaagcctggagaccgtggcaagctggccn

SEQ ID NO: 10572 - DNA, 450 bp, Homo sapiens
  misc_feature (1)...(450): n = A,T,C or G
cgggcccgnnaaataacctagggggcccgactgcanctacganannccnnnngntnnnggaaggaggccagtangcctgaggttatacgggcaattttgaatgcctcttttggtttaaattatgccatgacaaccctcttgtgccgatgaggctccccatccctgacagccaggtgagcatttggagctggtttctcaacatgaggatgggttggttgttaaattaacaacctccacagtatcagattgagtgagctttgtctgctggaaaaacctgaaacgtcaactctgcttcaaggtcggcaagaagaacagaaggcggagacttggcagagagactcaagctgattgtcacaggctacagaggggccagctccagaacagtgaccagctacatcctgtccaagcagcccgagtgtggtcttggtccctgcaaggcgatgtgggcat

SEQ ID NO: 10573 - DNA, 448 bp, Homo sapiens
  misc_feature (1)...(448): n = A,T,C or G
ttaattttagttgacctncngnngnnnnnagtgcctcaagcaccacgacccgggagaaaactgagttgagaaggccttggtgatgaaggtgagaaattcgagaatccccggagataacacatcagcaaatagtgcgcaggcagaacaagctgttggaggtgagagacacagagcagagaagcacccgcacctggagagtcaggagggcctcacatcagaacgcctgagcaaatacagttttgaaggatactaattttttaaaaagttcattcacatgagttagacaaagagaaagaagcaggacattctaggaagaaggaacggcccaggcaaaagcgacgcgtacattggcgtgggtccattcaagaattgtgcccacaatataccaggcacttgtccagacctgcatcgtccaatgcccacctcgacctcccaaagtgttgggatt

SEQ ID NO: 10574 - DNA, 416 bp, Homo sapiens
ttctcttaaattttgatacttatagagacaggacttgccatggggaatttctttccccttactatataattttattactagaaggaaaagtaatagcaatgataataatgaacagacttcgtgtctttattacatttgctttcctagttacctttagactgtcacttctgagttctttctctgacatgcttttcttttctcgtgaagcgtcttacattctgactaaattttgtttttttgttgttgttttagtgaggtgatttttaaaacatgctctaggtcaataagacaaagttaatgatgagcagtaaaacaattcttgaacaattttgtactttttttctttatataatatatccgtaagccaaagtctttcttgacaagtacagcgttttactctgctttcttagtttgga

SEQ ID NO: 10575 - DNA, 422 bp, Homo sapiens
gtggatcacttgaagtcaagagttcgagactgtcctggccaacacagtgaaaccctgtctctactaaaaaaaaaaaaaaaaatcccaaaattaccccggtgtgggggggcgtgcctgtaatcccacctactcgggagtctgaggggggaggatcatttgaacctgggagggggaggttgcagtaagctgaaatcatgccactgcactccagcctgggggacaaaaggaaaaccctgtctcaaaaaaaaaaaacccaaaaaaaaacccccccggggttttttcaaacccctttttgggttctaaaaaaaatttaaaccggggttttaaaattttaaagggaaaggctttttaaaaggggaccccctttttaaaacccaaacttggggcccaattttgggggaaaaaactttttttctcatttg

SEQ ID NO: 10576 - DNA, 464 bp, Homo sapiens
  misc_feature (1)...(464): n = A,T,C or G
gcgtgccccccggattaaccttgaaacctttgncccagcttgcanagtanaagcgnngnaaatngnggggcaaggacttggtgcagncggagctttacctgagatattcacagaattggaaatttcctatttcctgcttagacggcttctaggtgtacgcactgaaggagacaagaaagcagcaaaggttcaaaagctgtctaagaatgaagtgctcatggtgaacataggatccctgtcaacaggagggagagttagtgctgtcaaggccgatttgggtaaaattgttttgaccaatccagtgtgcacagaggtaggagaaaaaattgcccttagccgaagagttgaaaaacactggcgtttaattgggtggggtcagataagaagaggagtgacaatcaagccaacagtagatgatgactgaagaataccagttaaataatacattcggatggatttggaag

SEQ ID NO: 10577 - DNA, 464 bp, Homo sapiens
  misc_feature (1)...(464): n = A,T,C or G
nggggaatcgaattgcgtaccattngngcnggacnncgcaaggacgacgggagctgagcggctctgtgttttgtcccttcatccaacaggaacctaaggagatgctgactctaagtgagtaccacgagcgcgtgcgctcccaggggcagcagctgcagcagctccaggccgagctggataaactccacaaggaggtgtccactgttcgggcagccaacagcgagagagtggccaagctcgtgttccagaggctgaatgaggattttgtgcggaagcccgactatgctttgagctctgtgggagcctccatcgacctgcagaagacatcccacgattacgcagacaggaacactgcctacttctggaatcgcttcagcttctggaactacgcacggccgcccacggttatcctggagccccacgtgttccctgggaattgctgggcttttgaggcgaccaatgcn

SEQ ID NO: 10578 - DNA, 487 bp, Homo sapiens
  misc_feature (1)...(487): n = A,T,C or G
agggnagtgncaaatttggganccaagttcagnnggngcangcagangncgnggaannntggagnttgaggatataatgggctaagtgaaacaangccaaacattagaaagacaaataccacatggtnctcacttatatgaggagagctaataaagtgtgaattcatagaagttagagggtagaactatgattaccagaggctgagggaggcagggagttggtggggaggagtgagggaatgggagttgttgatcaaagggacaaaattttagatagacaagaaaaatagattttgagatctattgcaagcagagttactgtagacaataatgtattacatatttcagaatgactaagaataaatctcaaatgtctcaccgtagaaatgatagctaagtgagatgatggatatgttgattagcttgacttaattatgccacattgtatacatatataaaaacatcacattgtatctcataagtaaat

SEQ ID NO: 10579 - DNA, 489 bp, Homo sapiens
  misc_feature (1)...(489): n = A,T,C or G
ggtncannnnagggggggnccnagnnngtttattcatgtangcccactgagagcatcgnaannncagagngannattnagcaatnnttggttttggtatattaggcatgtttggaggctttcctattctagcatttaaatttaaattttattaaaattaaagaatttaaatctagcatttaaatttaaataatttaagtctagcatttacttttaaataattataatgaagttttgaaatactaagttaatccagacctttagttgtcccatggtgttaataaagttgccaaagaagatgtattatgaacaattcagcaataagacaattgtcaacacagttgagaataacaatggtaatcgttagtaatatttagaattggaatttgcctactgaaatagttatagatgattacttgtgatgtgaaactgaattgagcatgacaaccagacatctccagttggttttgtaagttttgagaatctagag

SEQ ID NO: 10580 - DNA, 491 bp, Homo sapiens
  misc_feature (1)...(491): n = A,T,C or G
agcgggaaatgagaccatgatgacattagnccagngcggtggaattcgctaaactactggccaggtgtggcggctcacgcttgtaatctcagcactttgagaggccgaggcggatggatcacttgaggccaggagtttgaaaccagcctgggcaacatggtgaaactctgtctctactaaaattacaaacattagctgggtgtggtggcacgtggctgtagtctcagccacttgggatgctgaagtgggagaatcacttgaacccaggaggcggaggctgcagtgagctgggattgcaccactgcgctccagcctgggtgacagagccagactctgtctcaaaaaaaattgagttaaactacacatcttcactttggaacccttctttccttttgtcttatcacttgctccccagcactgattgaatattacgacctgtcaagtaccgaacagaaagtactgtaaggaagtctgacatatacacaaagaga

SEQ ID NO: 10581 - DNA, 464 bp, Homo sapiens
  misc_feature (1)...(464): n = A,T,C or G
ggggccanncggganacaccgaaacctcngnactgacagctanccacagngcggnggaattccaggggccctgccttcaaaccccggccccctccaggggacagttatttaaacgagtggccgggagcatctgccacctgctggggaggcagagaccctgcaatggccacctctttaaaagggcagctgtacagggctaggttttttcaatgaagtttctgtattaaaggagtggctctggaaaaaaaaaaaaaaaaaaaaaagggccccttcaatttaaaaggcccctttaaaccccgttgaacaccctcaacgggccttttaagtggccaccctttggtggttggcccctcccccggcctttctttgacctgggagggggccactccccttgtcttttctaaaaaaaaggaggaaatggcatccctttgccggagaaggggccttttttatggganaanccn

SEQ ID NO: 10582 - DNA, 460 bp, Homo sapiens
  misc_feature (1)...(460): n = A,T,C or G
gggtgccgnnnnnnattaaactgaaagctccgnactgacggcgtagaaaggcgccctgccttcaaaccccggccccctccaggggacagttatttaaacgagtggccgggagcatctgccacctgctggggaggcagagaccctgcaatggccacctctttaaaagggcagctgtacagggctaggttttttcaatgaagtttctgtattaaaggagtggctctggaaaaaaaaaaaaaaaaaaaaaaccgcccgttcaattaaaagggcccctttaaaccccgttgaaaaccctgaatgggccttttaattgcccaccctttggtggttgccccctccccgggcctttttttgccctggggggggccccccccccttgccttttcttaaaaaaaggagaaaatgccttccctttgttggagagggggcaatttttatgggcncanaaaaaaaaaacncn

SEQ ID NO: 10583 - DNA, 465 bp, Homo sapiens
  misc_feature (1)...(465): n = A,T,C or G
ggggcccgnagggganaaaattgaaacctacgaaatgacagctacgnananctgnggaaatcgncgcgccgggagctcgcggcgcgcggtccctgtcctccggtccgagatgaatcctgcggcagaagccgagttcaacatcctcctggccaccgactcctacaaggttactcactataaacaatatccacccaacacaagcaaagtttattcctactttgaatgccgtgaaaagaagacagaaaactccaaattaaggaaggtgaaatatgaggaaacagtattttatgggttgcagtacattcttaataagtacttaaaaggtaaagtagtaaccaaagagaaaatccaggaagccaaagatgtctacaaagaacatttccaagatgatgtctttaatgaaaagggatggaactacattcttgagaagtatgatgggcatcttccaatagaaataaaagctgt

SEQ ID NO: 10584 - DNA, 470 bp, Homo sapiens
  misc_feature (1)...(470): n = A,T,C or G
natcgaaattcgtttgcagtgtggcggaattcgttatttgtacgtattacttctatgacactgttttttcatctgtgttagaaatgtctttctttcttgaataagctacttcaatttcttatagacagattctgcttttatgacccttgtttctacaaagtaatctctactcatgctgaaatctcagacaattttaacaaatatttagagtacttaatttttctttgaattctaaatattatccttctttagttcaccatagttggatattttcagataactgtggaggaaacagcactgatcctggggccatgaaacctgatttcaagatctagtcccttctttaattttgcacaactaatttaatcacattcatccttaatttcatcatcattaanatagcagagaataattccccgttcatggagttgatatgcaatgaaatagcatatcaatgtatgtatgaatgg

SEQ ID NO: 10585 - DNA, 440 bp, Homo sapiens
  misc_feature (1)...(440): n = A,T,C or G
gggcccnnatcgagacaatagacagccatgtggaattccggaactaaacgatgaatcaagtgattcagatgaggaaatgactgcagtggcctaattgtcttctcttgaattgaaaataaataatttgagagcttcgaattatattcattgattatggtacctaattgtcatgatacaaaaatttgatactgacattctcttatatgatgagagcttcatttgcgtttcaaaaatggtgttatgatacttattttaaaatgaagattgcttttcatttccattaagttgctaaaatagatagatgtgatctgcagaagttgtttagtcttcatctgaatttcaggctgggagggagcaatataactaaggacaaaaaatgttttgtttttcttgtgtatttatgatcacctaatttcacgttttgtgaaatggacagcacg

SEQ ID NO: 10586 - DNA, 451 bp, Homo sapiens
  misc_feature (1)...(451): n = A,T,C or G
atcgaattcgagacactagnccgngcggtggaattcccaagactggttctggttggacagctaatctgatttggggattcactgtttcagaggacacagacaaaagctgttgcatcaaaactggactttaggagtaatttctattgaactcctgtcaatatgtttatttcctctgtctacagcagatgggagtcttctcttttagacaggggctttttgtttttaaccccaattgtaataaagggtgttctttttcttctttagagtttacaaaactataaatatttgtgtctccacataccatcttcatcttcacacattcactgtgctttcctccccatagtgggagctgtcatcaccaacagggtttactctcccctggagaggttatttaaatagctgtccataagccatccagatcaacaccctttcttccatacagaaaagggct

SEQ ID NO: 10587 - DNA, 462 bp, Homo sapiens
  misc_feature (1)...(462): n = A,T,C or G
agggccggnngggtttacctaggagcttcgnactgacgnctaacgaaanggcgccaggangnaggcagcgatataaagtcctaggagtcagaactccaagaggggaaggcagtgaggagagtggggagggttccagcagccgggggtggccctccggccaaggcaggcaggcatggccatgctgagcgaccatgcaggagggacccgtgcagggatgcaggcagaacacagggcgtgcccaccaaaaggacaggagcacagcgggccaggagcagccgggagggcattcctgtgtgggggccttggggcagtgctgggtgagcccccagcaagggaagctgtgtcatgtggaagaagcgggtgtgccagagagctgtgatgtctcagaggcttaagagacctccagaggctgagggtcccagggcacagccacagcacggagagctagacagggccagaaag

SEQ ID NO: 10588 - DNA, 476 bp, Homo sapiens
  misc_feature (1)...(476): n = A,T,C or G
attgagaccttggccaggccgggtgatcacattttttccagacaaagtaatatcttttatgagatctgagagatgaatgatgataatgatgaaggagggaagataggaaaaacctccaggaaatgagacaagcttacaaatcagagtgggtaatgtaatttggggaaaatagaaagggggctgcagggtgactcaggggcctgattatggagggctttaatttgattctaatttgttcttcatcattagagtaatgggaagctaaggaagagtttttaggctgggcacagtggctcacacctgtaatcccagcactttgggagactgaggcaggtgaatcacttggcatcaggagttcgagaccagcctggccagccgtctgtactaaaaatacaaaaattacctgggcatggtggcacatgcctgtattcccagctacttgggaggctgaggcaggagaatcactttaatccagn

SEQ ID NO: 10589 - DNA, 493 bp, Homo sapiens
  misc_feature (1)...(493): n = A,T,C or G
cgggcgggcccccnnnagnnattaancctagggaccttcagnctgcncngctnntgnagagncnngnaannngnaagaatttgaagctggaaagggaagaccccttttcccctcctcctgtccccagtgagtcttagcgagacttttgccctgcgcacaattggatctgaatgtgcgggggagagggctgggggccggagggcaggcaaggcctggggggtgctcgtgatatgtgctcaagccagttgtgggaaaaactcgagtcctcccctcctcccgacctaccccgtgtggctgcttttggctggattccctgcacccagtgcaacacaccctttccccttcactctcccttggttactatggaaacaagggtgtcattgatgtgggctgagctggggaacatgtcggtgcacagctgaaagtcagcgattatgccggcggttagaaatgtgccagggttaaaggagtccgcagctcccacggctgctgg

SEQ ID NO: 10590 - DNA, 479 bp, Homo sapiens
  misc_feature (1)...(479): n = A,T,C or G
agaggtccnnnnntttgagnaactgatgaacntacggaagagccgnggaatttgntgagaggtgaatcaccgtaattctccgaagctctgctgggcagctcatccatgttacattgtctatgcataataagcaggcctggagtctgcaaatgtaccagtccttctcccgcatatcctgggtgcccccttggctttgcctctcctgtgtcctgactttctgcgttctagaagagagagcctctccttcaccttttgagcaactgagtcatctcaagtgctgagctctgctctgccgcctgctggtgccttgtaaaggtatactcgttacaggccctaaatgatctaatggaccagggttaagcgataggagactgtgctttgtttcaaaggatccttcaccctgatctgcagtgaggtggatagatcacctgtagtccctcgtctgtggtcttggaggcttacatagtaaaatacattcc

SEQ ID NO: 10591 - DNA, 479 bp, Homo sapiens
  misc_feature (1)...(479): n = A,T,C or G
ggggtccnnnnnttttgaaaaactgagaccntacggaagngccgnggaatttgggaatcgagtatcattttgtgtaagaaatcacagcctggaatggatgtgaaccaaatgtcttttaaccccatgaactggcgccagctgtgcttatcaagtccaagtacagtgagcgtgtggaccattgaaagaagtaaccaggagcattgtttcagagcaaggtcggtgaaattacctctagaagatgggtcattttttaatgaaacggatgtcgttttcccccagtcgttgccgaaagatctcatctatggtcccgtgctgccactgtcagccattgccgggctggtaggcaaagaggcacagactttccggccgaaagatgatctatatcctttgcttcacccgactatgcattgctggactccaacaagtgacttgtacattggctgtgaagagggtcatcttttaatgattaatggagacac

SEQ ID NO: 10592 - DNA, 552 bp, Homo sapiens
  misc_feature (1)...(552): n = A,T,C or G
ngttcgatcacagtccgtgtggtttagaatcacagtccgtgtggtgcaattcggcgtcgccggngtcgggctagcaggctctgggatcgggcttgtgggacaccccgaaaataaagacgcagagcctcagagaagttaaacgattgatcctatgtcagggggtagagtcaagactcatacctatgccttttaacttcaagattggacgactgattattggacagaatggcatcttgtcgacacctgcggtctcctgcattatcaggaagatcaaggcagctggtggaatcattctaacagccagccactgccctggaggaccagggggagagtttggagtgaagtttaatgttgccaatggagggcagacttcttggaggaagtgaaatttgaactgcgatgtgaagaatgagcaggagttagtgaggtgaagaagagaagaggagtgttgcaaacacaggtcagtctgtgcaaaggccctgagacacaaggagcctagaaccacggctcgaagaacaccgtctggctggggcatggctcgtcttacagaan

SEQ ID NO: 10593 - DNA, 500 bp, Homo sapiens
  misc_feature (1)...(500): n = A,T,C or G
ggggnnnnnnnaagtaggggnncnnagggagattaatccgagaccattcccagttagccaactgaagngncgnggaannnaatctggntacttgaaaacaagtgaaagtgctgtagatttgttctgttgctaagaaccaccacactaaacctcgtatagttcctggaggatacacaacagtgtaattctctttagggtgtgccacaggttcctggcctgtgggagggaatgaatcaggagggctcttgagaaccttcatctgtgtgcttgcactgaaagtgagtcccaaagctggagatttagtgagagcaggcaacccctctgtgtctcactgtccatattctggaggcagaggtttgtaacaggccatgtgcacctgcatagggatgggtaaagcaaggactttgaaagagttgaaaagcattataaacagttgttcagaaatacgtcccaggagttccatgtgaaactggctctgtgtgcattgaagcatggctgtt

SEQ ID NO: 10594 - DNA, 484 bp, Homo sapiens
  misc_feature (1)...(484): n = A,T,C or G
aatgaaaaccntcggnnnnncctaatgagatcataggacagngcggnggaattcgcaagaaggatgcccttgagatatgagtttgtgttacatgtgtccatcaactagtcagcagatacttactaaatgctattgtggtaggtgctatagaggacaaaaaggtacatataatgtggtctttattctcaaactatttatgatgtagttgaggaaaaatgacatttacatgtgaaaagatgtggctgaagaaatagattggagagaacagatctgaaagctactttgatggaaaaatccacaatttatgcctaattttgagaggagggaaagagaaagagaggtattaaagagaacttatagggagtggtagtacccttttcttaaaatagaacatgaagtcagaactggaagccatatttggggtcagtgataaatttgttgattttcagatgaatttattgaatttgaaatgtcaggataatgg

SEQ ID NO: 10595 - DNA, 448 bp, Homo sapiens
  misc_feature (1)...(448): n = A,T,C or G
natcgaagacatctggaagngcggtggaattccattttgcaaatgctcaaatgagcattctatcttttggctttcagagtgatagagctcctaacaggtgtacaggcccaagagttgaaggtgattggttttctttacagactccttgttctctagaagggctttttacttgaataaaacaatgcaacttagcaaaccaatttatggccttagagaaacatttttgcatgagttcttacaaactgtttgttatattttctggaatgataagtgagaattatttagaaaagacatgctccaaaaaaaaaaaacaaaactgataaaacagtttttcgaaacttacttttaaaagcatacgtgctatgactctctccagtttgaatatgcaattgttttcacaggcaggatgtctgttttctgcctgtatttcccagtgatttactctagg

SEQ ID NO: 10596 - DNA, 486 bp, Homo sapiens
  misc_feature (1)...(486): n = A,T,C or G
cggggcatagggaccccgggagtctagcacgngcggggaanncgaaattactttgcttcctagctgatgtcatcccacattggtacaggtgttattcagtactgggtggttcagcagggaagccaggtgggaccagtgtgtctgtcatgaaaccactaactgcattcctgactgaagagccatctgtcatttattggggaaggtcttcagttgagctctcatccttaggaaggaagcacgtggaggagggacggaggaggttcccttgctgggcatgcttcgtagagggccaggagcagcaggtcatgtgcacatgccgttgcagcacaagcttatgcttcccgtagccgtggcttttcattctgcacagtcccaggtcccagctcccctcttatggtttctgtcataatgtgctttatctgattgactccaaacatcccgaaatgtcacctgcagatttctcgtgggaaccaatatgtacatgtn

SEQ ID NO: 10597 - DNA, 552 bp, Homo sapiens
  misc_feature (1)...(552): n = A,T,C or G
aattagancacctnannnnnnnnntttcggtcactactcagtgtggtggaattcagacttcaaatgaatgataaaaacacctgtaaagtgataggacctctactttttctcatgtccaatgttcagtttcttataaaccaggcatgaagagaaacaaaaagtaattaattctccagatcatgaagttgtcttcaacctaagcacagaggtataataattacatttctcagaagttccccctctgttttgagtctcaagggcaattgagatgtcagtgaggctgtgattaaatgtattggatattagaggattttaaatacaaacaagtattataggtgttaccactgaccccgaaggtaagatttactgtgaaaatttataatgcaaggaagaatgatcaagttggctgtcagaacaacaaaatattacaaacccaggatgtctaagaagcagaagtccgtggttgccacctctcaagcctcttagcttaatccaatctaggatgatttccactctgcaacaaaacagaattattttgccttatttgcgaaa

SEQ ID NO: 10598 - DNA, 470 bp, Homo sapiens
  misc_feature (1)...(470): n = A,T,C or G
gtgcgngnnnnagnaacctgagaccctggaagactgatgccctccgaacgccgctcttcgcgtcccggattccggtggctgcgtccgcgtcgcctctcccagactagatcgaagggttccccccacctcccctctgtgggcggaaagagcggaatgttccatttttctgtggaataacggggtcatgaactggagcccgggtgctgcccgccgcccgctgcccccgccctcccttctcgccagggcgcctgcggcctctcttcgcggccttccccgagggactcagagccgcgagggaccgcctagctcccttggggatggggaaggcgtgggagcctcttggggaaagtgaagagctcggtggccgtgactccgcacgagactgcggcagattgtggcggcggcttctctccaagacttacgatttacggaatggccatcttccataattaacaaataaataaatgaan

SEQ ID NO: 10599 - DNA, 494 bp, Homo sapiens
  misc_feature (1)...(494): n = A,T,C or G
cgannnnnnnnagggggggnncnnaggggagtgnatccagtnacctcgtcagctagctaccgnangncacnganaannannnnangagaaaggacatgcctaatnctatggaatntagaattatgtagnattttgatgcatttaagcagtaattggaggcaatatgaatgagtactttacaccaaatgtactaaattctttatatctgctaacacttaatattcataataatcacatagaatagggattatttttatcctagttttatagttggaggatctgaagctccagaatgtgtaaacatcttccccaagaccacaaaaccagtaaaggatagaaccagcattcacagcaatatgtttctaatactgaagtcttcatttttatactttgtgtgtgtttctacatattagagtatattagtccttttttttaagtggtcacctgcctttttgaaaaaacccattttaacttaatcatgtgcaacattaaac

SEQ ID NO: 10600 - DNA, 487 bp, Homo sapiens
  misc_feature (1)...(487): n = A,T,C or G
gcgtgactactgagacactagataacgtcgggaanncttgcagnngtagacagatcatcaaatgtggttactattttcacaaaacaagaacatcctaaatgtctactcattcaacttgtatgcaagtaacagaaaatccatccgaaagagatttaaacaataaaggatctgtatgttgcataatcacaaaataggttgactgtgaattaactgcataatgcagtaatgttagcaaggacccaactctttctctttcctctctgcctcttcgctagctcttttccgaatcacagaggctacagcagctccatcacacacattccagctacctgagctggaaacctaccctcaaaaccctccgaagattgctgatgacttgtgagcaagacctgtgtcttttgcctttttctaagcaaatcctgaaatggaatgaaatttactgtgagttacctggtcaaccagagaaaagtagatccctgataaaatc

SEQ ID NO: 10601 - DNA, 470 bp, Homo sapiens
  misc_feature (1)...(470): n = A,T,C or G
ggcgtacccggcggccnaaaaagaaanttcattganangcaagcacangcggcggaantcagangacagttgatgctttatttggaaagcagtgtgcatatcttgaggggtgatgaacacaagcaaaccaagttgcacctggcttctgcacactcctgcgaaagtcgggaacattcacttcacattgaccccttcctaacctggcaggggacgtcagggtcctttacaaacaaacacgcttgggcttggcaggagctggcgtggccacccccgctgcccaggggctggcctttaaaaataagctggggttccagggggtcacccggggggcccacagtgcccacccgtggctgggtcggagcttcatggtcctaagctagggctagggctacacttctaagacgcacgcatatcaacccgtgtaccctgggacagggactggccccacctcctgtgttagaggtgccctt

SEQ ID NO: 10602 - DNA, 475 bp, Homo sapiens
  misc_feature (1)...(475): n = A,T,C or G
ntggaactcgaaaatgatgaccctagtccangcggtggaattcttaaagaggaaagactaatctgggattttgccccatttctctggtttttcactcctatatttaattctcacaatcgtgtcgtcacatagtgcaaaaaacaaaattcttgtaaagtccccaggagtttatgcttgggtgaaagttttagcctgagtattttcttcctctaaaaaaggtgggaaatgagacattgaggaattaacatataaatgtctgctatgggtttaagagaactggcgtatttggaatgcttcttacactaacactgtctcattgtaaaatataaaaccccttactctaactacatttttattcctctggtagtgtggtatccaggcaacatatcacttctgctatgtaattctaagaattctcatttctagagtacctgagccaaacaaatacacaacggaagctgcagctgtatcatca

SEQ ID NO: 10603 - DNA, 489 bp, Homo sapiens
  misc_feature (1)...(489): n = A,T,C or G
aggggagtncgnnncccnngnnnnnnnnncctgggaccctagatcgagtagcctaatccgagtggtggaattcgttccaggaaaactcgttcacatcttccgtaagatcaagaaggctctggcatcagataagatcaaatgttgtctttctgttttaaatatgtgccgcaaagagatttgcttacaatctattgagaaagctaaaacagagcagacattgtcctgttgcggggtagatgaatagcctaagaatagtttagacaaattctgaaaacgaatttaccttagaagatgttcatgttagaactggtaaaagtaacatgttatttttctgtcaagccctttttgtacttgccgtttattacatattttagatttattttttattttcgaaacatccaaaaaggaatgctaattagtgaaatggaagaatttccatttcaacaccttaggaaaaaaaaaactgacttgacatacctaagaaaaggc

SEQ ID NO: 10604 - DNA, 454 bp, Homo sapiens
  misc_feature (1)...(454): n = A,T,C or G
gggtaattgagacatatanattcgagacatctatccgtgcggtggaattccatttgaagactgctggaatagatcatggactcaataaataccttttcataggagcacagagggatgaacaaggcagactgaaggagagaataggaatgctccccatgtcaggtgtgtggagggtgcaccaaggctcattctggtagaggtagaggagcttctcccaaagtagcaaactcagatcactcatggtctcagtccccttaattctttcaagctgctggatcaagaacgaggcagccagccctccagctgatgaccggagacatttattatctaccatgtgctaggcactgtcctaggtaccagagacatcctggtaatcaagacaaagttccacgtttgtgaagttggggatcagggaggtggagagacagagaaaataaacaaatctatgagaatc

SEQ ID NO: 10605 - DNA, 469 bp, Homo sapiens
  misc_feature (1)...(469): n = A,T,C or G
cattgatagcgtacgccacgacgcngcannntgngggntggccaaccatctgttactcgtttttgatgccagcctgactgggacacctgctgtgttttcaggtcacgacggggcagtgaatgccgtgtgctggagccaggaccggaggtggctgctctctgcggcccgggacgggaccctgcgaatgtggtcggctcgtggggcagagctcgcactgcttctgatataaacagaagagcaagtccaagctgatttgcaggctctccacgacgggtgcagtagacatgaccagtttatcggcagtcaacgacttttattcccacatcgtactcgcagctggccggaacaggaccgtggaagtgtttgacctcaacgccggctgcagtgcagcggagatagaggaagcccactcacggtctgtccatcaaatctgtcaaaataaaggttcatcattttcaacccaacagcg

SEQ ID NO: 10606 - DNA, 456 bp, Homo sapiens
gcggctaactcgtagacactagtccagtgcggtggcattcgcctggtcactccagggaatgtcgctctgtgggcccctgtcagagtggagatcttgtccctccatactcactggagcaggagcccgcataattctcatagagagtcgccaggagcctattctgtgacttctggaagatggggaccacggtctcattcaggggatccttgtttttctccagccagcccacaatgctgtaaggcacctggagagacaagtcaggtgctgagcccgggtgggagacctggagcagggcgggaggagcctggccgagggctggggttccagcaagcacctaccacgcctgcgtagtggaccacctcgaagtgggcctggtacttgcgcttcttgtcaggccgaggctgctggaaattgggtgacttccccgcgtggttgtcgtatagcttggcccggaag

SEQ ID NO: 10607 - DNA, 472 bp, Homo sapiens
  misc_feature (1)...(472): n = A,T,C or G
agggcgcggnnnctcccatagaatagcgtaccnagngacgnggcattcgaaaggtcagcttgcatagcatcacggaaaaagctcaggctttggggtcccagctctcccaatcagcaatggtataatattggcccaatcacttcacttccctgagcctcagtttcctccttcttcaaagggccagtagttcctcactctcagaattctggagattggcagagaacagtgaaaaagctccatacccagtgctctctcagccagggtaaatctctttcttcccctttttctcagaatggctggctatggggtgatcagcttcatggaatattccagactataagactgtgcagagatgatgggttttcaaagaatcagaacatggtgcaataaggactggcccaacattgataattgttaaagctggataatagatacatgacagnttatcatactattatttctattagtatgg

SEQ ID NO: 10608 - DNA, 487 bp, Homo sapiens
  misc_feature (1)...(487): n = A,T,C or G
cggggnnaatgagccacttgagaccntaggacagngcggnggaattccagactcggtgtccaggtgttcctggggcagggctggcactctgcaaacttctgttactgagttacagaaagagtgcacgcaggaagggcctccacagccttgcacacaaggaccccaccccacaaccgagttgggaaaagatacacattttgtcccctgaagttcctttaagtatgctttgcgtccttacatgaaatgtttataggaatctggaatcatcacagacaatccccctccattaatagttggatccccccaaaacccaccttgtctgccagttagttggaaagctttgtaacttcatgagcccatttctacgaaataatggcccgagacagacagagaatttctagagacagaaagcagatcagtggttgctgggagtaggaatgggaattaactgcaaacaagcaaaagggatctttgtggggtgatggga

SEQ ID NO: 10609 - DNA, 492 bp, Homo sapiens
  misc_feature (1)...(492): n = A,T,C or G
acgggggatactagaccctagaacagcgctgnggaanncctcagggctaggggtgttaggacacattgggagggggcacagcctggggccacaccacatcctgcccacgacagagctctgctcattcacaactcccccacatctgttcacacaaacccatcatgtcttcccgacctgagtgtgtgcaaatgccacggggggcggggggctcaagctcagctccacctgctgtcgtatttattaatgtcctcagagcccatccctgcagaatgcccatctcctcaggcactcactcggaccagtccagtttgctctctccccccttgcttgacacccacaaatgtgacaaacctgccctccgtgctagcatcagccctgcatgagcctgtgatgcaagaggcagggaaatacagttggcctggagaaggggaaggatttgagggagtgggcttcctgatgacctcaggatcatcctatccatacctcccctcn

SEQ ID NO: 10610 - DNA, 464 bp, Homo sapiens
  misc_feature (1)...(464): n = A,T,C or G
nttttaatcgaagaccctagtctcgaagtggcgtaattctttctagctgatggagcgggcggcccgggctgtagtgccggcgccgccgcgtcttcccggtctcctttcccggccgcacagggtagattttcgttccgtcacccacgctggagtgcagtggtgtgaccttggcttgctgcaaccctttgcctcctgggttcaagtgattctcattgcctcagcctcctaagtagctgggattacaggttttataggatcacattgacaaaagtaccatggagttttatgagtcagcatattttattgttcttattccttcaatagttattacaagaattttcctcttcttctggcttttcatgaaagaaacattatatgatgaagttcttggcaaacagaaaagagaacaaaagcttattcctaccaaaacagataanaagaacgcacaaaagacaaagaataga

SEQ ID NO: 10611 - DNA, 451 bp, Homo sapiens
  misc_feature (1)...(451): n = A,T,C or G
atggggtnnnnnnaatcgtagaccactagtcttgtgtggacgaaatcaaatgcttgaacctgggaggcagaggttgcagtgagccgagatcgtgttattgcactacagcctgggggacagaatgatactccatcttaaaaaataaataaataaaaataaataaataaaaataaaaaataaaaaataaaacttagctgggtatggtggtacatgcctatagtcccaactacttgggaggctgaggtgggaggatcacctaaggccaggatttcaaggctgcagtgagctaatgatcacatcactgcactccagcctgggcaacagtgcaagaccctgactcaaaaaaaaaaaaaaaaagaaatcctaaacatcaatgaaaaagtatcgtccaataaaaaaaaatgggcaaaagactttttatacagactctttgctgaaaagaaaatctgaa

SEQ ID NO: 10612 - DNA, 482 bp, Homo sapiens
  misc_feature (1)...(482): n = A,T,C or G
gagagcgncgcnnnnnattgagnaactgatgaccntacggaagngccgtggaattccacgatgagctcaatcggcactggggtgagttcgctgtctgtcggtgtaatagtttaacctaaggattggggttgaagggaactcggacagaccacatggggttcgcggacccggggtgctctgagaccgccttcggctgggtgggccatttgcagctgtttggagaccggtcgtctttatcccctatatgctaggcctgcgtctcaggtgaccgtgactcctgaagcttttcagcgcaggtgtagccggcttggcgtcgccgcagtgaggtttggagccgctttggattgctgagtcattttcttcagccacttagggaaaccgaaagtggaaactcgtggggcttgaaatagtgtgttctcttgagaaccaccgaggcagtgagatttgggattccggggtctggagatcgtgctttttgtggn

SEQ ID NO: 10613 - DNA, 480 bp, Homo sapiens
  misc_feature (1)...(480): n = A,T,C or G
gagagggnnnnnnnncctcgagaaactgagaccngtcgnggaagcgctttatattaaaaaatgctttgcatttcttccagtgcaatgaaattcatatggtgtcccaccttatttaatgatgggacaatttaaaatcttagtcaacttctgtagaaagttttctctatgaaagtaaagctgtttgaaaaattattatttttttacagatctttctataaaaaataaacatcttttgattgcttggatttaggaattcaattcttgtttcagtgaccaatgtcaagttgcaggctttgtgtgttgcatatttaatatttctactaccaccgtatgtcaactgggtaaagccttccagagctctctaaatacctgaaagacttaagcctttttttaagtaattaatacttaaaaaaaaaagatcctggcatctatttatgcaactaaatacttttcagaaatggtatataaaaggctacagtn

SEQ ID NO: 10614 - DNA, 488 bp, Homo sapiens
  misc_feature (1)...(488): n = A,T,C or G
agggaagggcgnnncnnnngnnnnnntnnncctcgagaccctagttcgagtggcgtaattcaagctgcggatcgaaaagcctgacagcacagggcttcctgggctctgcagagcaaactggaaagagctgggatccaggcactatgttctctgaagaactgtggctggaaaatgagaaaaagtgtgctgtggttcggaagtctaagcagggcaggaaacgccaagaactgctggccgtagccttcggggtgaaggtgggtgtcaaaggcggctttctttggccccctctcaaactctttgcctgttcacagatctcctccctggttcgaagggctgccctcacacgcaacgacaaccacttcaattatgagaagacacacaactttaaggtccacacgttccgaggcccacactggtgtgaatattgtgccaatttcatgtgggggctcatcgcccaaggggtccggtgctcanaactgtggatgaan

SEQ ID NO: 10615 - DNA, 489 bp, Homo sapiens
  misc_feature (1)...(489): n = A,T,C or G
cggggnnatttgagccactgatgaccctaggccangcggnggaattcgatgattcctagtcggagattgggagaaaaagaagatgagcctgaatcatttcatgtacctaacagaaagaaaatactctggctgggctcagtggctcatgtttgtaattctagcatgttaggaggtcgaggtgggtgtgttgcttgagcccaggagtttgagaccagcccaggcaacatggcaaaactgtctctacaaaaaatataaagattagccaggcgtggtggcatgcacctgtcatccgagatactcgggaggcagagaggtgggaggatcacttgagcctgggagattgagactgcatcgagctgtgatcatgccactgcactccagcctggaagacagagtgagaccctgtctcaggaaaaaagaaaaaaaaaagatgttgctcagcaagttaatggacaaactgtgcaatatccagaaaactttaacattctn

SEQ ID NO: 10616 - DNA, 452 bp, Homo sapiens
  misc_feature (1)...(452): n = A,T,C or G
ttgggggnngnntttcgagacattagnattgtgtnggcctatatacangcgggggaattccaaatggtggggtaacagaaaggaactggctaccgttcggactatttgtagtcatgtacagaacatgatcaagggtgttacactgggcttccgttacaagatgaggtctgtgtatgctcacttccccatcaacgttgttatccaggagaatgggtctcttgttgaaatccgaaatttcttgggtgaaaaatacatccgcagggttcggatgagaccaggtgttgcttgttcagtatctcaagcccagaaagatgaattaatccttgaaggaaatgacattgagcttgtttcaaattcagcggctttgattcagcaagccacaacagttaaaaacaaggatatcaggaaatttttggatggtatctatgtctctgaaaaaagaactgttcagn

SEQ ID NO: 10617 - DNA, 476 bp, Homo sapiens
  misc_feature (1)...(476): n = A,T,C or G
gcgcgtngnnnncnaaccgaaactctacatgaccgttcgnaaagcgnnganatngggngaattgatcgtgtttttgttcggttactgaccagctgtgggatgatttctttgctgcggaccttgaagctgttctccaggaatttggattactcccacaaaaggaagtcttggtgctgacatctgtgcgtaactctgccacgtgtcacagtgaggatagcgacctggaaatagattgaactgatagtctagttgcatagatttctcattgtttgggttggaatacacgtcattgtttatttttgttcctttgtcttctggcttttcagctgttctttgtagtcccttttattatgcataaaataaagaaattcttagattaaaaaaatataacaaaattatataaaatcgaataatatctaatcataattatttcggcgccctcttaaaaaaaagggccttttaaaacccttgttttt

SEQ ID NO: 10618 - DNA, 455 bp, Homo sapiens
  misc_feature (1)...(455): n = A,T,C or G
ggtaattgagacatntnaatttgtagaccttagtccgtgcggtggaattccagagaactcacactggagaaaggccttttgagtgcagtgaatgtgggaaattttttagacaaagctataccctcgttgaacaccagaaaattcacactggattaaggccttacgactgtggacagtgcgggaaatcctttatccaaaagtctagcctcattcaacaccaagtggttcacacaggagaaaggccatatgagtgtggcaaatgtgggaagtcctttacacaacactctggcctcattctccaccgaaaatctcacactgtggagaggcctcgtgacagcagcaaatgtggaaaaccctacagcccaagatctaacattgtttaactcttgaaactccaaacctgagaaaagccttagacctgcagggaatgtgccatgtctttcttcagtgttatg

SEQ ID NO: 10619 - DNA, 508 bp, Homo sapiens
  misc_feature (1)...(508): n = A,T,C or G
cgagagccgccaaatgaacaactggagaccctacgccagngncgnggaattcaagatggcggacattcagactgagcgtgcctaccaaaagcagccgaccatctttcaaaacaagaagagggtcctgctgggagaaactggcaaggagaagctcccgcggtactacaagaacatcggtctgggcttcaagacacccaaggaggctattgagggcacctacattgacaagaaatgccccttcactggtaatgtgtccattcgagggcggatcctctctggcgtggtgaccaagatgaagatgcagaggaccattgtcatccgccgagactatctgcactacatccgcaagtacaaccgcttcgagaagcgccacaagaacatgtctgtacacctgtccccctgcttcagggacgtccagatcggtgacatcgtcacagtgggcgagtgccggcctctgagcaagacagtgcgcttcaacgtgctcaaggtcaccaaggctgccggcacn

SEQ ID NO: 10620 - DNA, 445 bp, Homo sapiens
  misc_feature (1)...(445): n = A,T,C or G
ngggggnnngnaatcgggaccctagcctctggaccctagtccgggtgcgggccgacgagctacgctttcgctacagcatggtggcctactggagacaggctggactcatctacatccgatactcccagatctgtgcaaaagcagtgagagatgcactgaagacagaattcaaagcaaatgctgagaagacttctggcagcaacgtaaaaattgtgaaagtaaagaaggaataatctaccctgactaaagcttgaaatgctacatttccaaggtgaagatgtgtgggcacatgttatggcagattgaaaaggatctcattccatgggaaaaaaaaaaatcctgtcttgttcataaattgacaatgtcaataaattgaaatatggttcactgttactcttgannaaaaaaaaaaaaaaaaaaaaaaaaaaaaaaaaaaaaaaacgga

SEQ ID NO: 10621 - DNA, 457 bp, Homo sapiens
  misc_feature (1)...(457): n = A,T,C or G
agggtaattgagacatttnnnacttgaggaccttagtccgtgcggtggaattcggggcctcattagaactgccatattttttaagggaaaaaccagatgattatgtattttttccttttttcacttattgagcacttagggatggggccagtatagtggcctactggtttagagcatgggctttggcatcaggctcaaatcctagctttatcccttaccaagtgacttaactcagtgacctgaactcactaagcctggatttcctcatctataaaatgagggtattcatatctagcccacagagctgttttgaggagtagagaaggtaacacacataaagcattaacagagcctctgagagctcatatggcatctttgtcaaattagaaaaaggtgtcccttcctccaggcggcacagcctcatgccagggtacggagcaaacagagcaggggctat

SEQ ID NO: 10622 - DNA, 492 bp, Homo sapiens
  misc_feature (1)...(492): n = A,T,C or G
ggggntttttagacactgaccagcgtggnggaanncgggaacaaacagtgagtatgggaacaggcagtcacctcgagtgtgggaggtcacctgggtccgtcgtcttccttctgtatggtgttgggtttatgtacacactataacacttcctgtgtgagttcatgtacctgtctgtgagtgctttggtgtattgagcctcagtacactccaagggcattaaagtcaagaactagaacctgaaaaaaaaaaaaaaaaaaaaacaaaaaaaataaaataaataaataaaaaaaaaaaaaataaaaaaaaaaaaaatattaaaaaccccccttttataatagaaggggactaaaaaccccttatagaccttcgacttgtcttttttatgtcacccacttttgttttctcccccccccccgtcttttttttgtgggggggggggcccccccctttttttcttattaaaaaaaaaaaaagaatctcatatctttgtgg

SEQ ID NO: 10623 - DNA, 490 bp, Homo sapiens
  misc_feature (1)...(490): n = A,T,C or G
cggggnnttttgagccactggagactctagcccagngcggnggaattcgtttcagaggggcagtttaggcaggtattatattatgaactactagcaattcgagaagcctgcatcagtttggagaaagactatcaacctggaataacctacattgtagttcagaagagacatcacactcgattattttgtgctgataggacagaaagggttggaagaagtggcaatatcccagctggaacaacagttgatacagacattacacacccatatgagttcgatttttacctctgtagccatgctggaatacagggtaccagtcgtccttcacactatcatgttttatgggatgataactgctttactgcagatgaacttcagctgctaacttaccagctctgccacacttacgtacgctgtacacgatctgtttctatacctgcaccagcgtattatgctcacctggtagcatttagagccagatatcatcttg

SEQ ID NO: 10624 - DNA, 532 bp, Homo sapiens
tactagtacagtgcggtggaattcgtgcttcagttgctgcactccacgagcgacgtggagcggcagtacatggccaggctcattaatgcttttgcgtcactggcagaaggtctcctctaccttgcccagaacacaaaggtgctgcatatgctggagggaaagctgaaggaggaggacaaggatatcatcaccagggagaatgttcttggggccctgcaaaagttcagtctcaggcgcccgctgcagacagcgatgattcaagacgggctcatcttctggctggttgatgttctgaaggaccctgactgcctgtctgactacacgctggagtactcggtggctttgctcatgaacctctgcctccgcaacacagggaaaaacatgtgtgccaaggtggcaagcctcgtgctcaaagtcctttcggatcttcttggccatgaaaaccatgagatacagccgtatgtgaatggagctctgtacagcatcctttctgcttcatccattcgtgaggaagcaagagcaatgggaatgg

SEQ ID NO: 10625 - DNA, 501 bp, Homo sapiens
  misc_feature (1)...(501): n = A,T,C or G
aggncgcgcnnncccnaactgatgcgatcgatagtgcggngcaattccgacagaatagggcttgctgtaattctctcctggaggcaggctctctctctggctctctgttcccccttccccaacctctgtgaaaccacttcaaggatggctcaagctgcgctgatccttgaggcgccaacagcctaagctgtcagcatcttctccagagcctggaagtagaggccttgtcactttttggtataaaagttttgggttaagaggtgccagcagcagaaacatatgttcaaggatgaaggtccttgctgcgaaagtgctcaaccttgtgctgccaaacttgtccctcgggcccatcgactccagcgtgctctctcggaataagacagaggtcgacatttataactcagaccccctgatctgccgggcagggctgaaggtgtgcttcggcatccaactgctgaatgccgtctcacgggtggagcgcgccctccccaagctgactgt

SEQ ID NO: 10626 - DNA, 457 bp, Homo sapiens
  misc_feature (1)...(457): n = A,T,C or G
nggcggtnnnngnntttcgagatccctagtcctgtgtgatcgcctatccgggtggtggaattcgagacgacctacgcacacgagaacatgcctctcgcaaaggatctccttcatccctctccagaagaggagaagaggaaacacaagaagaaacgcctggtgcagagccccaattcctacttcatggatgtgaaatgcccaggatgctataaaatcaccacggtctttagccatgcacaaacggtagttttgtgtgttggctgctccactgtcctctgccagcctacaggaggaaaagcaaggcttacagaaggatgttccttcaggaggaagcagcactaaaagcactctgagtcaagatgagtgggaaaccatctcaataaacacattttggatnnnnnnnnnnnnnnnnnnnnnaaaaaaaaaaaaaaaaaaaaaaaaaaaaaaaaaaaggggg

SEQ ID NO: 10627 - DNA, 477 bp, Homo sapiens
  misc_feature (1)...(477): n = A,T,C or G
agagcgtnnnnnnncctgataactgagaacnctcggaaaccatcaaagacaagcttcaactttactttgaagtgtttctgaaatgataaaatgtagccctagccccctgccctcaattgtaaagcgagcaaccattgctagtaattctttaatgtgtataaattcaatttcaggtataacaaatgtgatcatgacatgaaaatattctagaatagatactgtattaaatattgccatgtttacaatatgtaatatgtttttagccgatggatttaaacatgtagattcaactagaatccatttgtgatatttgtaaataaaggtagaaatattagatccatttctgcagaacttactgtacagtttagttggagtgtagcactgaagaactgtcagctcagcgttgactgaggagatagtgaaaatagcctatacacagcatcttgtgaaaagtactggcagccgtggttgcagcaa

SEQ ID NO: 10628 - DNA, 466 bp, Homo sapiens
  misc_feature (1)...(466): n = A,T,C or G
natcgtagaccactagnccagtgcggnggcattcggatcctgcgatccgctaacaggtcaaaatgcagatcttcgtgaaaacccttaccggcaagaccatcacccttgaggtggagcccagtgacaccatcgaaaatgtgaaggccaagatccaggataaggaaggcattccccccgaccagcagaggctcatctttgcaggcaagcagctggaagatggccgtactctttctgactacaacatccagaaggagtcgaccctgcacctggtcctgcgtctgagaggtggtatgcagatcttcgtgaagaccctgaccggcaagaccatcaccctggaagtggagcccagtgacaccatcgaaaatgtgaaggccaagatccaggataaagaaggcatccctcccgaccagcagaggctcatctttgcaggcaagcagctggaagatggccgcactctttctgactn

SEQ ID NO: 10629 - DNA, 469 bp, Homo sapiens
  misc_feature (1)...(469): n = A,T,C or G
atcgagaccttngnnnnattgtagatccctagtccagtgcggtggaattcggcgggcgtctgtagttccagctactcgggaggctgaggcaggagaatggcgtgaacccgggaggcggagcttgcagtgagccgagatcgcgccactgcactccagcctggacgacagagcgagactctgtctcaaaaaaaaaaaaaaaaaaaaagggggccccccgggtccctgggaattccccccctcaaaaaaggaaaggatttttttttgaaccaaggcctccccgggtttttttttttcccgcccagggaagggaaaaagggttttcccctttcttttttgggggggggggggggaaaaaatttctttaaggggcccttgggaaaccccaaaagttttggggggggggaccaataaaaggaggcccctttggggggttggggggaaatccccgggggggaacccttcctttcct

SEQ ID NO: 10630 - DNA, 464 bp, Homo sapiens
  misc_feature (1)...(464): n = A,T,C or G
cttcgaccccctatagangacccttatncagtgtggtggaattcgctaattgtgatatgttatttattctcacctgatttgaatcattggattcaattaaatgagtttaattatcattaaataattctaagagaaataatgtctattcggatggtgggaattttctttctacatgcagccccattctgaatgaatgaaatcaaatcacgtgaagatcagggtcctagagtaacttaatattttgtacattggttatttgactcctcatttttatattacatgttatatcaagggagggggtataaaagaaatacaaaaattgcagaggtatctggaatgtacctatttgttaattctatttgtcatttcttttgtttcatcttttgagtaataagctgcttggaaaagtttctgttctttagctgattttttagctataaaaatgtatttgaaaagctcataaa

SEQ ID NO: 10631 - DNA, 478 bp, Homo sapiens
  misc_feature (1)...(478): n = A,T,C or G
gcccgccccgccccattgaaaccctattgtagacatctgacagngcggnggaattctgagattctattttcagtaagttagtgcttctgggacacttggagaaagctgtgagagtcattgtctacgcaaagaacaacgaagctgatcctaaaagtgatccaatctaagaaaatggtaaaacgagctctggccacagcacagaattttatgtgaggaactcagatttttgaagacttaacaattgcagagaaaggttgcagcctgcacaccatagcccacctctctgagcagactttggttttgtgtggtgacgtggcacatgtttgtacactgggatttttcaaaggacgctacgcgagcagactgacttgcctcttctgtgagcactgtggcttttgtcagatggagtgccggtctgcagaggactgctctttcgaatccacagtgttatctgtgtaaatagctttaatttttcttc

SEQ ID NO: 10632 - DNA, 523 bp, Homo sapiens
  misc_feature (1)...(523): n = A,T,C or G
tgcttgcgggtacctcattacatactttactaatcacaaaataaaatacgtggaatgcagnttagctttttctttgattctgagctgtcattatgaccataatgttatagtagcccctatttatagagctctttgtaatttagaaagaatatttctatagtttgtaaaaagttttcatgtatatcatttaatagttagaagaactttacaagtttcaagtttcaactgagaaaattgatattcagagaggttccaaggaccagaaccatcattaacttgtagaaggcagagtcctaagcccagtatttgcttctacttcactgtttgtggtgtgcagtcatataactatgctctcagggatcattgagatattaagccatttaactcttcattaaatgttcccagattatctcctttttgctttggtattttcgtgtgggaagggcaggtagaggctcttttccctggctttatttgcatactgggggcgngggttccttctagcagctatcagttgtatcct

SEQ ID NO: 10633 - DNA, 501 bp, Homo sapiens
  misc_feature (1)...(501): n = A,T,C or G
gaggccccccactgagacctgaggcactgtcgnggaattcgctacttctaggaataagacgaagcagtgaggaagttgccagttgagtgattcttggggaaaaaaattagcattcagtgccagctctctaaagtgtggattctggattctggtagaagccagtaaagaaacgttttctctggagtggaagctagtaagatttattctgtggtgatgaagccatctgaaaccttacaagcagtgtggttgtatcagcatatgggagctgactgcctcaggactttggaagcctgcttctctgtgcctcagccggaactcaggttactcaatagtcatttgctaatttctgagaacgcagcactcctgaagggatagaaagcatgaacaatacccaaactttttagactagtactgtgtgtcaggtattgtaacattcattcagtccctgaaatgtacaaactagntattgctcccctttttcatttgaggatactgatgccn

SEQ ID NO: 10634 - DNA, 473 bp, Homo sapiens
  misc_feature (1)...(473): n = A,T,C or G
cgccgtgccnnnnnntttgagncccctgagaacctcggaagngccgnggaanttattttcactgcttgcagtttgggaatctggtttaatagctatgtttcctacaactagcatataagggggttttacacaactttgcaaaggaattttcagattgtaatttaggttaatagtataatatggcttatggtttcttgttcccataacttgatttccagacaaaattctaatgtggtacgaggccacagtgagcttccataattctgggtgttcaggaccaacaacaggactaactaactttggtcggggtgatgaaatcctcttttcaccccatttccatggatagggtgattctcaccttctataaacctagtctagccttttagttaaatcactatcataggccggattagtgggccaggcagatggagcctgtgaacatgagtgggtctggcccatagagtcataatata

SEQ ID NO: 10635 - DNA, 470 bp, Homo sapiens
  misc_feature (1)...(470): n = A,T,C or G
cgagctnnnnnattgagatcctagaacgtcgggagaannccgagcagtgtgaagaagaggcgagaacgacccccggaccgaccaaagcccgcgcgccgttgcatcccgcgtccagcacctacgtcccgctgccgtcgccgccgccaccatgcccaagagaaaggctgaaggggatgctaagggagataaagcaaaggtgaaggacgaaccacagagaagatccgcgaggttgtctgctaaacctgctcctccaaagccagagcccaagcctaaaaaggcccctgcaaagaagggagagaaggtacccaaagggaaaaagggaaaagctgatgctggcaaggaggggaataaccctgcagaaaatggagatgccaaaacagaccaggcacagaaagctgaaggtgctggagatgccaagtgaagtgtgtgcatttttgataactgtgtacttctggtgactgtacagtttg

SEQ ID NO: 10636 - DNA, 426 bp, Homo sapiens
  misc_feature (1)...(426): n = A,T,C or G
cctgtagtcccagctgcttgggaggctggggcgggagaatggcgtgaacctgggaggtggagattgcggtgagctgagatggtgccactgcactccatcctgggcgacagagcaagactccatctcaaaagaaaaaaaaagcaaaacgtttggcttgttttggtggtataccatgttatttggtttgtggagccagtgtttttgtgtgaacatgatgaactactgattaaaactttgatttgtaaattcctggggtgagttgatctgaattgtattttattccactgcctacataaatccatagtgctctgtgaagcatatgaataacatcaccgtgttgtgcttgaaggggagtgaagatgaatgatgatgaaaaagatgagcatacttctaaaaagcgcanagtagagccaggagaaccagcaa

SEQ ID NO: 10637 - DNA, 454 bp, Homo sapiens
  misc_feature (1)...(454): n = A,T,C or G
gtgnggtcgagaccctantttgagagccctagtccgcgnggcggaattcaaagcaatgaacgagatgagatttcccatacagacgagaaaccctcggtccgacctcttactatttcttagtgtcttaatctgatttccttaccatatacctacaggcgtctgtcacaaactttgtctaatatagccatgtgctttcgtcccttatcctttttgcaagtgctgacttatccatcctcccctaacttccattccagtgacttccaacagggagatatattgccaccaccccaccccctgtggtgtattcggcactatctgtagatgttttgggttgacacgtgtatgtgtgtcgcgggggaggcgctataagtatcctatgggcccaggcccctagtgctaaacataaggcacaggacagtcctctggggggacaaatagctacctggcctgtaan

SEQ ID NO: 10638 - DNA, 455 bp, Homo sapiens
ccatggtggagtgtccagcctgccagcattagagaccaacactgagtcttagagataccagctaccaccaggttgagtgcatcagatcccttttaccttggaatgggcatcaatttgttcttaccagaattgatatatgctctaaatgagcttgtcttccccaactactttgcctccagcagcaccaccatctgagagcttacagggtgccttatccattgacatacctgaaactaaggaacccaccgatagccaaggaggtgtgacagtgaactcgaagctacaaaattcatggtgcatactcatcatccagaagcagctagccagatagggttttggaatggcctgttgaagactgggctaaattgcgattaagatgtaatgccttgcaaagttgggagcagttcttcaaaatatggtatatgcgctgaaatgcattgggccaaaatggataa

SEQ ID NO: 10639 - DNA, 452 bp, Homo sapiens
  misc_feature (1)...(452): n = A,T,C or G
nttttatttgagaccactatctgtagggcggaattcgacagagcctgaaaatgccctgtcagccaatggcagctcttctcggactcccctgggccaatgatgttgcgtctaataccctttgtctctcctctatgcgtgcccattgcagagaaggggactgggaccaaaggggtggggataatggggagccccattgctggccttgcatctgaataggcctaccctcacccacccacccagtttaattgtgcttagagcccaagaagattgggatctagcactaggaataaacctttcataaaagcaggcccagcgaggtcaatttgtcggggactctaggagggtggcctgggtggagacaagctcagtctaatcaaacaccagaaccctatcaagtcaaaagagctggggccaggcagctgaagtcacaggtttcagagatggtttgaagg

SEQ ID NO: 10640 - DNA, 455 bp, Homo sapiens
  misc_feature (1)...(455): n = A,T,C or G
ggggnaattgattcattactattagtccangcggtggaattcatttttttcaaaaagcataaaattaaattagcagtgagtaaaaggctcaaattttttttcaaaaagcataaaattaatttttacttttatgtggtcattggtttactgccacttcatttggaaaacttggatagattttcacctttgatatacctttgaatatatgttacctgaaatataactgtgcattgctaactctttcatttctgtagtaaaaggttaatactagaaaggatatgcaattaatactttgattttctcctgaccccacgagcttgtaaggatatgtcatgtatttactggtttttattggatctggtgcatagccagagttccacagtaacaaataatttgacaatttttatttctaatgattatttctgctttatagttaatgtctatttctaatgtat

SEQ ID NO: 10641 - DNA, 580 bp, Homo sapiens
  misc_feature (1)...(580): n = A,T,C or G
cattaggaaacactatncagagaggngcaattncttagaatgacttatgcgcanggacaggtgtgtttatcctatcttctaaacatgactgggtcttttgattatttccaaagagcgagacgtagagatatatagataaaagctcaatttttcaaaaataaaattttattgaactataggtagtgatacacttttaaaatgtttttaaattatttttttgaacaggaaatgttaagagatttaaatcttggtgaaatgaaaagtggagtaccagtgttggcagtatccttagcattggaggggaaggctagtcatagagagatgacatctaagcttctttctgacctttgtgggacagtaatgagcacaactgatgtggaaaaatcatttgataaattgttgaaagatctacctgaattagcactggatactcctagagcaccacaggtttgtatgattcttctttttgttcattcccttccactactatattcctaattgtggaaataatgtatactcctaggaaatnttagtagatggagangatggcaacatttctacacaccgaatattcgctagn

SEQ ID NO: 10642 - DNA, 469 bp, Homo sapiens
  misc_feature (1)...(469): n = A,T,C or G
ggggccnnnnnnttcgagatcgatagtccttgcggaggaactcggagcttgtaagccctcggtaaatgggaagtctgcgactgctgaaactgaaattaggtccagttgctcatttgatcttcctaaagctcctgccacattatgtcttttagccaactcaggaaatgtcacagactccttttgccttacaaaaaaaagtctctttttgtcatttaagccttcagtcttccaccaccacgccacaacttgtgaaataattcctcccccataaacccgtttctccagccagtgactcaccatttctcagatacttccaaagcactccgttctctgcatggtgtacctgtgtagtgcctgttcaaccttactgtgtaagtatcactttacagttcacaaagcaccatcctatacaacatcccacttgtttcacatacacaggctctgcagcatatggaccaattaacctttn

SEQ ID NO: 10643 - DNA, 536 bp, Homo sapiens
  misc_feature (1)...(536): n = A,T,C or G
acttgaccatcgnctgaganggccaattcccaaacttcctattttagagttttcacgaggcgcaatagatgtaactgaaagcttcgagaagtttaaaggacttgcaaggaaatctactgaaataagccccattccacctgggcagaagcactcagacgccaaaccccaccttctgtcctgaaattcaccttccactaggagagtttgcttttctaatgcttcaaatgcacaacgggagatgttctgacttcagggtttctacccttcactgctgtaatctgctgcctgtatgacatgcgatctggtttacaccgtacagcttatcatcttcagcttgtggccccttccttgtttccaccttgctattcaggagggcctgtaagggtatctggattccttgagctgtaaatgcaagacagtgagagggagggaggtagttctctggtctaatttcagtttcctaactgagggtacatgccttccctgaatgatcatcatcaaaaatatccagcccttcatggaagacaccacccctc

SEQ ID NO: 10644 - DNA, 531 bp, Homo sapiens
  misc_feature (1)...(531): n = A,T,C or G
tgtcatcgctggggccagccatgcctatgtcggtggaggaagggcctgagtgccagggacctgtggttgacaggcgctgccctcgatgtgggcatgaaggaatggcataccacaccagacagatgcgttcagccgatgaagggcaaactgtcttctacacctgtaccaactgcgagttccaggagaaggaagactcttgacctttttcctgggcaactctacagtccctccctcctttcggaaggtgaaggatactgggtttttagatgccttgtccatcctgtctggttgcaatgttttgctcccagaagagaatcagatcatcatgtggggattaccattgttcctggagtactcctacccttagttgaatttccttattaaaggtatatttttctataagaccctgaacaaaancaacgcctccgtgctggactacgacgggtccttttttcctatacagcaagcatcaccgtgggacaagagcagggtgggggccnggggaaccgtttcttcttgcgtctgtgtgcg

SEQ ID NO: 10645 - DNA, 440 bp, Homo sapiens
  misc_feature (1)...(440): n = A,T,C or G
ctcgaggtcgattacnccagagcggaggaattccaatttgctttttgataagattggaaaacatttatggagactttcccagttaaatctatgacagtgtccacttaaatagtgcaatttagtatattctcagataactgcaacacaaaattgaaatgtgccagtatgtcatctttctacctggaagatactgtatatttggaaagtttatgcttctctcaataaatacatgttattaaataagccatatcacagtttaagaaattgtatatactttatcatatgccctttcagaaaccaggtattttgcatatgattgattttagaaagattttgaagctggggtttgtccatgttaattaagatcaaagtatatatatatatatatatatgcgctgtatttgcaactttcacattgtaatttcctatacacttattan

SEQ ID NO: 10646 - DNA, 474 bp, Homo sapiens
  misc_feature (1)...(474): n = A,T,C or G
aggggcgcggccggntnnnaactgactgcgtccataggccangcggnggaattcggggtttcaccatgttggccaggctggtcttgaattcctgacctcaggtgatcaccctcggcctcccaaagttctggggcatgagccaccacatccagccattattaagagttttgaaatccggagttccaacccctgtcatccatcagcctctgttttgatgccttgattgagaatatggagtaaccaaaacagtttcatggaaggaaagattcaactgtaactttagtgatgaggatgagctcatttttcttacttcttattcatttttccaggtggtatgatttgggtaatatgtctattttttttctattctttaacccaccacatgggagtatgaaagaaccagagaaaaaactatcaggccatgaggccatgttggatgtacaagctgagttacacggtaggtttttcataaat

SEQ ID NO: 10647 - DNA, 499 bp, Homo sapiens
  misc_feature (1)...(499): n = A,T,C or G
gtcgagaccccttgnagngtcgtagaccctatccangtggtggaattccggttattaaggagcttcgcaaggctactgaagcactgaaggctgctgaaaatatgacaagctgactttctggagaaattctgatgagatatgtcaagctctgcaagagggtttgaagattgcattgtagttgagaatgtacaatgaaattactgcatgcagcagtgtagaaaaattttactttttaaaagaattataaaaccatagctttataaatcagtggaaagtggcttacagagagaactatcagatgtgtttacatcacatcttattcactttttttaacagctctaatgctttggcattgctatgttcatatttatgtattccttatttatagctctgatagctttaattttctaagcagtctgtctatcagatgtgcacatctgctgtgccaggttgaagtatagtggaacccatcagtagtaatgtgtagtagttatgactt

SEQ ID NO: 10648 - DNA, 455 bp, Homo sapiens
ctcaagaatataaagatgtattattttaagccaaggagctgaaatatatctcagtttataaattcaggtatattctttttgtctccatggcaaccataacttttgaaccaaaaaaaattgtttttacatctttatgctgaaaatgtgtttagattaggaatatggtcgggctgaatttgctgttgctccctaaccaaatccacctcttgttttccttgtgagtccatggctaaatcaaagctgcccctgagaagagacttaatccaagcctgattgtactagtggcatcacttagaagtaggctttccctcttcctagtagatctcaatgttttataattccttaaaacagctgaaaattgggacaacatactttacgcaatgaacagtagttaaataggaaataaactagttccatataagtatacacctagagctttaattacctttataatg

SEQ ID NO: 10649 - DNA, 503 bp, Homo sapiens
  misc_feature (1)...(503): n = A,T,C or G
ngaggttctnncaatgagaactgaggcactgtcgnggaattcgtcgggccttcccaggtcaaacagttcccatctgggtttggaggaaagacccaggggcccttgtggctcactcccccacatcctgtctttgcaattgtcagaaagtgagaaacgaaaggatggctgtgagctgtgacctcagctgggcctgggctgcagaggtggcttccgctggagtaaagcaagagggcccagggttcatgctcttccctggaaggtagaaaaggacagaccaccagggagcctccaccgcaaactgacctgtgctgcctacacactaactttcctgggcctggggcctgcacaggctgaatggtccttgagccttcactctgcatctgagcggtcttgggcccgctgagtggcagtggcaggaagtcggtggaagcagatccctgtgcagaagttgaattaccagggcggccacacacgggctgcacaacctttgcagtcgtgcacgg

SEQ ID NO: 10650 - DNA, 510 bp, Homo sapiens
  misc_feature (1)...(510): n = A,T,C or G
cgagagcccnnncaaagagnaactcgagaacactacgcagtgtggtggaattcctgcgggaagggagacctaaaggccaaggctggggacgagaggcaggtgcctggagtagtggacggtggaaatggcgacggcggcctgcacccagcgatcccgaaagtgcccatgtatccgtccatctgggttttttttttttttaaaaaatccaccaaggccggggtttccaagggaggcgcccacttggcatcccacagtaccgccaggggggtttcccatgacctttttaaaaaaaaacccaaaagctttttaaaaaagaacccaaataatgggggaataccttttccaataacttcaagtgaaaggtttaganacatacatatacatacacacacacacacacccccccgcgcgtttaaaacatatttttttggggaaaaagtgtgtatccctggggtgtccttccacctttcctttggggcgggggcaggacccaaaaagggggggagtggg

SEQ ID NO: 10651 - DNA, 503 bp, Homo sapiens
  misc_feature (1)...(503): n = A,T,C or G
gacggtctnncaatgagacctgaggcactgtcgnggaattccaggtagaatccatcagttttcctccccctccaaatgactgtgtacctccagctgctcatgattttggaggtgggggcggggcctggggatctacccttctaaaaaactctccaagtaattctgataccaataaagagggagacctccatttttgaggcctatttgcaagcatgtctccctccctttccatggctttttcgtttctcgcatgttccactgctttgcactgtctagacaggaaacctacgaagatgttggtgctaaactgaaaagatttcttacagcaaaacctgcctcggccagggctacagaattccaactttcaacttgattcctagccgtgaacagactgtcctctgctcagactaaaagggaattataaacaagtgggaacttactctccagttgtgacttaacagttctgaacatacctacaaagggaaagtcaatattagcaatan

SEQ ID NO: 10652 - DNA, 502 bp, Homo sapiens
  misc_feature (1)...(502): n = A,T,C or G
cccccatcgagacccttngagattgagaccatagtcagngngcnggaattcgagaccagccttgccaacgtagggaaaccccatttctactaaaaatacaaaaaattggccgggcatggtggcgggcatctgtagtcccagctactcgggaggctgaggcagagaatctcttgaacctgggaggcggagattgcagtgagccgagattgtgccattgcactccagcctgggcgacagtgtgagactccatctcataagaaaagaaaaacaaaggaaattcctggctggttgccctgaaaaaaccaaagctgaaatccaaagccacggcagaaaccccccccccccgggaaaattgagggggtcaaggggaaattaaaaaggaataggttctcttccggggggcctttagagttttaaaaaataaaatgcttggccaaaaattttgcgccggcggaaaaaaaaaaaaatggccgtttttagggttaaggggaaacatggggcc

SEQ ID NO: 10653 - DNA, 455 bp, Homo sapiens
catcgtagaccatatgcagtgcggtggaattcgcagtgagctgagtagacagttttcaagatctctcaaaaggagggaacctggggaatactatgggatttcagttgaaagacttggagagctaggccctgggaacagaggcaagtgaagtagacagaaccctgtcaacactgcatcccatagaccttgagctaataaacacagaaggaattacagaattagaaagttaccatttgataaccaacatagtaaaatcgtctcaagcaagtcgagtcagtggataataaaactagtgaggctgggtgtggtggcttatgcctctaatcccagcactttgggaggccgaggcgggcggatcacttgaggtcgggagttcgggaccagcctggccagtatggtgaaaccccatctctactggaaatacacaaaatagctgggtgtcgtgctgtgcacct

SEQ ID NO: 10654 - DNA, 534 bp, Homo sapiens
  misc_feature (1)...(534): n = A,T,C or G
gagtctctagtacagtgcggtggaattcgccgagcgatgggcatctctcgggacaactggcacaagcgccgcaaaaccgggggcaagagaaagccctaccacaagaagcggaagtatgagttggggcgcccagctgccaacaccaagattggcccccgccgcatccacacagtccgtgtgcggggaggtaacaagaaataccgtgccctgaggttggacgtggggaatttctcctggggctcagagtgttgtactcgtaaaacaaggatcatcgatgttgtctacaatgcatctaataacgagctggttcgtaccaagaccctggtgaagaattgcatcgtgctcatcgacagcacaccgtaccgacagtggtacgagtcccactatgcgctgcccctgggccgcaagaagggagccaagctgactcctgaggaagaagagattttaaacaanaaacgatctaaaaaaattcagaagaaatatgatgaaaggaaaaagaatgccaaaatcagcagtctcctggaggagcagttc

SEQ ID NO: 10655 - DNA, 474 bp, Homo sapiens
  misc_feature (1)...(474): n = A,T,C or G
catagatattcgtcnngcgtgngcaggaanccgnnggagcagagctaaattgctctgagtagtagagaagaggtggacatcctaccagaggaccttccttctccaatccttctagatcattctagaatagaagccttcagcctctattctaaataagtgttgaatatttaaaggatataatagtcaaattctttaaagatcaggcatgtatcataagtaaatctagatgtaaggtaatagggcacgattgagtctctgaaaaagtggagcaaatgccatttactctttagtaaagacatttccattcaaatatttaaaaattgtgtcagccaaaaattaaaattaaaaaatgcccacctttgtgctagagtcagctcgtagtggactgcagttgggatttctggattttttttttgaaagagtgccctgtgaatgtcttacccacagtgtctgcaggaccctggcaggcccagt

SEQ ID NO: 10656 - DNA, 445 bp, Homo sapiens
  misc_feature (1)...(445): n = A,T,C or G
attgaagaccatcggatgaccatcgnaaagngcggnggaantcccagaagaagaagagaacacgtgaatccgaagggaaaggaataagatggctgcagcttattgccgcaaccggaggagggagctgactgatccactccaagcggagacagaccaactacaagatgataagtctgctttgcctaccgagattgccaacctgctgaaggagaaggaaaaactagagttcattctggcagctcaccgacctgcctgcaagatccctgatgacctgggcttcccagaagagatgtctgtggcttcccttgatctgactgggggcctgccagaggttgccaccccggagtctgaggaggccttcaccctgcctctcctcaatgaccctgagcccaagccctcagtggaacctgtcaagagcatcagcagcatggagctgaaaaccgag

SEQ ID NO: 10657 - DNA, 474 bp, Homo sapiens
  misc_feature (1)...(474): n = A,T,C or G
catagacacctagagccntggcaagngncgnggaantcagcctgacagaagatgtggatgagttccggaataaactgcagggagagcggatctcaggttacctggatgctcctgagggcggcttcgatgccatcctgcagacagctgtgtgcacgagggacattggctggcgcccggacagcacccacctgctggtcttctccaccgagtcagccttccactatgaggctgatggcgccaacgtgctggctggcatcatgagccgcaacgatgaacggtgccacctggacaccacgggcacctacacccagtacaggacacaggactacccgtcggtgcccaccctggtgcgcctgctcgccaagcacaacatcatccccatctttgctgtcaccaactactcctatagctactacgagaagcttcacacctatttccctgtctcctcactgggggtgctgcaggaggactcgn

SEQ ID NO: 10658 - DNA, 451 bp, Homo sapiens
  misc_feature (1)...(451): n = A,T,C or G
nattctagatcactagtctgtgtggcggaattcccatggtttactatgggtcagaggcacagtgtattatttagaagaatagagtgacgcatggtaggtagaaatcttttgggatggggccttatcgcagaaatttctgtgttgggacagtaggatatctgtgctttttataggcttcaagcacgtagatgaatgcaggcagcaacatcaagaaaagcagatttcaggaaaaaaaaacatttacaaggagttcttggcagaagttttgctgccaaatcagaaatcataatgaaagatattaaaattattttgtgaggtggtcgtctctttgcagtgcagttactgacgggtttaagagcaggctgccaagatagagacagaaaatgttgcataatgcaagttgctggccaggttagtgtttatctctactgaagagcctacttgcttttgt

SEQ ID NO: 10659 - DNA, 558 bp, Homo sapiens
  misc_feature (1)...(558): n = A,T,C or G
natcggaacccattgagngccgtgtaagtctgngcaccatcgcattccccttgtctagatgctggtgcccacagccaaagctgcttttaatatgcctggtctagcttcagtcttccatggagctggtgcctgtgccagtgcctggaaccgcccacccctctgccacagctggagcacctggctgtgtgcagtggctggaccctgcactcacttgctcacacatccctcactgctccatgcctggcttgcccatggcagttaggggatgcggctggtagcacaagccgagcaggggctgctgggctgagtgggtggaatgagcccagcgagcacaagcaaaacctaagcagaggcaccaccagccacagaggtttctggctggcaaattgacaccctaggaatcccatgacagcctgggctccctggttgcccactgcattctgggagagcttaaggatccactgtctttaaacatcagttttctaacctatatcntgtgagactntntaangtacatcatttcagagaccataacccattttccgtcagagtcaagcn

SEQ ID NO: 10660 - DNA, 457 bp, Homo sapiens
  misc_feature (1)...(457): n = A,T,C or G
attcgaggcannagnnnttttgatgacccttagaccangcggnggaattcgcggcgccggcgtccgcggcagctgataccagagtcttgctccggccgcggccattggagccctgggctggggcaggagccgcaatgtctcaggctgtgcagacaaacggaactcaaccattaagcaaaacatgggaactcagtttatatgagttacaacgaacacctcaggaggcaataacagatggcttagaaattgtggtttcacctcgaagtctacacagtgaattaatgtgcccaatttgtttggatatgttgaagaacaccatgactacaaaggagtgtttacatcgtttttgtgcagactgcatcatcacagcccttagaagtggcaacaaagaatgtcctacctgtcggaaaaaactagtttccaaaagatcactaaggccagacccaaactttgatgg

SEQ ID NO: 10661 - DNA, 468 bp, Homo sapiens
  misc_feature (1)...(468): n = A,T,C or G
gggaaaannnaactgagaccactgaccaccgtgtggaattctcttattcttcttcctcttatttttattccatggatttctgctcttatatgtattttctattttctctcttgtacagctattctgttactagtttttgaggtggaaacttagatgactggtttttagcctttcttctttcctaacatatgcattccaggctctacattcccctcgaaatgctgcttgagctgaattatgtaaggtttggtatgttatattttcattaccattcagtctgaaatattttacaatttttgatgtatttcttctttgatccacagattatttaaaagtatattgcttaatttccaggcaattggaaatattacgaattatctttttgctatggatttttaaagcttactccactatagttagaaaatatgctctgaatggtttaagtcttttgaaatatattggagaatn

SEQ ID NO: 10662 - DNA, 457 bp, Homo sapiens
  misc_feature (1)...(457): n = A,T,C or G
gggcgcgtttgagaccattgnattgtagacattagtccangcggtggaattcaaatagaacagccttgaatctataaaactgtgcagtcattatgccagaaattatcttaaatatataatgggtcaccttgctgttcaaagggtggtgcaaggtcctgcagcatcttacatctgtagcttgttagaaatgtaaactctcaggccccacaacttacttcctgcattttaacaagatccccaagggatatgtatgctcataaaaatttgagacactggtttaaatgaaaatggatataaggtatgtataactgggggtggggtgagggtaggaggcatttacaactcagattttatttattttgaaattatcaattgtataaatctaatttattaccaaatagggtcttttaaaaaatatttttatcgttgaaaccttgacaggtacttcatattcttt

SEQ ID NO: 10663 - DNA, 450 bp, Homo sapiens
ttttattgagaccctcatctgagtggcggaattcgcagagggagagtgtgaggaagacgagggtgagaagaggaggctcaggagggaaaagctgggtgtatccatgcttcatgtttagcttgtgggtttgggcaatgtgcttctctgaccctcagtttttctcaatgtaaaagctataaactcagtaaaataacataactctgcaggggtgcattgttagagtaggtagtcaggaagacataagcagggcaggagaggtctacctccccaggaatgtcaggtggccatcaggcgatggtcaggtggttgttaaactgtctctctaaaataatacttggtcacagccagcaccagggaaaggcagtctccctatagagagaaacatctgaagctggtgatcagtagcttcctgataagatctcaggatttgggcaagcagacccaagcatg

SEQ ID NO: 10664 - DNA, 456 bp, Homo sapiens
  misc_feature (1)...(456): n = A,T,C or G
ggncccttttntttgagtccctagtttgtgtggcggaattctaaaaaactacatgtttgtgaatattttataatgtggaatgatcattgaaatatcaaggattctagtaattgtatttcctgaataaatgtatgtttatgaattttctaacttacattttgttgtgtcctctgccaacaatctggttttataattgttgtctaaagtttgctagtagtgtttcttcaaaggttattccaggtatggttaagtagtgagaaaaatcacttattaattttcaagaactttgagactaatttgtattgactcggttttttaaaataactggcaaatgctatgcttctacttttaaaatttgtggtaatacccagaatggatgtaaaataacatttttcaatagattacttcatttatcaatttaattctgattttaaggcttatttaaaataaatttgt

SEQ ID NO: 10665 - DNA, 471 bp, Homo sapiens
  misc_feature (1)...(471): n = A,T,C or G
ggggannnnnnnnnggggnnnnaattgtagatccctagtctagtgtggcggaattcgccccgcgctgctcctgcagaaggaagacactgtccgccgcctggtgctgcccgctgtccagctcgaggactccggcgagtacttgtgtgaaattgacgatgagtcggcctccttcactgtcaccgtcacagagtcttaccaaagtcaggacagttcaaataacaatccggagttatgcgtcctcttgaaaaagccgaagacccggcggctctggtcccgcttccccccatggcgacgaacagctggcactgagtagcagctgcccccatagtttggggcccacattcctctgtcccacctccctgccattgctttttgcctctccccagactgcttcagccgctaacctaacctggcccctgtgggcatttgagtttgcgacccctgtgttaaaccaataaacatgcaaataaa

SEQ ID NO: 10666 - DNA, 557 bp, Homo sapiens
  misc_feature (1)...(557): n = A,T,C or G
natcgagcccatcgatcactagtccgagnggngcaattcctgactntgatttcttaaagttattggaaaaggcagctttggcaaggttcttcttgcaaaacggaaactggatggaaaattttatgctgtcaaagtgttacagaaaaaaatagttctcaacagaaaagagcaaaaacatattatggctgaacgtaatgtgctcttgaaaaatgtgaaacatccgtttttggttggattgcattattccttccaaacaactgaaaagctttattttgttctggattttgttaatggaggggagctttttttccacttacaaagagaacggtcctttcctgagcacagagctaggttttacgctgctgaaattgctagtgcattgggttacttacattccatcaaaatagtatacagagacttgaaaccagaaaatattcttttggattcagtaggacatgttgtcttaacagattttgngctttgtaaagaaggaattgctatttctgacaccactaccacattntgtgggacaccagagaatcttgcacctgaagtan

SEQ ID NO: 10667 - DNA, 406 bp, Homo sapiens
cagaaaggaggaggttttccaaaaccaaatcatgtcaagtacctagcttgacctcaaaaaaaaatacagaagcagggttggtaattgattgacaggaagggcagctcaaagcaggaaatggagagtggtatgaaaacacttaagcagtactgcccaaaggaagaacctgaaaagttcagccatagattttctgagaaaatgaaagtgtaggcattagcatactcaagaatcaggcagacagttttccccatttggaagctgaaaaaggaatgatctgctgcccaagacaagaaaatgatgtgggcccagagggaaccgtcactcacacgtacactgtccagggggccagagaaggattacagccgccattttggcttctctagagtgaagcagcaaaacaatgtct

SEQ ID NO: 10668 - DNA, 565 bp, Homo sapiens
  misc_feature (1)...(565): n = A,T,C or G
cgggatgccggnaattgaaaaccactgagcacagtccagaggggcaanncctgatttcatttgattagccttcagtttccactgttacagtagtattctggtcatagtattctgttactctgctactacacccaaggcatcaaatagaggcattgacacatagtcatctaacataggatgcttctaaaaaaagcacggttgatttattaattaacttttactagattggattaaattagatttttcttacttttatcctcaggtaactgagatgtgtttagctggatgtctctcctgtgtacttatagctaccctttgaatattcatattaatgtaattttatcgaataactatagtccccttttatttaaaaaatgagaaagaaagacagcaagagtttgattattcagtgattntatggtggagaaaaggcccaaatagttntttttttccaaaagaaacttaaatcaatcctaattgatagtggtccctaacatattaaaaggtcttatgtgaggtttatggatatctggttaattattttatttattgtcacttgacagag

SEQ ID NO: 10669 - DNA, 474 bp, Homo sapiens
  misc_feature (1)...(474): n = A,T,C or G
ggtagtgnaaactgagacctgactgaggcgtggaanncccagtcaagcaagagactagttgaagggagttctggggccaggctcactggaccattgtcacaaccctctgtttctctttgactaagtgccctggctacaggaattacacagttctctttctccaaagggcaagatctcatttcaatttctttattagagggccttattgatgtgttctaagtctttccagaaaaaaactatccagtgatttatatcctgatttcaaccagtcacttagctgataatcacagtaagaagacttctggtattatctctctatcagataagattttgttaatgtactattttactcttcaataaataaaagtttattatctcnnnnnaaaaaaaaaaaaaaaaaaaaaaaaaaaaaaaaaaaaaaaaaaaaannnnnnnnnnnnnggggggccccttaatttaaagggccccttctac

SEQ ID NO: 10670 - DNA, 482 bp, Homo sapiens
  misc_feature (1)...(482): n = A,T,C or G
aggtaggtnnaactgagnccnttgctgatgactatctgaaagngcggtggaattcccccctttcccgctatatcttcaggaaggctggggagatgctgggcagacacatcgtagcagtgttgcccgagattgacccggtcttgttccagggcaagattggactccccatcctgtgcgtgggctctgtgtggaagagctgggagctgctgaaggaaggttttcttttggcgctgacccagggcagagagatccaggctcagaacttcttctccagcttcaccctgatgaagctgaggcactcctccgctctgggtggggccagcctaggggccaggcacatcgggcacctcctccccatggactatagcgccaatgccattgccttctattcctacaccttttcctagggggctggtcccggctccaccccctccaagctcagtggacactgggtctgaaaggaaggagtcttttgcttcctt

SEQ ID NO: 10671 - DNA, 428 bp, Homo sapiens
  misc_feature (1)...(428): n = A,T,C or G
aaaaatacacactggattttgaagattagaaatgtaccctaaaacttaaagtataataataaaaaaaaagaaagaatgtaaaatatgataattaaaaaattgcaattacatgttgaaatgataatattcgataatatttgagttaagtaaatttaatgttacttattttttagcatggctatggaaaacttaaaattatgcatgtggctcgcatgatatttttgttgaacaatgctgtttgctgaagcagggctggcagcccttgccagaggtttgaatctccattgtcttggtggctgcagatggatggatgtgggggtaccagcctggtgtgttgggaagatttttctttgtgaaggggaacttgccctttactgttggggatagtttcttctcagcctatccagggacacacataccagcatttn

SEQ ID NO: 10672 - DNA, 474 bp, Homo sapiens
  misc_feature (1)...(474): n = A,T,C or G
aggatgaccngntttgaaacccactgatgacattagtccagtgcggtggaattcctttagtgcaggcctgttctgaggcaataacaagttgctgtgaaaacagcatgtgctgctgcctttgtaactgcatggaaacttttcacatgggtttttctccaagttaatacagaaatatgtaaactgagagatgcaaatgtaatatttttaacagttcatgaagttgttattaaaataactaacataaaacttaattactttaatattatataattatagtagtggccttgttttacaaacctttaaattacattttagaaatcaaagttgatagtcttagttatcttttgagtaagaaaagctttcctaaagtcccatacatttggaccatggcagctaattttgtaacttaagcattcatatgaactacctatggacatctattaaagtgattgacaaaaaaaaaaaaaaaaaaaa

SEQ ID NO: 10673 - DNA, 484 bp, Homo sapiens
  misc_feature (1)...(484): n = A,T,C or G
aggtnagttgnnaatagaatgacantagctagagagccgtggaaancggactttaaattttaaagagctcatttgcaatgcacttgtatacacttcaaaaattattgtagacacagaatttgttatatttttgtgcttagtatttaaacctgaacattgaaacagttctcctccttgtctttcttaacagtaatagtcattatatttacctgttttttaacacaatgtatgtgatagtcaaaaaatcacagtttttcattattattcatcttctgtacccacgcataaccactatacatagtttcttttgtacttgaatatacaaaacatgaacacagtgccatatgaataatttcacatacagaacctttttttctctgaagtcctgtggacttgcaaatatatatatatattgctttgttaatttgtttttatatttcatatatgtaataaaggaatatgatcttaaaaaaaaaaaaaaaan

SEQ ID NO: 10674 - DNA, 499 bp, Homo sapiens
  misc_feature (1)...(499): n = A,T,C or G
ntcgagacccctttgcangttcaggaactctagcgagcgcccgacaaagggaagcgaagccggagctgccggcgctttttatgcccgcgttgcttcaaattgatttttatagaactgataacttagtcctccacaatgtgtgaacgaccatgttatgccccaccttgcaccctagctactgcaacgacacatgcccagcacaccagggtgtgtgggatacaatccatactggcatctcgcctacaacaactacaggctgggagggaacccgggcaccaacagccgggtcacggcatcctctggtatcacgattccaaaacccccaaagccaccagataagccgctgatgccctacatgaggtacagcagaaaggtctgggaccaagtaaaggcttccaaccctgacctaaagttgtgggagattggcaagattattggtggcatgtggcgagatctcactgatgaagagaaacaagaatatttatacgaatacgaagca

SEQ ID NO: 10675 - DNA, 482 bp, Homo sapiens
  misc_feature (1)...(482): n = A,T,C or G
aggtagtnnnaactgagaccnttgctgatgaccatgaganagngcggnggaattcgtgaggcctccaaagcttcctcagaattgtggctgtgccacgctggaccacagggtccccctcaagcatctcggggccctattctctctgagcacctggagggctggactcaggcttgtgccagggcctgacttgggcctgggggccctagaacgctcctcctcctgagcctactgccaaacgtcctcagtgttgtctgcacctgctccgactccttcagccgccccattcagcgcccgctccgtccagtgcccgccctgtggggccaaggcggccgtgccttactactctgtgtcttctgcctcctctgaggaatctggccctgtctgacagtcccagaccccccgttctctcctctttagttgcatgagtttttctttgttcatggaatgttttttcctgattaaatgttggggaaatgccaaaa

SEQ ID NO: 10676 - DNA, 405 bp, Homo sapiens
  misc_feature (1)...(405): n = A,T,C or G
gagatgtaatggatgttattgaaaaacctgaaaatgacccatagtggtggaaatgcaggaagatcaatggtatggttggtctagtaccaaaaaactatgttaccgctatgcagaataatccattaacttcaggtttggaaccatcacctccacagtgtgattacattaggccttcactcactggaaagtttgctggcaatccttggtattatggcaaagtcaccaggcatcaagcagaaatggcattaaatgaaagaggacatgaaggggatttcctcattcgtgatagtgaatcttcgccaaatgatttctcagtatcactaaaagcacaagggaaaaacaagcattttaaagtccaactaaaagagactgtctactgcattgggcagcgtaaattcagcaccn

SEQ ID NO: 10677 - DNA, 472 bp, Homo sapiens
  misc_feature (1)...(472): n = A,T,C or G
gggggngannnnnnngnnnnnnnnaatcgtagaccactagtcttgtgtggcggaattctacacacacacacacacacacacacacacacacatacacacatataatttgaaagaggtgagtatgtactctgacttcagctctcaggttttaaaaattatattagtgggaccagttatgacaagaataatcattatagcacttttcagattttataacctggagcagattattttaagttgattagtaggttctgttacagtttttcttttgatcgcgcacttatagtcttcatttaattcctcatagaatcccagtcacctttatatatcatattatgggaagagattcatcttcataatctccagttttttcacagtgcctcacagagttaatcatgccttttggagctagagggactttagaacttatctagntatgctcctttatattataagngagggaatagaatcn

SEQ ID NO: 10678 - DNA, 440 bp, Homo sapiens
  misc_feature (1)...(440): n = A,T,C or G
atcgagatcgttgaccactgtccgngtggtggaattcgcggcggcggcgggagcgcgaacggctggagctggccttcttcgccttctcctcggctgtggagccctggtggggggtctgcgcccggtcaccatgacgacgccggcgaatgcccagaatgccagcaaaacgtgggaactgagtctgtatgagctgcaccggaccccgcaggaagccataatggatggcacagagattgctgtttcccctcggtcactgcattcagaactcatgtgccctatctgcctggacatgctgaagaatacgatgaccaccaaggagtgcctccacagattctgctctgactgcattgtcacagccctacggagcgggaacaaggagtgtcctacctgccgaaagaagctggtgtccaagcgatccctacggccagaccccaactttg

SEQ ID NO: 10679 - DNA, 477 bp, Homo sapiens
  misc_feature (1)...(477): n = A,T,C or G
cgggtcgcnnnnnnnaggggnnnnnaattgtagacccactagnattgtagatccctagtccangcggnggaattcgatttctgtcgtaatgctaaacttgaataagatggaatggctgaacatgtggttagtcttttattttaagaagaattgagaattgatagatttggagatgagctttgcaaaggctgtttgcttttcatgtctataggtctgtcattgtcctttttcaaagcatttctgaagttattcctacttggatatagttaatggaattggcttaatttgatgacataataaatcacttataaaattttaaatatcaagtgaaaatttagaaaggccattactattctataaaccttataaacttgctctgggagaatgcattctaaattatatatagtgtttcagctcccattgtggtgttcatagtcttctaggaacagataaacttaagtattcaattcactcttg

SEQ ID NO: 10680 - DNA, 474 bp, Homo sapiens
  misc_feature (1)...(474): n = A,T,C or G
aggttgtttaaatgagaccctactgatagcgtggaanaaacagannccgatggtctcctgatcccctggaagctgacttacaggaatattggttctgattttattcctcggggcgcctttggaaaggtatacttggcacaagatataaagacgaagaaaagaatggcgtgtaaactgatcccagtagatcaatttaagccatctgatgtggaaatccaggcttgcttccggcacgagaacatcgcagagctgtatggcgcagtcctgtggggtgaaactgtccatctctttatggaagcaggcgagggagggtctgttctggagaaactggagagctgtggaccaatgagagaatttgaaattatttgggtgacaaagcatgttctcaagggacttgattttctacactcaaagaaagtgatccatcatgatattaaacctagcaacattgttttcatgtccacaaaagctgtt

SEQ ID NO: 10681 - DNA, 505 bp, Homo sapiens
  misc_feature (1)...(505): n = A,T,C or G
aggggcgggnnncccccctttgatttgcctcgttagtgcggtggaattcgatgaactctaaacctagctgatctgtatatgtatgatgtatatatgtcatatgtatgatatatatgaaatattcccataactgcatatgaacacatatgccatatacatatataccaacgggctgaataacatactcttttgtcttggataatctgttttctgggttatgtatctgttgtctttggcctactcagggatttttatttctttaaataacttatcttttggacatatttttatattatttggaaaactttccaatattcctgttacaaagtggtgtctgttttcagtgatggctatttcatcagtgcttgaaatagtgtgcactgtgttgcacaggtttttcatttttctattgagtagatatttttaaattaacatacacatttttctctttaaagggtcatatctattaggcctttccctgctggtaacttaaaatgattatttn

SEQ ID NO: 10682 - DNA, 493 bp, Homo sapiens
  misc_feature (1)...(493): n = A,T,C or G
natcgataccccttnncagttcgatatacctactcgagtgtggtggaattccaagaagttaatttgctttagtaaaaatccctcattccagcctttctatataaatagctctttcttgctgttttaatgtggggcacactatagcctcacaaacctgttattccagtgtaatctgcagtgtcgtaactaaagttactggcttggtcttatttgcacagtttttgcgtcttgtttgcttcttgcatctgattaactagaatatttctctttcccccttttaatttgtgatgtcacttgaccccatttatgtgtaggagcactacaccattggtttccaatactgcacacataagatacatacttgtgtgcagaaagtatcttcctccaggcttgtaatacccttcacatggaagattaatgagggaaatctttatattctgtataaaaacaaaagcaaatttatatactaaaatcatttgtctaaaaatttaag

SEQ ID NO: 10683 - DNA, 555 bp, Homo sapiens
  misc_feature (1)...(555): n = A,T,C or G
natcgagcccaatcggacactagtccgtgtggtgcaattcgcccaaggaacaaaaggagaattatgaggatattcagtgtgccacctacagaggaaactttgtcagagcccaacttttatgacacgataagcaagattcgtttaagacaacaactggaaatgtattccatttcaagaaagtacgactatcagcagccacaaaaccaagctgacagtgtgcaactctcattggaatgaaacctcagaaaaagagcaacagaagtaattgtttcaagctcctgattctttctactaaatcatgaacagctttaaaaacatttctgtctgcataaaattattttacttgtaacttttccccaattgttctgtgcattgttttgccttttaaattacatctccaagtggctcagaaggccttgacacagggaacctgcacatatccaggatatgtgtaaccagcgatggtgacttgaccttgccaagacctgtgattccttcaggatacaatcagtgagagataanaacacatctttggaagtgggagtcctggagttt

SEQ ID NO: 10684 - DNA, 442 bp, Homo sapiens
  misc_feature (1)...(442): n = A,T,C or G
ntagagatcgtagtccatgcggaggaattcggagtgagaagccgtcagattctaggtaggatttgaaagtagagccagtgatgtgctggcagatgtttgcatgggttttttgggggagggtggaaaatgatttgtggccatttgccagcagtcagtggtataaataatcctgctgtggcagatttcaagtgatcattatgacatctcagatccccttcccggtgagagccacctccatcctagagtcatcggctcattgatctgattgaaagccaagagatactggcatcacccagagaatgtatgtacctaggaaagaacacaggagcaggctgaatgtactagggcactctaggaaaagctgttcaagttgtaatgtaaacagttggttctttgctgaatgagttgggtgattaaaatttgcatttatgtggcttctcag

SEQ ID NO: 10685 - DNA, 515 bp, Homo sapiens
  misc_feature (1)...(515): n = A,T,C or G
accgacgcttcagcgggtgccgcccgcctagagggagtggagcggtgagcacgtcaggggtggggggcgcaggtcaagctttcaccagtttttaattctttgatggggtaaatttgagcaattttctcgacttgtcgacattcgttattaactgagcaggaatcaggagaggaacccggtcctctccacacagcccagcagagagcctacgactagatttgcatctttacgtcctgcgcggaggctgctacacacatgcagaagtcatgctggtggcctggacagtgaagggaaagaagtggatttgggagacatttaggaggaacagtaagaggaccttgtgcatgaataatttgtttccacactacagagtgggtaataagcagattagtaaaaacaattctgcttcacttcaataacagcctcctccaactcattntttctcaacaaacttatttttccagcagaagaatcccagacttcttagagaaaccagtgactgtttgaccctanan

SEQ ID NO: 10686 - DNA, 481 bp, Homo sapiens
  misc_feature (1)...(481): n = A,T,C or G
cccccccccnagnagaccaattgagnccctaactgagaccctaggaagngncgnggaattcgtgatccacctgacttggcctcccaaagtggctgggattacaggtgtgggccaccgcgcccggccaggggtgtcaaggtatttcttgttgggataatctagaagacaaagacaactgtcagctcactggagaaagctggccctatatcctgaggctgacatggcggaacttcaggcggtgtgcttggacttccactctcagggatccgggaaggctctcagctgctctgttctaaccccatctgcttgagtcacctcaaaattcacgtgaataagcgggaggcagcaatccagcatcagccagcaggtcaggagaccaggtctttaccttaagcagccttagaccaatttggctgactgagtccggcatctacaaatgcagctcagttaactgagctggtaaagtgctctttctactggt

SEQ ID NO: 10687 - DNA, 465 bp, Homo sapiens
  misc_feature (1)...(465): n = A,T,C or G
cggggnattgattcgataccactagtccangcggtggaattccactgcccctgcacaggagacaagtgcgttcagggcacaggccccgacatcaccccaaggacaacggcacaagtagagagaaactacctacctcacttcaaattatgtttggacttgacaaaaatgtatgcaaatgatgggggatggtagaaaaaaattatttacacaaccttggaagattaggcatgaatacacagagatttaccttttggaagtttcatcttttaatttggccagtgtttccttcatgctaatctagatgctgtggctgattacttgcccaggatctcctgtggcagcctctgcttgttctctggcttggagtggatggggcagcctccagctcctgtggaagtaatggaatagtggtggaaagggaacacagagagggaggcttccagtaagataggtgtgtaagcccag

SEQ ID NO: 10688 - DNA, 477 bp, Homo sapiens
  misc_feature (1)...(477): n = A,T,C or G
cgggccctccntttgtagtcattagtcactgtggtggaattcgatttttattatgttatattttgaaatgcagaactgacctttgagcaagtattcacttttttaagtttggaaattgttctaaaatattcactggtattgagtgttaagtaacaggtaaaaaggcacagaaaaccaataggaaattagagttttgtaactgggtgtctccaccaataatatttctctgactctgtatttttgggtaatgttgcatcctcctggttgaaaatgtattcagttatgtgatttgaagtgtttatgaattaagacaaattatcattactagttagaaatgtctcttccaaaagtagtacactatacaactttagtttttgtgctacttaggagagaaaagcagatattgccttattttgtgtgccctatccatttaattagaagctcaatgaaaatttttatcattatattatcacctct

SEQ ID NO: 10689 - DNA, 493 bp, Homo sapiens
  misc_feature (1)...(493): n = A,T,C or G
natcgagacccctagtccagngtggaggaactctngagatgttgcacgcgccgagagggcgggccacggccgcactccggagactcgcggatgctacgcgcaccatggctggaggctgtcgcgccccttcctcaccgcccacggtctcgcttcctgaactccgttcactcctagcctccggacgggcccggctcttcgacgtgcgctctcgcgaggaggcggcagctgggaccatcccaggggcgctcaacatcccgggtatagggtggagaggggacgcccatgcggtggaatacagaccgttcaggaggttctttgccgatgggacctcatttacgatggaatggggaacgcactgattatgggggtcctgcattcccgggagccagccctcagcttccgtaggaaggactgatggggggcggatcttggcatcggaactggcccatccagcttgagaagaccgcacgcggagaggagaggggctgaccan

SEQ ID NO: 10690 - DNA, 459 bp, Homo sapiens
  misc_feature (1)...(459): n = A,T,C or G
cccgcccccccnnnnatagagatcgtagtccatgcggaggaactccaacctctctatccccattacccagcttagtacttagcacaaagcaagtgctccacaactttatgcctctataaaagtttgccccatatattaatccaagatatctaaatgtcaggcaagagtaattgtatcctcttcaatcacttatgatttagtaagatttactaagtcctagatattatgacagagactacagagtaaatcacatgctttccgccttcaaggaactgagaaaacaattgaagagctaagaaataaacacatggaaggttaagtaacagtaatacacatcaagaaaagttcagaataatactaaagccatatcataaggcacaaggttatgcccaaaaagttagtcactgacactaacaactacaaaagttcagaagatgacagaattactctcatctgccn

SEQ ID NO: 10691 - DNA, 467 bp, Homo sapiens
  misc_feature (1)...(467): n = A,T,C or G
cgcgggnattgagtccattagcccagngcggnggaagtcgcaatgaagggagtcatccatagactcgaaatgagaccacatatggggatgagatccttctagttagcctagtactgctgtactggcctgtatgtacatggggtccttcaactgaggccttgcaagtcaagctggctgtgccatgtttgtagatggggcagaggaatctagaacaatgggaaacttagctatttatattaggtacagctattaaaacaaggtaggaatgaggctagacctttaacttccctaaggcatacttttctagctaccttctgccctgtgtctggcacctacatccttgatgattggtctcttacccattctggaatttttttttttttaaataaatacagaaagcttctttgantggtggaaaagggaacacaaaaaaggagggctccaataatataagagcccatcccaan

SEQ ID NO: 10692 - DNA, 467 bp, Homo sapiens
  misc_feature (1)...(467): n = A,T,C or G
natgagaccatcgactgangncgtcggaaaangcgngagccaccatgcccagccatacatgcatgcattctaatccatgtatacatctatattagtttcctattgttgctgtatcagcacaaactttgtgccttaaatcaatgaaaatttgttatcttacatgtttggaggtcagaaatgcaaaatagtgtgagttccttttggagacgctatgaaagcatccttttccttgccttttccancagctagagtctgcacacatttctgagctcatagtatgccctgcatctctctgatctttgcttctctcttcacatcgcctcctggaattatgacccacatgcctccctcttataagggcccttgagattacgttggactcaagtggttaatccaggatgatttctccatctcaacatccttaatcacattcttttagccatctaagataaccttttcacaaggtn

SEQ ID NO: 10693 - DNA, 433 bp, Homo sapiens
gttcatcttggataatattcttcaaaaagagccatgtttatagatcatgttattagaaacactatgagaaagtataatttatacatttataaatttgtctatttcttgccataaaacttatagactaattttctttttttggtttttttttttttttttttggaaaaaaattttttgttttggccccccgggtgggagaccggggcggggatttaagttaggggaacctttggcttccaaggttaaaaaaattttcttttttaaccccctggagtttggggaataaagggccccccccccccggccgggttatttttggttttttaaaaaaagaggggttttccccttgggggccgggggggtttgaaattcgggccttaaacaatttggcttgcttaaccctccaaaggggggggaattacgggatgaactt

SEQ ID NO: 10694 - DNA, 466 bp, Homo sapiens
  misc_feature (1)...(466): n = A,T,C or G
aatcgagatcgtangcatngcggggacttncaaaagagtggaagccacgagcatcctatgatgacattgatgatttggtcattcctgcccccattcaacagctggtgacggggcagtctggcctctttactcagtacaacatacagaagaaagccatgactgttcgagagttccgcaagatagccaatagcgataagtactgtaccccacgctatagtgagtttgaagagctcgagcggaaatactggaaaaatcttacattcaatcctccaatctatggtgcagatgtgaatggtaccctctatgaaaagcatgttgatgagtggaatattggccggctgagaacaatcctggacttggtggaaaaggagagtgggatcaccattgagggtgtgaacaccccatacctgtactttggcatgtggaagacatcctttgcttggcacactgaagacatggacctcta

SEQ ID NO: 10695 - DNA, 500 bp, Homo sapiens
  misc_feature (1)...(500): n = A,T,C or G
ngggagggacgggccggccnnnnnnanaattgaaaacttgagagcactagcccagngcggnggaattcgaagatttaattatgaggccttgaacacggattatccccaaacccttgtcatttcccccagtgagctctgatttctagactgctttgaaaatgctgtattcattttgctaacttagtatttgggtaccctgctctttggctgttctttttttggagcccttctcagtcaagtctgccggatgtctttctttacctacccctcagttttccttaaaacgcgcacacaactctagagagtgttaagaataatgttacttggttaatgtgttatttattgagtattgtttgtgctaagcattgtgttagatttaaaaaattagtggattgactccactttgttgtgttgttttcattgttgaaaataaatataactttgtattcgnnnnnnnnnnnnnnnnnnnnnnnnnnnnnnnnnnnnnnnnnnnnnnnnnn

SEQ ID NO: 10696 - DNA, 474 bp, Homo sapiens
  misc_feature (1)...(474): n = A,T,C or G
ttcagaagnccatatcatattgacatcagnanagngcggnggaantcgttggaccgttctgatgtgactgagagagaaggntgcananatcacatcttagattatgaaaaacctgaatctatcagtgacactactgacttggctctaccacctgaaatgccgattttgattgatttccatgctctgaaagacatccttgggcccccgatgtatgaaatggaggtatctcagcgtttgagtcagccaggagtagcaataggtttggcttggactcccttaggtggagaaatcatgttcgtggaggcgagtcgaatggatggcgagggccagttaactctgaccggccagctcggggacgtgatgaaggagtccgcccacctcgctatcagctggctccgcagcaacgcaaagaagtaccagctgaccaatgcttttggaagttttgatcttcttgacaacacagacatccatctg

SEQ ID NO: 10697 - DNA, 470 bp, Homo sapiens
  misc_feature (1)...(470): n = A,T,C or G
nactgatgaccatccgacagngctgatgaacctnagnagnggcagctatctgtatgttttgcaatcttaatacagacatgctttccaataagattaatacagaaccatcctgccgttttggataaaaatgtcacaaagctacttactgtacatgggcagtatcagatttcaaatcctaatatttcagctgtgcttttaatactcaaaatattaggggatggggtgttgaagctttcccttttttgcttttaacaatttatagaatttaacagatgtactgtctttcatgtggcctcacatttaaagttatgagaacatacacatggtttacaacttttactatatacctttccttggccaccaagtattttaaaagtgtgccaccttttaacctttactttttttaagttgaaggtgatactttttctatatatgatgaaactcatgtcaactgaagtgagtgtaatctc

SEQ ID NO: 10698 - DNA, 469 bp, Homo sapiens
  misc_feature (1)...(469): n = A,T,C or G
aatcgagattcgtaggccatngcggnggaattcattttatggtatgctaataaagttgttttatttatttatttttgagacagggtctcttgctctgtcacccaggctggagtgcagtggcatgatcatggctcattgcggccatgacctcttgaactcgagtgatcctcctgcctcagcctcctaggtagctgggactgcgggcgcatgctatcacgcctggataatttttttatttttatttttgtagagatgggggtctcactatgtttccggggctggtcttgtttcctggcctcaggtgatcctcccacctcggcctcccagagttctgagatcacaggcatgaatgactatgcccagcccacattatttaaaaaaaaaaagagagaaggaattatttggggaaaataggtattctcaagattcagcactattcttgagttgaaagagatatacatacaggtag

SEQ ID NO: 10699 - DNA, 447 bp, Homo sapiens
  misc_feature (1)...(447): n = A,T,C or G
cctagaacatagtagancattagcgccagagcggtggaattcctctgattgttgttcatatttccatgggatcagtgatgatatctcccttattatttctaattgtgtttggttctcctttcttttcttatttatttgcctagctagtgttccatctagtttattaatttttttcataaaaacagctcctggatttgttgacttttttttttggaaaagttttcagggtctctatctccctcagctctactttgatcttggttatttcttgttttctgctacctttctggttagttttcacttggttttctagttcttttcatcaagatgttaggctgttaattttagatcttctagtttctcttttttttcttcttggggcaaagtctcactctgtcacccaggctggagtacaggggcatgatctccgctcactgcaaccttcat

SEQ ID NO: 10700 - DNA, 497 bp, Homo sapiens
  misc_feature (1)...(497): n = A,T,C or G
ggaggggccccccccccatagaagaccanatagatagnccgtcggaanncgccgcagcggcagggccggcggggaagtgggaagagggacctggacttcgggaccccatccgcccccgcccccgccctctccaccagctcaggctgaacgcgcctggaacgtcccaggtcccctctgccaccatgaggaacattttcaagaggaaccaagagcctattgtggctcctgccaccaccacgtcacgatgcccattggacccgtggacaactccaccgagagtgggagtgctggggagagccaggaggacatgtttgccaaactgaaggagaagttcttcaatgagattaacaagattccctaccaaggagctcatattatcagagttgctgtccaacctgtacttgcatgggaaccagaacacgctgatggaggagttggcagagcacgcacagtggcgagatgagatgctgcgcatgtaccacgtgctgaaggaggtg

SEQ ID NO: 10701 - DNA, 447 bp, Homo sapiens
  misc_feature (1)...(447): n = A,T,C or G
cctgacctacctaagcacctagcaagngcggnggaattcggnttttttgtcattttcatcttgcgaacaaccacgcaatttagatagtatcatttttgtcgcggtattgaaaaatacacagagagtcagaaatggcaaactcctaagtacacaacaaagcagaaacagaggcaggactataagctttttaccataactctgcttgctaaaatgtctgtctggtttgtttttattttaaaaacagtttgctagatgatgctaaggcccgcttaagaaagtatgatattggaggcaaatattctcacttgccatataacaaatactccgtccttttgccattggtggctaaagaaggaaaactccatttgttgttcaccgtccggtcagagaaggtaggtggacaaaaaaattcctgcccttaaacctcaggacatcaaaagaactcan

SEQ ID NO: 10702 - DNA, 494 bp, Homo sapiens
  misc_feature (1)...(494): n = A,T,C or G
ggtctgtaagggcgggccnnnnaaaatggagactganacatccgcaagngcggnggaantccgaacatccagtacaacattgaacagaaccaactagaacatccagtgcaacgttgaacagtattagccagaacatccagtacaatgttgaacagaaccaactagaacatccagtacaacgtggaacagaaccggctagaacatccagtacaacgtggaacagaaccggctagaacatccagtgcaacgtggatcagaaccggctagaacatccagtgcaacgtggatcagaaccggctagaacatccagtgcaacgtggaacagaaccggctagaacatccagtgcaactttgaacagaagtgttgaaagcagacacccttgcttgtttcctattataggggaaaaacactcagtctttcaccattctgtaggatgttagctagggttttttaaaaatgcccattatcaagttgaggaaattcccttttattn

SEQ ID NO: 10703 - DNA, 555 bp, Homo sapiens
  misc_feature (1)...(555): n = A,T,C or G
ctttcgatcacccctnannnnnnnnnattcggaccctactccatgtggtggaattccctcgcctgacaaattcataaatgtctacgcaagaacaactgaaagtacttaacagagaactagacaaatccacaaatacagctgtatgcttcaatgtccccctttctcaacaatttatacaacaaccagatagaaaatcagcaagaatacagaagaacccaacaacacgatcaaccagcgggacttaaattggcaattttagaacacccaaccacaccagaatacacattgttatgggatgcattgtgcccagcccccccaaattcatatgttgaaatcagaacattattagccactagtgatttactaattaaaacaatgagaaattgctacgtacctatcagaatggccaacataaaagtgtggaccacataagtgctgtcaaggattcagagaaagctggatcactcatacattggtggggggggtgtaaaagttacagcccactctggagaatatctggataatttttacttttaaaactttatgtgcaactac

SEQ ID NO: 10704 - DNA, 462 bp, Homo sapiens
  misc_feature (1)...(462): n = A,T,C or G
ntcgagnncccttttgatgacatctagacagngcggtggaattcgcaagatcctcattgaaaccagagggtcggagcaaggagagaagagtgaccgtgtgtccatcaaggacaatcagaaagaccgcacgttcactgtgaccatggaggggctcaagcgagatgacgcatatgtttactggtgtgggattgaaagaagaggacctgaccttgggactcaagtgaaagtgatcgttgacccatagggagcggcttcctcaacagcaagctcacctaccaacagcaatatggcagtgttgatcggctcccacaagaggaaccactacatgctcctggtatttgtgaaggtgcccatcttgctcatcttggtcactgccatcctctggttgaaggggtctcagagggtccctgaggagccaggggaacagcctatctacatgaacttctccgaacctctgactaa

SEQ ID NO: 10705 - DNA, 499 bp, Homo sapiens
  misc_feature (1)...(499): n = A,T,C or G
nggcccgggaggcagcgccnngnaanaattgagaacctgagagcactagcacagngcggnggaattcctgaaccattattcccaagggaaatacagggttgggttcctatgaacctctgggcacagtttcatcaacccatcagtacataaacttgttacatgtgtttctgtttgaagacaccttagtatatatggttgacccattaacactgaacttagcccacgacacttattcctgaatgaagcttacctcagtttctccaggcggcacatcacagtcttcttgcacttaggaacacttggcactgtgcgtgggggtcactttaagcagcaaaatccacaaaaatgcaaaagacatggcactaaatagactgaaaaggatacttgtttataagaactgaaacaagaaggccttgttccacctcagctgggaacatggagagcaggcaattcaaattttttcacatgctgcatgtccgcaaatggctgcaaaagccca

SEQ ID NO: 10706 - DNA, 448 bp, Homo sapiens
  misc_feature (1)...(448): n = A,T,C or G
ngtggttcttaaatcagctatcccgtannacccgnanaancnnggnaggtgccctggacccgtctcaggattgcgctcgcttttttgggacctgacttgatgctttaaggtgggcgtcgtcacggttaaggagaaatgggctcgtcccgagggtagtgcctgatcaatgagggcggggcctggcgtctgatctggggccgcccttacggggcagggctcagtcctgacgcttgccacctgctcctacccggccaggatggctgagggcggagtctattttacgcgtcgcccaatgacaggacctggaatgtactggctggggtaggcctcagtgagtcggccggtcagggcccgcagcctcgccccatccactccggtgcctccatttagctggccaatcagcccaggaggggcaggttccccggggccggcgctaggatttgcattn

SEQ ID NO: 10707 - DNA, 441 bp, Homo sapiens
  misc_feature (1)...(441): n = A,T,C or G
gggacctggtaagtttgaatgtctgtctttctagtttgctccatttagtttagttactatgcatagctgacacttaatggaaggaagtcagtatgtgtagccaaagcttgaaaatggggagttgtgctccacctctgagggtggaatatttacataaattatctaattagctgtctaaatgtactattgtaacaaattaaatttggtcaattattaatgataaagaaaaagaaatacttggtttatcattataattggatggtgtccagtgacctcgtgctactaaaagcaggataggntgcttctgtttttcttttcctctcttctgtttccttgcctcatcctggcttttggccatttatactgaagagaagggtagatgagcttgttccattttgtgggaagggggaaggttatagatacattctctcagttttgatn

SEQ ID NO: 10708 - DNA, 547 bp, Homo sapiens
  misc_feature (1)...(547): n = A,T,C or G
naatgtgancacagtccgangggngcgaattgagaaacttgtaatctaaccattctcatgtctccttataatgcctaggggatctttgaaacagtatttttgccaactcatactttctattttcattctgtaaagataaaacatgtaagtgaaaacgtttaacaaacattaagaaccttcttcgaccaggcactctccttcgctacaaaatttccacattacctatttttttaatagccatttttgaactctcttccatttctaagtttctccctgcagctttcctgaacatgaagcatttccttttcttttcatttctagctttcctttctctgtacctcatgtacacttggaagcttcagggacttagcactggtcatgccagcctctacagatcacatctctgtctataattgggtctccatggtaatgagaagcagaaagtgctgaagtagcgcactatgtaaggactggcaagagaaaatactgtcgcggcctctacaggcatagcattgaatccccatggtgcccaagaagcccgagagaa

SEQ ID NO: 10709 - DNA, 470 bp, Homo sapiens
  misc_feature (1)...(470): n = A,T,C or G
aactgagacctagagctatngcggnggaattcnagcatccagatgaccagtccctgacactgtttaaccacacagtgagagctgccaaatgagaccagcagaaaaactgtccagctagccccagctcaccaaggaaaagacaaactcctaaaagcttccagggagaaagtcatgcataaacaagtgaaactcaggatggcatgaggcttcgccaccacgactggttagaagacaacagcacagactttgaaattctaaggtgtttttcacagggccagtggatttcacaatgtgagtgctgtccagcaccaaagggaatggccaacaggcatggagcagcctacagcgtccagcacccagtaggatggccaggaggcacggagcagcctgcctgtcccaggaaagcaggagtcacaggacacaactggacccagagacctggccttcagacgccaccactcactgccgct

SEQ ID NO: 10710 - DNA, 475 bp, Homo sapiens
  misc_feature (1)...(475): n = A,T,C or G
cgggacgactttacaattganaccctttttggagtgccttaancaagaggacacaaatgagtctgcaaccctcaatgtctgaaactcaatagctggaagacggatacccccagcccctgcccctccccgaggtcccacctatccacctatgttaccgggggaggggagaagtcatagctggaactctgggggtttcccagaaccagccctgctgactgcgaacagcgtcccagcatggagaggctgagaacagtacgtaccctaagacctggaaaagattggggcacaaatccacgctcggcacagccatcacacacggccacacccagagagccacccatggcctgggaagcagggctgccacccgcacctccctgggctgcccagatgagggcgggtgaacagaagggcagcccagggccatgtgtcaggattcgggccacctgcccaggcagcccagagctccacccaccac

SEQ ID NO: 10711 - DNA, 493 bp, Homo sapiens
  misc_feature (1)...(493): n = A,T,C or G
ggagagagngnnnncttttagacctatggagatcatcagacangcggcggaantcaaaacataatttttcccatatccctggactcttgagaaaatgggtacttaaatggaattttgccttgctgcaacatacaattgcaaaagatgagttgaaaaaattacatacaaacagcttgtattatattttatattttgtaaatactgcataccatgtattatgtgtatattgtccatacttgagaggtatattatagttttgttatgaaagtatgtattttgccctgcccacattgcaggtgttttgtatatatacaatggataaattctaagtgtgtgctaaggcacatggaagaccgattttatttgcacaaggtactgagatttttttcaagaaacagctgtcagatctcaaggtgaagatctaaatgtgaacagtttactaatgcactactgaaagttaaatctgtggcacaatcaatgtaagcatggagtt

SEQ ID NO: 10712 - DNA, 558 bp, Homo sapiens
  misc_feature (1)...(558): n = A,T,C or G
aaactaggaacacanctccgnannnnnccnnctcgatncactacctccgtgtggtggaattcgtttcatgcttataccaaagaattaaatctgatctttaatatctgatattttcctggtactcgtactgataagggattattggaagtcagtcacagaatttggaaataaattctagtctctccttagctatttgatgcttttcatataggccaagaactcattgcaaaacatttttgcaaggatgaatgcctgtatttggtctaggaacagtacattttagtctgatttagaattactggtagcttattttaaagcaaggaaaagcagctgagctcaagtttgctgtctttagaatggtgtgtgaaaatatggtataaagggttttcattttcctgttcttacctattattgtatagagctattcatgccattttttgggaaaactttaaaaattgccccaaatactgacattgagtgcattaaataacaaattatctttgatacattanacttttattcttcatgcatctggaatttaaatttaagnnatatgtt

SEQ ID NO: 10713 - DNA, 544 bp, Homo sapiens
  misc_feature (1)...(544): n = A,T,C or G
nttttcgatcaccactccgtgnggnggaattggatggcccttgtgtgacaacaagaatgactctgccaatgcctgctcagccttcaaggtgcccatcatggaatgtcgtgggggctgtgggccccagtgctgccagcccacccgcagcaagcggcggaaatacgtcttccagtgcacggatggctcctcgtttgtagaagaggtggagagacacttagagtgcggctgcctcgcgtgttcctaagcccctgcccgcctgcctgccacctctcggactccagcttgatggagttgggacagccatgtgggaccccctggtgattcagcatgaaggaaatgaagctggagaggaaggtaaagaagaagagaatattaagtatattgtaaaataaaaaatagaacttatttttattatggaaagtgactattttcatcttttattatataaatatattacaccatctgcgtatatgtaccatatagtgagtattttttacaagtttgnngtgggatttggtggttttaaaaaatagctgttaaaatt

SEQ ID NO: 10714 - DNA, 555 bp, Homo sapiens
  misc_feature (1)...(555): n = A,T,C or G
nggtcgaancacactccgngnggnggaactgatgaccactgcgtgacaacgagaaagactctacacagtggcgccatttgcgcttctttctataaaaccatcactcacgttttacagctcctggtattattgcctgcacattcttggtatcttagtattattgttgttgccagtgaaaaaaactcaaagaagaaagaatacacatgaaaacattcagctctcacaatccaaaaagtttgatgaaggagaaaattctttgggacagaacagtttttctacaacaaacaatgtttgcaatcagaatcaagaaatagcctcgagacattcatcactaaagcagtgatcgggaaggctctgagggctgtttttttttttttggaggtaaacaaaaaccatttttacccctttttaagggggttggagttggtggaaaaaccatttaccggggggaaaagggacagttataaataaggattttcctgccccccaaatggaaatgggagggaaacaggccctcccttgccatgtccccggggcccaccctttatgtaaaaa

SEQ ID NO: 10715 - DNA, 546 bp, Homo sapiens
  misc_feature (1)...(546): n = A,T,C or G
nttgcgaccactagtcagtgtggtggaatgcgatcccaatatgggtcanaagctctgggtcctggagtagtccaaggaacaccaccccttacttgccgacttccgaaggtcaccgggagcgggttctcagcctctcccaagccctggctactgaggcgtcgcagtggcacagaatgatgacaggtggaaatttggactcccagggagaccctcttcccggtgtgccgctgcctccttcggaccccacgcgccaggagacccctccccccagatctcccccggtggctaattcgggttccacggggttctctcgccgagggagtgtggcgtggagggtcccaccccctggggcccgcgtgggatgccgggatcgccccctcggtcctgccacaagacgagggggcatggcctcttggagtcactctgctacaatccagcttctaatccgcccaaaagcggcagccaatcggagccgccaagaacgtggtctgagtacccggcggagatctgggaccactcanggcatcatgggggggctgctgtccc

SEQ ID NO: 10716 - DNA, 481 bp, Homo sapiens
catcgtagaccctttgtagactggtggaattcgccaaaaacatttaagactgattgggttgaagtttataataaattatattaacatgtcttcctttttgaggtaaagatatatactttgtcaaatatcattttgtcatcctctaaatataaatccaaatacctcagctaagtaattctattttattatttttactgttatgtatgtttttaatcatatttcttaggaagtataggctactggacttagaataaaaagtccccaaacccaaacaaatggtttatgaaccagagtatatgtggaagattctttgctggtcttgctctgtgtgcatctgaagcttctttggcctagattttagcacaaacctgagtatatctcttctactttcatcatgtgttctgtaccttctttttgtttcattgggcatgctacggaaataggtggattttgtgtgtaatgccatcagtttttatgaaag

SEQ ID NO: 10717 - DNA, 453 bp, Homo sapiens
  misc_feature (1)...(453): n = A,T,C or G
cactgatttcatcgcccangcggnggaattcgctttttttgctgttgagttgtaagagttctttatattttctggatattaaaccctcatcagataaattatttgcaaatgttttcttccattctgttaattttcttaatgttgtcttttgatgcacattgtaaaaatttttaaaatcaatttccattttcttatttttttattattatgctttaagttctgggatacatgtgcagagcgtgcaggtttgttacataggtatatacgtgccatggtggtttgctgcacccatcaacccatcatctacattaggcgtttctcctaatgctatccctccccttgccccgcacccccgagcagaccccagtgtgtgatgttcccctccctgtgtccatgtgttcccattgttcaactcccacttgagtgagaacatgcagtgtttggttttctgtt

SEQ ID NO: 10718 - DNA, 499 bp, Homo sapiens
  misc_feature (1)...(499): n = A,T,C or G
aggagagagngnnnncttatgagnccctattgatgacgtancgcaanngcgccgnaanttaaanntataatctgcgatgcggaaaagcgtacaacaaacaagcctattttgcttgtatttttttaaacaatacaggtgggggcttgctatgaggcccatgctactcttaaactcctaggctcaagtgatcctcctgtctcagcctcccaacgtgctgagatgacaggcaagaggcaccatgcctggccaaaataaaaatttttaataggcagtccagtagtccgaaaaatgaagcaatgcgctccccagagatactttttataacaaaaggtttaatgaagattttccagtgtgcagatttctactttgcagagcagatagaatacatctgcgcatttaaattattaaaacattacagaatcattacatggactaacaacaaatttttattttctaacagtgtgttatggagaaagcctgccaaacggaaaatgagaat

SEQ ID NO: 10719 - DNA, 479 bp, Homo sapiens
ccatagacgacattagatagagcgccggaattccggacagggtacgagatgctcacgctctcgaatgctgccgtttggtatggtctcttccaacatcctgtatcagcattataaaataaaatggatacttcaagctttgccttcacttatttctttgctttttaaaaactatttgtaatgtaattttaatgcattttttacaggcccagtaatggttaaatacgtcagcttactgaataattttaactatttattcttctaaggatacagcttgtctctggattttccagtcttaattttatattttattaatctattttaatgcttgcttttcccatttatagacgttgtagcagtaattgcaagaagttcttgagctgaattcctgttgtgacaacttcctataattacagtagataactttttcttttagtcgtatataacttttctataacttgtgatggacaagagatatgctt

SEQ ID NO: 10720 - DNA, 479 bp, Homo sapiens
  misc_feature (1)...(479): n = A,T,C or G
ggaaggcgccggnnnnanaaaatgagactaaggcatngcgggaactccagcttcctatgacactacctgcttggccagcctccagccatacgcttttcttgagtttgacagcatcattcagaaagtgaagtggcattttaactatgtaagttcctctcagatggagtgcagcttggaaaaaattcaggaggagctcaagttgcagcctccagcggttctcactctggaggacacagatgtggcaaatggggtgatgaatggtcacacaccgatgcacttggagcctgctcctaatttccgaatggaaccagtgacagccctgggtatcctctccctcattctcaacatcatgtgtgctgccctgaatctcattcgaggagttcaccttgcagaacattctttacaggttgcccatgaggaaattggaaacattctggcttttcttgttcctttcgtagcctgcattttccaggatccaa

SEQ ID NO: 10721 - DNA, 492 bp, Homo sapiens
  misc_feature (1)...(492): n = A,T,C or G
ggcncgggggccggcccnnnnaaattgagactgagagcctagcacagngcggnggaattccttatccccattcggtcctctttttcctctctcgctttagttttcaaccttgttggtgctgagagagagaaccgagaggtcccagtacaagggcagggcagggcagggaagctgccaagctccgcaccccagaggagtgttctggactacagccttgtcttatggtcaaattgatacccttaataagaaaggaaaggaaaggaaaacagatcctcccctctgctttttattgtaaccagaatcaccctgaggtcccttctgaaccctctgggcctgcgctaattgtaggagccacagcgctcctagggtgagaggcttagccatccctgaccctggcagtgcactggtaagcagacactgcactgaaccaactgctatgctcagagtgtaccagaaacccaaacattggcaagtaattttgcaactttcaag

SEQ ID NO: 10722 - DNA, 585 bp, Homo sapiens
  misc_feature (1)...(585): n = A,T,C or G
cgactccgattcgcgattcgtataaccgttgtgatacngcgtctatggcatggtgcccataccactccccccccncccccacgagggccggcccncctttgtttagagttcatagttcgagcacactaggccagngcggnggaanacngaggacntgctctttgagctgaaagcaaaaggtcgatggggcattaattaaagttaagacaggacaatagcacatgcagaggcccaggggttaaagaaagcaagggtgaggctgagtgcagaggctcatacctgtagtcccagcacttggggaggccaaggtgggcgaatctcttaaacccaggatgggtaatgggtaacgtggcaaaaacccatctctacaaaaaatacaaaggttagccgggcacagtggtgcacatctgtaatcccaactactccggaggctgaggcgggaggatcacttgagcccaggaggcacaggttgcagtgagctgagattgcaccactacaatccagcctgggctaccgagtgagaccgtgagaccctgtctcaaaaaaaaaaaaaaataaaaaaagggcccgccaagattaaaagcg

SEQ ID NO: 10723 - DNA, 471 bp, Homo sapiens
attcgagatcactagtccagtcgatggcattccctcaatctagaagatagagttgtttcttagaactttgtaatattttggttagaaatatttcagttaactccagttttttcctagctattcggtcagcagaaaaagtttgcttaaaacaaagggggtagtcctcttataacctgatatttgtcaacacagtataagctttctagttgttttcaaaattactgtaatggtttgtgtctgtatttgtatattatacctacaaacatacatatctttcagctactgaacacatcagaattggttttactttttaggttgttgattttttttaattaactattaactaagaataatacttattttctaattataagccaaaaacccctgggtttttttctcattgattaagccacttatttttataaggtatatttaaataattcccatcttctgatatgattttaaactctt

SEQ ID NO: 10724 - DNA, 469 bp, Homo sapiens
  misc_feature (1)...(469): n = A,T,C or G
nattgatagcgtccctccgacanngcgnggaanttgagctgcggaagatgaatgccagaggacttggatctgagctaaaggacagtattccagttactgaactttcagcaagtggaccttttgaaagtcatgatcttcttcggaaaggtttttcttgtgtgaaaaatgaacttttgcctagtcatccccttgaattatcagaaaaaaatttccagctcaaccaagataaaatgaatttttccacactgagaaacattcagggtctatttgctccgctaaaattacagatggaattcaaggcagtgcagcaggttcagcgtcttccatttctttcaagctcaaatctttcactggatgttttgaggggtaatgatgagactattggatttgaggatattcttaatgatccatcacacagcgaagtcatgggagagccacacttgatggtggaatataaacttggtttact

SEQ ID NO: 10725 - DNA, 475 bp, Homo sapiens
  misc_feature (1)...(475): n = A,T,C or G
agcgtttcnnnnttttgagncaactgagtacnctagtcagngcggtggaattcggagtgtaagctgaggatgaagggaagtgagggtgtgaaagagggaagaaacaggactaatgaatcgtggatctgggaagggtgcaaagattgttgaagttgaacgattagaggaaatgagctggaaaaatgaagtggttactggaaaatgggatatttcaaactgatatctttagagggaaagcaattttttgataatcaaagtctaaggttatcactgtgggaatgactggctgaggttcagtggaagatgagatcatggcaggggtagagatcattgcaggggtagagattggaccgggcaccaggatgttggaaagagcatctctatgtatattgacatccccaagagtgacggcaggaggcgtggtggagagagtgactgagctagagccacaatctttacagaaggagtgggaatg

SEQ ID NO: 10726 - DNA, 464 bp, Homo sapiens
  misc_feature (1)...(464): n = A,T,C or G
cgcccccccgnnggatgnaatgaaccttttcagattgaggactttaggaattccaggtttttctggcctccctggagagctaggactgaaaggcatgagaggtgagcctggcttcatggggactccaggcaaggttgggccacctggagacccaggatttcccggaatgaaggggaaggcagggccaagaggctcttctggcctccaaggtgatcctggacaaacaccaactgcagaagctgtccaggttcctcctggacccttgggtctaccagggatcgatggcatccctggcctcactggggaccctggggctcaaggccctgtaggcctacaaggctccaaaggtttacctggcatccccggtaaagatggccccagtgggctcccaggcccacctggggctcttggtgatcctggtctgcctggactgcaaggccctccaggatttgaaggagctccag

SEQ ID NO: 10727 - DNA, 493 bp, Homo sapiens
  misc_feature (1)...(493): n = A,T,C or G
agctctcaannnaatgatcnccgtcgnnnnnnctnggtagacatcgcaccgngcggnggaanncctagaatatttctccattaactcttgagattcacaggactgtctagctctgagtcctagcaatagactccttagaggagtagtacgtttatctagattttctctagataatgcaggcggaagacctgggttcccgggtggggcattgcagttcttcctgtgtttggcttccaggaattacatgaacgacagccttcgcaccgacgtcttcgtgcggttccagccagagagcatcgcctgtgcctgcatttatcttgctgcccggacgctggagatccctttgcccaatcgtccccattggtttcttttgtttggagcaactgaagaagaaattcaggaaatctgcttaaagatcttgcagctttatgctcggaaaaaggttgatctcacacacctggagggtgaagtggaaaaaagaaagcacgctatg

SEQ ID NO: 10728 - DNA, 421 bp, Homo sapiens
ctggattaagaagcattaccaataggaatggatcgatagttgaataatgatttttatacatagatatataaaatacagccaggaaaacttaaattacttttcttttaaaatatctcacaatttatgtggtatttttaaagactgatcttagaccaagtcaaattcccatttatcatttagttattttttgaggttagagaataatttgtacatatttatttagacctttgatatttattaaagcaattactcacaatggaagtgaaagaatcaggagaaaagccttttaaaaagtattctccaggtttgtcagggtcactctaaagataaaaatgtaactaagtcttctgtgaaatatcatccatctaatcttgatgctgttgcagatggtggtgacacaagttaattgacaaactactgc

SEQ ID NO: 10729 - DNA, 469 bp, Homo sapiens
  misc_feature (1)...(469): n = A,T,C or G
catcgatagcgtacgctgngacnngcannngnanaaacgattgcagggtttcaccaggatccacctctgatgttcactgaagagtaccataaaagtctgctagagcagtaccatctgggtctggatcaaaaacgcagaaaatatgtggttggagagctcatttggaattttgccgatttcatgactgaacagtcaccgacgagagtgctggggaataaaaaggggatcttcactcggcagagacaaccaaaaagtgcagcgttccttttgcgagagagatactggaagattgccaatgaaaccaggtatccccactcagtagccaagtcacaatgtttggaaaacagcccgtttacttgagcaagactgataccacctgcgtgtcccttcctccccgagtcagggcgacttccacagcagcagaacaagtgccttcttgactgttcacggcagaccacaacgtttcttg

SEQ ID NO: 10730 - DNA, 480 bp, Homo sapiens
  misc_feature (1)...(480): n = A,T,C or G
gagcgaganaannnattgtagactctagtcattgtggngcaattcctcacatcgngcgggaagcccacaggccgggatccaaggtgaacaagaaggaggtggtggaggctgtgaccattgtagagacaccacccatggtggctgtgggcattgtgggctacgtggaaacccctcgaggcctccggaccttcaagactgtctttgctgagcacatcagtgatgaatgcaagaggcgattctatactaattggcataaatctaagaagaaggcctttaccaagtactgcaagaaatggcaggatgaggatggcaagaagcagctggagaaggacttcagcagcatgaagaagtactgccaagtcatccgtgtcattgcccacacccagatgcgcctgcttcctctgcgccagaagaaggcccacctgatggagatccacgtgaacggaggcactgtggccgagaagctggactgggcctcgg

SEQ ID NO: 10731 - DNA, 472 bp, Homo sapiens
  misc_feature (1)...(472): n = A,T,C or G
natagagattgttgancactacgccagagtggtggaattcggtcagttgccggaatccctccgtaaaaggtgtgcagtgcaagccaagtatatccagcacttaacgagaaggaactcatcgcagagaccatctgccattcagctgctgcagagggaacttttccaaaatgctggaaaggttaacctcaccctacagatgaagataatagagcaagaaaaagaaattgcagaactaaagaagcagctaaacctcctttctcaagacaaaggggtgagggatgacggaaaggatgggggcgtgggatgaaagtggacttaacttttaaggtagttaactggaatgtaaatttttaatctttattagggtatagttggtacaatgcttcgttgtatttagtaagcctttacaagacttgttaaagatgtcagagtgccccaagctgccgttcctttccttcctgccccacaagct

SEQ ID NO: 10732 - DNA, 477 bp, Homo sapiens
  misc_feature (1)...(477): n = A,T,C or G
ntttgagaccactcgcncgngcgagtgaatacccttatcgcnggagcngngagaggttttctaccagccaggtcttatgttcccaggccctgtcttctggaaagcattactgggaagtggacactaggaattgcagccactgggcagttggggtggcttcctgggagatgagccgcgaccaggtcctgggaaggactatggactcttgttgtgtggaatggaaggggactagccagctctctgcatggcacatggtcaaggaaactgtccttggctcagacagacctggggtggtgggcatctggctgaaccttgaggagggaaagcttgccttctattcagtggacaatcaggagaagcttctgtatgagtgtaccatctctgcctcctctcctttgtaccctgccttctggctgtatggcttacatcctggaaattacctgataataaagcaagtaaaggtgtaaggtttcctaa

SEQ ID NO: 10733 - DNA, 465 bp, Homo sapiens
  misc_feature (1)...(465): n = A,T,C or G
agcgcgccggnnnntattgatagcntccctaggccgngncgnggaattcaattttttagtacactgtttttcaatttaatgttttcattttttaaatcttttagtttatactctattaaactgaaatattatggtgtgaaaacataacttattttttaaggcataacttataatagctttgtattccatcatatgtagaaaccttcgtttatccattctcctacggagttatatttaggctgtttcagttctttgctgttaaaatactaatacagtcagtatccttgtacatgtttctctatgtctgggtttatctaggtaactagaagtgtggttgcatcctttacttcactagatactgccaaactgccctgctaaatatagtcttgctcatttttctaaggatgtttggatttttgatttaagagagttttattaaccttttttattatatacagaatgtan

SEQ ID NO: 10734 - DNA, 450 bp, Homo sapiens
  misc_feature (1)...(450): n = A,T,C or G
nattcgagtgcactagcccagngcggnggaattcgtcaagtgaactgtttggcctggagaaggaacaaagaaatctgtaactggttgtgatcaattagttgtaagcattactgcacttggaccagcctcaacttctacctttttaaattggtgttagagattaaccaaatgtcacctacatcatttcccaacactgataccatgtgcttcagcacctcatttttcttactttgtatttatagtattatttatttaatgtatagccatattcttcagaataattaagaattgtggcatgttgaagaattcagtcatttattagcccttcagatatctttgttttttaaatcagtgctcaatttgttttgcaaaaagttttctttaaaacttttctttaaaagtttctttaaaacttttctttaaaagtttctttaaaacttttctttaaag

SEQ ID NO: 10735 - DNA, 473 bp, Homo sapiens
  misc_feature (1)...(473): n = A,T,C or G
aggcgttccnnnaaactgagacaactgaccaccgctgtggaattcaaaattttttctttagtaacagacttaggtactgctaagcagttattaacacaatattccttagttttcatatgttggttattcatatgtctatttatatgtatatttatttttatgtatgttactatgtaaatatggtttgcagttgtttttgtgtggaatcttgtctttccgtataagttgtaagctccttgagagcaggatccatgtcattcctttatttttataaattattccccctatcattcctttacagtgcctagtgctactcattatgtgttcattgaatttgactgacatagttaaaaacttaaggtttattttagactttcaaggaaacaaaagactttagagtcctctctctgtaattctgccccactcatttgtttaccctgggttgtatacagttctcttccttctcccctccc

SEQ ID NO: 10736 - DNA, 447 bp, Homo sapiens
ggtttcaccatgttggccaggctggtcttgaactcctggcctcgtgatctgcctgcctcagcctcccaaagtgctgggattacaggtgtgagccaccgtgcccagcctcacagatgtcttaaaattcacctgataaagttaggagcctcaagaaaaattagcagaggaaaataataggtagttactatttagggtaaactaaactgttctaaggaatagaaaataaaaattccatgtcttcaaaaataattcttccctctcaatctctctgaatatctcataagagtattcaggccacagaaataactaccatttagccactcagaggcttatagtacttctactaactttaacatttggcaaccaaaattactctaagaatcatcacccaagtcagacaaacaggtaagataacaagaaaaagtgcttgtataaggatttaagact

SEQ ID NO: 10737 - DNA, 472 bp, Homo sapiens
  misc_feature (1)...(472): n = A,T,C or G
ggcgtccnnnaactganaaccttgagatcataggaagngcggaggaattcgagaactagagcattgcagcatggaggaaactgtgaggcaccagatcctgtgcttctgcaggccattttctgaaaacccctgttaggaaggttggatttggcgtgacttgcttgagcaagagtcctggggagagattttgaggtttaatttaacggtatatccagagctaacagtgactcaactcgtctagttctgcaagtcagatgtacacttatagtctctctgtgaagggtttgggtctgagctgtgtagtatgtcaaactgccagtaagccagcccctcaccctctgatagatattcctttaatgcaccagacttcatgtttgataaatgattaatggttgaaatcgcttctcttcttttgtgttttcccagttaatagatggtcactgtttccacaatgttttatactttcagcttt

SEQ ID NO: 10738 - DNA, 451 bp, Homo sapiens
  misc_feature (1)...(451): n = A,T,C or G
tttgagattgaaggccttgcggaggaattcgccatttctaagacctacagctacctgacccccgacctctggaaggagactgtattcaccaagtctccctatcaggagttcactgaccacctcgtcaagacccacaccagagtctccgtgcagcggactcaggctccagctgtggctacaacatagggtttttatacaagaaaaataaagtgaattaagcgtgaaaaaaaaaaaaaaaaaaattaattaataaaaaaaaaaaaaaaaaaaaaaaaaaaaaatanntnntntaaaaaataaaaaagggttttttgcccccntatttttcacccccgtgtaaaaaggggggaaaagagagggtggccccccccccccccccccttttttttgcgggggggggccccctctttttttgtattcaaaaaaaaaaaaaaaaaatttttttattaat

SEQ ID NO: 10739 - DNA, 570 bp, Homo sapiens
  misc_feature (1)...(570): n = A,T,C or G
nattcganccccattgatnncctatcccgngnggngcaattcagaggtttcattgactcagagttctgcatggctggggaggcctcaggaaacttaacagttatggcagaatgcaagggagaagcaggtaccttctttacaaggcggcagaagagacagagagggcaggggaaactgccatttttaagctatcagatcttgtcagaactccgtcactatcacgagaagagcatgagggaaactgcccccatgacccaatcacctcccaccatcccccgctcaacacgtggggatgacaattcaagatggaattgtgtggggacacagagccaaaccatatcaagtacctacaaaattatggtgactcttcactaatttgcaaactgattatctgcaaatcttagatagggaataaaacacaaaaatatcattatccctccagaactgaggacgcanattggatttagaagacttagctntgacacctagatatgttntcattgatttgacctagcttgatctcagtttctcttttatagagtagttctttagatcagaggtccccaccac

SEQ ID NO: 10740 - DNA, 472 bp, Homo sapiens
  misc_feature (1)...(472): n = A,T,C or G
cttgactgacgaccctccgacagngncgnggaanncccgcaagtcccagacgctgcccatggaggcgtccagcgagccgccgctggatgctaagtccgatgtcaccaaccagcttgtagattttcagtggaaactgggtatggctgtgagctcagacacttgcagatctcttaagtatccttacgttgcagtgatgctaaaagtggcagatcattcaggccaagtaaagaccaagtgctttgaaatgacgattccacagtttcagaatttctacagacagttcaaggaaattgctgcagttattgaaacggtgtgaagacggattctttggttgataaattgctatcattctaaagtcatggacttcactttcggcaacaaaactaaataaggatggaacatttattgaatgaaaaatgcacttttgtttttccatttttttaaataataaaaatcagacaaacaggaaaan

SEQ ID NO: 10741 - DNA, 473 bp, Homo sapiens
  misc_feature (1)...(473): n = A,T,C or G
natgagaccctggccgngcggtgatatcattctccaaatcttaggattttagaaccgaaacaaaatttacagatcccctagtaaaaaaattttttaaatttttattttcataggttttttgggggaacaggtggtgtttggttacatgagtaaattcttttgtttttgagacagggttttgctctgtcgctcaggctggagtgcaatggtgtgctctcggcttactgcaacctctgcctcccgggttcaagcgattctcgtgcctcggcctcccaagtgacttgggattacaggcgggcaccaacatacccggctgatttttgtatttctggtggagacggggtttcaccatgttgtccaggttggtcttgaactcctgacctcaggcgatccactctgctcggcctcccaaagtactggaattacaggcgtgagccaccacgcctggccaagtaaattatttagttgctatg

SEQ ID NO: 10742 - DNA, 474 bp, Homo sapiens
  misc_feature (1)...(474): n = A,T,C or G
agggttccnnnaaactgagatcattgagtaccgctgtggaantcagatgattggtatgactgtcatagggaaatacgtctgagtttttctgatacctatcaggattatgaggagtactggagagcttactacagggcatggcaagaatattatgctgccgcttctcattcatattattggaatgctcagagacatccaagttggatggcagcttatcacatgaataccatttatctacaagaaatgatgcatagtaaccagtgattataggatatacctgagaccatcaggaactgtcaacaaatgatacctttggatatccatcctcctcgacttatagtacagtggtgtatagtggcatttctgataaacttgaaaagacttgagtctttccactgggacacatccatttttcagattgttttgatttaggccaggtatattatcttcatttttaagagtttctttaagaga

SEQ ID NO: 10743 - DNA, 485 bp, Homo sapiens
  misc_feature (1)...(485): n = A,T,C or G
atttgaaaccccttttnnnnnnnnatgagtancactagtccgngcggtggaattccaagtcacaaatattaggattttagaaccgaaacaaaatttacagatcccctagtaaaaaaattttttaaatttttattttcataggttttttgggggaacaggtggtgtttggttacatgagtaaattcttttgtttttgagacagggttttgctctgtcgctcaggctggagtgcaatggtgtgctctcggcttactgcaacctctgcctcccgggttcaagcgattctcgtgcctcggcctcccaagtgacttgggattacaggcgggcaccagcatacccggctgatttttgtatttctggtggagacggggtttcaccatgttgtccaggttggtcttgaactcctgacctcaggcgatccactctcctcggcctcccaaagtactggaattacaggcgtgagccaccacgcctggccaagtaat

SEQ ID NO: 10744 - DNA, 457 bp, Homo sapiens
  misc_feature (1)...(457): n = A,T,C or G
nttgtagaccatttgaagacgttggaattcttttgattacttttttactattccatctcctctgttagctataaacctttgttttacttttataacagttgctttatggcttaaaatatgcatctttaacttatgcagcctgccttaaaataatatgccacttcatttatagtgtaaaaacttcaaaaagtgcactttcattttcccattatatctttggactattgacatacattttacttcgacatgttaaatgtcccacaattcattgttaccaattttgcttttaatgacaaaaagcctgaaaaagaaaagtattttccatttacccacatatttgccatttccaatgccctttattcttttgtttagatctgagttcccatccgtattattttatttagcctgaaaagcttcaccgttttttgtactaaagatttcttctatgctgtgcacg

SEQ ID NO: 10745 - DNA, 426 bp, Homo sapiens
tttgagggactttctcatcttcaagttctgtatttgaatcataactatcttaattcccttccaccaggagtatttagccatctgactgcattaaggggactaagcctcaactccaacaggctgacagttctttctcacaatgatttacctgctaatttagagatcctggacatatccaggaaccagctcctagctcctaatcctgatgtatttgtatcacttagtgtcttggatataactcataacaagttcatttgtgaatgtgaacttagcacttttatcaattggcttaatcacaccaatgtcactatagctgggcctcctgcagacatatattgtgtgtaccctgactcgttctctggggtttccctcttctctctttccacggaaggttgtgatgaagaggaagtcttacagtccctaaag

SEQ ID NO: 10746 - DNA, 455 bp, Homo sapiens
  misc_feature (1)...(455): n = A,T,C or G
tcnnaatggagcccattgnanattgagacctatggcagnnggcnggaantcctggcagttatgacaggaaggctctctatacctggctccccagtgttctgcccctggcactgagcatgaggagccaggctttggggagactttgcaatcacccccccaacctggtccattttccacaggtagctttcttgaactcaccttgacccctcctcagccagcagcccccacctccaggggcaaaggagctgaaagacagtcctgaactggggggagctgggatcacatcagccaggccctgtccctcacaggaagtgagatgaggtgataccatggacggtgactaaggccccaaagaccctgcctctctgcctccccagaaacctcacagccaggccagcccccagagcagagcctgtgtaaacatgcccaggaggggaggaggggttgctacataa

SEQ ID NO: 10747 - DNA, 487 bp, Homo sapiens
  misc_feature (1)...(487): n = A,T,C or G
naatgaggnccttcgnnnnnncattgaagatcctagcccagngcggnggaattccatgttttagacaaatactcatgtcttctttgtagcagctaggccctgccaccactgtgcttggctgctacaaagaagacatgttttagacaaatactcatgtgtatgggcaaaaaactcgaggactgtatttgtgactaattgtataacaggttattttagtttctgttctgtggaaagtgtaaagcattccaacaaagggttttaatgtagatttttttttttgcaccccatgctgttgattgctaaatgtaacagtctgatcgtgacgctgaataaatgtcttttttttaaaaaaaaaaaaaaaaaaaaaaaaaataaaaataaataaaaaaaannnggccgccctttattttaaaagggcccttaaaaaccccttatataccctggtggggtcttttttattcccccactttttttgtctcccccccca

SEQ ID NO: 10748 - DNA, 480 bp, Homo sapiens
  misc_feature (1)...(480): n = A,T,C or G
natttgagaccactangccgngcggtggaattccataaagaatgtgaattagcattttaaaaataggggagtctaacaacaccattgctttttattctcattacttctctttcagtggcttaggatctgattgctccctcacctctaaagtgtttccaagtagagtctggcagtattagtttcccccacaaacaaattcaggtagagaagttgtagtcgaagggaatgttgggactcctcactgcatggtccctggggtgtctggctcatccccatcatgacgtgagttggtagcagaggactaggtgttaggacagactctcctcacctcagttgctgctgctctgggccaggaaatctctctatggattccctcatctcctgccacactgctgcagcatcaagtgtgctatgagagctgtatgtgcccaggggtgggccctgccactggccaccccgagcccaggacgcattctggtc

SEQ ID NO: 10749 - DNA, 478 bp, Homo sapiens
  misc_feature (1)...(478): n = A,T,C or G
ntgggaccnnnaaatgaganacttcggtagtcgtagggaagngcggnggaattcgttaatcagaatagtgtattataaagcagtcatttttttctaattgttaaaagtgatatattctgaccacaaaatacttggaggtaaaagcataaggatgcaggaagaaaccactataaccttatcactgagaaatataaaatgatatagtttaatattttttacattataacattataaatatttatattacaggaaataagatatgtggaacggagttatgtatcaaaacccactttgaaggtgagtaatttaaattgtgctttaaaatttccagaatttaaaggaaatgtcaataaaaatgcatatacttatgatttggatacatgtgaaagtcgaagcaggattatgtaacagctaggaatagctaactattcaaatattcagctaaagtagatgactataatagaagaacttgtcagtt

SEQ ID NO: 10750 - DNA, 485 bp, Homo sapiens
  misc_feature (1)...(485): n = A,T,C or G
ggccggnnnnnnnnnnaattgatatgcctacgtagtgtcgtggaattcccagttttgtttctcatagggaaatctgacccacctgtcatgttggctcctaaggaactgctgttgtaagcggctcatcaagagttgaacttcacgtagccttgttgggaatatggaaaaggaagaaagccacaggactgcccattcagtcttgggaagattgggatgattctgcacaagcaaaaatgactgaagtttatgtatagacacacctctaccaatccatcttcagctgactgaatgttgtatgatagcccttctccaaagcagaggtagaatgttcaggtttcaccatggattttctacttatttcgtttttggaatcaccttacagattccaggtcccttttgtatatattctttattcttttgcttttttaaaaaataattttgtttcataatttaagcacttgtatagtcaatggttcgtgttccgc

SEQ ID NO: 10751 - DNA, 471 bp, Homo sapiens
gtggttctaaaaactgagaccatcgaaagctcgtggaattcggctgtactggatgagctcaaacaaaaggaagaccgagaaaaggagcaactcagctctttgcaagaggagctagaatcactcctagagaagtaaaaagaactgatatttaatttcagtcttcagactggtcagcattagaaaattcttggctttattgtactgggtattaagaccttgctcttcctagtccttttaatgctgtgtgttctgttaagttctttcatttgtttgtaattttgtttttcagcaaatttatattgttttgctaggtgttcatcctataagaagcaggattgtataggcagaaaaatgattgtaggaaagttgcaggattagcggaatgtatggttcaaccttaattatagcttcattgcaggactttactgtttctccattttctagaagctgctgttgctgctttgtgatgac

SEQ ID NO: 10752 - DNA, 461 bp, Homo sapiens
  misc_feature (1)...(461): n = A,T,C or G
tggcggannttttatttgaattcatatgcattgtcgnggaattacagtcttgacttgttagcactctgtatttttgtgccgggtgtgtacttttagatttaaatcaacaacaaaagtaaaacatttcctacagatgcagagacaaatggggataaatgctatggttatacaaacccgtcattaaccgtgttcaatttatgttactcaagatgcagccatatatatcttcctgaactggagctcttctcatgcacttctcagatactttccaggactcctcatcacatgctagaaaaaatctatactctttggactacatttgaggtcctttattatataaccccattctaccttctccactgtctcttctgggactcctctcaccactcattcagtgcctcagcccagtgtctgttgttggttcctctcatataactcaggaagccagaaagtctcacaat

SEQ ID NO: 10753 - DNA, 458 bp, Homo sapiens
  misc_feature (1)...(458): n = A,T,C or G
cctgattagcctaacactcgacgnnggcanncganacacatacttactttgctttggaataatttttcttatcatccacacttggtcaaatttctgtgtttcttgactgaaatgataggctgggcacattagaaagttacaaatcatcggcgtagtacctctagacctgactttgcagtattgctttaaaagtgatctgggctgggcacagtggcttacacctgtaatcccagcactttgggaggctgaggcgggcacagcacttgaggtcaggagttcaagaccagtctgaccaacatggtgaatccctgactctactaaaaatacaaaaattagctgggcgtggtggtgggtgtctgtaaccccagctacttgggaggctgagacaggagaattgtttgaacccgggaggcagaggttgtagtgagccgagattgcaccactgcactcctgggtgg

SEQ ID NO: 10754 - DNA, 467 bp, Homo sapiens
  misc_feature (1)...(467): n = A,T,C or G
agtgggccngngtnnnaattggattcgatggcntaggccagngncgnggaattcatctaatttacccaaataaaaagtgtcaacccaatttttaattttaaaaattatttctatagctttatgaacttcagaaatttaaagggatgatggtgtggctgttgtattaggttgaggaagcatacatttatacaatgattctgtataacttaacatctgaacagcattcatgctttacatagggatttcaaattttattatactgatttatatagataccttgttgacaaagacaggaactttcattttatagatgagaaattaaattcagtagccagagatcatacagggatacagtggctaggctgaacccagaattttgtctcagagtgagagagactttgggaaagaagatttataatagacactgaaggtgatgtgggaggattttttaatgatttgccattgtt

SEQ ID NO: 10755 - DNA, 449 bp, Homo sapiens
  misc_feature (1)...(449): n = A,T,C or G
ttggtacggaaagcctacgcattttgaggncattggcagangccgggagaagcatgcaacagttactggattatccagaagatgacatagagtttacattttgtcttatttttacgatcacagttgaaaactttggtgcaacagaagtgaaagagctggttctaaatggtgcagacacagctgttaacaaacaaaatcggcaagagtttgtcgatgcttatgtggattacatattcaataaatcagtggcttccttatttgatgcttttcatgcgggctttcataaggtctgtggaggaaaagtccttctgctctttcagcctaatgaactacaagcaatggtcattggaaatacaaattatgattggaaggaactggaaaagaatacagaatacaaaggggaatattgggcagaacatcctacgataaaaattttttgggacgtattt

SEQ ID NO: 10756 - DNA, 454 bp, Homo sapiens
  misc_feature (1)...(454): n = A,T,C or G
gtgcgcattcctatggaancnctcantganagcgatcgaannnccaanacngnaaccaanggatatttatacagtaagcttattaatttagcttgagatcaattctgcttatagagaaagaaggtactggagtatatctctggcagaaatagtgctgaaaaaaatcccaaattcacataatattatatatatgacataatatattgataatattcaatccactatgcttttaatgctctcatcaaacagtatatagaatgctattcccatttataccatttatttttgttttgctatagaaggagtctaggcccgaataaagaaaaagccaaaaaatatcagggttattatggttgagaaatttgagtaatttatagctaattgcttggaaatcttcctaatttgtatttgataatccaaataaatgaaagtttagttaatctggaatggatag

SEQ ID NO: 10757 - DNA, 454 bp, Homo sapiens
  misc_feature (1)...(454): n = A,T,C or G
tcgcaaatgagacctttcgantantganagctctggcagngngccggaantctgccccagtagttctctggctacagggtgggccgggaggttcattcatgtttggactctttgtggaacatgggccttatgttgtcacaaggaacatgaccttgcgtgacagagacttcccctggaccacaacgctctccatgctttacattgacaatccagtgggcacaggcttcagttttactgatgatacccacggatatgcagtcaatgaggacgatgtagcacgggatttatacagtgcactaattcagtttttccagatatttcctgaatataaaaataatgacttttatgtcactggggagtcttatgcagggaaatatgtgccagccattgcacacctcatccattccctcaaccctgtgagagaggtgaagatcaacctgaacggaattgcttn

SEQ ID NO: 10758 - DNA, 490 bp, Homo sapiens
  misc_feature (1)...(490): n = A,T,C or G
tgggggtcnnnnnggggnnnnntttgtagatccctagtccagtgcggtggcattcgtgaggtcaggggccatgccattgctaaggacagtggctggctcaatacttcatccttcggtgaattaaagaaccaagtcagcagcttgggctggcagggccttagaagtcacccagcccaggctgacaccctgcacggcgcccccgagagctgagtgtccgtgtctgctcgcacactcctgttgcacccttcccaccgccatcccctgctcagtaaagttgggggggttcccgaattcaggtagggaccagagaggagtcacagaggacccctgaggactgtccccccaccccttgtgatttattttccgcccttcctctgctgcatcccgcccccctaccccaagctgttcttcctgctgttgttctcttgttttcacatgttgctctctgtttcctgtaaggctgcttcactcaggaaacgccatgcagcaa

SEQ ID NO: 10759 - DNA, 468 bp, Homo sapiens
  misc_feature (1)...(468): n = A,T,C or G
natagagattcgttggcagtgcggnggaattccccagtttcatctgttacctgacaaattaagaagggaaaggcttttgagacaaaactgtgctgatcagatagaagttgtttttagagctaatgctattgcaagcctttttgcttggactggagcacaagctatgtatcaaggattctggagtgaagcagatgttactcgaccttttgtctcccaggctgtgatcacagatggaaaatacttttcctttttctgctaccagctaaatactttggcactgactacacaagctgatcaaaataaccctcgtaaaaatatatgttggggtacacaaagtaagcctctttatgaaacaattgaggataatgatgtgaaaggttttaatgatgatgttctacttcagatagttcactttctactgaatagaccaaaagaagaaaaatcacagctgttggaaaactgaaaaag

SEQ ID NO: 10760 - DNA, 453 bp, Homo sapiens
  misc_feature (1)...(453): n = A,T,C or G
atcgcattcgtagacactagtccagngcggtggaattcgtactaattaccttttccttgatgtttgccaaatttgaataaaggcattggtacgaaattacagaatgtaaagaaaatgtttttggcttgaaaaattaacatattttatgacgtaccacagtatactctgcccaaaccagcaccctatctatctttcctgttctttacatccctgttccccatccctacttcctcatttttggtataacacagttcttttgtagcatcattataattgcagttctatggcaattggacagttatagcatggaaacagactggtataaatagtacagtagtcaccagtgtgccacatttgcattagtaatgcaaaatatacattttataaaggacaaactttgtgttatggtttattttcattacattgtataatattgtaagactattgtatgtc

SEQ ID NO: 10761 - DNA, 475 bp, Homo sapiens
  misc_feature (1)...(475): n = A,T,C or G
naatagaagnactganggncattacgccagngcggnggaattccattttcagagaattaggatctttgctgggaacttcctgcttgaagaaaactattattagccccctccagggtgggtgcagtcacagatagggaaactgaggacaaagacaagcagcaaaagcatcctgagaactgaaattgatcgccaccagcatctgactcagctggccttcttggcatccccagcaggccaagggttcaaaacgcattgtccctctttatgagaaatttggagacatggtaagtgtctgacaaaaggaccttgagaatcacagtgttatagaaacaggacacagcctagtgtcctgtgtttggagattccttcctctctggcctgctgcagagatgacctttcctccctcctctccaatttccagctgcaccttaaactctagagcccactcccttgttgaagtccccttttcagcatn

SEQ ID NO: 10762 - DNA, 462 bp, Homo sapiens
  misc_feature (1)...(462): n = A,T,C or G
ggggggggtnnnnttcgtcgaccctagtctcgtgtggcggaattcccttgtaaaaagaaatcctgttatgttgggaacaagccccccaaaatctggccataaactcaccccaaaactggccataaacaaaatctctgcagcactgtgacatgttagtgatggccataacacccacgctggaaggttgtgggtttatgggaatgagggcaaggaacacctggcctgcccagggtggaaaaccacttaaaggcgttcttaagctacaaacaatagcatgagcgatctgtgccttaaggacatgttcctgctgcagttaactagcccaatctattcctttaattcggcccatcccttcatttcccataagggatacttttagttaatttaatatctatagaaacaatgctaatgactggcttgctgttaataaatacatgggtaaatctctgttctgggctctca

SEQ ID NO: 10763 - DNA, 504 bp, Homo sapiens
  misc_feature (1)...(504): n = A,T,C or G
ggggcccgnnnnnccccccaattgatgtctatacttcgtgcggtggaattccttatttctcccaaagctctgaagtggacactgttgggaaacccaaacttgaaagtagttcagtggatgtctcatgctatactgtagaatagttgtttaaagatagctataatttgcaaagatgatcataaatataacattcatactaattacattgtgtctttttggaaaatggctataaaacagtcactgtctattgggtgcctattattattctttgattctctcaatgggcctaaagggtaattatggttacccttaccttccaaatgaggaaactgatacctataaatattgagtgaattacccaaggaaacttaggaagcaacggagtgaacattcaaatctaaatatgtctgattctgaagtctaagttcttttgaccatcttactacaaggatacatacaccacacgcacacacacgtgcacatgtgtgtgcataacacacactt

SEQ ID NO: 10764 - DNA, 477 bp, Homo sapiens
  misc_feature (1)...(477): n = A,T,C or G
ctggcctnnnttttgatcgcggtccataggccangcggnggaattccgcagggcaggggagccccgaagtggagcatagtgtgtccggaactggtgggttcttggtctcactgacttcaagaatgaagccgtggaccctcacgtctacaggtgtatccagcagctccagagagacagcgaccaccgagaaggggccatgatgacggtggcggttttgtcaaaaagaaaagggggatatgtagggaaaagagagagagatcagactgttactgtgtctacatagaaagggaagatataagagaatccattttgaaaaaggcctgtactttaaacaattgctttgctgagatgttgttaacgtgtagctttgccccagccactttgacccaacctgaagctcacaaaaacatgtgttgtatgaaatcaaggtttaagggatctagggctgtgcaggacgtgccttgttaacaagatgtn

SEQ ID NO: 10765 - DNA, 489 bp, Homo sapiens
  misc_feature (1)...(489): n = A,T,C or G
ggaatgtgaannagatnnnnnnnnctcgagaacctcctggagngccctagaacagcgcgggggaatgacagagctaggagcaagctcactaccctcattcaaaacctagtcctatctcatttgatagtaatcattgcttatgctagaaacctcagttgattttctcacttacactcccccacattgaaatgctctcaaagtccagcagcaaattctatcaattacatgtaagtttcattccatacatgtgtccggtgcctggtgggaggttcctatattaaagtcatctaccttccatccattgtctgccttacagccacagtttactcatctgtacaacgaaataacaccactttccttttcctatgcccaaatgagctaaggatgtgaaggtattttgcagaatatagagtgataaagaaaaataaggtgctattacactgtgtgagcatgccgcagaccacaactgcacttgttagactggaggct

SEQ ID NO: 10766 - DNA, 478 bp, Homo sapiens
  misc_feature (1)...(478): n = A,T,C or G
ggtgtttannagaannnnnncctgataacccatcgatgccctagaaanatcnggaaatgacttggggaggacacagcttcatcacagcctctcctgcgggccatctcgctgcgaaccctccaccagctaccggagggaggagggaggatgcgctgtggggttgtttttgccataagcgaactttgtgcctgtcctagaagtgaaaattgttcagtccaagaaactgatgttatttgatttatttaaaggctaaaatttgtttttttattctttgcacaattgtttcattgtttgacacttaatgcactcgtcatttgcatacgacagtagcattctgaccacacttgtacgctgtaacctcatctacttctgatgtttttaaaaaatgacttttaacaaggagagggaaaagaaacccactaaattttgctttgtttccttgaagaatgtggcaacactgttttgtgattttatttgn

SEQ ID NO: 10767 - DNA, 407 bp, Homo sapiens
gttctcagctctcctgctaaacccagtgtacaccctgatcttcttaccagcctaatgagtcctttgctttttattctttttgccattcctcctacatagtaggcacttgttattaaagtgtgataaatatatgcaccagctccaaataatactgagcccaacgacttccaccatgcatatgggcctgtgtgcttagtttttcaaaagagtacttgcttaattgtaggtactgcatcttcgtacacaggatgctttatatttcatgcttgctaagcagaaataactttaaatcttcaattttgaagttttatatttatgcagcttttattttatttttatttttattttttatttttgagacagtctcactcactttgttgcccaggctcgagtgcattgtcatgatc

SEQ ID NO: 10768 - DNA, 498 bp, Homo sapiens
  misc_feature (1)...(498): n = A,T,C or G
cccccccttggagacccttcccagatagaaggacttccatagagctacaggcaagagatgaagtggagttctcagtgattcttaatcagcgcactggcaagtgcagcgcctgtaatgtttggcgagtctgtgagggccccaaggctgttgcagctcctcgacctgatcggttggtcaatcgcttgaagaatatcactctggatgatgccagcgctcctcgcctaatggttcttcgtcagccaaggggaccagataactcaatggggtttggtgcagaaagaaagatccgtcaagctggtgtcattgactaaccacatccacaaagcacaccattaatccactatgatcaagttggggggaatctggtgaagggttctgaatatctccctcttcatccctcccgagatctggaatacttattctattgagctattacaccagntttaacaccttcctcgtgttatgcttactaaaataactaaatttaagaccaccatt

SEQ ID NO: 10769 - DNA, 414 bp, Homo sapiens
  misc_feature (1)...(414): n = A,T,C or G
ctctcccacatccccgaggataaagaccaccaggtccgaaagctggccacccagttgctggtggacctggcagagggctgccacacacaccacttcaacagcctgctggacatcatcgagaaggtgagagccgttgtacccggggccgggtgctagcgtgccagagctccgtgggcagcaatggcctctgggccctctgtcctcctcttcgagtgaccggatggctgtgtccgtaggtgaggctcccctccctgcagggtgggtgtcccgaggcctgtgcagggcctgccactgctggatttgtgtcctgactgaaagntcctggacatgggtgtcctgtcacactctgggacagctgggctgggcctcctggaccgacgctggagcccagacctggggctggggctntggcct

SEQ ID NO: 10770 - DNA, 443 bp, Homo sapiens
  misc_feature (1)...(443): n = A,T,C or G
gtttgaagaccataggatgaccattggaaagngcacgagcaagctctcacgattaaggcacgcctgcctcgattgtccagcctctgccataagaaagtttatcagccagcgcctcaatagagacctaagggcgctgaatgagtgggaaagggaaatgccgaccaattgcgctgcggcgggctgtgccactacctacaacaagcacattaacatcagcttccacaggtttcctttggatcctaaaagaagaaaagaatgggttcgcctggttaggcgcaaaaattttgtgccaggaaaacacacttttctttgttcaaagcactttgaagcctgctgttttgacctaacaggacgaactcgacgacttaaaatggatgctgctccaaccatttttgatttttgtacccatataaagcctatgaaactcaagtcaaggaatcttt

SEQ ID NO: 10771 - DNA, 552 bp, Homo sapiens
  misc_feature (1)...(552): n = A,T,C or G
gganaaccaancctttgannccccnctcgatgcacatctcgtgnggngcaattcgaagngatgaagcgaatccagagcctgctggacatccaggagaaggagattgagaagattatatttgcaattgttatgatgggccgacaccagtacataaatgaagacgagtatgaagtaaatttgaaagactttgagccacagcccgagaatatgtctcatcctcggccttggctagggctcgaccacttcaacaaagccccaaagaggagtcgctacacttaccttgaaaaggccattaaaatccataactgatttccaagctggtgtgttcaaagcgaggacggtgtgtgggtggccccttaacagcctataactttggtgcacgtgccctctagccgaagtcttcagcaagaggattcgctgctggcgataattttattttattgaggctgctcagattggcttctctgtatctattgactgacctttttgagcaaaatgaagatgtttttataaagcttggatgccaatgagagttattntatggtaaccacn

SEQ ID NO: 10772 - DNA, 471 bp, Homo sapiens
  misc_feature (1)...(471): n = A,T,C or G
natcgagactgatagaccttagtccagngcggnggaattccttgaagactgcattaatgtgtcttttgccttcatcccccccccaccctcccgctttctctagtccttgtgtttaccaaaatacttttgctaaaacctgtatgtctagcttctgctgatactcttagcaatactcccttatttccttctggcgccatttgccaatcaccagctaatggctttgctctttgcatggtacctgtttctgtcctactagcttctagtctgaaaaggaagcctttactagcagcttcaacccagtcctccttaccttgcacctattaacgttggttcaacatgaaggggaagtaagataagtggaagaggatacacaggaaaggtggaactggattcaggtatctgtgttctgccattgacacttgggactgcgttccagcttccacctgtggaaaccagaaagcatttgccaan

SEQ ID NO: 10773 - DNA, 451 bp, Homo sapiens
  misc_feature (1)...(451): n = A,T,C or G
nttttntttgtagaccacttgtacagtccggtggaattcctcttttttatactgaacttgaattttgtctttagctgtatctttgcataaaactgaaattgtttctaagttctttaaaagatatcactaaggaaagttaagattcagtgtaaaaaaacaaatttcagacttactatttgggaaagatcattaaatctagttgtttgtttaatggattataattctgatggtataaattttcagcatcttgttaccttggtgagttcatggctttgaggtgactggaaacatggtgttgtctgtttgaataatggaatttctgcaacttattttacatacacagcctcttaagtctgccactgatggaggttatttatggatctgtttctgatccaaagtcttgcagagggagattttcccttggagcataggctggccaaaatatttagat

SEQ ID NO: 10774 - DNA, 470 bp, Homo sapiens
  misc_feature (1)...(470): n = A,T,C or G
ntttgtcgactctagtccagtgtggggaattcgttaaattaagaaacccaatatctgaacagaccaataacaagtaactacattgaagctgtaataaaactctgccagtaatgaaaaccctaggacctgatttttatcaaactgctgaattttatcaaacatttagagaactaataccaatcctacttaaactattccaaaaaatagaggagaagggaatactttcaaactcattctatgaggccagtgttaccctgatatgaaaactagaaaaagacacattttaaaaggaaaatgacaggccaatatttctgatgtatattgatgcaaaaatactcaacaaaatactagcaaagcaaattcaacaatacgttagaaagatcattcatcatgaccaagtgagatttatcccagggatgtaaggatggttcaacatataccaatcaataaatgtaatacatatcaacaga

SEQ ID NO: 10775 - DNA, 498 bp, Homo sapiens
  misc_feature (1)...(498): n = A,T,C or G
aatcgatacccctcgcagnggctttgatanccntactccaggngccggaattcggcatttgcggaatcgatgaatttgataagatggggaattttcatcaagccttgccggtttccatggagcagcaaagtattagtcttgctaaggctggggtggtttgtaaccttcctgcaagaacttacattattgctgctgcttatccagttggaggacattacaataaagccaaaacagtttctgagaatttaaaaatggggagggcactactatacagatttgatttggtctttatcctgtgagatactccaaatgagcatcatgatcacttactctctgaacatgtgattgcaataagagctggaaagcagagaaccattagcagcgccacagtagctcgtatgaatagtcaagattcaaatacttccgtacttgaagtagtttctgagaagccattatcataaagactaaaggtggttcctggagaaacaatagatccca

SEQ ID NO: 10776 - DNA, 404 bp, Homo sapiens
ctatgttacacgtgatgacttaaaatgcttgagactaaggggagggatgctgtgcacactgtggaaggctatcattgactttcgaaacaaacagacttgactgttgctcaatctaatcttcgatggaaattctaaaaattaatacagagctgatcttcttgggggtgggaaaatcgaagggagaggagaaaggcgctgcactttaaatccagtatttgtttactcatgttaaaaaaaaaaaaaacagacaaacccccctgaaatttcctaactacatctatttctataatttttaaggactcttcataaggactcttaaaataatcctgaacattaaaaccctaatgttcaggaaaattttaatctaagcatttttatggaaatatttttaatgcagcagctat

SEQ ID NO: 10777 - DNA, 483 bp, Homo sapiens
  misc_feature (1)...(483): n = A,T,C or G
nttttgagaccactaggccagngcgcgtttgattacattatagacaatgaaaacagagttcctacatgtgaagaggtcatgccacctcagaacctggaaagggcagatgaaatttgcattgctggctcccctttgactcccagaagggtgactgaagttcgtgctgatactggaggacttggaaggagcataacatctccaaccacattatacgataggtacagctccccaccagccagcactaccagaaggcggctatttgttgagaatgatagcccctctgatggagggacgcctgggcgcatgcccccacagcccctagtcaatgctgtccctgtgcagaatgtatctggggagactgtttctgtcacaccagttcctggacagactttggtcaccatggcaaccgccactgtcacagccaacaatgggcaaacggtaaccattcctgtgcaaggtattgccaatgaaaatggagggata

SEQ ID NO: 10778 - DNA, 468 bp, Homo sapiens
attgagacggtagaccatagtcagtgtggtggaattcctgtcaagccagggtgaaggatccgtggccaggcagaggtctgtggagtggagaggcgaggcctcacggtggaactctcagatgacagcatgcaggcaccaagagagtggacgcacatacagaagacagccatgcactgagctggggacatgcaacaataacaggtgagttccaacaaattggttcaaaaagaggggggataaacacgctggcccatgctgggcaagcatggcaccaccttccaggcactgtcttcttctgatcagcactctgggtgtctttgcacttaactgcttcaccaaaggtcagaagaacagcacgctcatcttcacaagggaaaacaccattcggaactgcagctgttctgcggacatccgggattgtgactacagtttggccaacctgatgtgcaactgtaaaaccgtcctgcc

SEQ ID NO: 10779 - DNA, 552 bp, Homo sapiens
  misc_feature (1)...(552): n = A,T,C or G
gtggaattcgaccactatccacgnggngcaattcgatatgctgacccctctgctcctcaggctgtcggctggcctgctgcgtcaggccacctacaccactacccgccttggcatctataccgtgctgtttgagcgcctgactggggctgatggtactccccctggctttctgctgaaggctgtgattggcatgaccgcaggtgccactggtgcctttgtgggaacaccagccgaagtggctcttatccgcatgactgccgatggccggcttccagctgaccagcgccgtggctacaaaaatgtgtttaacgccctgattcgaatcacccgggaagagggtgtcctcacactgtggcggngctgcatccctaccatggctcgggccgtcgtcgtcaatgctggccagctcgcctcctactcccaatccaagcagttcttactggactcaggctacttctctgacaacatcttgtgccacttctgtgccagcattgatcagcggtcttgcaccactggctgcctcatgccctgtgacatgccagaccccgatcn

SEQ ID NO: 10780 - DNA, 556 bp, Homo sapiens
  misc_feature (1)...(556): n = A,T,C or G
gttcgaattacgagtcccgcgtggngcaattccaatgttctgtttgtagaactcatagtattcacttatagtgctcatgtcaggaatggcaagtgagtaagagcccctgataatctgcttttgttagaacgtaatgcaaagataataaaacatgtccacttcttttctagttctaatcagtttttagacatcaagatttatttactttgcatgagatttgtttcctattatttgaatatgtgctatacacttgaattagaaaaacctgcttgaatgtattgtcagttattaaagcacatgtgactaagtttgcatttgtcagtattgttctactgtttgtactgaaagtctcattttaaaattgctacttaacactgtactataccttggaattntttagattctccacttggattctttanatgtttccagatgcctttagttntagctgctgtaaaatagctactttgcgttagttgatatagaaatgttttttaaaaactccatttatttatacagagacccattatatattntacanacattcttatatccg

SEQ ID NO: 10781 - DNA, 419 bp, Homo sapiens
ctgtaatcccagctactcaggaggctgaggcaggagaattgcttgaacccaggaggcagtggaggttgtagtgagccaggatcgcaccactgcactctagtctgggcaacagcgagaccctgccttaaaccaaaaaaacaaaaaactggaaaactcaaagtgattgcttacctgtgtctctagtggaactggttcttccttggtgagggtaggaggttcatcagcaacttccgaggagggcagggagggctctgaaaaggcagtagggtcggcctgagggcagggctcccctgaggcctggacctgggggagcttccttagagctgtgtggaggtggcttggtgaggaggggagaatactggcctgagaagcaaacattcattcagggcccagctggaccaggtcacagccaagaatgg

SEQ ID NO: 10782 - DNA, 495 bp, Homo sapiens
  misc_feature (1)...(495): n = A,T,C or G
ncaagcatggcccgcccnnatagagaactgagagccgtgcgcgagaancnncnaagttggctgtgacatgagccacgatatggatgcgtgaccaatactttggactctctcaatgctggccctctgcggttcatggctctcctccctttctcgctgtcaccagccacgtttaggtcagtctttgtttttggctgttgttcctgaagacgcatttatcaggtggatctcttaaaatcagggttagggattggaagtctagctgggacaattcctgtgaagacagacttccttctgatgaaatatttactagcttttgtaggaagccatctcctcctctttgctgtgataagaggtactccccacctttctgtctcatggcaagggtggaaactgatgatatttgtagggcatactggggtgagccaacaggctggaggcagccaaccctgggcatgcaaagaagcaccgtttggaagctctggtgtagctctcgtg

SEQ ID NO: 10783 - DNA, 443 bp, Homo sapiens
  misc_feature (1)...(443): n = A,T,C or G
nttgangaccnnttgnntttgaagtcccatagtccatgtggtggaattcgtcagtttagagactaaccttgagaacagacttgctatcagtgccgtggtgggaacctgactgattttgctgtatttcctttttgccacaaggccagcctttgacattgtgtgtgtctgagtacttactaatatttatttcatgtagttggaattttaggattagaagtgacttgcgtagttgttttccaaacttctcaattcacaaatgccaaagtatcctaaaagaagatataaattatgttagacctacaacttctcatatctgcagcatcagagcatgtgaagtgcaaagccatgtagaacctttgaaatcagctctcttttccttttttttcttacagtgagttttagttagacatgctgtgctgacattctgcatggntgtggctttg

SEQ ID NO: 10784 - DNA, 446 bp, Homo sapiens
  misc_feature (1)...(446): n = A,T,C or G
gattgaaaaccntattgatgactcttagacagtgtggtggaattcgacacagtaatgctgatgccaggtctctctgcctgcgtccgggactgtgttgccttccttcaggcagtggtcctgggggatcccagtccagcagcacagtgtcaagatacctggacactagcagcatccgctgatggtacctgcaagggtacataagactcctctggcccttgctgtacattttcagactagcacaccatcgccctggaatgaaggagaatttcagctgattatttttattttgggaacacatacacatatacacacacttcccacagaggttttcaattttacaaaaagcccactcaattgggagactgtgtgcattctaataaggcaggacacctgggtgcttcatctgaagtttgtcaccacatatgggatccttgggcaagctgctg

SEQ ID NO: 10785 - DNA, 440 bp, Homo sapiens
  misc_feature (1)...(440): n = A,T,C or G
natgaagacccnctgaangcgtcggaannccagnggccgcaaggacccggacctcagggaggcctccgcacgaagtcggaccgtcctgcgcgccgcctaagtccaggcttgcccgtctgctgccaggcaacaacgcccctagtctctccgttcgggaagacgcgtggccctgcctgccacccaccggaagtgagggcaaatggcaacagcggctctggaattctatacaggcattgctgaggacacctaagatgacgcaatctccgcgcgggtagggcggggctccgcaaggacctcatgccttagagatcgcctgaagagcggaagccttctgtcgagaagcagctacccaagctccaggagcttccgaaacaggaccagagagggaaggtgacctgaaagtcacagaataattttttagagctgaacaagaatccaag

SEQ ID NO: 10786 - DNA, 457 bp, Homo sapiens
  misc_feature (1)...(457): n = A,T,C or G
cgggtgggccccgatggaaaacctaactgatgatattagacagncnggnggaattcgaatgtgacaaatatgccctgcagtcacagcagagatggaaagctgctaatgatgctggctactttaatgatgaaatggcaccaattgaagtgaagacaaagaaaggaaaacagacaatgcaggtagacgagcatgctcggccccaaaccaccctggaacagttacagaaacttcctccagtattcaagaaagatggaactgttactgcagggaatgcatcgggtgtagctgatggtgctggagctgttatcatagctagtgaagatgctgttaagaaacataacttcacaccactggcaagaattgtgggctactttgtatctggatgtgatccctctatcatgggtattggtcctgtccctgctatcagtggggcactgaagaaagcaggactgagtct

SEQ ID NO: 10787 - DNA, 481 bp, Homo sapiens
  misc_feature (1)...(481): n = A,T,C or G
atatcgaagctctccgcannnncntaagataccctcgaacgnnccgnacnccaaagtgctacgattatagtcatgagccaccatggtttgactgtatgaagattttatcaaaatcccaagtaaattgcaggccaggcacggcaggctgggagtacaggtgcacgctgccatgcgcagctaatttttgttttttgagacggagtctcgctctgtcacccaggctggagtgcagtggcaccatcttggctcactgcaagctccgcctcctgggttcatgccattctcctccctcagcctccccagtagctgggactacaggcacccatcaccacgcccagcaattttttttttgtattttttagtagaaaagaaatggggtttcactgtgctagacaggagggtctcaatctcctgacctagngatctgcccgccttggcctcccgaagtgctgagattacaggcgggagccaccgcgcccaa

SEQ ID NO: 10788 - DNA, 459 bp, Homo sapiens
  misc_feature (1)...(459): n = A,T,C or G
acgggnnaatcgttttcactacccctaggccagggaggtgcaatcaaagcatgcatgcttatcttgttcctgaccttagggaaatgtatctagtctttcactgttaggtataatgttagctgtgagtgtccttaaatatcttttgtcagggtggaaaaatttttttctatttcaagtttgttgaaataatgataatttacatcatttatgtaccatttatttccatcatatgcatttgaaataatttgtataatttaaaagttctacaaggatttaccaaaggtgaactgaaggcatgtggtgtctgtctatagccattagaaatggtaacagaggtgtactctacatgatgcacaaatgtgatatgtctttttggtgaagagcacgtgatgaaaacagtaaataactgagaatagcacaaagctactagggactcagatgattcanatattgaagact

SEQ ID NO: 10789 - DNA, 486 bp, Homo sapiens
  misc_feature (1)...(486): n = A,T,C or G
gcggtagccnnaactgagaccanattgcgagtcgtggaaancgcagaaggaaaaatagcttttatcaatttttttctcctcaagattctgtaataaacctcaaagtctggtgtagaatggtattttcccgtttgaggtcttggtagttttttttttttttaaaacaggggccccctttaaataaactaaaggtaacaaaattctcaccatttgtttttgccgggaagaataatggagtctttccatccccttctaaaaaggggaaaatctatgttttcagaataataacagaatctgcaaaacctataaaaaaatgcttggcccaaattggctgttaataaagggacccaaaatgccagttttgtatgggggatatgtttaacataaataaaactcattaaaaagtttggtccaagtcctgcttttttttttatggggaaattgatttttaaggagcgattcttttcctatataaaagctatggag

SEQ ID NO: 10790 - DNA, 455 bp, Homo sapiens
  misc_feature (1)...(455): n = A,T,C or G
cggtcaaatgattcatngcatgngcgangcaagtcgacagagaggaccaggatgccatgaaaaataaccttggctagaaataggtcattttatttttggctaattggcaactctacagtttttgatatacaatgttcaatctgatgtgcaaggcaattgtatctcgcaaagaatttgagaatttgaaatgtcgcacacattttaccacacaaacaagtgaattaaacttttacagaatactaaaaaagcattgctgagcaaaataaattaaatgaaaagacataaaggaataactagtgacgaaatagcaataagaacggaaaacatgaaagagctgcttttaaagcaatgttagaagcacaaaataactgcattnttcagaatcgtactggagttcaaatcacttctaccacatctaatttaaaaacatagtgaaagatgttaaacggatcatg

SEQ ID NO: 10791 - DNA, 452 bp, Homo sapiens
  misc_feature (1)...(452): n = A,T,C or G
cctagaacatagatnaccatagcaccgngcggnggaattcgattaccggtttcctcctatagaaaccagggaaagcattagtagacctccccctgtggatgttagagatgtggttgggcggcctatagatccaagagaaggtcctggacggcctccactagatggtagggatcattttggaagacctcctgtagatataagagagaatcttgtgaggccaggtatagatcatcttggtcgaagagaccactttggctttaatccagagaagccctgggggcatagaggagattttgatgagagagagcatcgggttctaccggtctatggtggtccaaaaggcttacatgaagaaagaggtagatttcggtctggaaactatcgatttgatcctagaagtggtccttggaaccgaggatttggacaagaagttcacagagattttgatgacn

SEQ ID NO: 10792 - DNA, 446 bp, Homo sapiens
  misc_feature (1)...(446): n = A,T,C or G
aaaattagaggaccactagnntttgacgacccctatnccatgtggtggaattcgcaggacggtgttgtctgggtaaaatgtcacggtgggcggttgcctcttctgccagatgctggaacctgggaagggcctgctgtcttcctaacccctctcttccctcatcccctcctccttggccccagttccctggtaactttccctttcctttgaagggcacgaccagttcaagcggcgcctcccctctggccagatgcggcagctgtgcattgccatgggtagacctggggtgggggtagggctgttttgccaatcagtgcctgccggctccggttgactgccggctgtggggccagaaagattctatgtgcatggcttccccatgtaattccagtaattgcccgctcttgtgtcttctgagatagcagcagagcacaggctcctttggc

SEQ ID NO: 10793 - DNA, 444 bp, Homo sapiens
  misc_feature (1)...(444): n = A,T,C or G
cactgagnccccattgcatgatctcagacagncnggtggaattccttgggagttgggggccagagttgagcctggacttgaccaattaattcccttacctttcagcccaagatagctacatgtctttacttgctgtataagttttccttttgtcctgggggtgcctgattgatcctatctcttcacccttcattctttcaacaaacatgccatctatctcccaggacatttattcccttctattcaaggccagttaggaatgcaattattttttttttcagttaaatacagacttgtttggacgcaaggtaccctttctctttttaaaaactttttatcatgaaaactttcaaatacaaaaataaaatggtagagtgaacctccatgtacccagcatccagctccagtaaccatcaatgtgtaccattatttcatctctcttcc

SEQ ID NO: 10794 - DNA, 470 bp, Homo sapiens
  misc_feature (1)...(470): n = A,T,C or G
natagagaccttagnnnnnncnnntatagatgatccttagtccatgtggtggaattcgtggaagggaaaaagaagaaaaaagaggcagtgtttgataataatctagaagcaattaaaagatagcaaagggaaacatgatttttgagaaataacctaaaatggtaactaaaagtaatgaataagattacataaaggaaaatgtatctgatacaaggagaaaatgccctaatcatgaagtctgcattatttcctcaaaaagaagcggtagctgcttctctcttcaaagtttttgtttttaaaatagactggacagatcacctgagagccatcttggttgatgacactatttacatacatgtgtgtgtgtatatcttttcccccatgtccaacctggtacttatgtattactacttttacaatctaagactgttagtattagtatatgataaaaatgcactttaagctagctt

SEQ ID NO: 10795 - DNA, 481 bp, Homo sapiens
  misc_feature (1)...(481): n = A,T,C or G
nctgattcctatcagttggaggacctccagatattctaaaacatctccagtcttgcttttttcccctttagctcataaatgaatagtgctggaagatatctcaggagcattctccctgagatgatgtcttcagtaatgatcgcacgtattggtgttgattccatccttgaagttactttcctttatctttcacagtggtgtttcttcactagaggttttgctgtctgattaacttctctgccaaataaatggacttttgcttcataggtacacaagcatttctaaaactttttttggaaaatatatttctttcttaaaaaaacaaatagtgcatgcacatttttaaaaaaataaataaaaaataatctaccccaaaatgaccagttaagatttactttcagacaactctgtgcatatttacatatgcttatatacaactatgtacacctttgcatagatgagatcacactctatgtactgg

SEQ ID NO: 10796 - DNA, 452 bp, Homo sapiens
  misc_feature (1)...(452): n = A,T,C or G
ntttgattgtagatnacttgtacagtctggtggaattcgtggcacgcacttgggaggctgaggtgggaggatcgcttgagcccaggagattgaggctgcagtgagccgtgtttgtgccactgcacttcagcctaagtgacagagaaagaccctatttcaaaggaaaagaaaaagaagtgaaggccctgtagagagcgtcctagtgtctaagctgacctggccccaagcgctgctcgaggggtgcttctgtgacggcgcagcatgtgtgcccaggcctggttcctcacggccaggcccatcatcactcactggctttttccttcctcgtgttagattggagctggagggagcatcactgggctgaagtttaaccctctcaataccaaccagttttacgcctcctcaatggagggaacaactaggctgcaagactttaaaggcaacattctacg

SEQ ID NO: 10797 - DNA, 499 bp, Homo sapiens
  misc_feature (1)...(499): n = A,T,C or G
ggcagcagggcccgncccccctagataactaagangcntcngcagngnccnggaancatggcacccagcaaccatcccctaggagaacaggcaaggaccctcgtgggaagatcccaccacagcaacacctttcttcaaggcgggctctgctccgcaatgtgtgagtcaagacaatccattccattcaagaccaatttactctcaaattttgccaacacagaaatattatccttaaagaaatgtgcatttaaatcttttaattcacttcatcctgtattttaaaataaatgttttccatatagattttccccttgggggggaaaagaattcagggtcttaggttccaggcagttcaaaaacagccacgcggttcttttttctccaccagaataccacaatagcagaacttaagaatcgggatatgaaaagggaggcgtggtcctggcagtggcccctggccggcaggaatacacagcaacacccaggcaggggcagcggg

SEQ ID NO: 10798 - DNA, 417 bp, Homo sapiens
gactaaatgatttttaagtcccttccactctactatatcacaataatttcccctattttaccttatttaattttcacaacaaccctgcagcctgtaagtaggtgactcctccatggtcagcaggtggtcagtggtcgaactatttaggactatctgatgctctttcctctgctcaccattgcaatacaatgagaaaaatgcaaatgaatctaagtacagtgttctctgggaatatgaagatagaactaaaaactgcctgagagatcagggcaggcttctagaaagttgtgtctaactagtcttgaggtttacataaaccacaccaggctgatgggactgggaagggcccactaagcagtgagaccattcccttttggagagtccttgcatcccctcccagatttcctctttgagggg

SEQ ID NO: 10799 - DNA, 460 bp, Homo sapiens
  misc_feature (1)...(460): n = A,T,C or G
ntagagatcgtaggccatgcggnggaactcgnggggacggcggcaacatgtctgtggctttcgcggccccgaggcagcgaggcaagggggagatcactcccgctgcgattcagaagatgttggatgacaataaccatcttattcagtgtataatggactctcagaataaaggaaagacctcagagtgttctcagtatcagcagatgttgcacacaaacttggtataccttgctacaatagcagattctaatcaaaatatgcagtctcttttaccagcaccacccacacagaatatgcctatgggtcctggagggatgaatcagagcggccctcccccacctccacgctctcacaacatgccttcagatggaatggtaggtgggggtcctcctgcaccgcacatgcagaaccagatgaacggccagatgcctgggcctaaccatatgcctatgcagggacn

SEQ ID NO: 10800 - DNA, 466 bp, Homo sapiens
  misc_feature (1)...(466): n = A,T,C or G
ngagcgggnnnnntnnnaatagatgatcgtagtccagtgcggaggaactcgtctgtccgcctcggcctcccaaagtgctgggattacaggtgtgagccaccatgcccggccctgctggaatctttgacttaaagttccactgtggcttgaggctggagttggaacgttatctcttaggcagagctttactgggtcccttctctcttcattcacagggggccctccctttagatctctgtctattcagacaggcggccctttctcagatgggatatagacagatgatcttttgaaataagtgagaagatttttaagattagaataatatgaagaatatctttctggccgggcgacgtggcttatgtctgtaatcccagcactttgggaggctgaggtgaggggattgcttgaacccaggagttcaagaccagcctgggcaacatggcgagaccctgtctcgaagaaa

SEQ ID NO: 10801 - DNA, 446 bp, Homo sapiens
  misc_feature (1)...(446): n = A,T,C or G
taaaattttgacgnacccctagtcctgtgtggtcgaattcgacagacagtggcactcctggtcctgctgtcttggttttgtcttggctctgggaggactctgaggggcagtgctcagttcagacaagggggaactgaaggctgacaagttctgaggattacagctctgcccaggccctttctactttccctgcctgcctccctccccctgctagaagtagtttctgatttccctgaatgaaagatagtgatcttttaggccttcatatatcttctaaaattcctcatctcaaggccaccagtccccagatatcacccttggaaatcctctgtttagcttaactgcacaaaaggtagtatgtccagtggctaaaggtggggtgggaagagaggaggccaggccaggccctcaggaattccctggtttgcactgtgccacccacttgn

SEQ ID NO: 10802 - DNA, 482 bp, Homo sapiens
  misc_feature (1)...(482): n = A,T,C or G
ggagcggtnnnnnnaactgtanactgagaacntgcgaagangcgtggaanntccatgccgaggtctctggggaggagtctctgtcctttagtggtcaaaatgttagagagtaacatgaagttgttctcaggaagagtggtgccagcccaggggaaagaaacctttgaaaactggctgatccaagtcaatgaggtcctgccagattggagtatgtctgaggaggaaaaactcaagcgcttgatgaaaacacttaggggccctgcccgggaggtcatgcgtttgcttcaggcggccaaccccaacctaagtgtagcatatttcttgcgggcaatgaaattggagtttggggagtctgaaagcagtgtgactgcccatggtaaattttttaacaccctgcaggcacaaggggagacagcctccctttatgtgatccgatcagaggtgcacctccagaatgctattcaggcaggcatcctagctgt

SEQ ID NO: 10803 - DNA, 478 bp, Homo sapiens
  misc_feature (1)...(478): n = A,T,C or G
ggagcggggnnnnnnactgagaccctgagaacctgcaggaancctttgaggaataaaatggaattatttataaagttttcatttgtattagagagagccatttttaaaatttcacattcaatttgtaacattctagaagacagattatcttctttctgtatactgtgtgcagtaggtatttaataaaatattaacagaaatgtaaaacagtgatttctcatagggctacttatacctttgtattttggttaatgatgataacacttgtcaaagggccctaggattaactttttcccgtaaacccccttattttgtgtttttaataagttaaagggccataatttctttttcagtctttttaatggatctcattatttagacgttttatataaaatgacagcagatgaccaaagatacagtggatcaacttacctgtctgatcctcgtcttacagcgaatggtttcaagataaaattgg

SEQ ID NO: 10804 - DNA, 462 bp, Homo sapiens
  misc_feature (1)...(462): n = A,T,C or G
attgagaccttagtccgngcggnggtagaccggcactgctttcatttaattgggctttaggcactccattcgaatgcagaacctcacctctagttgagaccaagaattggcaaatttgcatgagctcctggaaagagttgctgactttgtatctaagacctgccagggaataccaagagttgtttctacagacttttttttttttttggtggggaaaaaaatctggggccccccgggagggagggaaaaaaaaattttttttttttccgcaaattaaggggggggagccccccccacccttggggtttttaagggtcaaaaaccagggcctagggaaaattcccaggggagaattttgggggacttttttggttaccttgggggtcccgaacaaagaattcccattaagggaccggctttaatattaaaacccccggtttggcccccttttttggcttaacg

SEQ ID NO: 10805 - DNA, 450 bp, Homo sapiens
  misc_feature (1)...(450): n = A,T,C or G
ctagacatcgagacntctaggccgagcggtggaattcgacggtccccttggaggaatggtctttgcatctgactacttccttctgcaactgtgttcttccattagcttccatgacactctcctgctttatttttttctacatctctagcctttgctgtttcctctcctaccccacctttagattttactcagagttcagtctccagccctacaatctgagggacacctttaccaggtccccttcctaaccctccagtcccaaatccaagattctttaaccacactctaaaagttcttcagactcaggacttaaacatagccacgccaccttggccttcaatgacagggatctagcaatgctgcatcatcagccttccaataccaggtttaagggtattttaaacacagctcctcttaaatcctccaatctcagtacccagtgttttagcn

SEQ ID NO: 10806 - DNA, 436 bp, Homo sapiens
  misc_feature (1)...(436): n = A,T,C or G
ttcacaggtaataaaatattacaaggcaaatggaggcagggtgagatcacaggactggggtgaaattaaaattgctaatgaagtttcgggcatgcattgtcattgataacatcttatcaggagacagggtttgagagcagacaaccggtctgatcaaaatttattaggtgggaatttcctcatcctaataagcctgggagcgctacgcgagaccggggcttatttcttcccttatctacaactgtaaaagacagacattcccagagcagccatttcagagacctcctcctaggaatgcattctctttctcagggctatttcttgctgagaaaatgaattcagtgatatttctcctatttgcttttgaaaaaagagaaatatggctttgttctgcccagctttcaggcagccagacctaatggttgtctcccttgtn

SEQ ID NO: 10807 - DNA, 457 bp, Homo sapiens
  misc_feature (1)...(457): n = A,T,C or G
cccccaagaagaccattgnatagaggacccttagtccatgtggtggaattcggagaagaccccaccccccaccccatacttcccgcccctcctccattcatccacgcacgagagcctcctaattacctcattctgagctccttgctttggttaattcgtttaatcaaaccacaacacagagatgaggaaactgaggcataggaaggctaagcgcatttctggagctcactcagtgacccaggagtcagccctgcgtgccctggctcaagagctcaaggtgtaaccactgcacagctctaccccacagaaggtgccggacgccgcttcctgccctgatagagctcctggtccagtggggagctgggtgctgatgggtggttggagccgtgatggggaacactcaggtggtgcaggtcctcaagaaagacacaggtggccctaggggagtcccagaagg

SEQ ID NO: 10808 - DNA, 487 bp, Homo sapiens
  misc_feature (1)...(487): n = A,T,C or G
cggggnnnnnagggagggcccagggggattaatccgaaaccctgcatgtagtctcgaagnggcnggaannnccagagnggagattcccggnctcatccagtgcaggtgagggggaaagtgatttgtccacagttacatggctaccatcagcacacctgggtcaagctcgattccactccacggcccctgtctgaaacctggaactggaaatggccctggaaatcactgattccatctgccgccttccaaaatggcccgcagaggttaagatatagactcctgtaatgccttgcccactcgtgtgtggggaaatggcagaggagcaccggctttgccctcacactgcctgggctgccgcccctgccctgcctagtggctttcctctctggtccgttttctcattgtggaagtgggcacaattcttcctgtgcagcgtggttagagtggacagtgatgattcgtgaagcaaggtggagcgcctggngga

SEQ ID NO: 10809 - DNA, 485 bp, Homo sapiens
  misc_feature (1)...(485): n = A,T,C or G
tgggatccngnattgagaccttatcaggcgttgaattctatcattccagcacgccaaaattgaagaagaacaaaaaaaatggaaacccagttcaggagtcccctcaacatcagatgattcaagacgcccaaggataaagaaaagcacatatttcagtgatgaggaagaacttagtgattaaaatcttgccccagcacagtaataaaaatcaagatttgttagtaacaatcttgaagagctaattttaataaaaataagaaaaattaatactatcatgttaatactattattgtcatcccaagaaaaaagatattttaaaaatttatttgaaaagttcattataagggctttattcatgcctgatttgtttacatgaggacttctgaaattaatccttaaaacaaacttcctgaagaccgaaaagttgaatgatttattgttacttatattaataaacttttcaagagaattttgtctttaaaaan

SEQ ID NO: 10810 - DNA, 415 bp, Homo sapiens
ccgaggtcgagttccaagtcggagacagattttgcgagtggataagacgatggaagatggtaccccaaagcatatcatccagatgacaggatttaagatggaagaaaaagaagcgctagtcaaattactttaaaactagattgcacttttattaagagtgagaaatacaaaaattgtacacatcttatagctgaacgcctatgtaagagtgaaaaatttttagcagcttgtgcggcaggaaagtggatactaaccaaggactatataattcatagtgccaaaagtggcagatggcttgatgaaacaacttatgaatggggatataaaattgaaaaagattcccgttattcacctcaaatgcaatctgcacctaaaagatggcgtgaagaactgaaacgcactggtgctccaggag

SEQ ID NO: 10811 - DNA, 461 bp, Homo sapiens
aatcgagaccactagtccagtcgagtgccattcgaggagacgggagcggtgactacacacacacacacacacacacacacacacacacaaacgtgcacacacacatatgcatatcttgacattgctctgtaggagagagaggaccatgacgcccacgtttgcagctgatacttgtttgggcacacctccaagttctcgggattagaaggacaagagcactcccaggccccagagtctaagcctaagtctctatcgctcttcccctctcctcggccactccccagataccagacctgaggcaattcacttgccagcacagatggccaacccacctccagattccccagtgcttccacacccggtctctgagcaaatggaaaagactttttatttagtagacaattcacttctttttgtgtgcttcccctatctgctgtggcttcctaataagaaatccattc

SEQ ID NO: 10812 - DNA, 467 bp, Homo sapiens
  misc_feature (1)...(467): n = A,T,C or G
tgggggcccttttttggaagccatcgagactgataccatcgtagagngcaagaaaactcttaattattccctgctacgtacacgcagctgaaatctttatcactattatggggttctttacaagagactctgagctggaactaaacacacaccataaaactaaaagcacactttacccctaacctataaccacagagtcaatcaggaaacttatgatcagtttataaagcacttgcaaggtgtccaggctgacagggaacattaactgggagagctgggttaagtatactgtatttttttttaacttgaagcttgtgaatggaaagatgatagctctgtcttattactatatttaatttacttgaagcaacattggaccagtatttacctatataattagtaaattaatttctccagaaaagtatttttcattataaaaaaatttagagaaatagtattcttgagaa

SEQ ID NO: 10813 - DNA, 482 bp, Homo sapiens
  misc_feature (1)...(482): n = A,T,C or G
aaatcgataccctcgaanggcnactagagtctacgcannnacaagcntaagcagatgcaaaaagaataaagcaaacgggaggaaaaataaggccgataaaggttctggctacaatacaagagacatatcattaccatatgatctaatgtgggtgtcagccggactgtgttcattgagggaaaccttattttttagctgtgctatggagtaaacccaggaggttttcaacctaggcacagagcagcacctaccccctcctcctttccacacctgcaaactcttttacttgggctgaatatttagtgtaattacatctcagctttgagggctcctgtggcaaattcccggattaaaaggttccctggttgtgaaaatacatgagataaatcatgaaggccactatcatcctccttctgcttgcacaagtttcctgggctggaccgtttcaacagagaggcttatttgactntatgctagaagat

SEQ ID NO: 10814 - DNA, 485 bp, Homo sapiens
  misc_feature (1)...(485): n = A,T,C or G
tgggattcgggcgcannnttggagnccccngnnaattgtagaccatagtccatgtggtggaattcggtacagcaggacctttttaggaaatgtggcatacaaaacatttttatctcataaaacataaaaattacaaaaatattcttacaaaggtatcacatacagaatacattaaatagcagatttcagtagtgcatggagattgattttcttatttacgattacttttttcctcaccttcctctttggaaagcattttttgcacaaagttaagtttacttatgttaacttgccacttaatgagagaggaagagaaagagtgagagcacaagatcatgtgctggaactaaaaatgttctattcaacccagcaatccctctactgggtacctacccaaaggaaaataaatcgttttatcaaaaagacacttgcagtggtatgtttatcacagcagtattcacagtaacaaaatcatggactcaacc

SEQ ID NO: 10815 - DNA, 481 bp, Homo sapiens
  misc_feature (1)...(481): n = A,T,C or G
gagagtaagaatttgagaccctgncctgatcaccctagtcaagngcggaggaattcggtggctccggggctgggggatcacaggctggtgaaccccggtggtaacagaggtgatagcctgccacattccgcctgtctccctaaccctccattgcctcggctctattccagaatcaatgctgcagaatgtgttagctgcagataggcatggtctcaggtatgaacagacactttgaaacgactttagggctttcttttctccagtgttttaaacatgttgattatccaaagaattgaaactcctagcacatccagtttttacaacagatttgcagctcattccttaccctggttaggtcactacttttgcagattttgctggcactgatctggagatctgcagatctggaggagacgggaaggagtcgattcttaaataaggatcagtgaggcatcctgtcccaagctactgtttggtggng

SEQ ID NO: 10816 - DNA, 458 bp, Homo sapiens
  misc_feature (1)...(458): n = A,T,C or G
ntttaattgtagactatagtncgtgcggtggaattccatgatccaggaccacaaaacacttgcaaactcactgcccagaggccctgtgcctgtctggagtgtgcccagtgtgtctgcgccccacagcttgtcctggcccgccagcagagccgcagcactgcagggcccttctgttgtgagtgccagggcccttgctggctgcctgagcaaggcaaaaggttcaaaacaggaagtctctgggcagctattcccaggtgcagaggggagcagcggccacacaggtgccagtgtggcaggagctgcagtcagaggcagcatctcaagagccctgggagcaggggccagccacgtgaagcccacgagtgtcgctggcacagggaagggacacgaggatcacactgacccaagagaaggcccacagtgaggaggccccaccgaagcatccccagcaacagggn

SEQ ID NO: 10817 - DNA, 432 bp, Homo sapiens
gtgggaaatgaatttgtgcagtgtgttcccttaattatctactgaatgttgttaccgactaaacaaggtttctaaaagtctcgcatttcttttactattcaaaactctttggttggaaatgactaatactgctccaatttaaattatctgaaatgtgtgtgtgtgtgtgtgtatctaaatatcaatcccatggcttaagtattcctaccagagtggtggttgccatcagtctattttcactccctgccttccttcctgcacgcttaaactcttcaccctttgactccaaagagccctttcattgcaaagatgtacacaagtaacagaatcaatttatcttctctccaccactctgtattcccacgcaccaccaatgtgagtaactccctccagattgtttgtgtctaatgactaggaaagttattaacagta

SEQ ID NO: 10818 - DNA, 497 bp, Homo sapiens
  misc_feature (1)...(497): n = A,T,C or G
ntcgaaggccntnnnaantttcgagtnccctagtcagtgtggtggaattcctctctcttgtcattcaactagaattatgtccccctacttgcctcctgaataaccaggcattatatcttggccctggggatgacagagggaaaaggacaggatgtattatttcccctcatgcctgacaattgaaagttaacagtagtgagtttatctgagtaacactcacctctctgcggatagaagcccaaaggctggggaggaagtccttcagttccttctgtccatacacagcacagcaagcattctgccaaggaaaccgctgctatcagttatgtacacactcagacaccctaggatgtgcaggtacctcagcataatggcacctgaaggagccctggtctcagcagaaaaaccagttaagatttttaacagtcctactaagggaacagagaagtaggagataaccctggttgataaaatagaagcctaaagagggagtcctg

SEQ ID NO: 10819 - DNA, 476 bp, Homo sapiens
  misc_feature (1)...(476): n = A,T,C or G
gtgagtnagnntttgagaccctagcctgatcaccctagtccaagcataggatatggagaggcccctggcttcatgagaacaaaggcaggcccacgttataattacagctttctcctgccccttctttactttctctaccacagttttctccactgtttgttttcctcttgccacaatttgctaacatttaaaaaattttcctgcacccagtagtttcatatcctgtagacatcctcttatgacattctctaatttcaaaataaaaaatattcatctatgtagttaattaaagttaaagtttttgcagatcaactactcaaactactaaatacattcacctgagaaaaagtctctgagagcacttcattcctgttttagttcgngtaaattctctgagaatgttctggagatagataactcatttacagtggtttctattaactaattaaagcacccatgattttttccttttctgg

SEQ ID NO: 10820 - DNA, 453 bp, Homo sapiens
  misc_feature (1)...(453): n = A,T,C or G
nttcgatagccgaccatctgnccgngcggtggaattcgcaagagctagagagctgtcattggctgggcctgcctgggccatatgtccatctgtggaatcagagtgggatcagcctccctgaattctcgcgatggggctgaggattactcctagagatgcaggacatagaagacccaagatgggcattatcaggcagcatgataaccgcacagctctagctcagaggcaaacatgtccccagctctgaaaataacccttccaattaaagtgagtgtttgaggcagatgacaattaactgtttctcctactcctgttttcatttctttctggtgaatagtaacgttgaattggatatagaatttaaagagctttcccttggcccatgttttgggaagtgcctagagagaagcagatccgggttcctctgctcagaatttatcctatgctctcacg

SEQ ID NO: 10821 - DNA, 477 bp, Homo sapiens
  misc_feature (1)...(477): n = A,T,C or G
gaagggtgnnnnttctgagatcatagaacnctggaaaanncgagaaagataatcacaaagagagggccgaggaagagaataaggcctaggtggctccgcttgccgagcgggctcaggaaagaatggctcctgccgggaaggtcaaaagcaccagcactgccggcatacagctgatgaaaggcggcaagcaggcatctgcctcctacgactcagaggaataggaggagggcctgcccatgagctacgatgaaaagcgccagcttagcctggacatcaaccggctgcccggggagaagctgggccgggtagtgcacatcatccaatctcgggagccctcgctcagggactccaaccccgacgagatagaaattgactttgagactctgaaacccaccactttgcgggaactggagagatatgtcaagtcttgtttacagaaaaagcataggaaaccgttctcaagcgggataaacaggg

SEQ ID NO: 10822 - DNA, 444 bp, Homo sapiens
  misc_feature (1)...(444): n = A,T,C or G
cttcgacattcgttgacccttagtccagngtggnggaattcgcagtaaagtcttaaaagtcaaccgttaatcattaagtcttttgcctctaaagtcttttgcctctgaagaggtttattacatgagttgattttcatattttcattttggtggggttttcctgttgttgggcaaggtggggtcacaggacatgggactagtaagcattttactgtttactatatttgtctttttataaacagtatctcccaaaatgtgattagaaggctaccaagcctgtatttggacatttaattgtgtgctttatataatgtaactactaacagtatttggactgcctgttcattcctggagacaaaaatgaaaatctgtcagttcaagttcttgggtaacatcaagtcattagaatttatctaaagcttatcatgatttgataagacatcc

SEQ ID NO: 10823 - DNA, 463 bp, Homo sapiens
  misc_feature (1)...(463): n = A,T,C or G
naatcgagactgacgcgactntgcaaggccnccgnnntatgaattcatggcaatatagttggatagcctggatactttgttagatgagtatttagctgtgtctgcaaatcttaaaagccattagcaaagaggcgaggtatttttttctttatttttaaatgatngggcaccaaacctaaaagcaaaagattgacgaagcatgtttctcttaaggctacttgtattttacaatacaatattaaattatttaatttgagaaatttagttttgcttatatgcactttttaaatatatactattttgaagattccttatgtaaatgcaaatttcctagttaaaaccgaataacagagatctgaaatgactgagaaaaacttttttattaaaggaaggaattaatttaaggcaatttttaactatgtagaactaattgcccatgtttaattatagcagacacgccatt

SEQ ID NO: 10824 - DNA, 491 bp, Homo sapiens
  misc_feature (1)...(491): n = A,T,C or G
ggaggtccgggccggggnagnaatanatcagtnangccccgtcagtncncctncgnnagngncgnggaantccttccttctgctggnatcactcgatcacctcccacccccatttggaccaaggctgagatggcaaatggcagacgagcctggggttctgcctttccttgcctctgctacctctcaaatatcaattgtgccgctataaatctcctggaggtcttgtcactttgcagattatgacacagtaggtctggagctaaacccaaggccctgcatttctaacaagctcctaggggatgctgatactgctggcccgtggaaagcaagatagaaacgaagtgggccagggtgagggtgaggcgagggatgcatctaggccacaaaatttagggaggcacctgctctcagagtcatccagctgctcttagggaggttcaccctcttggttggtgcaggtgtggacaggcacctgagcgtgggcgacttct

SEQ ID NO: 10825 - DNA, 453 bp, Homo sapiens
  misc_feature (1)...(453): n = A,T,C or G
tgggcnnnnattgannccttttgtagatcatctatcagtgcggtggaattcctgagtgagatgttcctcgaattttcctttcccatattttgccaagtattgttatcaaggttatcctggccttaaaaaataagttgaggaatgttcccttttttggcttgtgcaaaatagtttgtgtaaaagtgacctttcagtcattatttcttaaatgtttagtaaaattggccagagaagccacagctttcttcgtgaaaagattttgggctactgattgaaattctttagggcaggggttggcttataacctattttgctactgccttcaagctaagaatggtttttgcaatggttgttaaaaacaaaacaaaacaaaacaaaacaaaaaactatgtaaccaagactttaggtggcctgtaatgcctgaatatttactatctgacccagaagaaaatt

SEQ ID NO: 10826 - DNA, 420 bp, Homo sapiens
  misc_feature (1)...(420): n = A,T,C or G
acagggtttcattcccgtcacccaggctggagtgtaatggcgcaatctcacctccctacaacctcccactccctggctcaagcaattctcctgcctcagcctcctgagtggctgggattacaggcacctgccaccgcacccgatgaatttttgtatttttgtagagttggggtttcacaatgttgcccaggctggtcttgaactcctgagctcacgtgatctgcccacctcggcctcccaaagtgctgggattacaagagtgggccaccacacctggctgtgtctgttgtttctaagccaccaaacctgtggtgttttgttacagcagccagaatgaactggcaccgtagtatcacgattcactctttcattcccattcacgaacatgctgccagtgttcacatgttaaaaaacaaaatn

SEQ ID NO: 10827 - DNA, 426 bp, Homo sapiens
cccaggtggtcataaaaattgaagctcagggtactagggccaggactgtccttatggaagcttctggtttgggggtctgcatacctctctggatttatgtattctccttatgcttggcctatgtggttcaccttagtttctattcaagtcagtaatatacttttgaaaaatgacatgtacattttatctggtatttgtagatttcatatagcaggatagtgattcagcaaatttagtctaccacaatgctgggaatagaattcccctaatttttgaaaacattatatcaaatcatgtttattgccattaatagtcttataaatgtgcttttaagtaactgcattttgtcatagctcattgtgattgtatatttaactagttcacccctacctcatgttttttgggagtgaaggttgtactcaactc

SEQ ID NO: 10828 - DNA, 542 bp, Homo sapiens
  misc_feature (1)...(542): n = A,T,C or G
ncttgatcacagctcgagagggttagttcgccattcttcttgtttgatctgcatttattatacaggcttgtttctttaagcccatactctgtctcttcccccgtcttcctctcaggtgacagtatcagtgagtgccatacagaattgtgtattcaccagcatcatgaaacagttgtggtcttttgagttgatcttggcagagtaaagggacgtgtcctggagccattcctgaatctccccttctttgtgacagctcctcccacccccccaaaaaataaaaaaaccacaaaaaacaaaaaaacaaaactaaggcacttcacttagagactggagtcctgcttataatcatgcatataacctttactttgatggatctggccagaggggtgttggagcccagcccacccacataccagtcaagctcttatgggagcagaagaaaagcaggaagaatttaaatgcttaattntttttttaaattgacttttctagttattaanaagtgcttgtttcacagtgatattgataaagaacatcttgta

SEQ ID NO: 10829 - DNA, 471 bp, Homo sapiens
  misc_feature (1)...(471): n = A,T,C or G
aattgaagnaccactagtctagtgtggcggaattccacaaaataacggggaccaatatttttaactttgcctatttgtttttgggtgagtttcccccctccttattctgtcctgagaccacgggcaaagctcttcattttgagagagaagaaaaactgtttggaaccacaccaatgatatttttctttgtaatacttgaaatttatttttttattattttgatagcagatgtgctatttatttatttaatatgtataaggagcctaaacaatagaaagctgtagagattgggtttcattgttaattggtttgggagcctcctatgtgtgacttatgacttctctgtgttctgtgtatttgtctgaattaatgacctgggatataaagctatgctagctttcaaacaggagatgcctttcagaaatttgtatattttgcagttgccagaccaataaaatacctggttgaaat

SEQ ID NO: 10830 - DNA, 501 bp, Homo sapiens
  misc_feature (1)...(501): n = A,T,C or G
ncctgggagaccgtggncangncgnggaanattgtagaccatagtccatgcggtggaattcacagaaaagaggaaaattcagaatgggtacatcccttagccattgtgtacaaactgttctgaggcttcatcattccatcaggccgttggaggcttatgcaaaaggttaaaatgtgacgacctcatggaataatagccaggactataacagcactagtaagtgtcagtagctgcatatgtgacttaaatgtaaatatcaaggtcttcttctgtgtgatgcttttgaaatggccaggactaagggtttccctttagagaatgaaggggattttaaaaaaagtaaagaggtgaattccctggggtggcaatagagagcaaaacgagagagcctggtggacggtggggtgtctgtgaacgagggaggggcagaaattacactgggttgataacttttagatggcaattgggagctgcttgaagaggagacagaagaggcagagn

SEQ ID NO: 10831 - DNA, 486 bp, Homo sapiens
  misc_feature (1)...(486): n = A,T,C or G
gggaggtaacgggcccgnnnaggaatanacctacnnggcttcgnctnanaacgtccgnananccgcnnanngnaaannntnntgggcgggtgtataaatagnaagataatatttactgagttttacattggctcttgaattttaaaaggttcttatagacgaacattaattggaatggggggtaaggaggtaggaatggcttacttgcggaaatgcaggctcattgttgtgtctagtaggtgctaggtgcattcacacatctcttaagctttaaacaacctattgagccggtttccatttccttgatctattagatttaaaaaaatgaagcataaaggagttggctcttgccctaagtcatactactgatggaatgagaatacaaaccaaaaacactttattcaagtccaggaaatatctgccttgaaaaagaataacttaaaaattaaaagtgtcctctatttgaacatgaaaacagctaataag

SEQ ID NO: 10832 - DNA, 468 bp, Homo sapiens
  misc_feature (1)...(468): n = A,T,C or G
agaaacctgataccntggnaannnctgatgacactaggacagngcggnggaattcgatctggaaactgagcttagaaagaaaaatgaagagcaatttcaacttgtttgcaaaatgaacagtacaaatggctaactacaataaccagtgtagagaagtccttaaatgacctgacggagctgaaaaccatggtatgagaactacatgacaaatgcacaagcttcagtagccgattcattcaactggaagaaaggatatcagtgactgaagatcaaatgaatgaaatgaacaatcctcccctcatccatggtttcattttctatggttccagttactcatggtcaaccatggtcagaaaacaggacaaactgagagtaaaagatgcaggaataaaacacagaaatcaaaataaagggtttactgctgaaaaatccgcttgaacaagcctgttaatgtgatcttcctgaatg

SEQ ID NO: 10833 - DNA, 336 bp, Homo sapiens
tgttgggagcacgtgacatctgtggcttttacatgtattagcttatcccttgccacttgaagagattgccattagtgagctggccttgtggggtcatgctaagtgccatgttttggatcacagttgttatcggaccttagttttagatccagtagggaattagtaatattatcttgatggcctgaagatgcagtgggttacttagtcagcttcccagagcagatgtgctaaagaaagggtaagctgaggcgttcctactcagatcagctttgggagtaagaaggcaattgggtaccaagcctgggaatggctgcttctatgttagtgcattaccca

SEQ ID NO: 10834 - DNA, 501 bp, Homo sapiens
  misc_feature (1)...(501): n = A,T,C or G
agtacannnnnngnnncctgaatccttcgaannnactgantgtctagcagngcgcgnaannanatgnnnggaaccggtgcctgaccccaatctggttgcgaggaaataggggagaggtatcctgggccacatcccagcctaacacctgtgaggttcattttaggaactaacctcattagctataaggatcatgcagaggcagcaaagccgggtgcgatgagctcagcctttactcattcacatacaccatcacactttaattccaatctgtatattgctttttaaaagttaagtccattctaattacccaaatatgcatgaattcattctccttttgagaagctagattggtaaagatagtctcattcagctaccaaccactccttgatccttcccttcttagtggctgttgtttgttgtacttccgtttagactttgttttaatgcttgtacgtacatatgtgaactcattgganataattgggtgttaaatgcaaatag

SEQ ID NO: 10835 - DNA, 489 bp, Homo sapiens
  misc_feature (1)...(489): n = A,T,C or G
atcactacngtcngnannntaccgtttcaacatgagnncgganannnggaagaaagactcgtcaacggccgagtgctggcgccttctccgtctgcgcagtgcgttccaccgggtatccgttatagcactgatgtgagtggagatgaagtaaaagctttggcttctctgatgacatacaagtgtgcagtggttgatgtgccgtttgggggtgctaaagctggtgttaagatctatcccaagaactataccgataacgaactggaaaagatcacaaggaggttcaccatggagctagcaaagaagggctttattgttcacagatgtggggatctcaagaagcaggcggtcctggaactggttcccgttcctgtgcttctggtatttgaaaaccattcatcaccttgctgaattcttcagcggtcttcaaagaaaaagtaaataaaatgttaagaagccaaataaaaaaaaaaaaaaaagagggccggcttg

SEQ ID NO: 10836 - DNA, 335 bp, Homo sapiens
aagtgaacaaaaatccagaaagtttttaaaaagcctcatccggaaacagccccaggaactgctcctggttatcgggactggcgtcagcgcagcagtggcccccggaatccctgccctttgctcgtggagaagctgcatcgaggccgtcatcgaggctgcagagcagctggaggtgctgcaccccggagacgtcgccgagttccggaggaaagtgacaaaggaccgggacctgttggttgtcgcccatgatctgatccggaagatgtcacctcgcacaggcgatgccaagcccagcttcttccaggactgcctgatggaggtgtttgacgacctgg

SEQ ID NO: 10837 - DNA, 492 bp, Homo sapiens
  misc_feature (1)...(492): n = A,T,C or G
naaaattcctatttcctgtannntaccgttgaactaggagnnnccnannnngntntgagagtttgtaggtctgttctccattgacaggccctgaggggcacccgagggctcaagcaaggggaccccagtgtgcatccttgcctgttggcccactggccctactccacattcaccctggacttgccccctacctgccttataaaggtacaggctatagtatggcaactccatgacccgaccagagatgaggaagctgcccggggaaccaaaagaccggagaagttttgccctatcccccactgcctgatctgggaccaacaaaaaaaaaattcttggccaggcgcggaggctcacgcctgtaatcccagcactttgggaggccagggcgggcagatcacctgaggtcgggagttgaagatcaacctgaccagcatggagaaaccgcatctctactaaaaatacaaaaaattggctgggcggggggcgcatgcc

SEQ ID NO: 10838 - DNA, 417 bp, Homo sapiens
gtttatttctttctcttgcctcattgctcagggttaggtcttcactgctatgctgaataggaggggtcaaagtaggcatccttgtcttattccagttcttagaggaaaggctttcagcttttccctgtttaggatggcgttagttgtgtgttcatgcaacatttatcatgttgagttatgtccccttcatgcgtagttcctgtggacaggtttttttttttttaaatcatgaagggatgttgaatgttattaaaagactttcatcccatttgaatgtgaggggccacattaattgatttgcctatgtggaaacctccttgcatccctgggataaaccacacttgatcggggcaaaatatctttttgatgggtcgaggaataggcgggctaccatttggccggggatttttgcatctg

SEQ ID NO: 10839 - DNA, 458 bp, Homo sapiens
  misc_feature (1)...(458): n = A,T,C or G
ggggcttttncctgaagaccctagtctgtgtggcggaattcacgagcttaagaaggactccggctatgtcatcgccctgcgcagctacatcactgacaactgcagcctcctcagcttccaccgtggggacctcatcaagctgctgccggtggccaccctggagccaggctggcagtttggctctgccgggggccgttccggactctttcctgccgacatagtgcagccggctgccgctcccgacttttccttctccaaggagcagaggagtggctggcacaagggtcagctgtccaacggggaaccagggctggctcggtgggacagggcctcagaggtgaggaagatgggagagggacaagcagaggcaaggcctgcctgagactgaggaaggaaaggggtttgaccactcccgaggctgccatgcggtgggaccaccctgctgtccgtctcctgtg

SEQ ID NO: 10840 - DNA, 565 bp, Homo sapiens
  misc_feature (1)...(565): n = A,T,C or G
actgannactatattaccattnnnnnnnncaattccncnacatagacttgcaagacatggcctgtatgagaagaaaaagacctcaagaaagcaactaaaggaactcaagaacagaatgaagaaagtcagggggactgcaaaggccaatgttggtgctggcaaaaagtgagctggagattggatcacagccgaaggagtaaaggtgctgcaatgatgttagctgtggccactgtggatttttcgcaagaacattaataaactaaaaacttcaaaaaaaaaaaaaaaaaggcggacggtttttttttttttaaaaagggaaaaaatattctccttccagcaaaaatacatagaaatgggtttttttggaaaatcaccttcggggcccttgttgagaaatgatcttaggggagggcaaaaaaaaaatgttgtaaaccccaggattttatttttatgttaaaaaggccaaatgtggtggggggaacactttgtatttttttaccaaaaaatttgtgtttgtataccctcaccaccatttttaaataaaagggagattaattattggggg

SEQ ID NO: 10841 - DNA, 455 bp, Homo sapiens
  misc_feature (1)...(455): n = A,T,C or G
ntttgagaccccctgaagagcgtggaaannccgagctantgtaagagttcaggcccgtttcagaacactcagaggttgctagccttataagtcatccccaaagcagaccaaccggcttggggtaaaacaggaatagttgggaccattctggatctttcctagctaaatgccttcaggatttaggaatattttcctaggagggccaaggattagctagacctgcccagcgattccagccctgagaaccagacagaatggatgtatagccgacagctggctgggagggggctgacggtcctcactgccaccaggcttagttggagacagattccccgggctgtagagagacaacagtttaagcaaagagaccagttaggagtctaggtgagaggcagcggctgcctggactaacatggtaacagcggagctattgagagtggtcacatttggaagat

SEQ ID NO: 10842 - DNA, 446 bp, Homo sapiens
  misc_feature (1)...(446): n = A,T,C or G
naaaactgagnacctagnactgacacgtagnagnagaccagtgggggagcagctgtacaatgaggtagactcctagaggttaattatcatctcctaatcttaccctgacccttttgtcaaacgttatctagattaaacctcagtataggcaggctgcaggaaatggacattccagtggcccctggggttccagcctgtagcagcttcatctgtgctttgtgcacttggttctcagtcatctctgcaagggaccctgacgcctgggagatcagagccactgaccctttatggcactgctaacagaccccttccctcaggtaattctggatccagaactcattatgggatgtaatccaggtcaacactaataccacttggaaggttccgctctgtctcactctgcttgagtatcccactgatcagtctctcagtgcctgcctactgng

SEQ ID NO: 10843 - DNA, 350 bp, Homo sapiens
ggactgggatgcctctaccacccatgaacttgggcacattagcaaaaggcaccccttctgggtggggacaactcccagttacccacttggcaggtgcccttatgcaggatacaacctgcacaattggccatggctgctctgcaagggaagaggaaatgacctttttcccctcctctgggagccacatctcatcctgcctcactgggctgctttcactatcagagggtcattcatactccgaacagctaggaggtggctctggagaaaaactgcctgagttcactccccagcccagccgcctcagggtatgtgagttgtcttctctgtacctgttttacagctggggaaag

SEQ ID NO: 10844 - DNA, 451 bp, Homo sapiens
  misc_feature (1)...(451): n = A,T,C or G
aattggaagaacattactcgattgccgtgcaattnggcaacttagggatgagatagtcaagaattccaaagcaggggagatactgagacattagacgaaacaaaatattgaagtgctttttaggggagacagaacgtagccagtcttcttgctcatgccataagcacagggcccggggagaagaaatggcagccctgactgcccactacaccagtgtctcccaaatagatctaaatgtgtcaatgagaagttaaatgtattgggagtttggggaacaatgtctttagttacacagcttttccaccaataggttaacttctggcagaaatagaaaggtcattgcttagagtcacatttgaagctttaccacaaattcagacaatttaaattcctttgttttgttgaactcatctgaaaacagtctttaattactttgggtttttttttcctn

SEQ ID NO: 10845 - DNA, 462 bp, Homo sapiens
  misc_feature (1)...(462): n = A,T,C or G
ggggcgttgnaatcgagacccctnncctcgaganccatatccatgtggtggaattcacacaattggtcagctgcttccacagcagatgcaagcattccattctcctaaagcactcttccctgtgggctatgaagccagccggctgtactggagcactcgctatgccaataggcgctgccgctacctgtgctccattgaggagaaggatgggcgcccagtgtttgtcatcaggattgtggaacaaggccatgaagacctggttctaagtgacatctcacctaaaggtgtctgggataagattttggagcctgtggcatgtgtgagaaaaaagtctgaaatgctccagcttttcccagcgtatttaaaaggagaggatctgtttggcctgaccgtctctgcagtggcacgcatagcggaatcacttcctggggttgaggcatgtgaaaattataccttccgata

SEQ ID NO: 10846 - DNA, 334 bp, Homo sapiens
  misc_feature (1)...(334): n = A,T,C or G
ggtgcggatggacactaatgcagccacgattggagaatactttgcttcatagtattggagcacatgttactgcttcattttggagcttgtggagttgatgactttctgttttctgtttgtaaattatttgctaagcatattttctctaggcttttttccttttggggttctacagtcgtaaaagagataataagattagttggacagtttaaagcttttattcgtcctttgacaaaagtaaatgggagggcattccatcccttcctgaagggggacactccatgagtgtctgtgagaggcagctatctgcactctaaactgcaaacagaaatcn

SEQ ID NO: 10847 - DNA, 474 bp, Homo sapiens
  misc_feature (1)...(474): n = A,T,C or G
ggggnagggcggggccnnggggnttttncctgaaacccctatttagagggcggaattcgtggggagccaggatgagacggacctcagcacctacggggacagcctgtccggctggtggctgctgtggaagcggctgaatccctgggctgacaaggtaaaggttccagacatggctgaaatccagtcccgcctggcctacgtgtcctgtgtgcggcagctagaggttgtcaagtccagctcctactgcgagtacctgcgcccgcccatcgactgcttcaagaccatggactttgggaagttcgaccagatctatgatgtgggctaccagtacgggaaggcggtgtttggaggctggagccgtggcaacgtcattgagaaaatgctcacagaccggcggtctacagaccttaatgagagccgccgtgcagacgtgcttgccttcccaagctctggcttcactgacttggcagagat

SEQ ID NO: 10848 - DNA, 448 bp, Homo sapiens
  misc_feature (1)...(448): n = A,T,C or G
nttcgaagaccactagtcctgtgtggcctaattcgcagtgaatcaagatcgtgtcactgtacttcaacctgggtgacagaatgagaccctgtctcaaaaaaagaaaaaagaaaatttacctaataactacttctgtcatgttgagcattctttgttaacaagttgaggatggggttttttgcatcattaattggatatttaaagataggttgtgggaagggtgtgtgggacaagtgggtattttactaatgaaaggttgtaactggcatcttaaagttgagaggtgctttataataattgcagatttcttggcaaaatagtgtaatgcttgatttgttaataggtataaagcaatccagtcattttcctgagtcttaaattggcctgtcaccataaaaatattaattaaaacttttttttttttttttcttttttgaaaggggggttt

SEQ ID NO: 10849 - DNA, 390 bp, Homo sapiens
taaaaatgagtgactgatcactgaatattgttttgattttgtctgagtgtgaaggatagatgatatatatttaacagtgaatttgataaaaacagaatatgagcattacctccagttttagcccaaatctttaaagagcttagcatttccaattcccatccttacaaagaaatagttaaagaaacttaaaattgatggcttgtcttggacccgtcagagaactgatattacagggcaaactgtcaccttaaaatctagaaatacaagcaaattcagagttgcagagaactgcttacctggagtagaagcctctggggccataaactagtaggaaaacttaagaggtaattttgaaaacttctggatcctgaatgtgggaaatccttagag

SEQ ID NO: 10850 - DNA, 438 bp, Homo sapiens
attgagaccctatcattgggtcaattacaagatcctgtttcatttcaagatgtcaaggatgaaatctttgacatggtaaaaccaaaggatcctttgaaaatctctcttcaggatttaatcaacagtaatcaaggagacacagtaaccaccattctaatcgatttgaatggcttctggacttacgagaacagagaggctcttgttgcaaatgacagtgaaaactctgcagaccttgatgatacatgatctctgaaagactagactgtcttatattatgagatacttgaatgctgcatgtaaagcctttaaagcaaaatcctcagaaatggtctaaataaaacacttgatatgcctagagaacacagcaaatgttttggttactggaattttggttgcaatagtttagaagcaataggaccaaatattgcttgttaggag

SEQ ID NO: 10851 - DNA, 453 bp, Homo sapiens
  misc_feature (1)...(453): n = A,T,C or G
aatcgatgacactngnntttgagnaccatctgnaagngcggaggaattcatttacccaagtcccactagctaatgagtgacagagctgggatttgagcccagatctttctgattccaaagacagcatgtttggtcggcatttccagtgactcccgaagctcatggagcatgaaaatcacctcaggaccttttaaaaaatcacagatttgggggccctggccctgctgtccaaaagtaaagaagtggctgctgcactgtgtgttctctgatgtggaagtgcagcctggcacctgctctgcctcctgcagccaggatcctccctccacggggcctggcaagccatgaggccttagctcaaggcaccagggcaaaggtcactgatgctgcctcaagacagcgttgggaagattcggtccagctgttcaggtatttttatgtatttattttaaaatt

SEQ ID NO: 10852 - DNA, 562 bp, Homo sapiens
  misc_feature (1)...(562): n = A,T,C or G
acttgaaaactagatnnccnntnnnnnnnncaattccgccaanaagtcaccgccgctagggtcgccgttgcatcggtgcagggcaagatggcatcttccacagactcgcgctatgggcagaaggagtcctcggatcagaacttcgactacatgttcaagattctcatcatcggcaacagcagcgtgggcaagacgtccttcctcttccgctatgctgacgactcgttcacgcctgccttcgtcagcaccgtgggcatcgacttcaaggtcaagaccatctatcgcaacgacaagaggatcaagctgcagatctgggacacagcagggcaagagcggtaccggaccatcaccaccgcatactaccggggcgctatgggcttcatcctcatgtatgacatcaccaacgaggaatccttcaatgcagtgcaggactggtccacccagatcaagacctactcatgggacaatgcccaggtgctgctggtaggaaacaagtgtgacatggaggatgagcgggtggtgcatcagaacgtggccggcagtagctgaccaccttggttgn

SEQ ID NO: 10853 - DNA, 484 bp, Homo sapiens
  misc_feature (1)...(484): n = A,T,C or G
cgcccgccccccccnaatcgagcccctnnntttgtagacactgtccgngcggnggaattctggatatgtcacatgtgcagatgggagtctagacctgagaaaagaggcctgtgttgaagttggtcaactaacagacatttctggaactcccatgagacattgaagagtataggcaaagtccaaagtctctgttcttgaggagcttacatgtaattctaatggtactggcattatttgagaggccttggcacatcacattgagagtctttagcacatgaaattgaaagccctgggagttcattttggagaaaagtagaagaggacagtggaccaatccctgagggcctccaacatttagttcttttataaaagaagagggccaatagagaggtagcaagaaaacatgaagaggagtatcacaaaagccataagaagaggtgtttttcaagaaattggtttagtaaactggattgagtgcttctgn

SEQ ID NO: 10854 - DNA, 558 bp, Homo sapiens
  misc_feature (1)...(558): n = A,T,C or G
ntaggaanactantnagaccggnggaannncacccgtgtgtgtgtgtctgtgtgtgtgtgtgtatgtatgtacgctaggattctgattgccagtataaccagccaatttgagctagtttaagcataaaataataattcattattacagtacaggtttttctcatgtaaccaaaagtcagaaatgtagctgagtccaagggagggacttgaaccaaaatagaaaacctaagaggcaatgtaatctctgcttatctgcttaatttttctattgctttacccaattctctgttttatctagtggaatctattacttttggttttatagttctagacaacttgaggacctgaatgacgacctcttccttcccaaatccaaattcccaaggaaagaaataaggaatttcattgacccagcttggattaggtgaccatcaccaagaaactgaccactaatttggttctcaaaagactgataagaantagtggtcaggagtaactcagtcattggaagaatatttcataatctaaantttctgggtctcctgtaatggtatcata

SEQ ID NO: 10855 - DNA, 339 bp, Homo sapiens
aaatgagatacaggatctccagacgaaaatgagacgacgaaaggcatgtaccataagctaaagaccagagccttcctgtcacccctaaccaaggcataattgaaacaattttagaatttggaacaagcgtcactacatttgataataattagatcttgcatcataacaccaaaagtttataaaggcatgtggtacaatgatcaaaatcatgttttttcttaaaaaaaaaaaaaagactgtaaattgggcaacaaagatgcatttacctttgtatcaactcaggaaatttaataagctggtcccactcaggagaagtttatttttccagatgaccacccg

SEQ ID NO: 10856 - DNA, 448 bp, Homo sapiens
  misc_feature (1)...(448): n = A,T,C or G
atttgatgacatctgnncttgatgagccatttncgccaggagaagttgaggggagcatgcttccctgcagctgaccgggtcacacaaaggcatgctggagtacccagcctatcaggtgcccctcttccaaaggcagcgtgccgagccagcaagaggaaggggtgctgtgaggcttgcccaggagcaagtgaggccggagaggagttcaggaacccttctccatacccacaatctgagcacgctaccaaatctcaaaatatcctaagactaacaaaggcagctgtgtctgagcccaacccttctaaacggtgacctttagtgccaacttcccctctaactggacagcctcttctgtcccaagtctccagagagaaatcaggcctgatgagggggaattcctggaacctggaccccagccttggtgggggagcctctggaatgcatgggg

SEQ ID NO: 10857 - DNA, 336 bp, Homo sapiens
tatgcaatgcttcattattcaagaatgaaaaatataactggtgataatatatattaagtgtgccaaatcagtttgactactctctgttttagtgtttatgtttaaaagaaatatattttttgttattattagataatatttttgtatttctctattttcataatcagtaaatagtgtcatataaactcatttatctcctcttcatggcatcttcaatatgaatctataagtagtaaatcagaaagtaacaatctatggcttatttctatgacaaattccagagctagaaaaataaaatgtttcattatgcacttttagaaatgcatatttgccaca

SEQ ID NO: 10858 - DNA, 460 bp, Homo sapiens
  misc_feature (1)...(460): n = A,T,C or G
gggccgttttnatcgagaccctantttgagagcatantcagnngggggaattcgaaccattaagccccacctgcaacactggggatcaaatttcaacatgatgtttgggtaaaggatgctccaataaaggactgctgactaaaaatcaattgaagatcacaaacagcgacagatttggatgttcgggacaaagaaccatgctgcccctggccttccaaatctcatgtccttccatacaaaatataatcattccatcccaatagtctccaaaagtcttaacttgttctaccatcaacttataagcccaaagtctcacctgagacttaagtcaagttccttaaagctatgagcctttaaaataaaaatcaagttatttacatacaacatataatggttgtacaggcactgggcaaacatgctcccattccaaaagggagaacttggcccaatataggggtaa

SEQ ID NO: 10859 - DNA, 456 bp, Homo sapiens
  misc_feature (1)...(456): n = A,T,C or G
nttggaattganacctntttccagtttggaggaccttgtcagaggagagagctagctgcacacaacttcagggagaatttgtttccctgatgacgtaaccaggtacctagctagctgtgtcaaacttgctgatggccacattagcctaaatgtatgtctacagtaccataaaggaggtaccccaggccgggcgtggtggctcaagcctgtaatcccagcactttgggaggctgaggtgggtggatcacctgaggtcaggagttcgagaccagcctggacaacatggtgaaacccggtctctactaaaaatacaaaaaattagccaggtgtggtggtgggcacttataatcccagctactcaggaggctgagacagggaaatcgcttgaacccgggaggcagaggttgcagtgagctgagattgcgccactgccctccagcctgggtgacagagcca

SEQ ID NO: 10860 - DNA, 481 bp, Homo sapiens
  misc_feature (1)...(481): n = A,T,C or G
ccccccccccagagnnnaatcgagaccctaattggaggctgtaaacatnncaaagcatccatgaaacagttcctttatgccttctgtttaggatttccagaattaggaagggaaaccaggcttgtgccttggatccaaaagcagcaaaaatactacacttgccaaaagcaaactgaggaatgagcattggccagtcctagtatgaagtcaagaggtggacttttgttaagttagcccttaccatttagtgcttactgaatgccaacaatgcacttagaaaaataagggagacaagaatttacagaccataccctaaactggaaggtacaggaaagacacatctcctagagctgggaatgtgtccctaacatttcaagaagaagcagaaagtaggagagatcacgatctcagtctttttaggattccaacacaaaatggaagggagccctctgtggggtgatattacaaagggtttttcttg

SEQ ID NO: 10861 - DNA, 509 bp, Homo sapiens
  misc_feature (1)...(509): n = A,T,C or G
aggggcngcnnnnccccnncaatcgatagacatncgatcagngcggngcaattcgaatgacttgttgggattcacatcccagtgatgacaaatattcttaatcaacagtgtcaaagttgtttttgttaaaacaagtcattcatttcacagataagggtgactaaaaagttttgccaaggaacaaaacttcaggccacaaagggttagagtattggcaaaccagaagctaccagctcactggcagtacgttgtctcatgtgtctttggtgcacttgcttaatctcagcagcacacactgctgaggggctggctcactgggatgagatgggatggacggatgggatagatgatttccagggagcagcccatcggcagcagagtgggctcctgcatcagcaaactgtggaggccagaagttttgctgggcattttgttctctcactcaactactcactcaataaaactgcctccagactgtgcacaggttaaagggatatcacatgttttgg

SEQ ID NO: 10862 - DNA, 466 bp, Homo sapiens
  misc_feature (1)...(466): n = A,T,C or G
cttcgagcccctattgtagacattagaaagngcggnggaattccaccatcttgaccaaactggtcttgaactcttgacctcgtgatccagctgcctcggcctctcagagtgttgggattacaggcgtgagccaccatgcctggcctcttggaatatttaataagctaaaaaattcttatacacaggtagattaattaggtagccaggagtggcccctgaaagtatgtctggcaaaacctagaactgcatcctagccatcactgtaccttctgccctccctgctgtctcctctgccagttacagttaaaaggttgtgggtgaggacgctgggcagagtcccaggcgtctgctgtcagctccccagcccggcctgcctgccgagccatctgggcgtcccacagtggagagtgtggtgcttgtgacgcggtggtgctgggagccatcctggtggcagatgtgggctctt

SEQ ID NO: 10863 - DNA, 450 bp, Homo sapiens
  misc_feature (1)...(450): n = A,T,C or G
aattgatgaccntnngatttgacgacattagtaagtgcggtggaattcattgttttttaattgctgtaggatcctgttctttcagcaggtgaaaaataaaacgcagttcaaatttcatggttttaattttcaactcagaagcactcaaaaatgcaaaatgtgataatgggcacttgtttaaaagaattagtgtatccagccttcactccagctggttaaaaatgttgcacttatcagcaaccctaccactttcatctgctgaaaggacaaatgtgcttggttttactattatgtaatcacaacttactttctgcttgtagttgcttaaaattatgtattttgtcttgggctgcaatttgttttatgcttattttattattactgcagtagttgactttgctgtatggaaaaataaagtgaaattgccctaataaaacttctctttcttaa

SEQ ID NO: 10864 - DNA, 576 bp, Homo sapiens
  misc_feature (1)...(576): n = A,T,C or G
naatcgatcactntccgngnggngctcgtaatactactccgagaggtgcaattcgactggagaagggaggcggcgggcgaagcgcacgtcgagcggnggagcggcgctgcctgtggagatccgcggaggccgacaggattcgttggctgccgtccccgctgctgtgcattgggttaaaaacgacaaccaacatcagccatgaaagatccaagtcgcagcagtactagcccaagcatcatcaatgaagatgtgattattaacggtcattctcatgaagatgacaatccatttgcagagtacatgtggatggaaaatgaagaagaattcaacagacaaatagaagaggagttatgggaagaagaatttattgaacgctgtttccaagaaatgctggaagaggaagaagagcatgaatggtttattccagctcgagatctcccacaaactatggaccaaatccaagaccagtttaatgaccttgttatcagtgatggctcttctctggaagatcttgtggtcaagagcaatctgaatccaaatgcaaaggagtttgttccctggngtgaagtacggaan

SEQ ID NO: 10865 - DNA, 573 bp, Homo sapiens
  misc_feature (1)...(573): n = A,T,C or G
ngctcgancactactccgngnggnggtatgaatcacctctctagcagcagccgccgccagagaggcccgcccaccagttcgcccgtccccctgccccgttcacaatgcagcctgcttctgcaaagtggtacgatcgaagggactatgtcttcattgaattttgtgttgaagacagtaaggatgttaatgtaaattttgaaaaatccaaacttacattcagttgtctcggaggaagtgataattttaagcatttaaatgaaattgatctttttcactgtattgatccaaatgattccaagcataaaagaacggacagatcaattttatgttgtttacgaaaaggagaatctggccaggcatggccaagttaacaaaagaaagggcaaagcttaattggcttagtgtcgacttcaataattggaaagactgggaagatgattcagatgaagacatgtctaatttttatcgtttctctgagatgatgaacaacactgngtggtgatggaagtggtagattacccagaagtagatgggagcagatgatgtaagtctaanaattcttttnttctgttn

SEQ ID NO: 10866 - DNA, 498 bp, Homo sapiens
  misc_feature (1)...(498): n = A,T,C or G
cccccatagannccntcnnnnattgagacccctggccangncgaggaattccgctgcctggccgcccggacgccttccaccgctgcatcttcctcttctgctgccgcgagcagccgtgctgtgccggcctgcgagtttttaggaatcaactacccaggaaaaacgatttttactcatatgagccaccttctgagaatcctcccccagaaacaggagaatcagtgtgtctccagcttaagtctggtgctcatctctgcagggtttgtggctgtttaggccccaaaacgtgctccagatgccacaaagcatattactgcagcaaggagcatcagaccctagactggagattgggacataagcaggcttgtgcacaaccagatcatctggaccatataattccagaccacaacttcctttttccagaatttgaaattgtaatagaaacagaagatgagattatgcctgaggttgtggaaaaggaagattactcagagatta

SEQ ID NO: 10867 - DNA, 430 bp, Homo sapiens
  misc_feature (1)...(430): n = A,T,C or G
ctgctgtcactgcttgggttctagttcatgtctgctgttaatgactggattacatattgtaattctgtgattttttattttctataaaataaaggaattaaatttaatgatctcttaggtcccatatcactccaaatactctgttaaatgcagttgttttacaaacatatgcatttaatgtaaaatgtgcttcagaacgctttttccgtataggtattgaaatagatatgttgtttgcagacagattgaggcatttccagttaatgattttatgtaacctgtcataactcgtataatgaaacaaaccttgtgctaaaagtctgacatattggattaatgtcccagtcccactgtggatgaggtgattaacctctctatgcatcagttttgttacctataactctaaacagtcatctctgcacagcacacn

SEQ ID NO: 10868 - DNA, 550 bp, Homo sapiens
  misc_feature (1)...(550): n = A,T,C or G
agaaaaaaaanccctcgattcaccgnctggagaggccacttcgagaatctctntcccttggaagcttgaattataaatgtggtgtttggcctgcctcagcagcaccagttgactgttcgtgtgccatcggtgtggggaggacggggcaggacgctgcagctctctccagccctgttggcatcctcagtgcctgcaggcctctcgctgcctgttgggctgtctggggggtggccatttagggatcgtggggacggggtccaccccaagaagaaagaaaggcccgtccacaggcccggctctgggccacgtgccccggaagcaggtgtgtccagagtcagctgagggctctccccacaccacccagcaggcgctggtgctccttctgcctcatgggaccagtccagcttccagccgctctggctcgagggtggtctgaccacttccttctgagtgggcttctctgggagctctccagtggcactgctggacctgcccacgtttctgtaaaatcaggatacgtggctttagtaagcagaccaagcgcttcgtn

SEQ ID NO: 10869 - DNA, 575 bp, Homo sapiens
  misc_feature (1)...(575): n = A,T,C or G
ngcttgatnaccnctncgngngnnncctttgattncctctcccgagnggngcaanncgaacactattcttatgccttaccctatcttactgctctccaagagaaaaggtctgattggttcagccaatcacctgccagagcacagtgttcctatggacagagcatcaacacctcagaggctgctgaccagcccatagctagtaggctttgggttaagttattctgtattgcatcagctgtggccaggattccaaggtcaggtgatgcgaaacatcccaagccgtgggtcaggaacctcgcagagaaaggctagaggatggtaggctcctggcatggccaactgctacgatatcggggtgaagaaaggtaaccaaaatagccaaagagaaagaagccccatgaatatgaagagacaaatgtcccaataggagcatgatactttggctggtgacagatgctagacatggagaacagaccagcctaatgngtgaagtctgangtcctgagttcttatcccagctccaccattctcttgctgttgatcntgggaaattactcggcctctctgacttgacn

SEQ ID NO: 10870 - DNA, 446 bp, Homo sapiens
  misc_feature (1)...(446): n = A,T,C or G
nctggagtacattagcacangcggnggaattcagtttattcccaggacagtgctgacggcgagggggacaggcagggagttaggagggttttctaggatttcaaacaggtggaacccatccatccctattcccaagggccacttacaactctaagggtggttacaggattaactaccagttcattttcaaaatgctgctttgaactcagagggttgatacttttaatttgtaattttttgtagaactttttacaaaatagtaaagtatttcaccagaataccagtttcaatccgtccatgggctgatttttatataatttagtggtgctttagaaactttgtttttgttgtttctgagctaaacagctcaatcctttttcgcctgtatctacctaagaccaatgtgaacctttgtatttttgctcctaattttggactcagtgaan

SEQ ID NO: 10871 - DNA, 474 bp, Homo sapiens
  misc_feature (1)...(474): n = A,T,C or G
gtgggatnnnnatgatagcatacgtcagngcggngcaattcccggctcgagcggcccagtgagcagcttcaagagcaacttctccacatgttgggtgtccatcctggggcagggaaggacagagtgttggatggctgggacggggccttgctcttgtcggccagcccactccccagccagagagggcttgaccaaatcaaattgaggtggtgacttttgttggaaaattgggctgggatcacgtcctgttttgtaataaaagctgaaaagtctgccnaaaaaaaaaataaaaaataaaaatatataaaaaaataaaacnccggcccccttaataaaaaggggcccctaaaacccccttgaaaacccctgggtggcttttttttagccccacctttgtgtgtggcccccccccccggttttttttttgggggggggggccccccccccctcttttttctaaaaaaaggaagaatg

SEQ ID NO: 10872 - DNA, 420 bp, Homo sapiens
  misc_feature (1)...(420): n = A,T,C or G
atttaagcaaaatacatctaagaacagctaacaaataactcttctcaaactcacatagagcattcagcaagatagaccacatgtgctgagccatcgttagtattttctgtcctttctctttgactcgcgtatagtgtgctcaaactcttaaaattatacactttaatgattatacactttcatgcatctcaattgcatgtaagttatatttcaatatatttgttaaaagtttataattaaaaaaactgtcctagcttgattcaagaaatcttttttatatttaagaaaatgtaatgttatgtattatcagggcaaaagagaccaaccatatgattaccttgtcatacacagtaaaagcattttgcacaattgataacttttttcatgatttataaaaacaaaccccagaatactctcagn

SEQ ID NO: 10873 - DNA, 483 bp, Homo sapiens
  misc_feature (1)...(483): n = A,T,C or G
gaaattcgagaccctagtcagtgttgtgaaactaatggaaaactgttaagggaagctgatacagagagacaacttgctcctttccatcagctttataataaactgtttaacgtgaggtttcagtagctccttggttttgcctctttaaattatgacgtgcacaaaccttcttttcaatgcaatgcatctgaaagttttgatacttgtaacttttttttttttgggtggcaatggttaaaaaacaagggatttattttttgaaactttttggctatggcccttgggaatcctgacagccccttgtgtgccaccccatgtcaatcaaaaggggggattataaaaggccaaacttctaaaataaaggtttggaaattcaaggggaaaataaaggctgttttggggttnaaaaaaaaaaaaaaaaaaaaaaaaaaaaaaaaaaaaaaaaaaaaaaaaaaaaaannnnnnnnnccggaaagggccccg

SEQ ID NO: 10874 - DNA, 496 bp, Homo sapiens
  misc_feature (1)...(496): n = A,T,C or G
ccccccatcgagacccttcccagatagaaggacccttgctacngcctagaagnggtattgaaaccattgaaaaaccacgacagaaattaaaagaatttcatgtgcacagcagacctgctcctgttttatgataatgcaaattagatgacttctgattcctgtgtgtgcaaatgaattttcgtttgtggcgtattagttatctttgtagcaacaaagcatagctgtaagaatggtaaccattctcttctaaaaatatgaactgaaaatatgccaatgagtaaaatttagaacttgggaatactgtttcaaatattatgagcatttgtaaaggcttttaaataaaattagaatcaattgtaatcagtaatctcattttgtctttaaagcagccctctccgtgagctaagttatgtttgctttataatgaagagtcagagaagcttgttaaagattgcacagctagtcagtggtctaaaggggattcatcacttgtcag

SEQ ID NO: 10875 - DNA, 474 bp, Homo sapiens
  misc_feature (1)...(474): n = A,T,C or G
ggcgaccaatcgagaccatnaactgagacccatggccanngcgnggaattctcatagcagcattacattctttgccgtgataaacattccactcctgctttcctaaggatgaaacagtgataatgtgaactcaaatgaggtttcctgggtaatgtgacacctgcagaaactatagagcgtcatttatacgtagtttggcagaaaccacttacggctgatgatgcgcaaccctgctgactgtttcagttaatatgctgcacaccacacacttgtttagtgaaccaaatctagaaagtaccaaggcagaggtatgctcctgctgtaatcaggcaaatgagttcaactggatttcttttgacaatactgttggtacctattacttgggggaggacatgttgcagaagaccagatcatttttatacagaatgtgaaatactgatacagttattcttttttttaaagaacattgtttta

SEQ ID NO: 10876 - DNA, 494 bp, Homo sapiens
  misc_feature (1)...(494): n = A,T,C or G
natcgagacccctagtccagatagaaggacttcgcagaagctaacagcagagagagactcgacttacgtgacttccggattctccaggacgaaaaagaggaggaagacgaggattaaatttcatttatctggaacatgttgaatgagttcttgcttcttgcttgggcaccacgaaaaacccagaagagaggcataacaaataccttaaaagagtcatcaagcctgaaaagaaagaggctttcagattctaaacgaaagaatacatgcggtggatttttgggggagacctgcctctcagaatcatctgatggatcttcaagtgaagatgctgaaagttcatctttaatgaatgtacaaaggagaacagctgcgaaagagccaaaaaccagtgcttcagattcgcagaactcagtgaaggaagctcccgtgaagaatggaggtgcgaccaccagcagctctagtgatagtgatgacgatggagggaaagagaagat

SEQ ID NO: 10877 - DNA, 392 bp, Homo sapiens
  misc_feature (1)...(392): n = A,T,C or G
attgancnccnnattgaggactattagacagcgcggtggaattccgacctacgcacacgagaacatgcctctcgcaaaggatctccttcatccctctccagaagaggagaagaggaaacacaagaagaaacgcctggtgcagagccccaattcctacttcatggatgtgaaatgcccaggatgctataaaatcaccacggtctttagccatgcacaaacggtagttttgtgtgttggctgctccactgtcctctgccagcctacaggaggaaaagcaaggcttacagaaggatgttccttcaggaggaagcagcactaaaagcactctgagtcaagatgagtgggaaaccatctcaataaacacattttggataaaaaaaaaaaaaaaaaaa

SEQ ID NO: 10878 - DNA, 457 bp, Homo sapiens
  misc_feature (1)...(457): n = A,T,C or G
nattgaaaaatcgatgaccattaggccagngcggtggaattcgaattccacttaaaaataaatactatgtgtccattgagaaaattcacaatataaatagaaatacaaataaatacatacacaattttaaagtcacctgtagccctacccttagaggtacccagggttaacattttggtggtattgtcttatcaatttttccgttgatacattcagcaaatttggagcacattgaccatggagttttgtgtccaaatccaatctgaatttacctggaagaggccttgacacctgcatggaaatgagctaagaaaaccactggagccttgggagctctttggcctcctggctggcccagtaatatctgagctcctttggttaatttataactgatataaaactacatcttctttataatataaattgtacctgtgagtctagaagctttaaatgtgtt

SEQ ID NO: 10879 - DNA, 438 bp, Homo sapiens
  misc_feature (1)...(438): n = A,T,C or G
ctagacttcgatgacccttagnacangcggnggaattccggtatgcccccgaatccctctcggacaacatcttctctcgccagccatacgttttgagcttcggggtcgtcctgtacgagctcttcacctactgcgacaaaagctgcagcccctcggccgagttcctgcggatgatgggatgtgagcgggatgtccccgccctctgccgcctcttggaactgctggaggagggccagaggctgccggcgcctcctgcctgccctgctgaggtgagttgctacagtggctggagagacgacatctgctccatgggctggtggccgacagtaatctcacgctgggacctggcctgcaggccctgccccagacctctcaccatcaccgccaccaccgtgcagctgccaccaaccctgcacgctactgcttgctcagtggctg

SEQ ID NO: 10880 - DNA, 431 bp, Homo sapiens
caacatttaaaaatcagttgaagagtgtcagcaggtgcttctaggttctgtgctgtgagcccccaggtcgtggagtgtagggctctggatctctctgtacacgggatagaaacacagtcacgtggaaatgccaatatgacttactgcttagggctgtgctgacatcggcatctctgttagactgattctcgtaggagaagctttttttttttgccttagtcaggagattattcgaggaacagtaaagaactgaactaaggaagtagctactggcttccaaagccacacacacacaaaagtaagtttcaaactgttgtcctctctcagggcaaacgagcaatgggcggacctgtcacgtttcatcaatcgatacgaacacagcattcagtctgtggaacaatgtgatgcggcaaaaatctgatctaatgcaa

SEQ ID NO: 10881 - DNA, 498 bp, Homo sapiens
  misc_feature (1)...(498): n = A,T,C or G
aatcgagaccctcngacangncnnnnnctgatgatcattagtacagtgcggtggaattctgtctgcgagcctctcctgccatctcttttgcagctgagggcacttggcacaaagcatgcacagacagcagagagggccaggcagtgctggagtgcgtttgctggcagggtttattgtgggagaggaatttgagtttaggatctgaatcttgtacataagaaatgaaaaggcttccctccaccccgcccccaaaatatgcccgtcctgtatccatgagagtgcatgtcggttctcagtgagggtcagagtgggggtgggggatgtaaggcctgggtccctttcagcggcctctagggcaggagcgtgcgtcttcttcccagtgcagtggtggtttgagtgctgtgggctctggtggggagggggctctgctcctcttcatttgctggtagctgggtcagggcactggcgcccagtgaggatgcccactagcattctgcc

SEQ ID NO: 10882 - DNA, 441 bp, Homo sapiens
  misc_feature (1)...(441): n = A,T,C or G
natcgagatcgatagctcacgcggnggaattcgccccctaacctaatggttgcttacagtaagaagcacatttcttttcttgatgctttgaagacagtttaggtaatgaatgggtcaggagtgcttactgtggattttctcctctaggaaagaattagtactgcataagatgattaaaaataatgcttttgtagtttcatttcggaatagtgaatgtactatgattgttgtgcgctcaaatcattaactgcagggttttttttttctcccccccacaggggttgggtgcaaaaagaaagatccgtcaagctggggtcattgactaaccacatccacaaagcacaccattaatccactatgatcaagttggggggaatctggtgaagggttctgaaaatctccctcttcatccctcccgaaatctggaatacttattctatg

SEQ ID NO: 10883 - DNA, 459 bp, Homo sapiens
  misc_feature (1)...(459): n = A,T,C or G
aggggcccccnggntggaaatgagaccattggccatgcnagctacgtacagngcggnggaattccgcttttcatatttcttcacatatctgaaaaatgttgaaagcctaagccaggaataaaagaaaagtagagataataatcagttctttacaaccgatggtaattaagcttgtattcacaagacttcatgccaaattcactttttagcattatatctaacaaatcaagagaatccttaatattgctgcagtgagtttaaagtgggttaaagtggccatttgacaatctcatatttgttttctctacatggcttatatgatgtgtgccttctagggaatgaagggaagtggtgatagagatcagcagcagcaggggctttcttttatattttatgtataatttaatgggctttaagtcaccactattaagacttacaaataagcaaatactttcctgg

SEQ ID NO: 10884 - DNA, 452 bp, Homo sapiens
attgagacctggacaggcggggttgataacattctatcacccattaaggtttgttgttgaatcaacagtactcagcatattattacagtacatcagaactcatgccaacagtctttatgatgggattaaggtggacaagatctcctaagatctgtgaatgggattaaggtggacaagatctcctaagatctgaaaagaaaccttaatacgctcatatggttggagtgttaagtgaacctctgattttgtcagggtttttctacgtgtaggcgtgaatagggggcaccccttcaaaactgtacaaagaagacgactgttttccatttccatttaaacatttttagccacttcatttctatttattgaacaggtcaaatttgtcttgttatttgtgagtacagtacatttaaaaaacatccttatcggttatttttttttcagtcggagtttgg

SEQ ID NO: 10885 - DNA, 536 bp, Homo sapiens
  misc_feature (1)...(536): n = A,T,C or G
nnctcgaancacagtccagtgtggtgcaattcgcctaaataaacgcanaatttgcttatactccatcacattcagatgtcttggttgtgacttattaccagtgtggcagagaacccaagttacattttagatcaaaatattctttatgtaggtattgttaaaaggctagagcctacaagttgctcttccatgcgttggtcagggggccctgaaaacactggtaatattaagagtctttctcagggtaacttaatgttttcttaatgaacagtgtttccagctacaaattcttccaataaattgtcttcctttttgaaaagtactctcatagaagaaatttagcaatttctcgttgactgactcagtctattntaagtattcagaaaagattttgatccccattgagttaatgctctgccttgaaaattatttttctgatccttggtagggataacattttttttctactgaagtcagaggataggaaacagtatttctcttctgcatacatgtatggattctgtaaaaagattata

SEQ ID NO: 10886 - DNA, 496 bp, Homo sapiens
  misc_feature (1)...(496): n = A,T,C or G
nacttgagaccatggaagngcgggggattgtagacatctgtccangcggtggaattcatgtgagttcctcaaaagcagcgagtctgcctaattcatctctgaaatcttggaacctagcaggctgcagtcacagagcaggcactcagtattttggtgctgagctttcctcctgtgcctgctggacaagtatgcaccctgcatcctgcatagaagcagaagcatgcatatgcagccacaagatttgccactctcttgaggatcaaggcgggagcgtgaccgcggagcaggagaggagacctgaatgaagtatgtaccagggacatctaagagatgggcattccaagcagagggaccagcagctggaaaggccctcctgagggagcagacctcgtgtgttcatgttcaaggagcagcatggaggccagtgttctcgaggggagagaggtcaaggcatgggaccttgatccttgaggctgttgtagggtctctggctttc

SEQ ID NO: 10887 - DNA, 454 bp, Homo sapiens
  misc_feature (1)...(454): n = A,T,C or G
attcgccgccccnattgaagacccttagtccgtgtggtggaattcgtctttaaaccctgcgtggcaatccctgacgcaccgccgtgatgcccagggaagacagggcgacctggaagtccaactacttccttaagatcatccaactattggatgattatccgaaatgtttcattgtgggagcagacaatgtgggctccaagcagatgcagcagatccgcatgtcccttcgcgggaaggctgtggtgctgatgggcaagaacaccatgatgcgcaaggccatccgagggcacctggaaaacaacccagctctggagaaactgctgcctcatatccgggggaatgtgggctttgtgttcaccaaggaggacctcactgagatcagggacatgttgctggccaataaggtgccagctgctgcccgtgctggtgccattgccccatgtgaagtcactgt

SEQ ID NO: 10888 - DNA, 448 bp, Homo sapiens
  misc_feature (1)...(448): n = A,T,C or G
attgacgaccctttgaagngccttggaacacctgctcgatagtcaacggtattagcagaatacaatatgtcttgcgatgatgtaagtctttttttggttagaaaattatagacctgcatgaaaacactgaaatttttggctttagaaaggtagacattttattagcaataagttttctctgtggaatgaatagtgagaatatacttagagcattgattctaaggtacttttacatttaacatctttggcattgagatccatcttacagtcaatgagatctgacaaattgggagagttgacaatttaatctttcttaatgacataaaatcatgaagcatcttataactgatgcatcttagattcagtgaagtacagtggttgtttgttattgaccaaaaatggctcaccggatattgggtttatacactactgctacttatcaagagat

SEQ ID NO: 10889 - DNA, 453 bp, Homo sapiens
  misc_feature (1)...(453): n = A,T,C or G
nattgtagaccgtagncagtgcggnggaattcaggctgtgtccactgaggctaagatgactgcctttcctgattggccttggctttttcatacattgtgtgacccttgccctatgaccctttggctgaccttaccggaagccatgacgacagcagccttttgccattagacgcagggtgatggtgaggattccaagggttagacaaaactggttaatctgaactaggtgactgttaccttgcgtgttttgtggccaaaccaccaccaaaaacctcacactgtgatgtggtggaggtggatacagcagtcggagaacatctggcagagacaaatacggaccacctgttcgtacagaatacaggcttattgtagaaaatctttctagtcggtgcagttggcaagatttaaaggattttatgcgacaagcaggtgaagtaacctatgcggatgccn

SEQ ID NO: 10890 - DNA, 414 bp, Homo sapiens
cagctactcaggaggctgaggcaggagaatcacttgaacctgggaggcagaggttgcagtgagcagagatcacgccactgcactccagcttgggcgacagggcaagactccgtctcaaaaaaaaaaaaaaaaaaaaaaaaaaaaaaaaaaacccggcccaaaaaagggtccccccccccccctaaaaaaaacccccgggggtaaaaggaaaaaaaaaacccggccaaaaccaaaaaaattattcccgggccctaaaaactaaaggcccaaattggggttttaaaaaaaaaaaaaaaaaggggggccaaaaaaaaattttctttcccttcaaacaaatttgaaaaaaacggttttttttaaaacccccccccccggggaaaaacaccccttccccctgttttcccaaaacaaaag

SEQ ID NO: 10891 - DNA, 407 bp, Homo sapiens
  misc_feature (1)...(407): n = A,T,C or G
cagaaagtataatgcaaatattcaaaaatccaaaatctaaaacacttgtgatccctagcattttggaaaagggatacttaatatgtatataagacatgtggattgttagtacatatgttaaaccaatgtgtaacttaacaagtattttgaataattagtgttgagggggatgcggaatccaccataatcagtgtttttaggatgtatggaggtttccagctcttctgattaatacagaattccttcatggactacacttgattttagttaaaaggctgagcagcgatagactcttcatggaaatagattttttaggagacatttaatggtgggaaagaaattttccaaaaggctagagaaaatagagagcctttgagtctagttttaaggtcctgttttactcagcn

SEQ ID NO: 10892 - DNA, 448 bp, Homo sapiens
tcttgactccgctgctcgccatgtcttctcacaagactttcaggattaagcgattcctggccaagaaacaaaagcaaaatcgtcccattccccagtggattcggatgaaaactggaaataaaatcaggtacaactccaaaaggagacattggagaagaaccaagctgggtctataaggaattgcacatgagatggcacacatatttatgctgtctgaaggtcacgatcatgttaccatatcaagctgaaaatgtcaccactatctggagatatcgacgtgttttcctctctgaatctgttatgaacacgttggttggctggattcagtaataaatatgtaaggcctttctttttaagaaaatgaaaaacaggactctgtgccatttatactatattccaagccagagccgcttgaaaaattaatgaccgctcttaaccccagagagaa

SEQ ID NO: 10893 - DNA, 541 bp, Homo sapiens
  misc_feature (1)...(541): n = A,T,C or G
ntttagaccacagtcagtgtggtggatttcgccgtctgcttttacctgctgatgctggtcatggtggaaggctttggggggaaggaggcagtgctgaggacgctgagggacaccccgatgatggtccacacaggcccctgctgctgctgctgcccctgctgtccacggctgctgctcaccaggaagaagcttcagctgctgatgttgggccctttccaatacgccttcttgaagataacgctgaccctggtgggcctgtttctcatccccgacggcatctatgacccagcagacatttctgaggggagcacagctctatggatcaacactttcctcggcgtgtccacactgctggctctctggaccctgggcatcatttcccgtcaagccaggctacaacctgggtgacagaacatgggagccaaattttgtctggttcggttctcctcatcctgactgccctacagccctncatccttctagtcttggcccacggtgggcagaattcgttgtcgcctcccctattctctannaacangng

SEQ ID NO: 10894 - DNA, 490 bp, Homo sapiens
  misc_feature (1)...(490): n = A,T,C or G
cggccggnaattgagagcatacgnattgagcnccntaggcaagngtcgnggaaatcggagaggagaggcctcgggatgtctctggcagatgagctcttagctgagctcgaagaggcagcataagaggaggaaggaggaagctatggggaggaagaagaggagccagcgatcgaggatgtgcaggaggagacacagctggatctttccggggattcagtcaagaccatcgccaagctatgggatagtaagatgtttgctgagattatgatgaagattgaggagtatatcagcaagcaagccaaagcttcacaagtgatgggaccagaggaggccgcgcctgaataccgcgtcatcgtggatgccaacaacctgaccgtggagatcgaaaacgagctgaacatcatccataggttcatccgggataagtactcaaagagattccctgaactggagtccttggtccccaatgcactggattacatccgcacgg

SEQ ID NO: 10895 - DNA, 454 bp, Homo sapiens
  misc_feature (1)...(454): n = A,T,C or G
catcgagcccccnattgacgacccttagnccgtgtggtggaattccaacttgcaggttattctcgtcatcgtgtccgctttcagtcgcatgggctggaaggattgaataaggaaataatgatggaactgggtcgaatttcttctagaaatcttggtcgtgatgacagagttattggtgatcatggaaaagaagcaagatttcctttcctggatgaaaatgttgtctcctttctaaattctctgccgatttgggaaaaagcaaacttgactttaccccgaggaattggtgaaaaattacttttacgccttgcagctgtggaacttggtcttacagcctctgctcttctgcccaaacgggccatgcagtttggatcaagaattgcaaaaatggaaaaaattaatgaaaaggcatctgataaatgtggacggctccaaatcatgtccttagaaaatn

SEQ ID NO: 10896 - DNA, 544 bp, Homo sapiens
  misc_feature (1)...(544): n = A,T,C or G
ncctcgatcaccantcagngngnnncattgtnatcactatccagtgtggagcgaattcgtcattaccaaggcttttagaatgcagtttctcatttgctgtggacatgaccataaaaaaatttcccagtaggttttctatctgctacgttgctagcaatcagcttattgggaacagttgattaactgtaatagaaatgcaatacaaataaaatgtgaaccacatgtgatttttctttaaaatcagtgagatttgaaaattctcctagatctcttgaatcatgcaaatttgctttgcctttatattgtaacccttgtgggttgctaataaccaagcagtttgtagtagagttaactcaggctcgttctagggactcattcatgttcactcactgtacactcatgtctggaaatgtaaaatttacttttatactattgtatgtanggctgacaggacaactggatcagtttcataaaaaaggatgtatgcattagaaaagacattggatggtcatttcaaagaggcttatgaggctgtgaaccaaan

SEQ ID NO: 10897 - DNA, 454 bp, Homo sapiens
  misc_feature (1)...(454): n = A,T,C or G
ctttgaatagcactacaccangcggnggaattcgnggtgtgcagagctcttgccagagacagctgtcttttggagagccacttctgttttggggaagatgtccttaaagagcagactcgggtgatctacatagatgttctcttatcccaggggcaatacagccagtgttgtgctgataactgggtctcttaaataaaagaggccccaatttatagggtttgcagattttcatggtgtcaatgctcccacaatggacaactaacagtggtttaacaactggcttgcaaaaccctaattatctcactatgcagtaggagccagccccagcataccactgaatcttgacgtagttccagacagtaacaggaagctgttgtcagggattatccttaggactttgtgtcctgaagtaagaaaatttaaggtccacttgacagcacgagagatttcactt

SEQ ID NO: 10898 - DNA, 485 bp, Homo sapiens
  misc_feature (1)...(485): n = A,T,C or G
cccccccccccccgcccnccaattganncccctaatcgtagaccctaggccanngcgnggaattcgctgacaggaggtgctcactaaataaccaaaggcagaaaattaactataagttacatcctctttttttcttttcttttttgagacagagtcttgctctgtcgcccaggctggagtgcagtggcacgatcttggctcactgcaagctctgcctcccgggttcaagaaattctcctgcctcagcctcctgagtagctgggattacagcgtgcgccaccgtgcccggctaatttttgtatttttagcagagatgtggtttcaccatgttggtcaggcgggcctcgaattcttcaccttgtgatctgcccacctcgacctcccaaagtgctgggattacagacgtgagccaccgcgcctggccagttacatctttttatgaggagaagagactggggcaagaattttgttgaattatatctgtc

SEQ ID NO: 10899 - DNA, 546 bp, Homo sapiens
  misc_feature (1)...(546): n = A,T,C or G
nntttcgaancacagtccagtgtggtggacttgatacacgctcagctaggactcggctttgcttaattccatgtctgtgcccctccaccagcacccttcatgctccatcaaccgaagtaattgtggcggctgggacttggaaaatacttgccagcactgtaggggagtaggattggtacaaaccttctagagggcaatttggcagtaactgaagtaataaagtgagagagtcagagagccaagacagaaagggagaaagaagaaaaggacacacgtctgtttgtatgcataaatgtccgtcacagcattaaaaaaaaaatttaagcagcctaaatacccattagtagggaagggactaaacagattagagtatttccatataatggaatagaatgggaagcttagagtattaagtaaggctacattaataggcatggaaagatacctacaatctattcaatgaaaaaaagatttaaaaatagttggtatcttataagtaccactatataccncatatatanagatgcacactatatattaaacagg

SEQ ID NO: 10900 - DNA, 518 bp, Homo sapiens
  misc_feature (1)...(518): n = A,T,C or G
tgtggnanannnagacncaacactcgatatcccctgtgcagngtggatgtnacctcttgaagngtggnggaagtcggcggacattcagactgagcgtgcctaccaaaagcagccgaccttctttcaaaacaagatcagggtcctgctgggagaaactggcaaggagaagctcccgcggtactacaagaacatcgggctgggcttgaagacacccaaggaggctattgagggcacctacattgacaagaaatgccccttcactggtaatgtgtccattcgagggcggatcctctctggcgtggtgaccaatatgaagaggcagaggaccattgtcatccggcgagactatctgcactacatccgcaagtacaaccgcttcgagaagcgccacaagaacatgtctgttctcctgtccccctgcttcagggacgtccagatcggtgacatcgtgacagtgggcgagtgccgtcctctgagcaagacagtgcgcttcaacgagctcaaggtcaccaaggctg

SEQ ID NO: 10901 - DNA, 499 bp, Homo sapiens
  misc_feature (1)...(499): n = A,T,C or G
nattgagaccctggaanngncngnaactgatgaccatagtccatgcggtggaattccagggaaggaaagaacttgcatgttggtgaaggaataagtggggtggaagaagtggggtgggacgacagtgaaatctagagtaaaaccaagctggcccaaggtgtcctgcaggctgtaatgcagtttaatcagagtgccatttttttttttgttcaaatgattttaattattggaatgcacaatttttttaatatgcaaataaaaagtttaaaaccttaaaaaaaaaaaaaaaaaaaaaaaaaaaaaaaaaaaaaaaaaaaaaaaaaaaaataaggggggcctgaaaaaaagaaaggtacattaaaccccctaaaaattaaaagggggtcctttttgagatcccgccctttgtttatgccccccccccccgcctttttgtcctttggaggggcccccccccccgtttgttttttaataaaaaagaaaaatattgatggggggt

SEQ ID NO: 10902 - DNA, 453 bp, Homo sapiens
  misc_feature (1)...(453): n = A,T,C or G
cctcgatagcgtacattagaccgngcggtggaattctctcgatctcctgacctcgtgatccgcccgcctcggcctcccaaagtgctgggattacaggcgtgagccaccgcgcccggcctgggctacatttttaagcagcaggatttagaaatgaaaccatctcttttctccttcctacactctattggagtcagcaaatgatttgggagtttgggcttcttagtggctggaatgtttggggtaagagttagttgaggtggaagtggaggctaattgctccccaggaacttaatggttgtaagggcacttaggccacatcgcactctacccacttaaatgatatataactatctcagagcctcaattcccacattaaaatagggatcgtagttgggagttgtgaactttcctcagtgtctaatgcacagaaaccattcaataaatgttatttta

SEQ ID NO: 10903 - DNA, 465 bp, Homo sapiens
  misc_feature (1)...(465): n = A,T,C or G
gccgccccggaagccaaacatggactacgcaacggaccgcaaancnnnnaannnnnnaagaagaaacatgatgagctataaatatgctgaatgaaagggattacaaaagcttgttgcgctttgcatcagcaagggattgacttgtgaaaaaatgatctgaaaaaaaagtttcaccgtttgtcttcttacctcattttaagaagcatgtgaaaatgggatactatagactactgagaatttcagaaattgagaacaatttcataataaaacggctatatttgaagagagaatacattttatataaacaggaaaatacatttgacactttatggaattttatgagactttttgtgggaacagaaggtcttcaaattgtaaaatgtaaagattgctctttttattaagtctttaacagggatgtatttcattgtatgttttgggcatggctttggaataaatcatttt

SEQ ID NO: 10904 - DNA, 553 bp, Homo sapiens
  misc_feature (1)...(553): n = A,T,C or G
nggtcgatcaccantnannnnnnnnntttggaacactactccgagtggtggaattcgtcttctctaacaagcaggacccacttgagcgccagtttgagcgctttaaccaggccaacaccatcctcaagtcccgggacctgggctccatcatctgtgacatcaagttctctgagctcacctacctcgatgcattctggcgtgactacatcaatggctctttattagaggcacttaaaggtgtcttcatcacagactccctcaagcaagctgtgggccatgaagccatcaagctgctggtaaatgtagacgaggaggactatgagctgggccgacagaaactcctgaggaacttgatgctgcaagcattgccctgacctattccctcttctcactttggggactgttcccatcacccacctctggagcttacactggttctgnggtttgttctctacccttccaaccaatcacacccctggccttttttttttttttttaaaagaaaaagacaaaaaaaaggggaagtgggtttcccccccccctcctggccccc

SEQ ID NO: 10905 - DNA, 545 bp, Homo sapiens
  misc_feature (1)...(545): n = A,T,C or G
cccttcgatcaccattcagagaggngcattcgatgatcactgcagcctcaacttccttggctcatacaatccacccacctcagcctccctgcctgagttgctggtgttacaggtgcaagccacagtacctggcaatcacctagaacttctgcctccagagtttaggacatgaactcagctgtgacctcaacttaattttagttacaagtttggggttagatataatgtatctaagacaaggccagggcttggtggttcacgcctgtaattccagcactttgggagacctgggtgggcagatgacctgaggtcaggaattcaagaccagcctggccaatatggtgaaaccctgtctctactaaaaatacaaaaattagccaggcgtgatggcgcatgcctgtaatcccagctactcaagaggctgaggcaggagaatcacttgaactcgggaggcggaggttgcagtgagccgagattgcgccactgcactcaagcctgggtaaaagagtgagacttcgtctcaacatacatacatacatacatan

SEQ ID NO: 10906 - DNA, 536 bp, Homo sapiens
  misc_feature (1)...(536): n = A,T,C or G
nctcgatcaccgttcgtgnggngcaattacaagatggaacaatagttntaatgggaacatacgatgatggagcaaccaaactcaatgatgaggcacggcgtctcattgctgatttggggagcacatctattactaatcttggttttagagacaactgggtcttctgtggtgggaagggcattaagacaaaaagcccttttgaacagcacataaagaacaataaggatacaaacaaatatgaaggatggcctgaagttgtagaaatggaaggatgcatcccccagaagcaagactaatggaaatgtggagagaattgaagaaagcgcactttcactcttaatgggagagctataaatggcagagctatgtgtaaatattttaagagcatgcagccatcttggtgtgtgcatgagtattgtctcttttgatatcaggattatttattgctaacgtaaatagatagcattgtaaataatcatcacaatgatcaaatcactgaaccatgtctacgcacattttcctaaaagtacaatgtt

SEQ ID NO: 10907 - DNA, 477 bp, Homo sapiens
  misc_feature (1)...(477): n = A,T,C or G
gcgccccccccnttnnnatcgtagacccttttcagtctggtggaattcaacgtgaggagcggaaacgactcgagtcccagcctgaccccagtccttccctcttggactcagagttggtgtggcctacctggctatacatcttcatccctccccaccatcctggggaagtgatggtgtggccaggcagttatagattaaaggcctgtgagtactgctgaaaaaaaaaaaaaaaaaaaaaaaaaaaaaaaaaaaaaaagggggcccttttaatttaaagggccccttaaaaccccgtaaaaaaccccgggggggccttttaaggcccccccctttgggggttgcccccccccccggtttttttttgcccgggggggggccccccccccttgtttttttaaaaaaaaaaaaaaaattccccccccttggggggaaagggggttttttttttggggcnnnnnnnnntnnnctaaaaaaaaa

SEQ ID NO: 10908 - DNA, 467 bp, Homo sapiens
  misc_feature (1)...(467): n = A,T,C or G
gaatgtcccggntgganacttagttgctgtatatgggcgtcngganaancanannanattnctagnactcaaggccccagcctggcacaaatggatgcatacagttttgtgtactgccaggcatgtgggtgtgggtgcatgtggttgtttacacacatgcctacaggtatgcgtgattgtgtgtgtgtgcatgggtgtacagccacgtgtctacctatgtgtctttctgggaatgtgtaccatctgtgtgcctgcagctgtgtagtgctggacagtgacaactctttctctccagttcttcactccaatgataatagatcacttacacctaaacccaaaggaaaaaccagctcttggtccaattgttctgctttaactgatacctcaaccttggggccagcatctcccactgcctccaaatattagtaactatgactggcgtccccagaagtttctgggcttacacg

SEQ ID NO: 10909 - DNA, 456 bp, Homo sapiens
  misc_feature (1)...(456): n = A,T,C or G
nnnaaactgattgcatacntcgngcggngcaantcggcccaggtagggaaggccaacaactatggagctacccaatgttaccagagccagggggcccagagccagcagttcaaggcacctcggtgcattgcaccaaggagagcctgtgtcactcgtcatgcctggctttggaggagcagatgtctgcaagggcgctgtgggaagcttctgatcagaatcagctctgagatggtcagaaatctcagaagcttccaggctaggattggaagaattgacttccagacccaggaagtgccatagaggtgcatggaggtggaatggcacggtgcttataaacggcaaggtagggagccagcgctggacacagagccagctgaacagtgaaggcagaagagtagggggcgctgaccctcatcccaggggtcaggcagaaggggccgatgggatgggtcangn

SEQ ID NO: 10910 - DNA, 462 bp, Homo sapiens
  misc_feature (1)...(462): n = A,T,C or G
gagaacccggngggnnaaacttggattatcgaaggctaggaaaacccagaaaagcagtgcccctctcctgccaaagaggagtcatcccccaaaaagacagagggggagccccaagcccaagtctttcctcccagcagcggttccccccaactccttaattttattctccgctagattttaacgtccagccttccctcagctgagtggggagggcatccctgcaaaagggaacagaagaggccaagtccccccaagccacggcccggggttcaaggctagagctgctggggaggggctgcctgttttactcacccaccagcttccgcctcccccatcctgggcgcccctcctccagcttagctgtcagctgtccatcacctctcccccactttctcatttgtgcttttttctctcgtaatagaaaaggggggagccgctggggagccaccccattcatccccg

SEQ ID NO: 10911 - DNA, 410 bp, Homo sapiens
ctgtgtcgctgtgtggtcctttgccgtgtgtactgcgagagtgaataccattctcattaatcagactgtcgacgttccagaaaatgtcaacattactctgaagggacacacagttatcgtgaatggccccagaggaaccctgcggagggacttcaatcacatcaatgtagaactcagtcttcttggaaagaaaaaaaaagaggctctggttgacaaatggtggggtaacagaaaagaactggctaccgttcggactatttgtagtcatgtacggaacatgatcaagggtgttacactgggcttccgttacaagatgaggtctgtgtatgcttacttccccatcatcgtcgttatcccggagaatgggtctgttgttgaaatccgaaatttcttgggtgaaaaatacatcc

SEQ ID NO: 10912 - DNA, 465 bp, Homo sapiens
  misc_feature (1)...(465): n = A,T,C or G
cgagatccgggnnggnaaattcgaacttacagaagcgtcanggaaaacccactngncttcttactctatcaaagggatgtagattcacttgtaaatgttttcgggctccctatactagaatatgagttcagtgactgtggagatttttgtttggtctgcatgctgtatttccagcacctcttttcaccctttcctcgcattcataagactaaaatttatcataatttggatgtcttttaggattggaactgttggagtaagatcgtattgtcatcttctcactaaagattttgcaggtggaattatgtgtggatgctacctttaatttctagcattaaaattctgaagttactttattatttttctgtttgggggtggggttttttttgatttggacagagttttgctcttgtcgcccagcctggaagtgcaatggtgcgatctcagctcactgcaacctctgct

SEQ ID NO: 10913 - DNA, 446 bp, Homo sapiens
  misc_feature (1)...(446): n = A,T,C or G
cttcgaaatcgagaccactgnccgngcggtggaattcatttattgatttgtatttttagagacagggtcttgctctgtctcctaggctggagtgcagtggcacaatcatagctcactgcaacctcagcaaatttttagaattttaatttttgttggtactgggctcaatatattgcctaggctggtctcagactcctgttctcaagccatcttcccacttcagccttccaaagcgctgggattacaggggtgagccaccatacctggccttatttagagttttatgattaggctttatttgtttttgtcactttgcaaccatgttcgtggattctttctgtcctggatgatggattgctatctctttgcatattctaggctctgattagattggggggtagaaagagaattgtttcttggcaaaataagaaattccaggaagacat

SEQ ID NO: 10914 - DNA, 458 bp, Homo sapiens
  misc_feature (1)...(458): n = A,T,C or G
aggaaaaaattcgagactcgagtacgtgcggnggaattcggaaacagcaacacaggctgcgctgttggtaggagtgaaaaccagtataattcttctgaaaaacatttatcagaaacttaaaatatttcataccgttggatccagtagcttcttctaaatcataaatgcagacaatgtttaggtaaagacatactcattaagtgttatttattttactcaagaactggaaaccaactaaatgccttctatagaagtaatttttgatgaggagaaatggtacaatactaattaacaacttggtttaacatgtttactgagcatctgttaagtgttgggggaaaaagcagcacgatccagagctataggtacagtgtgatctcagctttgcaaacacattctctacatagatagtactaggtattaatagatatgtaaagaaagacatcacaccattaatn

SEQ ID NO: 10915 - DNA, 550 bp, Homo sapiens
  misc_feature (1)...(550): n = A,T,C or G
agaaanaaaanttttgaacaccccttcggagcccagttcgngaggaggaattctctccctctgcttcttttctcttctgccctccttgtgggcagtcatgaaaatcaattcagactgtgttgattagcagatttattattctattgagaaagcactggaatgttttgtgagattatttttatatgaaggaatagcctgaactcaaacagatggtaagaatagtacaaacaccttagcacatcactgcacacacagtattctgaaaggagatttgacacttaattcccattttcttaaaataacagttttgttgacttaaaaatatgagatacataggatgtgaaaaaaaatgtttgcagtactcagcaaaaaatagggtacataaagcagggtggctgtccatccactgattctggggtgagaagcgatttctacctcgcaagagtgactagaaagtttctaggagcacctccaggcttgcaaagaaagtgaggcctcttggatcctttcctcagtgtgatatgacagccagtataatcaataccctang

SEQ ID NO: 10916 - DNA, 450 bp, Homo sapiens
  misc_feature (1)...(450): n = A,T,C or G
nctcgangtccactagcccagngcggnggaattcccaaaagaagattggagcctacgatcagcagatatgggaaaagtcaatcgaacagactcagattaagggtttgaaaaacaaaccgaaaaagatgggccacataaagccagacttgattgacgttgacttaatcagagggtcaacatttgccaaagcaaaacctgaaattccatggacatctctgactcggaaggggcttgttcgagttgtattttttccattgttcagcaattggtggattcaggttacctctttaagaatctttgtttggctgttactactttatttcatgcaagttatagcaattgtcttatatttgatgatgcctattgtgaacataagtgaagtacttggacccttgtgccttatgctactcatgggaactgtccactgtcaaattgtgtctactcagatan

SEQ ID NO: 10917 - DNA, 489 bp, Homo sapiens
  misc_feature (1)...(489): n = A,T,C or G
cgtgatgagccctatcgagaccctaggcagngncgnggaattcgagtaatgggcagccttgcccctacctgccctccccactcaacagaggaggcccccagtccccccacctcctcgccgccgccgtcgtcgccggttactgttctgggacaaggagactcagatctccccggagaaattccaggaacaactgcaaaccagagcccactgctgggaatgtcccatggtgcagccgcccgagaggaccatcagaggccctgcggagttgttcagaaccccaactctctctggctggctaccccctgaactactgggtctctggacccattgtgcccagccacccccaaaagccctcatgcgagagctgcctgaggaggcagccgctgaggaggaaaggagaaagattgaagttccaagtgagattgaggtcccgagggaggccctggagcccagngttccccttatggtgtctttagagatctccctaan

SEQ ID NO: 10918 - DNA, 467 bp, Homo sapiens
  misc_feature (1)...(467): n = A,T,C or G
nattggattcatcngcgtgngcaggaancctcactttcaggtaagcccattatgaagggataaggattttaccgtattccactggaataggggaaaaaaccatctcactttaacagaaagcatgcaagtgcccttttctggaggaggtgggaatgagggagtacacagactttagcttaaactgtggcaggagggtcttaattttggcagaacagggcatggtgttgcatctcacctgttccacgcttagtacaagcccttcttcccagtccctgtcacctgcctcattttgagctttcactgtattttcctgttgttccagggaagatgaagtgcatttaaatgctgcagttggatactgtgaagatgagaccccttagcctgtgggattaactttccatggagcccattctggagagacttgagagagcacctttaaaaggaagttagctaagatactgccctcc

SEQ ID NO: 10919 - DNA, 476 bp, Homo sapiens
  misc_feature (1)...(476): n = A,T,C or G
catagaaaactgagagccntangcagagngcnggaattcgnggcagtaaaaaacttactctcttttttcctctctgtaattggttatcaagaagaatttgcttaatgactaacaccctaagcatcagacctggaatttggagttgcaaagtgactatcttcccatttcccatctcattttcaataacttcagcctcccattctttcctttggaatgagagtttctttttacagaagtaggaaaggcttctcagaaaaaaaaaaaaaaagtttgggctgaatttacctcagggcttgaaaggggaaaatttgatttattattttcgcttttggccacacatacacacatactgtggggtccacacccccaacatgcctgtgcccagagccaacaccccttaaaaagggggctctgggggggtacctctggataaaaaaaatgcatgccaagccaccccacaaattttcaccaggggg

SEQ ID NO: 10920 - DNA, 543 bp, Homo sapiens
  misc_feature (1)...(543): n = A,T,C or G
agaaaccanncttgaacaccgccctgaggcccattcgcgagncacgaggaatggagcttgtttctgtgacccaggagaacttattgcaagactacaggagttaacagatggccagctccttattttttaatgtagaataactcctgagtttatatcaaatcctgaagaaataagcctcagttttccatctgtttttgataagaataagaaagggagtgagcgtgaagatggtggttagcagtttcactaagactgatattttaggcctcttgttcacatcaaaagatattggtgtcagaataccagcattttcctgccatgcaaaggattaaaacttagtttacactatgtggttacaaatatatgtcaatgtacattttgaacatatttatgtgctatggaaagaaatgctggtgactaaaataaggtttactctgaaagaggaggaattttattcaaagcattcaaacattntattcaagtgtttcaaaattcaaagcattgtattcaaagttgcagtgaaggcatcaacttatgtaaaan

SEQ ID NO: 10921 - DNA, 552 bp, Homo sapiens
  misc_feature (1)...(552): n = A,T,C or G
ggggaaccannccttgatnaccannatcgaagcaccgcttagngnngggcaattcctggctttgtaggggcggngccaagaaagtgttctggctgggagtgggcataaatttaagaaactgattcgaggcggngaggacaggcgggaaggccgcaggtggagggttcagcggaggccggcttctctcagtacttggtaaatacgtaggggagttcgtttcctgagctccggtaactgcctgaccttgtaggccttgtacctctttgcagagagagccaggtagagctccgggaacaaattgacaacctagccacagaactgtgccgcataaatgaggatcagaaggtggccctggatcttgacccctatgttaagaagctacttaatgcccggcgacgcgttgtcttggttaacaacattctacagaatgctcaggaacgactgagacggctaaaccacagtgttgccaaggaaacagcccgcaggagagcaatgctggattcgggaatttacccccctggctccccaggcaaataacagatgagcctatgn

SEQ ID NO: 10922 - DNA, 440 bp, Homo sapiens
ttaatttgaagaccctagtcattgtggtcgaattcggaaatgggtgatggcaaactgattatgtatgaagagacctcattttgctggtgaagcctgggtatgcccagctactaataacaagtggtcaggcaaccatgacagcctccctatgtgaatataatgctaaatgtatctaagcgaatttaggaccacctgttctgatttattttttaatccttcaaatacaacatggagttagatggcttctccatcaagacttcaatctcaaagggcaatactgtgcggcaaaagaagagctggctcctggaggacttctggggccccaggcatggatcaatgtttgcatcagaaaagaaagcctgtcagcaatggaggtgctggaggatttctggaaggggggggcctcattcaagaccaccaagggactgctgactgttcta

SEQ ID NO: 10923 - DNA, 473 bp, Homo sapiens
  misc_feature (1)...(473): n = A,T,C or G
naactgatgnacatctgtacagngcggnggaanttgaagcaccctcccagaatgaagcgacctctactccccatcgtatccgcagaaagagttctgtcttgactatgaatcggattatgcagcagcttcggtttctaggtaatagtagaagtgaccaacaagagaaagagattctgccagcagcagagatttcagactctagcagtgacgaagaagaggcttccacaccgccccttccaaggagagcacccagaactgtgtccaggaacctgcgatcttccttgaagtcatccttacataccctcacgaaggtgccaaagaagagtctcaagcctagaacgccacgttgtgccgctcctcagatccgtagtcgaagcctggctgcccaggagccagccagtgtgctggaggaagcccgactgaggctgcatgtttctgctgtacctgagtctcttccctgtcgggaacaggaa

SEQ ID NO: 10924 - DNA, 452 bp, Homo sapiens
  misc_feature (1)...(452): n = A,T,C or G
attganncccattgaagacccctatacagtgcggtggaattccggtagagcagtctgaatgttcctcactaggaatccacggcaagacagttattcattcattcaacaaatatttattgaatgcccgctgtgggttagtcaccggagcggcaacagtgagtaaataggactatctctgtccccaagaatcttacaacacagtctctccctccagcatctggttttgtagcctggatgtgtctgctagtagccgaatggtggtcacaggagacaacgtggggaacgtgatcctgctgaacatggacggcaaagaggtgcgttctccgaggtcctgcctttccctccctcacccccacctcggttctgtgtccccacctgaaccgagctcttctctgcagctttggaatctcagaatgcacaaaaagaaagtgacgcatgtggccctgaaccca

SEQ ID NO: 10925 - DNA, 483 bp, Homo sapiens
  misc_feature (1)...(483): n = A,T,C or G
gggagttgncatcgtagaccattagactggagagccgtagtacgntcaagaatttgactttctgtgtttacttgtatgaggaaaaacagcacatagaggcaaccacagtatttaatttgtttggataatagttaacagataaacaggtacaccccatatacaattaccaatacttttgatacagttcatatttcagtacatcaacactattttatttacactctatttatgtacattaacatctttctaaagtcagtgcattgtcaacaagttttatacagtaatttacaaggtgaatgtagttaatagttaatttaataaattttccgctagttcatgaattaaaaaaattaattacaaccagtataacacaaatcacacaacattagtagattgtgctacctgtttaaataaaacatctgtaaagaaattatttaaaatcttccactttntaatgggacatgtccaggtaggaatggacag

SEQ ID NO: 10926 - DNA, 450 bp, Homo sapiens
  misc_feature (1)...(450): n = A,T,C or G
nattgatgnccntcctgcagaacncttagaccgtgtggtggaattcggggtgggtgacttgactgtgagactggattataacatggacaaatcttattttgcttaatgtgtttgtgtgtgtgtgtgtgtgtgtgtgtgtgtgtgtgtatgtatatatatatataaatatctttcccaatatgccccgttgacagtgtttaaattccacactaggactgctgatctgcacaatttaattatgtggttattcgagcacttaatttcactcaaggttcattgggctctgctctcctccctgccattacgggagctgtggacagagctccctcacttcaagattcctagtgtttttgcacaacaggttgtccaagtgagaaagactgagttgcgtgtctgtaaatgtctgcgcagggtgcacatgctgcgaggtctccatcctgcgggcctgtc

SEQ ID NO: 10927 - DNA, 482 bp, Homo sapiens
  misc_feature (1)...(482): n = A,T,C or G
gccaggccncncccaatgaaaactagcgcantcgcaggaancncgnaannctcagaaagaacacagagacacggtagcatccctgtcatcctgaccagntcttaagcttacatctgcaaggagacaagttactgacacgtaacacgaagaactgaaattatatcaatctaaaggccagtctcaggaaagccttggtaaattttaacttggtccggaagctacatttccagaaatgttgaccgacgggccgtaggcaggtagccagcggtcatttttagagctagagccctggtttgaggaattagatttcctgacaatcaggcaggttattcagagcatcttgttaccaaactgtctttgccttacctttgtaaccagtcacattggatgtcccccaaggctggattgatggtagggggcccggctaccatacctccttgggtgtcatctgtgtccttacatcagtagcaaaatgagagacn

SEQ ID NO: 10928 - DNA, 480 bp, Homo sapiens
  misc_feature (1)...(480): n = A,T,C or G
nnttttgaggacccttggaaanncccnnnnanactgacgtacatctgtccagngcggnggaattctgacagcagtggtactgcctggtaaaagaattggttctgtgacccgggaagctttggttggccttgatttcttctctggaggcttggaaacgcttcctctcttcttctgttcttcacgccccatgcccctgctagcgtattactgttctgtgacttccctgtgacctctgcagaactcctcatcctgcgtttggtctccaggtgtcccctttctgccgtgttcctaacattttgattcctgtcttgaaaaaagcacctgctgcaccgtaagcccagggatgtggcagctgcagtgggcttggctttgtgaggaactgagtgtgtccacgttgggggaacatcatacttgatacacacgtttttatttgcacaaagaaaatgctgtttttggagccagaattttcatgtctgattt

SEQ ID NO: 10929 - DNA, 370 bp, Homo sapiens
  misc_feature (1)...(370): n = A,T,C or G
gatcaagcctctggagatgctccaggaccaaggaaagaggagcgtgccctctgagaagttaaccacagccatgaaccgcttcaaggctgccctggaggaggctaatggggagatagaaaaggtcagcaatagatccaatatctgcaggtttctaacagcaagccaggacaaaatactcttcaaggacgtgaacaggaagctgagtgatgtctggaaggagctctcgctgttacttcaggttgagcaacgcatgcctgtttcacccataagccaaggagcgtcctgggcacaggaagatcagcaggatgcagacgaagacaggcgagctttccagatgctaagaagagataatgaaaaaatagaagcttcn

SEQ ID NO: 10930 - DNA, 487 bp, Homo sapiens
  misc_feature (1)...(487): n = A,T,C or G
agaattttggaaccctcgcaantaccgtgatacctcgcagngngcnggaattcctgcgagtacctccatggtcccggtggctgtgacggcggcatttgcgcctgtcctgtcctttaacagcgatttctcagatttgcgggaaattaaaaagcaactgctgcttattgcgggccttacccgggagcggggcctactacacagtagcaaatggtcggcggagttggctttctctctccctgcattgcctctggccgagctgcaaccgcctccgcctattacagaggaagatgcccaggatatggatgcctataccctggccaaggcctactttgacgttaaagagtatgatcgggcagcacatttcctgcatggctgcgatagcaagaaagcctattttctgtatatgtattccagatatctggggagggccattttaaaatgtcattctgcctttagcgaaacatccatatttagaaccaatggaaaa

SEQ ID NO: 10931 - DNA, 449 bp, Homo sapiens
attgatttgagtgaccctagtccgtgtggtggaattccgcacctcgccagggccggggccgggacgggacggaaaactggcggcttggtttgttcagcgcgtcgcggtcatggctctcgtttcaggcctccacggtgtgcacctggagtcaggagcgcgcttgtgcgtacagttcggttcagcatgtggaagaatggcattcagtgagctgtgtcatcgcttcagataaagaaaatgtcaccgtggctgcagagatctcctgggatcactctgaggagttactaaaagatgtaactgaactgcagatccttggtgaaatatctttcaacaaatctctatatgagggactgaatgcagagaaccacagaactaagatcactgtcgtcttcctgaaagatgagaagtaccattctttgcctatcatcattaaaggcagcgttggtggactt

SEQ ID NO: 10932 - DNA, 442 bp, Homo sapiens
  misc_feature (1)...(442): n = A,T,C or G
atcgacaatgatgaccctctgnccgngtggnggaattcgaagcacctacatgctgacccaggacgaagtcctgtgggagaaagagctgcctcccggggtggaggagctgctgaacaaggggcaggaccctctggcagacaggggtgagaaggacacagctaagagcctccagcccttggcgccccggaacaagacccgtgtggtcagctaccgcgtgccccacaacgctgcggtgcaggtgtacgactaccgagagaagcgagcccgcgtggtcttcgggcctgagctggtgtcgctgggtcctgaggagcagttcacagtgttgtccctctcagctgggcggcccaagcgtccccatgcccgccgtgcgctctgcctgctgctggggcctgacttcttcacagacgtcatcaccatcgaaacggcggatcatgccaggctg

SEQ ID NO: 10933 - DNA, 487 bp, Homo sapiens
  misc_feature (1)...(487): n = A,T,C or G
aattgagaccctagcagnggcggctgaccccggtgttgagcctaaatctgaaccttgtggagaggtcacaagaaagatccctaacagcactttggtttagtcagggctaggtgtcatcacctgtatgccctttggccaaggaaaccagaatttttcaggattttccccacctctggaaggctggaggaaggggaagacccactcagcagattcccatagtgcagggatcctcacaggcatgactttgccctttgtcatggatactgcagctcccagacagtcttctgggctttgatcagcctgcaatcatctgactagagcttgatttttggggcagggaaggtggtccttatatgagctgccacttaatgggccactggggatttttcaacatgaaaggtaccgagtctccaaatgcttgttgtagggcctaaaaacagggctcaactccaggttctgccactttctagctgagtgatgagggcta

SEQ ID NO: 10934 - DNA, 495 bp, Homo sapiens
  misc_feature (1)...(495): n = A,T,C or G
tgccagagccncggcccncctagaaaactgagcagccntancccacngncgnggaanncggtagatccacccttatgcttctcagtttagcatnaacctcttatggattttcatcaaattcagcgtgttggtcactggaaagagccttttccttctccttttcttactctcccctcatggtgttcccctcttaaaggagaggagcttttaatttacacttaccacctcatttgcttttctggaggccatgcaatataggcgggactacagagttaatctcctttttacaaatgaggccaagagaagcctcattggttcacagtcatgcagctcatactgtccacccttgtattctcagatgcaggacaattgcattttagttttattttgtggaggtgcagaatatttactctttctgtccaacccttgattctgccgaggaagacactgatggtttgatgagtgattcagctgtttttggctaagggcttttgg

SEQ ID NO: 10935 - DNA, 454 bp, Homo sapiens
  misc_feature (1)...(454): n = A,T,C or G
ntttgangacccctagtccattcggtggcattcccttggggtacttgatggccccctcaagacctttggaatccagccaagtgatgcacccaaatgatccacctttcgcccactgggataaatgactcaggaaagaagagcctcggcagggcgctctgcactccacccaggaggaaggatacgtgtgtcctgctgcagtcctcagggagaacttttttgggaaccaggagctgggtctggacaaaggagtaccctgcattacgtgggatatgtgtgatcaattggggacatgcgacacacaatgagggtgtcatgacaatgcatgacacgtacggttatatgtggcagtgtgaccccttgacatgtggcgttacatgaaagtcagtgtggcacgtgttctgtggcatgggtgctggcatcccaagtggcaggatacatgattggtggtctatat

SEQ ID NO: 10936 - DNA, 478 bp, Homo sapiens
  misc_feature (1)...(478): n = A,T,C or G
catcgagnccccatcgtagaccactaggacagngcggnggaattcctcatagcagtgttttgtattttttctaattctttagctctcaatattggattaaagtcttgtttgtgaatatagtttccgtatggcaaatgatttcttgcttattagcttttgttaaagaatgcttagtaagagctaagcttttaaaagtaatgcaaacatttatcgttaataaaacctatggtgtaatatcatataatgcttttctttgatctttggagaattattcttttatagtagtatacatgaattttgatttttaaagcatttaaaaacaaatctcaatacattaaaaaacctgttattgttaaaaaggaaattaccatgcctttaagaaacaaggatgtacatcttcaattcagcatgagtgtccacatctagaaggctctcattgcagttgtttacagttaaggtacctctatctaaagggcca

SEQ ID NO: 10937 - DNA, 479 bp, Homo sapiens
  misc_feature (1)...(479): n = A,T,C or G
gggncggggccgttttgaaaccctattgtagacattagaccangcggtggaattcattctcttgctctcactctcacttcctttctcttgctgtctcttgctctctctttcgtgctctcctgctctctctctcctattgcccccccaaatgggtgtcccttacaaaccagaaaacgtggacttgaatgacgtcctggtgccaaagccgttctctcagttctggcagcccctgctcaggggcctgcactcccagaacttcacgcaggccctattggagaggatgctctctgaactgccagccttggggatcagcgggatccggcctacctacatcctcagatggaccgttgaactgatcgtggccaacaccaagactggacggaatgctcgccgattttctgcaggccagtgggaagcaagaaggggctggaggctgttcaactgctccgcctcccttgactggccccggatggttgagt

SEQ ID NO: 10938 - DNA, 485 bp, Homo sapiens
  misc_feature (1)...(485): n = A,T,C or G
tgggtcccccnnnnaaatgagaccnatgatagncnctcggaantccatcagntaacataatttttgtctattcatttaaaaatttgttggatccctagactaagttgaaatgtatttctaatagtaggcaattttaattttcatgtagttgtttaattgttctctaattaatggaccaatgaaaaatgagttcatgtgtgtgtgtgtgtgtgtgtgtgtgtgtgtgtattctacctttttatgggaaaactacttttttgttggaaagattttcttctgttttctttgctaataaagaattgttattaatttgcatgtgtgtgaagtatatatagtctcatgtacattgctattctcattttctttcctttattctgacatgagatttggctgttacttgcatagttcacttttttaaaaaatgctatgtttatagagagggtctcactctgtcagctacgctgaagtgtagtggtaataatact

SEQ ID NO: 10939 - DNA, 494 bp, Homo sapiens
  misc_feature (1)...(494): n = A,T,C or G
cccgcgccccngnngnaaatggagnccccatcgagnagcactcggccagngcggnggaattcgcaaggggctagaagttcacctcctgacagtattattaatactatgcatatatggaatatgagaccatttgattttctaggctttgtggtagagaggtgaaggtatgagaattaatagcgtgtgaacaaagtaaagaacaggattccagaatgatcattaaatttgtttctatttattcttttttgcccccctagagattaagtccagaaatgtactttctggcacataaagaaatcttgaggactttgtttaaaccttccataaaaaaacaattttcggtttctcgggttctctctctctctctctctctctctctggncctctgactctctgactctctgactctctctctctctctctttctttctttgcggattttattcaagatgagttggacccattgccagtgagtctgagtgtcactgacagcc

SEQ ID NO: 10940 - DNA, 454 bp, Homo sapiens
  misc_feature (1)...(454): n = A,T,C or G
attgaaaaatgatgaccattacnccgngcggtggaattcacctaggaagcagtgccaaaatcaaatgcaatagttgccaaagctaccatgagtctactaaacagctcacaatgaaaaaattacccattgtggcttgttttcatctcaagcggtttgagcatgtaggcaaacagaggcgaaagattaatacctttatctcctttcccttggagctggacatgactccgtttttggcctctactaaagagagcagaatgaaagaaggccagccaccaacagattgtgtgcccaatgagaataagtattccttgtttgcagtggttaatcaccatggaactttggaaagtggccactataccagcttcatccggcaacaaaaggaccagtggttcagctgtgatgatgccatcatcaccaaggctaccattgaggacttactctacagtgaagggtn

SEQ ID NO: 10941 - DNA, 469 bp, Homo sapiens
  misc_feature (1)...(469): n = A,T,C or G
atcgacccccctnaattcgagaccattagtccgngcggnggaattccttagtttttcttaggtctgtgaatatttccagacgtcttttttaaagcaactttattttattaacctttctttacaaatgcatttcttctttcaggccttcagtggtggctattatagaggtgggtttgaacccaaaatgacaaaacgggaagcagcattaatactaggtgtaagccctactgccaataaagggaaaataagagatgctcatcgacgaattatgcttttaaatcatcctgacaaaggaggatctccttatatagcagccaaaatcaatgaagctaaagatttactagaaggtcaagctaaaaaatgaagtaaatgtatgatgaattttaagttcgtattagtttatgtatatgagtactaagtttttataataaaatgcctcagagctacaattttaaaaaatgatttagcn

SEQ ID NO: 10942 - DNA, 488 bp, Homo sapiens
  misc_feature (1)...(488): n = A,T,C or G
cccccgccccccccccaatgagacccattgaagcctcttggaantccactgaaggacccctgtgatcacactggcccccccaccggatgacccaggataatccatctccctgtttgaaggtcggctgattagcaaccttcattccatctgcctccttcattccccctggccatgtaatgggattcacagcttctggggattaggacatggacatcttgtggcgggggcataattctgtcgacgacaccaagaaacacttggatgttaaggattcaccgaacactgttcaggctccaggtgctgggagcagcagtgaacaaagccaacagacactgccaccctcaaggagttcacgttcatgggcgagggaacagatgagaaacccggcaatgaaagctccaccatctcttcccctaaaggcaaccaccattctgatttctctcaccaaagactggaaaaatatcccaatacctggatgtatgcctcac

SEQ ID NO: 10943 - DNA, 449 bp, Homo sapiens
  misc_feature (1)...(449): n = A,T,C or G
nactgatgacctcttggaagngcggnggaattcatttaaagaacagttatctctacctgcagagtttccagacaaggtttttgctgagaagtggaatgaaaatgttcagtatctctcagaagatagaagtgtgcaagaagtactacagaagcatttcaatatcagcaaaaacctgcggtcattacacatgctattgatgcttgctttaaatcgagtaacagcatcgcacccatttatgactgccgtagatctaatggaagcaagccaactgtgtagcatggactcgaaagcaaatattgtacatggtctatcagtcttggaaatctgtcttataatagcaatgaaacatttaaatgacatctatgaggaagagccatttaattttcaaatggtctataatgagtttcagaagtttgttcaaaggaaagcacattccgtttataattttg

SEQ ID NO: 10944 - DNA, 449 bp, Homo sapiens
ttttaatcgagaccctagtttagagggcggaattcggcaggagaatggcgtgaacccgggaggcggagcttgcagtgagctgagatcgcgtcactgtactccagcctgggcaacggcgaggcacggtctccaaaataataaataaaaaaaataaaaaaagaaagatattctacttcttccctttgtggtccctcagatcattatcttaacctgtgtagaatagtgaagaagggacaagcccagcctttggaatcatctagacctggtttcaaatcctggccctgttaccttaatagctttgtgatttgggtgagtcacttaacctttcagagcctcagttttcccctctagaaacttacttttattggtatttgctgtatcatgtttatgtttatacagttaaaaaagcccctggatttctcattttaacagcatccatttgtagagca

SEQ ID NO: 10945 - DNA, 453 bp, Homo sapiens
  misc_feature (1)...(453): n = A,T,C or G
cattgacgatcgattgccatngcggnggaattcgctagaaatggtaactgggagtaaacataagaattttttttccattttattctctttaaaagatgactgcattgaaggagattgctaacaggtacaggatttccctttttgcacgatggaaatgttctgcagttagtggtgatggttgcacaacattgtgaattaaagaaatagtagctttaaaaagatagttgcttaaagcaaaaataataatgcattataggttttataacacatgggagtaaaagttatgacaatagcccaaagaatggaaggggacgggaagggtataagaaaccttagtcaggttatttatttatttgagacagagtatcactttgttgcccagggtggagtacagtagtgcaatcccagctcactgcaacccctgcctcctgggttcaacaaggatcaacaagc

SEQ ID NO: 10946 - DNA, 476 bp, Homo sapiens
  misc_feature (1)...(476): n = A,T,C or G
aatgagccccaattgagaccactaggccagngcggnggaattcagaagccagtcacaaaagacctcgtactgaatgattccatttatacaaagtatccagaatgagcaaatctatagagacagaaaataaattaattgttgcctccagctggaggggttggagggttgcagagtgataggtctggggtttcctcttggggtgatgaaagcattctaaaattgatcgtatgatagttacacgacactgtgaatatacgaaaaaccattgagttgtctactttaagtggtaaggtatgtgaattatatctcaattaagttgctacagaaaaaaagtcacagtggttctctgtgatttttggggggatagaaaataaatctcttgggggatagaaatgtcagtgattttcctcgttttcccactcctctgtgatttccaggttttccagatataattctgtattacttgaatcatggaa

SEQ ID NO: 10947 - DNA, 470 bp, Homo sapiens
  misc_feature (1)...(470): n = A,T,C or G
gagttccnnnnttttgagattnctagaacatcggaagngccgnggaantctttgaaaccttcagcacaaaccacagttgtaactagccagagttcagttgattccaccatctctagttcttcttccactaaaggaataaagaggaaagctacagaaattagcactgcagtggttcagaggtcagctaccattggcagttctccagttctctatagccagtcagctatagctacaggtcaccaggcagcagggattggaaaccaggcaacaggaattggacatcagacaataccagttagccttccagcagcaggaatgggtcatcaggccagaggaatgagcctgcagtcaaattaccttggactagcggcagcacctgcaattatgagttatgcagaatgttctgtcccaattggagtgactgctccctcattgcagccagttcaggcccgaggtgctgtgcctaccgg

SEQ ID NO: 10948 - DNA, 474 bp, Homo sapiens
  misc_feature (1)...(474): n = A,T,C or G
ggcngctcnnnnnnatttgagaccctgataagcgtcgnggaanncgnnnatttctgnngcgggtatattctggttgtctttttctttgtgtagagaggagacaatgtacagtaaaaacaatacactggttgcatggccatagctatacgacaagcaagagacaacggaggacaaatattcgcacctgactgaagtgtgtcctctggagggtcatatatacaatctcttttgtacagatgaaaagcaatcagctgcttagatttagaaatctactcttgctggtctttgtaaggtgcatgaatatttgactttgaaaaaatatcttaacgacatggggcaaaaagtgcaatctaaatggtagcctttactaatgtgtgtggaaagaggtgttcctcattatctaatatttcaatgtgttaagagattaatttttttgttatcattaaaaaagacaggattataaagagatatccg

SEQ ID NO: 10949 - DNA, 416 bp, Homo sapiens
gtgggaggagacaccaaatgcatagagagaatggaggcaggataattttagggaaggaagatggggaattccttttgtccatattctagaatgtgcgtgaggccaccaggtagatagcaggcagctggctgtgattgatcatctgaattatggaaggaagggggtctgggctggagacacagatttggaggacattacactgtgggggattgtatcaaccatgggagccaacacagtcacttagatgagatcttgtgagagtaaaggcacgatcctagagggtttcaaggtgtgtggagctagaggagcagaagagtcgcaaggaatcatcagtgaaagaagatctcacagtgcagtatggaaagaggtcgccaaataggaggaaggaattagaaatgtcaaaagtctccaagaaa

SEQ ID NO: 10950 - DNA, 507 bp, Homo sapiens
  misc_feature (1)...(507): n = A,T,C or G
gcgtgcataacgagaatcgtatgcagtgtggnggaattcggcagaatcagcttctggtccatcggaggatccgagtgtgaatttcctgaagaacgttggggagagtgtggcagctgcccttagccctctgggcattgaagttgatatcgatgtggagcacggagggaaaagaagccgcctgacccccgtctctccagagagttccagcacagaggagaagagcagctcacagccaagcagctgctgctctgatcccagcaagccgggtgggaatgttgagggcgccacgcagtctctggcggagcagatgagaaagatcgccttggagtccgaggggcgccctgaggaacagatggagtcggataactgttcaggaggagatgatgactggacccatctgtcttcaaaagaagtggacccgtctacaggtgaactccagtccctacagatgccagaatccgaagggccaagctctctggacccctcccaggagggacccacagggct

SEQ ID NO: 10951 - DNA, 505 bp, Homo sapiens
  misc_feature (1)...(505): n = A,T,C or G
gcggcccaatgagactgagnaccctacgcagagncgnggaattcccgcttccgcatctgcacagtcagcggacatggccgtagtccccacgtggtgttccacggttctgctcaccttggtgagttggtcctgccagacccacccatcacttctcctcccttccccagccctcagtgctggtcctctcacaggcctgccatccgccagcctctgccctctgccacaccttctagttctgacagctgcactctgtccctgcctcagtgcccacagctcgcctggtggcaggtctggaggatgtgcaggtatacgacggggaagatgccgtcttctccctcgatctctccaccatcatccagggtacctggttccttaatggggaagagctcaagagtaacgagccggagggccaggtggaacctggggccctgcggtaccgtatagagcagaagggtctgcagcacagactcatcctgcatgccgtcaagcaccaggacagcggtgc

SEQ ID NO: 10952 - DNA, 472 bp, Homo sapiens
  misc_feature (1)...(472): n = A,T,C or G
nttgactggagtncgtagngaagngcgnggaanttgttttactatattacaaggcttcttttattgtatgcgggctaatttttattaaatgttcaggccatgaaaggttaagtatgtatcccttcaaaggaaattccattatcagagttagaattgaaagtaaaggctgggcacggtagctcacgcctgtaatcccaacactttgggaggccgagacaggcggatcacgaggtcaagagattgagaccatcctggccaagatggagaaacctcacctctactaaaaatataaaaattagccaggcatggtggcgtgcacctgtaggcgcagatgccaggtaatttaagtgctgcttggtgaccagcttgttaacagtcactctatttatacctgcagactgaacaagtgcagccttttgccaagtctacccaacaaggcagccagctttgtattttaaaaagcagagctcgg

SEQ ID NO: 10953 - DNA, 469 bp, Homo sapiens
  misc_feature (1)...(469): n = A,T,C or G
nttgtagactttgnccgtgcgtagactatgtccgtgcggtggaattccttgagcccaggaggcgaaggttgcagtgagccctgattgtgccactgcattccagcctgggcgacagagtgagaccatgtctccaaaacatacatatatataaaatatatttaaagacctcttggagttcaggcagaagtgaagatagcactatgaagtagtttccacattaacaatagcaatgacttgaacgatgtgttccccctttcttctgatattaatatctgttcattttgcaaacattgaaagattatgaaagctatgacccagaatcacaattatataatttggatacatacccaaatggcataatttctgtcataagcctgtaggaaaagcttgagttcttcacttctcagattctcagagccagcttgctcttgggagaggggcctggtataggggctgcccaggttcgtaa

SEQ ID NO: 10954 - DNA, 466 bp, Homo sapiens
  misc_feature (1)...(466): n = A,T,C or G
aggtcaggngnncccncctgagaccactgacagccgttggaattctgaatggccaagctggtctagtagatgaggctggactgaggaggggtaggcctgcatccacagagaggatccaggccaaggcactggctgtcagtggcagagtttggctgtgacctttgcccctaacacgaggaactcgtttgaagggggcagcgtagcatgtctgatttgccacctggatgaaggcagacatcaacatgggtcagcacgttcagttacgggagtgggaaattacatgaggcctgggcctctgcgttcccaagctgtgcgttctggaccagctactgaattattaatctcacttagcgaaagtgacggatgagcagtaagtaagtaagtgtggggatttaaacttgagggtgtccctcctgactagcctctcttacaggaattgtgaaatattaaatgcaaatttacaact

SEQ ID NO: 10955 - DNA, 459 bp, Homo sapiens
  misc_feature (1)...(459): n = A,T,C or G
ggggacttttnatcgagacccctagtctagagtggcggaattcgtaacctcattgtaactatcatcagaatgggcagagatgatcttgaagtgtcacatacactaaagtccaaacactatgtcagatgggggtaaaatccattaaagaacaggaaaaaataattataagatgataagcaaatgtttcagcccaatgtcaacccagttaaaaaaaaaattaatgctgtgtaaaatggttgaattagtttgcaaactatataaagacatatgcagtaaaaagtctgttaatgcacatcctgtgggaatggagtgttctaaccaattgccttttcttgttatctgagctctcctatattatcatactcagataaccaaattaaaagaattagaatatgatttttaatacacttaacattaaactcttctaactttcttctttctgtgataattcagaagatc

SEQ ID NO: 10956 - DNA, 451 bp, Homo sapiens
  misc_feature (1)...(451): n = A,T,C or G
nttgaattcgtagacactagtccangtggtggaattcaacacctgctgtgtgctaggcattgagagctgttagcaaaaccaacagtattccctgtgcattaatgggtgggatggacaaaaaatgaatatgtgtgctatggtaggggcaagatgaagcagtgtaagggggatatagaattcagggaaggtgggtggcatgctgcaatttcagatagaatgatcagaggtggtcaccatggagggtgtataaggcactcttctgttgttgctggatcatgaactttagaggttttaagcattgaaaatattattgttcctcctcccccataggtaatttgaaatgaaaacagtatgaaacttgaaaatagtaagaaagtcctgaagttattttctccatgatggctacttcactgcttttgttgaaataaattatttcaagaacattaaaaaa

SEQ ID NO: 10957 - DNA, 459 bp, Homo sapiens
  misc_feature (1)...(459): n = A,T,C or G
agggtaataaancctgatgacatctgcctgagtgccgtaattngtgtggacactgaggttacctcggaggtcagggtcggggtgctgtctgtgtggacactgaggttacctcggaggtcagggttggggtgctgtctgtgtggacactgaagtcacataggagggtggcaggggccacagtggagaggaagatggagctagaaaccagggaatcagatgcaacgtgagtaaaaccaggaggttgacagaaggcggcggtgaggaggcagcagccacggggcttcatttctaccgccatgcagtgagggcatcggtggggaaaagaggacactattttggaagaggagtaacacaagggctcatgacaaggccagtgacttggtgcacgggtgtcatagtcaagggcgttgaatcttgtgcagacccagagagcaaatattcgggatgtgctgcaccatg

SEQ ID NO: 10958 - DNA, 454 bp, Homo sapiens
  misc_feature (1)...(454): n = A,T,C or G
acttgaggaccctnggctgagagacattagtacagtgcggtggaattcgttgtctgcaggcactcagaatggtccagcgtttgacataccgacgtaggctttcctacaatacagcctctaacaaaactaggctgtcctgaacccctggtaatagaattgtttacctttataccaagaaggttgggaaagcaccaaaatctgcatgtggtgtgtgcccaggcagacttcgaggggttcgtgctgtaagacctaaagttcttatgagattgtccaaaacaaagaaacatgtcaccagggcctatggtggttccatgtgtgctaaatgtgttcgtgacaggatcaagcgtgctttccttatcgaggagcagaaaatcgttgtgaaagtgttgaaggcacaagcacagagtcagaaagctaaataaaaaaatgaaacttttttgagtaataaaaatga

SEQ ID NO: 10959 - DNA, 449 bp, Homo sapiens
  misc_feature (1)...(449): n = A,T,C or G
gtggccttaaacatgcatattgangtctgngaaancnaanncanaggcgggagggaggagtatgtcaagcgagccctggccaacatgccttgcctgtcaaggaaagtacactccgagcggtcaggctggggctgctgccagcgagtccctcttcgtctctaaccacgcctattaagcggaggtgttcccaggctgcccccaacactccaggccctgccccctcccactcttgaagaggaggccgcctcctcggggctacaggctggcttgcccgcgctctttcttccctcgtgacagtggtgtgtggtgtcgtctgtgaatgctaagtccatcaccctttccggcacactgccaaataaacagctatttaagggggagaaaaaaaaattataaaaaaaaaaaataaatataatataattattntatatttnttattctccctcccctgt

SEQ ID NO: 10960 - DNA, 506 bp, Homo sapiens
  misc_feature (1)...(506): n = A,T,C or G
ggtgcccactggnactgagancctacgcagngncggggaattccggcattagattgngggttctgggagaggcaggtgaatgtcctaagtgaattgttctgtttgtaactggaatgtttttgaagtctttggtgttgctccgtgaaaggacatcgccacctggtgctcatgaggtgtctttgcagaacaataaatggcaaatgaacaaccaaaaaaaaaaaaaaacccaaaaaaaaaaaaaaaaaaaaaaaaaaaaaaaaaaaaaaaaaaaaaaaaaaaaaaaaaannnnccccccccttttaaaaaaaaggccccaaaaaacccccggataaccccctgggggttttttttttaccccccccttttttggttccccccccccccccttttttttttggagggggggggcccccccccctttttttttttaaaaaaaaaaaaaaaaatttcccttttttttggggggggggggttttttttttttgtgccctggtaccaacnccac

SEQ ID NO: 10961 - DNA, 450 bp, Homo sapiens
  misc_feature (1)...(450): n = A,T,C or G
ntttgaaaccctttactgatgaactatgaaanngcggnggaantngaaagaacagagaaataccaaccatgctcttcaaaaataaggctgtttccttatatatatacatataggatttgacatatatatatatatattaatcatatacatggagcaattagaggtactgttttgtaatttgcgtttctccctcacttaataaatacttgacatcatcccatttccacaccaagatctaccgtatcagctatatagtctgaatatgaatgaactctaatttattttatactttaaacattgaggttgtttccagtgttttattacatacactgtcctatgattaccgtaaattctttataagtagaatttctgggtcagcatatgtatagtatgtatacagtttctatttggatggttatgccaaactaccttccaaaaagaccacctttg

SEQ ID NO: 10962 - DNA, 466 bp, Homo sapiens
  misc_feature (1)...(466): n = A,T,C or G
cgcccccccgncccnntttgaaacccactgagtacnctagtacangcggtggaattcgtggctggaagagtatcagcaggcagcagcaaagccagttcccttccaggaagcctgcagcgttcacgaagtgacattgatgtgaatgctgctgcaggtgccaaggcacatcatgctgctggacagtctgtgcgaagcgggcgcttaggtgcaggtgccctgaatgcaggttcctatgcgtcactaggtaagagaactgattatggaaaattgtaccatgttctctccctgatctctgtgaagacaagttcatataccttaatcatttctattcattcttgttatttaaggatagtccatatgttttaatataattctatattgcggacacacttctgaggaatctgagctgccttgtttctccttttcccttgttctcatcatcgtcttgatcaaagaaacaattctt

SEQ ID NO: 10963 - DNA, 456 bp, Homo sapiens
  misc_feature (1)...(456): n = A,T,C or G
cggggnnntttgagttccactactccgtgtggtggaattcgtgatatagtcaatggacacagtgaaatagagcaaacacctttagtttcatcagatcctgctttgaaaattgatacaaacagaatcaggacagaaaatggttccattttgcccagtgttgtaccacaagaacacaacaccttgccagtatctcaggcaccttccaaaccaaatctgacaagtgaacatacttcatatggcttaattttaacaaaaccatacgtcagaccattgcctcccagttaccttgatgaacggtatcttagtatgccaaaacgcataaaatttctgactgatagagtagatgcctgttctgatcaagataacgtgtataaaaaatcaatgaaaagaataagatgtggctcatgcctgaccacctactgtaatgcagaagcacttgaggctcatcttgcacaa

SEQ ID NO: 10964 - DNA, 505 bp, Homo sapiens
  misc_feature (1)...(505): n = A,T,C or G
cggtgcccactggnactgagancntagcccangncgnggaattccacaaagcagaaagagatacaatcttgcttgaccgtttgggacatcaatcttccacatgaagtgcaaaatttagaaaaacacattgaagtgagaaaagaattagctgaaaaaatgagacgaacatctgttgagtaagagagaaataggaattgtctttggataggaaaattattctctcctcttgtaaatatttattttaaaaatgttcacatggaaagggtactcacattttttgaaatagctcgtgtgtatgaaggaatgttattatttttaatttaaatatatgtaaaaatacttaccagtaaatgtgtattttaaagaactatttaaaacacaatgttatatttcttataaataccagntactttcgttcattaattaatgaaaataaatctgtgaagtacctaatttaagtactcatactaaaatttataaggccgataattttttgttttcttgt

SEQ ID NO: 10965 - DNA, 481 bp, Homo sapiens
  misc_feature (1)...(481): n = A,T,C or G
gcnctcgnnnattgaagnaccactagtcttgtgcggcggaattcacaatttgaatctatgctattagttacatgtaaatttagaattgttgtatgttcttgacaaatctaattttcatcatcatgaggtcactttctttgtctttaggaatgcttttaaccttagtgtctagtttgacattattgttaaatctttgagaattctgatattttagtcttgtgttttgtaagtagcatatcaaattcagtgttattcgagataacaacctttgtcttttaatcactgaatttaaatatttacatgttatgtaatttctgatattttggggcttaaatctaccattttgctcagcttttcaatttgtactgcttgttctatgttccatttttttcatttcttgccttcatttgcattgattgaaaatttttaccagttatttgagtcctataaattcttgtgggattacaccagatattgctat

SEQ ID NO: 10966 - DNA, 454 bp, Homo sapiens
  misc_feature (1)...(454): n = A,T,C or G
atgcgcctaaaactatgaangcttgngtgcgnanancannnnaaatnnngngaggattgccatcctgggcgtttcttgccctctactgactactgattggattttacctatggctttctgcaacttggtactctcgccctctccatcccatctttgcagcctcatagggtgggatacagcagctttttttgcagttatccacactcacatttcagagtcctgactctcaaggaaccactggtttttgggatagaacttgggccagggctaggaacacaggctccacggtgacatgtcatttgattgtaaattaagtgctctgattagtaagaactaagcagggggccacatgctctcaatggagacaataaagtgttgtctttttcttatgacaaagatttaaaggaccttaacaatagacattgcttaattacggggtgcaattgcgcgctgc

SEQ ID NO: 10967 - DNA, 452 bp, Homo sapiens
  misc_feature (1)...(452): n = A,T,C or G
ngtgggtttanaccaggtaccctgatatctgnggaaancnngnagnagagatgggggtagcttcaaaggtagtggaatgagataagtggaaataattgagtagctggagtcaactggactggagatggattggaaatggagggcatgagaaggggtgaagttaaggatcacacttcagctgggcacagtggctcatgcctgtaatcccagcactttgggaggctgaggtgggtggattgcttgagtccaggagttcgagaccagcctgggcaaacatgatgaaaccccatctctacaaagaatacaaaattagctgggcatggtggtgtgggcctgtggtcccagctactcaggaggctgaggcgggaggatctcctgggcccaggagtttgaggcttcagtgcgccatgatcacgccactgcactctagcctgggtgacagagtgagtccn

SEQ ID NO: 10968 - DNA, 472 bp, Homo sapiens
  misc_feature (1)...(472): n = A,T,C or G
ccccccccccnnntttgtagaccctaatcggagtccgtagtccgagagggtatttgctccggaccctgcactacttaccactattgctatactgctgaggagagactgataccaccaattcattcactataaattctcccaagaactgcaggctgggaatggctatagattactctgaaacctctagaattttaaaatagtctcaactcatttctgtttaaatagatctcaccaaaaaattctaggtggtactggttggcctggtgaaaacagcttatccatactgacctcatcttagccggtcaatgatggatgaataatgctgtcatataggccatttcctctctcctgtgtgcacaccactgagtccaattggtcagaaaccttccgactctgtggaagtggtttgtggtcaaacccagcagttcaaacagtaaattttattgaaatgtcttgccttgacagtccagat

SEQ ID NO: 10969 - DNA, 452 bp, Homo sapiens
  misc_feature (1)...(452): n = A,T,C or G
tttaaatcgagacccctanctagagtggcgtaattccttcgagcaggagatggccaccgccgcatcctcctcttctctggagaagagctacgagctgcccgatggccaggtcatcaccattggcaatgagcggttccggtgtccggaggcgctgttccagccttccttcctgggtatggaatcttgcggcatccacgagaccaccttcaactccatcatgaagtgtgacgaggacatccgcaaagacctgtacgccaacacggtgctgtcgggcggcaccaccatgtatccgggcattgccgacaggatgcagaaggagatcaccgccctggcgcccagcaccatgaagatcaagatcatcgcacccccagagcgcaagtactcggtgtggatcggtggctccatcctggcctcactgtccaccttccagcagatgtggattagcaagcagg

SEQ ID NO: 10970 - DNA, 452 bp, Homo sapiens
  misc_feature (1)...(452): n = A,T,C or G
ngtcgagacccctnnatcgaganccctatccangtgcgtggaattcgggagtggagctagtttctctaagccatccagtgccatcctcgttgctgcagagacactcgctctcgccgccgccatgactgagcagatgacccttctgggcaccctctggggccacaacggctgggtaacccagatcgctactaccccgcagttgccggacatgatcctctccgcctctcgagataagaccatcatcatgtggaaactgaccagggatgagaccgactatggaattccacagcgtgctctgcggggtcactcccactttgttagtgatgtggatatctcctcagacggacaggatgccctctcaggctcctgggatggaaccctgcgcctctgggatcttacaacggtcaccaccacgaggcgattttggggccataccaaggatgtgctgagtg

SEQ ID NO: 10971 - DNA, 468 bp, Homo sapiens
  misc_feature (1)...(468): n = A,T,C or G
agagggcccgncnnccccccactgatgaccctttgtagacgtgggaanncaccagcccatgcttgttagtctgttaaagaagaagagaaatgacaacagtgaggctcagctcgcccacctgatacctgagctctgctttctaacagggctgactgaccaggcaacatctgatttccagctgatgaaggctgtggctgaaaagacacgtctcagtccttcaggccggcagcagcgcctggccaggcttgtggacaacatccagaggaataccaatgctcgctttgaactagagacctggggactgcattttggaagccagatatctctgactggccggattgtgccttcagaaaaaatattaatgcaagaccacatatgtcaacctgtgtctgctgctgactggtccaaggatattcgaacttgcaagattttaaatgcacagtctttgaatacctggttgattttatg

SEQ ID NO: 10972 - DNA, 457 bp, Homo sapiens
ggctgtggaagacgctgacttatgggttggccacgatggtgtccttgatccacttccggtagtgcaccaccttgatgtacagggaaggcctttcgggcagggcacatggttcactgccccatgacgtgataccttgaagcacaccattacagacaagtggggccccagaatcacccgagcaggtgcttttgccccctgtccagcgtccagcacacagcatgaacttggtcaccttctgagggtgaacttgcgcacacacgtcattggaaataacatggaggtccacacactgaagtttctttggggtcaagaactcctctgggtcaatgctgccccagcctgaggcgtagcaagtgagccccagtgctggctcctgggtgggcatgtccatgaccttcacagcatccgtgagctcggcaggctctgacaggcggagcagcatgatgtcgaggctgta

SEQ ID NO: 10973 - DNA, 474 bp, Homo sapiens
  misc_feature (1)...(474): n = A,T,C or G
ngccccgaattggagccccttgnnnnattgatgatccttagtccgtgtggtggaattcgtttctgtcacatgaagatggatctcctagcgtgctgggccttgagccaggctctggggcccagagggagatagaccaagggacgagaagacaggagtttggggggccaagtgcagtggctcgcacctgtaatcccagcacttcgggaggcccagacaggtgggtcacttgaggtcaggagttcgagaccagcctggccaacatggtgaaaacccatctctactaaaaacacaaaaattagccgggtgtggtggcacacacctgtaatctcagctactcgggacgctgagacaggagaattgcttgaatctgggaggtggaggttgcagtgagccgagatcgtgccactgcactccagcctgggggacagagcgagactccatctcaaaaaaaaaaaaagggtgcccagagacggn

SEQ ID NO: 10974 - DNA, 477 bp, Homo sapiens
  misc_feature (1)...(477): n = A,T,C or G
cgaggccnnnnntttgagcccctgagacactcggaagngccgnggaattcgctttgagaagccagacagtgttgcagcccaccgtagcaaaagtcacccagccctgcttctagcccctcaagagtcacccagtggtcccctagagccctgtcccagcatctctgcccctgggcctctgggatccagcgaggggtccaggccctctgcatctcctcaggctccaaccctgcttcctcagcaatgagctctcctccagctttggctttgggaagccagactccagggactgaaaaggagcaacaaggagagggtctgcttgagaaatgccagatgcttggtccccaggaactaaggcgacagagtgcagggtgggggcaagactgggctgtaggggagctggactactttagtcttcctaaaggacaaaataaacagtattttatgcctnactnaaaagctcaaataaaaaaaaaatag

SEQ ID NO: 10975 - DNA, 504 bp, Homo sapiens
  misc_feature (1)...(504): n = A,T,C or G
aggagcgccggnnncnnaattgactgacgttcatagtacangcggnggaattcttcaaagtgagattttcacttgtcagcttaaatttctgactagaactaacgtttgtgtatttttgtgcttagtcggaatacaaatttcacagtggatttttgaagtttgtccttaaattggataaaatcaagtgattaaagttactaaagagataaaaatggtaatttccatttttaaaagtaatttggttgtgtttatagttatttgtacaagtatttatcacagactctaaattgaaaaatatagtatgatctatatttgaccctaaaaatgttgcattaatttaacaaatatggcagatttttcataactaagtcttaagtcttctaaaaggaagctgttacccttctgtttttaattacattaattgaaatgtgttttaagagatacaatttcagcatattttatatattaaaaaacaaaaaaggattagtattgagccagtggccc

SEQ ID NO: 10976 - DNA, 481 bp, Homo sapiens
  misc_feature (1)...(481): n = A,T,C or G
gcgacgggnnnnnnnnnaatcgagatcatcttngaagngcggtggaattcaacaaatgtaagggattctttcatctggcattcaaggctgtttgtgatctccctgcaacctattttgccagttttttgtttgtttgttcgtttgtttgtttgttttttgagacagagtctcactctgtcaccaggctggagtcagtggcgcgatctcagctcactgcaatctctgcctcctgagttcaggcgattcttctcctgcctcagcctcctgagtagctgggactacgagcatgcccccatgcccagctaatttttgtagtttcagaagagacagcgtttcaccatgttggccaggatggtctccatctcttgacctcatggtccactggcctcggcctcccaaagtgctgggattacaggcgtgagccactgcacctggcctattttgtcagncttacttttgttacttccttccatgtanatta

SEQ ID NO: 10977 - DNA, 446 bp, Homo sapiens
  misc_feature (1)...(446): n = A,T,C or G
attgtgcgtccctagtccttgtggnggaattcgaagtatgaccaccagcgggagcaggagctgagagagtggatcgagggggtgacaggccgtcgcatcggcaacaacttcatggacggcctcaaagatggcatcattctttgcgaattcatcaataagctgcagccaggctccgtgaagaagatcaatgagtcaacccaaaattggcaccagctggagaacatcggcaacttcatcaaggccatcaccaagtatggggtgaagccccacgacatttttgaggccaacgacctgtttgagaacaccaaccatacacaggtgcagtccaccctcctggctttggccagcatggcgaagacgaaaggaaacaaggtgaacgtgggagtgaagtacgcagagaagcaggagcggaaattcgagccggngaagctaagagaagggcggan

SEQ ID NO: 10978 - DNA, 557 bp, Homo sapiens
  misc_feature (1)...(557): n = A,T,C or G
tacctgctttctaatctccaccgtgcctggttcttgacacctctacatcacttacttaagcgcggaaatactgccactctcagtacccccactccccgcccccaccaattacgagaccttatttgatgccgtcgagaaccgccgaggaaaanatattggccatttttctcaaggactttggtttcttcattctcttttctttacaggaattctgctgaatggatcttggcacttctaggttctgtatggctcttaactttcaatatttagcttttttctaatcccttcctgatgtcttctgggactgtcttctctacttgttcttctacctcactaattcattctttggcttatctattatatacctaatctgaagagatctttatttcaacccatgtatgttcatactctgtattggttcttttttgtaactacttagatctgcatgttatcagtcttctaactctaagaggattttaaatgctttgaaaattcttcatgtgtcttctccattaattctgctttgtatacacatagcttagtttgaatgggaaacg

SEQ ID NO: 10979 - DNA, 489 bp, Homo sapiens
  misc_feature (1)...(489): n = A,T,C or G
gcgcgggannnnnnnaactgatgactcatcgaagaccgttggaacgcgcagcggaatctgaatgttaaaaaagatataactgcatctctcttgattctggggcttggtaaaaatggatagataagatagtattctaaattcaaattcgtggctaggcacagtggcccacacctgtaatcccagcactttgggattccaagacagaagactcacttgagtacagtatgagaccagcctgggcaacatagatcttgcctctacaaaaaaaaaaaaaaaaaacccggggggggcacaggcctgtatcctcacctgttggaagggctaaaaggaaaggattttttgaccccagggggtttaggccaaagggagctgggatcgtccctttgccctccaaactgagggacaaagggaaactgtgtttaaaaaaaaggttggattaaaaaaaaaaaaaaaaaaagcgccccttgccacaaagagaaggggggtggn

SEQ ID NO: 10980 - DNA, 472 bp, Homo sapiens
  misc_feature (1)...(472): n = A,T,C or G
agaggggcccggnnnnncccccaactgatgaccnactgatagacctgcggaannccaaaaaagagagcgaagggctaacttctgagtgtggataagttcctgagattgttgacatttctatgatgagcaaagctcatttaccttctcctgcctgatggatgattcaactgaatatggtttctttcaccaggatctgcccccaccccataattgtgaatattttaatattcatttgaacagatggattttaggaaacgggatggggatggtagaggcatgttctctgcctcagagaactcagttcatggaccggttagggataccacatttagggcacatgaaacaattagtgacccactcatgacagtacatcattattaaggtatatattaactctaaatgtagtaagggttcggcagaagttaagaaaagttagggcttgcgttgggctttaaatgggtagaatttggga

SEQ ID NO: 10981 - DNA, 468 bp, Homo sapiens
  misc_feature (1)...(468): n = A,T,C or G
gcgggtgccnnaatgagacatttgagagcgcttaggaagncgaggggcaatcggcttacaaagtggaggggaagccagtgtggatctactcacagattgttcttttggtttccagccaggattgctacagttgtgattggaggaggtgagtctgtggggaaggggctcaagtaaccacctgcccctagggaggtggacttgggaagcagctggccttgtccatgccaatgtttccctcacatgggtggtcacgggaggaggtggggatgaggggctaagtatgaaccaaggagctagaaatacagcactggaagctggaagcagggggcttggagactgggagctggagtgcgtgtgggcagggtgtggcagcaaccggcacaggccatttccccttggcagaacattcaccatgtgaccctgagcatgtctttgaactcctctgagctcctgtttcctctacagaga

SEQ ID NO: 10982 - DNA, 451 bp, Homo sapiens
  misc_feature (1)...(451): n = A,T,C or G
atagacgacatctgngagtgccgtggaattccgcctaagaaagaaaggaggcctatcatgttcgagaatgaggcagtgagtgcggagactgctatgggcccgagacggctatgtccgaccgtttaagtgaaatcgctccccagtgggccccgctcccgtcaccacccccagagccaaggaggcagcatctcccttttgtgtttcttttttccccagatgcgaaattgaagcctgagactgagttgggcagtcccctttggacttgagtgctaaagttttcttggtttttaattagggccatagaaccctacataagtcgattggaagggtggatacaagatcttcttttcaaatttactcagcttgcggatttcctgagagtactctgagtattattgctttgtactaaaacacagtatgttagtgtatttagtgccattattngcaagtt

SEQ ID NO: 10983 - DNA, 442 bp, Homo sapiens
  misc_feature (1)...(442): n = A,T,C or G
nttggagacccttggntttgacgacccttagtccatgtggtggaattcttgggatccccctggccagggtaggggggatccattcagtctcgttgggtagcttacaatttcatttctggttcacatgtgcaaagtccttagctagtgatgtcacgcagtgaggactcagtgttggcagctacttctagtactacagttgttatcatcatcataggctcagtgcctgcctcagatgtttaaatctgaccattttaagaggaggcaaagcaaaataaggagtgaatgaaagtaggaggttgtggcaaattcggaaagcagcatttcaggtcagccctgtgctctgtgctcatcatatctttgaatctttggctgtcaactcagattgctgtttggtgttatctcaggtagcagacagtaactgttgatagtcctaactttggag

SEQ ID NO: 10984 - DNA, 473 bp, Homo sapiens
  misc_feature (1)...(473): n = A,T,C or G
gagggcagggggccgccncaatagaaaaccaactgatgaccatagtacagngcggnggaattccctggaagtagatgttctttgctccttgtcagagttgaagaggctgagacttggcccactgctaagcggcagaggcagggccagccatcctgtcgcaagcccgtgctggggctgccctttctgtttccagtccagttacggacttcccggccgccactgggccctgccggtcaccaggccactgtgcagtgggcgcagagcatggtcaggagtggcctgcccgtactcctccacccagatgagggccctccagagcctgcaggcatctgtggggaatcccagcctgcaggttcttggagaagcaggtgaacctaaggatgaaagcaaaggagggccttgaggaagcagcccccaggcctggcagccacgcagcggctgagctcatgaacttggttcgcagcctgccttgn

SEQ ID NO: 10985 - DNA, 489 bp, Homo sapiens
  misc_feature (1)...(489): n = A,T,C or G
ggnnagcatgacccctntcgnannatagatgnancactagnanagngcggnggaattcgaaattaaagagtgaaggccatatttcattttttataaattatctttcaagctcagatagcttaagagcagtttatattaaggagacccttttctccttgaggatagggataggtaaggtaaacttgtaaaaaggatgtcacagaagtcactttttaattaagtcatgattgagatactgaactcttccactcattcttctttcccattttcctattatgtttgataattatatgtatttttaaaaactgtgagaggaaaaattagtcataacccttttgggttatccacttaaatttaggtattttcatattactcaggtaaagatggaaatgacagagcacagacatttattttttaaattgatagggtagaaaatgaaatgtacttctgtttattcttaatactatatatatatatacacacatagtt

SEQ ID NO: 10986 - DNA, 456 bp, Homo sapiens
  misc_feature (1)...(456): n = A,T,C or G
atagaccacantngttgatgaccctctgaacangcggnggaattcatcaaggcctactctaaaaagcaaacaatacaagtgttgccacctgttgatggaaattttattactcttgtttcactggagctctgatgaagaacagcgtgaaaggaaaaaagaaactttattataactcccacaaactcaatccccagacttattaacataatatttgcattattactgttctttttttatttcataccttcttctaacatgggtcattgactgtaagcaagtatacattttgcttcattacaatttgctttagatatatttaaaacctttccatttgatcaaggctccacatttctttttaatttaaaagtttcaaacatcaaacattttgaaaccccatggatggtgtataccctagtgctctacatgaaatgaggtcagcaaacagccagagtttgg

SEQ ID NO: 10987 - DNA, 440 bp, Homo sapiens
  misc_feature (1)...(440): n = A,T,C or G
taaatttgtagaccttagtcattgtggtcgaattaatatttctgcagaaatatatatatcaatatacataccaagtagaagaaatgaagactgtaaatacctcatgccacgaacttacaaaaaaatacaaaagcacttttagtttttatagcttttggggctaggaattgtagacttgaatacagccatagtgatctaatcaatatggtattgatagaagaagagaaaaatggaccagtgaagcagaatagagaatcctgaaataaagtctggcatttatgaggatttaatgtgtctattgtggtaattcagttcagtaggcaaagcatgatttaataagtcatgctgctacatgaattttttttggttaaaaaaacaaaatttgccatctgtcatactctataaaaataccaataataaaaatcctgtaaggaaaactn

SEQ ID NO: 10988 - DNA, 499 bp, Homo sapiens
  misc_feature (1)...(499): n = A,T,C or G
tggccggcnnnnnnnncactgactacatctatagngcgggcaattcgatgattttttagctataaaaatgtatttgaaaagctcataaatttcaggattgaaaatataattgaaagttttaaagaaacctaattcattgaagtaataaacaaataattttcaatcttgattcaactgtgattcaaatcttacaccatttgcccacttctatgaattttatgtataaaattttttaagtcagagttttttttcttgattaactggatgtatttcacagaatttccaactgctcacgttagttttcttccttttagagatgatctctctaatgtattagatcttcatgcctttgatagtctctctggaataagtttgcagaaaaaacttcagcatgtgccaggaacacaacctcaccttgatcagagtattgttacaatcacatttgaagtaccaggaaatgcaaaggaagaacatcttaatatgtttattcagaatctcc

SEQ ID NO: 10989 - DNA, 438 bp, Homo sapiens
ttaattttgagaccctagacttggacggcgtattcatgtcctccctatagtagatgaaagtctctactgccttcccttaatgcttgttccttggctctgctgactagttgggagccagggtatgaacttggtgggtggcgacacatctgctgacctcgggtctgctgggaagaatacagggcaggacctatgtttggtgtcagaatcatctggaggtaggttggagccactccccttttttctccattctatccccattctctgaaaaccttcgctggctatagggataatcaggctgacaggaaaacttttaaattcatttatttgaattttagagaaaactagaagacagaaaaccacaactgtgggattgaagtcaacagaaaaggcctgacaagacagtattagaatgagtggcctgcctggctgtgcacaatg

SEQ ID NO: 10990 - DNA, 422 bp, Homo sapiens
cgaattccactcaggagccaacacaggaccctgcgtgtgagcgtgcctgacatctcacgcacggccactccagagccggtccctgtccttggaaagctgtgaagccttgcgttgagttccttctcgatactgacggctccgtgctgacattctgagctctggagtcacaccagcgcaggggcgtggaggaactgaggtttggaaggaatgccaggtctcgcacagcttggcctcgagaaggtgagaggaaggcaaaggccagggaggggacccagagaggcctggcacacaaggcccaagcaccaccgtcaacacagcccagtccatacagaaatgggtttcatgcccctgaaagcttttacagaaagatgccgcctgtagccagtgacagccgcaaccctacaggccctcagtccttgaga

SEQ ID NO: 10991 - DNA, 451 bp, Homo sapiens
atagtagacattatagagagcgttgaattcccgcgggtatgcgagtgccagatattggctgagacgagccagcttagactaattggtacaaggaaggcaagaaaacaaagacaaataaacagcggaagttatcagtatggaggggaagtgtaaacttaaagggaccagactttctaaatcttacaactcaagaggtggcagccaccctctaggagacaaaactacccccactgacaaggctttaggagaccctaaagtctgttggctgtgacgtcattatacctaaaatctgcatcatacctgcaagccaacagttcagtgttttaacagagaaccaccctgggaaacagaagcagatctgatgtgtttcctatacatgtcctgtgctcactttattaaaaattcttttgcacacaatgtttatgaaaaggccagatccttttccaatact

SEQ ID NO: 10992 - DNA, 455 bp, Homo sapiens
  misc_feature (1)...(455): n = A,T,C or G
atagaccaccctngttgatgaccattataccangcggnggaattcgaaatttgaaacattagatccctgaggagaattgaacagattctgttgaaaattggctagggaataggctaagatcataaataaataaataaataaacagacaaataaataaaaaacagctaagcagggcccagcagtagttagaactgatgggcccataggaagctagacatcttggttaccatgtttcttccatcattgtttaagcccaggagtaggaatagagtaaatgaatagtgaatgttatgaaggatgggcaagaaggacctgatagactgggttaacaagaataggtgtggtattgacaatgaacatgaagagtggattggtgatagggagattttgaattttggtatttaataggtttttccaagactagaagtgatccatttcatgtcagaatgatattt

SEQ ID NO: 10993 - DNA, 506 bp, Homo sapiens
  misc_feature (1)...(506): n = A,T,C or G
agggcgggcnnnnnnnnnaactgatctgcattcgtctagtgcggtggaattcggaacataacccagtgctaactgggggtttcatttattcagtcaagcacatcttactcacatccagatttattttcctacagtgcaaacacaccagatgaaactttaaaatgttactttttgtaagcttatcataaatgagttgcagtaatttgtttgcttgtttgtttaaccacaaccactattttaatgatatactaaagataacactatttagttttttcagaaacatctgcattatatgtgtgttggttgtggattttgtttctaaaattggcttagtccaataaataaagaaaagcattaaggacttaaagcaacaataaccaaataaaaacttgataggatctttgaagtctatttaaatattcattccattacatctagactcaccaagaactacatgttatgatgttaagttgaagttgaaacatgatgttttgcattanatttaa

SEQ ID NO: 10994 - DNA, 508 bp, Homo sapiens
  misc_feature (1)...(508): n = A,T,C or G
aggcgnggcgggccccnntttggatcgtcgtccattagtccagngcggtggaattccagttgctaaaaaaacccaagtataaatctaacaaaacatgtacaggacttcaattgtacatgttttgtggcagaaaactacaaaacattgatgaaataaaccaaataagatctaaataaatggaaaaacatagtgtgtttgtggattagaagattcaatataataaagaagtcaattatttgccaatttacatagaagtttaatgcaattcctatcagaatcccagcaagatttttgtagatatagacacgattattctaaaatttatatgaaaatgcaaaggaaccagaatagctaaaataactttgtaaaagaataataaagtgggaggaatcaatctacctgatttcaagatttattatagagctgtcgtatttacagagtgatagacacatagatcaatgaaacaaatagagaacctagaaacagactcacaaaaatatgcccaacc

SEQ ID NO: 10995 - DNA, 478 bp, Homo sapiens
  misc_feature (1)...(478): n = A,T,C or G
cgccccccgcccccccattgtagaccctagttcgcgcaccgtaattcctgagttttaactatatgtatatgagcttcaaataagcacctttttattatgtaaataaataaaagttatctgtatccccactgcattgtaaaatttttgttgttttgtttcatgtcttattcacctttgtatggaaattaattcagaaaccccaagcatagagtctacctctttaattccagcaggcagatgtagttctgcctgcttccttccaaggttaagttcataacagttcagaatcttgcaagctcacttcaggtataacctgtgtctccaaccctgcagtatttggatattgctgtttaaacagtagatttggcataaatgatggtggcacaatggttgtaaaggaaaagaagcagaacacctcagtttgttcaattctctcattggggttntcagttgtatccagagtttaagacagtaaaat

SEQ ID NO: 10996 - DNA, 455 bp, Homo sapiens
  misc_feature (1)...(455): n = A,T,C or G
taaaattagatgacactagtagagagccgtggaattccacagggagactccgtctcanaataagtaagtaagtaagtaaataaataaaagtatttcatctataacccatggttatttttaaatggagatttctattggagccattataatggcaagcttgaatttatagtatgttggggttttaagatttcctaattcagaaatcatgtttagaatgtgattgttctgtttattgatctagaggaaagaatgttttggaatctgatgccttttaccaccagagacttctccattcggtccctagccgaccgcttgggagacttgaattaccttatctacgtgtttcctgatcggccaaaagatgaagtatactccaaatactacacaccagttccctgcgagtctgctactggtaacaatgttcgcattctgatttgattttgttgtgtgtgtgg

SEQ ID NO: 10997 - DNA, 441 bp, Homo sapiens
ttaatttgtagacattagtcttggaggacgtattcgtttctttgtgaaaaggtcaagattaagactaaaacttattgttaccatatgtattcatctgttggatcttgtaaacatgaaaagggctttattttcaaaaattaacttcaaaataagtgtataaaatgcaactgttgatttcctcaacatggctcacaaatttctatcccaaatcttttctgaagatgaagagtttagttttaaaactgcactgccaacaagttcacttcatatataaagcattatttttactcttttgaggtgaatataatttatattacaatggaaaagcttctttaatactaagtatttttcaggtcttcaccaagtatcaaagtaataacacaaatgaagtgtcattattcaaaatagtccactgactcctcacatctgttatcttattat

SEQ ID NO: 10998 - DNA, 438 bp, Homo sapiens
attgaggaccactagatagtgcggcggaattccagtcctctagggagctctcttggaaaggttggggtgctagacacacaaaccagccccttctcttccctgagtgaagctgagagtgaggggctctcttcctgattgtatggcactgcactgtgggccaggtgtctgtggagacggtgctggaaatctccctaccagtttcagtgagtctggtttcatgttctggggttcaggagcctgtcaattaggttctgatttccatgtcatcttctaataatgatagttttgtacctttctttttcatttttatttctgttaatttttgtcttactgcatttgttaatctttcctatataatgaggaatggagcactgatggaagacattcttctttattaccaacttgagtggaatgcttctgaagtttcaaaaataagaa

SEQ ID NO: 10999 - DNA, 454 bp, Homo sapiens
  misc_feature (1)...(454): n = A,T,C or G
attgatgaccattagtccagttcgatggccctcaagacatatccaagactggataatatatatagaaaaaaagggtttaatggactctcaattccacatagctgtggaagcctcacaattatggcagaaggcaaaggaggagaaaggcacgtcttacatggtggcaggcaagagagcttgtgcagggcaacttccctttataaaaccatcagatcttgtgagacttactcactatcaggataccagtatgaggagaactgcccccatgattcaatggtctccacctggccccacccttgacacatggggattatcataattttaggtgagatttggttggggacacagccaaaccatatcagttgtccacccacacggaactcaccttcctaacccatgaaatgcaaaaatgcctaatacttcagtgttagggatatgaaaagacagaaaaaan

SEQ ID NO: 11000 - DNA, 454 bp, Homo sapiens
  misc_feature (1)...(454): n = A,T,C or G
atttgacacctttttggtaggacctcgcacagnccggcggaattcgactgtccctacagagggaacagcaaatgctaaattccctgctttagaaacaggttttgcatgagaaggactggcgaggatgctactggtcagagcctatcaaccaaagatataagtgaattaggtttgactgcaagtagcataaaatccaaaataattgtgacttaaacaattgaacttttttcttcttagttcaaatcccagagatagtccaggagtgatagagtgttcaatggtagcagggacccatgcccccatcttgctgctctgccatgcaacaccagcattcccaaggttgcttatgacccaagatggctgctgcagcaccagccatcacattgacgtttcaaccagtagtaatgaggaaagggtgatgcagagccagttacctcctgtaaggactcttacc

SEQ ID NO: 11001 - DNA, 485 bp, Homo sapiens
  misc_feature (1)...(485): n = A,T,C or G
tccagttggcttgnagngncncgantacctggaatgncagnnggncttggacagatgaactcggtgatgctggggggcaggaacatcaaggtgggcagacccagcaacatagggcaggcccagcccatcatagaccagttggctgaggaggcacgggccttcaaccgcatctacgtggcctctgtgcaccaggacctctcagacgatgacatcaagagcgtgtttgaggcctttggcaagatcaagtcctgcacactggcccgggaccccacaactggcaagcacaagggctacggcttcattgagtacgagaaggcccagtcgtcccaagatgctgtgtcttccatgaacctctttgacctgggtggccagtacttgcgggtgggcaaggctgtcacaaccgccatgcccctactcacaccagccacgcctggaggcctcccacctgccgctgctgtggcagctgcttgcacccctgtcaagat

SEQ ID NO: 11002 - DNA, 486 bp, Homo sapiens
  misc_feature (1)...(486): n = A,T,C or G
attggagaccctagnnnnnnnnnactggagatcactagtccagngcggnggaattcttcagggcgattctgtacattaataagatagataaaagttaaaaactaagagaaaattaattataggacatcaaaacaggacatgtgtatgtgtgtgggtgtgtacatatctaaaattccagactggacatattccaagtgttcaaaagatgcatgtggctgagtggtgactcactcctgtaatctctgtgctttgggaagccaatgggagaagtgcttgaggcaagaagttcaagatcagcctggacaacatagtgagaccccatctttacaaaaaatttaaaaagttagctgggcatggtggtgtgcacatgtaataccagctacttgggaggctgacgcaggaggagtgcttgagcccagaaatttgaggttatagtgagctatgatcacaccactgccctccagcctgggtgacagagtgagactc

SEQ ID NO: 11003 - DNA, 476 bp, Homo sapiens
  misc_feature (1)...(476): n = A,T,C or G
ataagagatcctcgnaagngcgagtgatnccgtcgcgccttaccgcgcagnccgaagattcactatggtgaaaatcgccttcaatacccctaccgccgtgcaaaaggaggaggcgcggcaagacgtggaggccctcctgagccgcacggtcagaactcagatactgaccggcaaggagctccgagttgccacccaggaaaaagagggctcctctgggagatgtatgcttactctcttaggcctttcattcatcttggcaggacttattgttggtggagcctgcatttacaagtacttcatgcccaagagcaccatttaccgtggagagatgtgcttttttgattctgaggatcctgcaaattcccttcgtggaggagagcctaacttcctgcctgtgactgaggaggctgacattcgtgaggatgacaacattgcaatcattgatgtgcctgtccncagtttctctgatagtgacg

SEQ ID NO: 11004 - DNA, 448 bp, Homo sapiens
  misc_feature (1)...(448): n = A,T,C or G
gggggaanatttgagnccccnnntttcgtcgaccctagtccgtgtggtggaattcctcagtgtggatcttgtgtgaagctcactgcctcaaggtggccgtggatggtcagcacctgtttgaatactaccatcgcctgaggaacctgcccaccatcaacagactggaagtggggggcgacatccagctgacccatgtgcagacataggcggcttcctggccctggggccgggggctggggtgtggggcagtctgggtcctctcatcatccccacttcccaggcccagcctttccaaccctgcctgggatctgggctttaatgcagaggccatgtccttgtctggtcctgcttctggctacagccaccctggaacggagaaggcagctgacggggattgccttcctcagccgcagcagcacctggggctccagctgctggaatcctacca

SEQ ID NO: 11005 - DNA, 505 bp, Homo sapiens
  misc_feature (1)...(505): n = A,T,C or G
agaggccccccaatgagaatatagtcactgtggnggaattcggngaaggcagcttaaaaattaggagagtcatggttcagaagctaatggaggaaagaaatttcaaggatagtcaagtaccagggacaggttaaataagagggacattgaaaactccccaaatggcagtgctggagagtaaagagaaaacgtatgtgagggagttaagccagggaatgtagactcatctttcaaggaacagcatttacaagatggctctccagggtaagggctaacacctgtgaccaggaaacagcaatagcactcttgcaaagattacatatacgtgttcatagctgaatgagaagttggcaaagcatgatcagactgatagagaacttaatttgaagatccacactggccttgcattgtggtcctacgctcatcagagntgggcatatttcagtttagaatatcaacataaaaaggtctctgattcttgataaaaatggtttctgaccacggn

SEQ ID NO: 11006 - DNA, 493 bp, Homo sapiens
  misc_feature (1)...(493): n = A,T,C or G
aggaggtgccnagatnnnnnnnaactgagactctagatagagcgccgtaattccattcttccatttctatgcaaatttctttgaagcagaattgcttgcatatttcttctctgccgtcacagaaagcagagtttctttcaaacttcactgaggcatcagttgctctttggcaatgtcccttaaccatgattattaactaagtttgtggcttgagtttacaaattctacttgttgcattgatgttcccatgtagtaagtcatttttagtttggttgtgaaaaaaccctgggctgaagttggcatttcagttaaaagaaaaaaagaaactagtcccagatttgaaaacttgtaataaaattgaaactcactggttttctatgtctttttgaactcttgtaatcgagttttgatcatattttctattaaagtggctaacacctggnnnnnnnnnnnnnnnnnnnnnnnnnnnnnnnnnnnnnnnnnnnnnnnnnnn

SEQ ID NO: 11007 - DNA, 474 bp, Homo sapiens
  misc_feature (1)...(474): n = A,T,C or G
cgcgtnnccnnncctgatncccactgatgacgctagaccangcggtggaattcgagaaagtggacggcgggatttaaatagatcataactggacatctggaaaacggggagtttgtgatgaaattaccctgctaatgccaggttcttgcaaactttgaaaaacattatattctaaacctcatttactgtttgggtaaaaattctaagctgaatgagagtttctgtataacataactggtttctttctttttttgagatggagtcttgctctgttgcccaggctggagtgcagcggcatgatctcgactcactgcagcctccgcctcctgggttcaagtggttctcctgcctcagcctccctagtagctgggattacaggtgcacaccaccacacctggctaatttttgtatttttagcagacagggtttcaccatgttggccaggctcgtatcaaacccttgaccccaggtgat

SEQ ID NO: 11008 - DNA, 495 bp, Homo sapiens
  misc_feature (1)...(495): n = A,T,C or G
aggagttgccnaggggngnnnccctgagnatatcggctgagcatcatcgnanangcgnnggaattnggactatctcctgtgcctgctcaccctgctgggctcctacatttagctgcccgcctacctcaagttggcctcccggagccgagctagctcctccaaggtccccctgatgacgctgcagctgctggacttctgcctgagcatcctgaccctctgcagctcctacatggaagtgcccacctatctcaacttcaagtccatgaaccacatgaattacctccccagccaggaggatatgcctcataaccagttcatcaagatgatgatcatcttttccatcgccttcatcactgtccttatcttcaaggtctacatgttcaagtgcgtgtggcggtgctacagattgatcaagtgcatgaactcggtggaggagaagagaaactccaagatgctccagaaggtggtcctgccgtcctacgaggaagccctgtn

SEQ ID NO: 11009 - DNA, 470 bp, Homo sapiens
  misc_feature (1)...(470): n = A,T,C or G
tgcgttnnnnnactgagnatcatgantaccgtgtggaannncnnnnnnggggaagacacctggtaccttgttagggttaatttgtcttttaaattgggctcccaagggtatctgctagctaccctgtctcacaaggctattttgaggctgaggatgtaacaactgtgaaaacagtttggaaactagtgctaagcaattgtttgtcaggaagcagggacttgtgggaactcatactgtggactgattcagcacattgtaggccctcacagtaaccaggctaccctgtgctgtcagcaggctttggaagagcctccataaaatgcaaacttgactttactaagctgaatcaatattgagggagcacatcccttccttcagcttgtcactgatgggaagctgtggcttatagagagcagggatctttgaagagtgatgagaaactcagctagaggtggttctgggaaggtacc

SEQ ID NO: 11010 - DNA, 481 bp, Homo sapiens
  misc_feature (1)...(481): n = A,T,C or G
ggtcctgcnaatcgatgaccatagatcgangngctgtaagacgnncctacttatgntntaccagccaattggactggaacctatacagttgtttatttagcccccgaaattaatatagctcccaacaaccaatccttcattatacttttaactgcaaccaccagacacaaatgagccatccaactgataccactttcggtagagctaggaataacagcaggagtaggaatgagagttagcagccttgcagtttccctatcctattaccaatgcttgtccaaggattttatggaaagcttaggtgacattgcccaaaagtatcatcaccttacaaaatcagatagagtctttggcagtggtggctttgtaaaatagaaggggactggatctcctaaatgctgaagaaggtggcttatgtctttttcctagaggaagaatgctgtttttatgtcaaccaaacaggattagtaagggatgcccn

SEQ ID NO: 11011 - DNA, 447 bp, Homo sapiens
  misc_feature (1)...(447): n = A,T,C or G
nattgaagaccatattgaagngcggtggaattcagatgaccttttggaccacacagatggctggtcgtcctgtgcaccagtgtggcagggatggagcttgtgccagctgccccgggcagagttgttttctttttaagaggtagccaaggcagccttgcctctcaggacccagccctggtgggtggcaccccagcccttccctttccagggctctgattttcctcatggcttgctgttatttcactcgcagagttcagatgttgttcattccagcagaggccggatgtgtaaatcatcctgcagcagttctgtcttgtatggccggaggctccttggtgggctgattggaaagcccagtacattanggagtgaagggagtgaaagaaaagagaatggaggagggagaactggagctggggcacgtgagctgctgtggtagcgtcgggn

SEQ ID NO: 11012 - DNA, 547 bp, Homo sapiens
  misc_feature (1)...(547): n = A,T,C or G
attcgattacagtccagagtggtggaattcccagaggtggtcaccccagggacagccaggcacctgctcctcttgcccttcctgggggaagggagctgccttctgtccctgtaactgctttccttatggcccagcccggccactcagacttgtttgaagctgcactggcagcttttttgtctcctttgggtattcacaacagccagggacttgattttgatgtattttaaaccacattaaataaagagtctgttgccttanaaaaaaaaaaaaaaaaaaaaaaaaaaaaaaaaaaaaaaaaaaaaaaaaaaaaaaaaaaaaaaaaaaannnnnnnaaaannnnnnaaaaaaaaaaaannnnnaaaaaaannnnaaaannnnnnnnnnnntttttttttnaaaaacttttttttttttcccccccccccccttttttttttctttaaggganacccctccctttttttttttaataaaaaaaaaagaaatttctctcttttttttaaatnnnntcttctttttctggaggggnncaattctctttncc

SEQ ID NO: 11013 - DNA, 554 bp, Homo sapiens
  misc_feature (1)...(554): n = A,T,C or G
atcganattgatcnatattccagcgnggngcaattcatgtgcacatatatatattacttaaccatatgaattttatttccttactctgaatatacttgtagttttacttctttctgtttatgtacccaattccttatgattattttgtttcttctgcaatatcaagatgttatttattttgagaaatgcttatttttatgactatttattccaatgttttaacaagaagcacagagatttatagtattcttaatagtatgtgcagaagttacatcatttaaaaaacccttgctgtaaagtaggataacttgaatattcattctaataattagactaagtgaaaatctgagaaagagttaattgcaatgtgatagtgggtagaaaggagagaaaaacccactanagggttcaaatacatgtgaattcaactgctttaagagaaataaaacaaataagcctagggaaatattagagtctaaaaaaccctagagttaatctcttttgggaacataaggaggtatacagaactgcagaccctctaacataagtaggag

SEQ ID NO: 11014 - DNA, 451 bp, Homo sapiens
  misc_feature (1)...(451): n = A,T,C or G
nttcgagttcactagcacgngnggnggaattcgattcgcggacccctctggccgcgctgtggctgtttcaccgctccccggctgggacttggagtcccttatctttccctggtttggtacatgacccggaagcctcggctggccgttgcgtcatccatggcgccggcgcagagcgagaaggaggtgggaacgccgtgaagcaagagcggtcggcagagcggggaggcgaactgcagcagagttcttgctttccggcaggtgatggcgccccccgcggcctagaggtccagcgcccgccgcgagcagcggacagtcctcctgttgtgtccgaccgagagtcctggtgactttgaacatgctggtgccgctagccaagctgtcctgcctggggacgattatcaagatgaacagagcctgagaagggagtcaaaattgaagctcagaagggatg

SEQ ID NO: 11015 - DNA, 451 bp, Homo sapiens
  misc_feature (1)...(451): n = A,T,C or G
natgatgnccccattgatngacatctagaacangcggnggaattccatgattttttggtgaaagtaaaagttggaaaattcatggccaaacttgctgaacatatgttcccaaagagccaggaataacaccttgattttgtaatttagaagcaacacacattgtaaactattcattttctccaccttgtttatatggtaaaggaatcctttcagctgccagttttgaataatgaatatcatattgtatcatcaatgctgatatttaactgagttggtctttaggtttaagatggataaatgaatatcactacttgttctgaaaacatgtttgttgctttttatctcgctgcctagattgaaatattttgctatttcttctgcataagtgacagtgaaccaattcatcatgagtaagctcccttctgtcattttcattgatttaatttgtgta

SEQ ID NO: 11016 - DNA, 485 bp, Homo sapiens
  misc_feature (1)...(485): n = A,T,C or G
cgggccgcccnaatcgagnnccntcgatcgcagagcgtaggccagngcgnggaattncgcctgagcattccatgatttctgccctggccccacctatcctaggatggggtgggatggagagtgggttcagttttcttgtactttagcctggctgaacatgaactttgtgtttacctggaagtggtaggggtgggagagattctcatctttagttctggcgcccaaaatctttggtagatggagggaactggggattcacaagatgtggtaaaggtctatttctgtagtgtggcagagatgtgtttttctaaagtgtttgcagggcatttttccctcttacctcagattaagttatttatatattgttgattgaaggttttttaaaattgcttttaaacttctaagaagaacaacaatgcaggaaatataataaataannagaggggcctttaaaataaaagggccccattaaacccccatgacac

SEQ ID NO: 11017 - DNA, 482 bp, Homo sapiens
  misc_feature (1)...(482): n = A,T,C or G
nttttaagaccctcggaannncnttttgagaccataggacangcggggaattccccgaaaaagatgtcaggaaaggtgcagagaccctcccccacacaccacattgttgttccatccttctctgtgcctttgggcaaggactctccgttctgtagggaccaccaggtggaattaaagtctacactcctccaagagctgatcttggggcggccccacctccatgcccctctacagcgtgccattctcatagaacacactaggacctttgtcctctggagctgttcagtgcagcagctctgacctcatccttctccagaagcctccaccttctctcccctctctcctcctgcgctttgtgtgtcctgttcttccacttcggtgacctgtctcctcccctaatctggctcagagaggggtaccagctgctgctgctgctattgcttcttcttctgttagaggttttttatttttttccaatgacg

SEQ ID NO: 11018 - DNA, 449 bp, Homo sapiens
  misc_feature (1)...(449): n = A,T,C or G
nactgatgaccacttnngaagccgttggaannccgntaatgtactaagatagttttaagatttttggttgtataacaaaataaaagtttacccaaaagtataagatacattttttggtaaaccatttaaaatacaaaatcctattttggaggcaataggataagcattgtcttagtgttttagaattatttttgaaacagagttaacaggataaggttacacttgtattagaattgtttttttctaaagttatgttacctgaaaaatcaaggagtgcacctgatttactgttgcttcatttatcccatccttcagagaccagcaaggttctgccaggccccaagcatctgagcatgatgattttgctgtgacaattctaagatcaaccaggttacttaagtccgctctgatgaaacccagtctctcaataccttcctatttctcaatag

SEQ ID NO: 11019 - DNA, 472 bp, Homo sapiens
  misc_feature (1)...(472): n = A,T,C or G
natcgagacccctgatcgngngctgtaagtcgaancgaataccaaagcagaacccanagcggaagcaggctccaggtctcggagctcatccagcacacctacgagcccgaagcccctcctgcagtcccccaaacccagtctggcagcacggcccgtcatcccgcagaaaccaagaaccgcctcacggcctgatgacattccagactctccatctagcccgaaagttgcccttcttccacctgtcctgaaaaaagttccttcagacaaagagagagatggccagagtagcccccagcccagccccaggacattttcacaggaagtttcaaggagaagctggggccagcaggcccaggagtatcaagaacaaaagcaacggtcctccagtaaagatggccatcaaggcagcaaatctaatgactccggggaagaagcagaaaaagagtttatttttgtgtaaaggtcacccacg

SEQ ID NO: 11020 - DNA, 470 bp, Homo sapiens
  misc_feature (1)...(470): n = A,T,C or G
natcgagaccantgtcagagngcnggaattcggaagaggctgcatggcgcggtagtcccccgagtggaggtcggctgcccctgggaaaccagagagtcggagggagtccatctggagcggccaacttctcctcttaagaacaatgatgaaggctcactggacatatacgctgggttggacagtgctgtttctgacagcgcttccaaatcctgtgtaccatcaagaaattgtttggacttatatgaagagatcctgactgaagaaggaactgcaaaggaggcaacatataatgatttgcaagtagaatatggaaaatgtcaactacaaatgaaagagctgatgaaaaaatttaaagaaatacagacacagaatttcagcttaataaacgaaaaccagtctcttaagaagaatatttcagcacttatcaaaactgccagagtggaaataaaccgcaaggatgaagaaataag

SEQ ID NO: 11021 - DNA, 489 bp, Homo sapiens
  misc_feature (1)...(489): n = A,T,C or G
ggaggtnccnaggtnnnnnncctgagaccatagatagagcgccgtaagacctgcaaccaggaagaatcatagattgcacccatcaccctagattgtgttttgtttgtttttaattgaaatagagacatggtcttgctaggttgcccaggctagtctggaactcctggtctcaagctatcttcctgcctcggcctttcaaagcaccaggattacaggctgagccattgttcctggccgccccggtttgtaatagttattttaggtgtcattctccacctctacattcagagcttctttggctcagggaccatgtctttgctcatatttgtgtgcttcctcagtgataaatgatggacccagtaggtgtggcagtcagcaaatcctttcctcatcggcttcactttgttctttttttctggacctgacacatggtaagcaagagatgtgttaaacactactgcgtagaattaatttctcccaccganacac

SEQ ID NO: 11022 - DNA, 477 bp, Homo sapiens
  misc_feature (1)...(477): n = A,T,C or G
cgcggatcctaatgatacccctcaatgaggcctaggaagngcggggaanntgncgcagcaataccggacccttttccagaatgatgcctccctttatctggggcgtttcagaaactgaatgattcaatccggctagccttctaacctgccttcccctccttctctccctgctttttaataggaactactggctccaggcagtgagaatgaaaataaatgagctgtgaatgaattgaatcttcccccacccacccccctgaaatagcaatttaataacaaatgctcagccaccctgtgcttttctccctcttattaagggaacagaaccttggtggagactaggtataaggaagcacagaatacctcctatctgtgtggtaagccccatctctaactgaggtggtcttggaatgaaaatgtagccattagcataagcctgcttctccttttaacagggtggtcctggctggatctgtg

SEQ ID NO: 11023 - DNA, 461 bp, Homo sapiens
  misc_feature (1)...(461): n = A,T,C or G
cggtaaattctgagccantttnnnacttgaggataattagtccatgcggtggaattcaagtgttatttttttcaaaagttaacttctcttggtgttcactttaacttttggtgattcatacaagttttctaaaaagcacatgtctcttagatctttagtttcctctctatataaatgtcattccctgcccctacacaccagggacatgcacagacacatgcacacaacatatataagtcttactggatttttgtgaaattaacaatattcatgtagtgcatccaccttggtctctggcacatagtagccatctcaaatgcttgttagggagattcaggcatatacaagttaatattataaagtcaatatgtctaaaaaaaataaaatttaaataagcaatttaaaatttggagccaagtataagaataaacagctaaaagccataagtagccgtgaatggn

SEQ ID NO: 11024 - DNA, 450 bp, Homo sapiens
  misc_feature (1)...(450): n = A,T,C or G
nttgaagatnattagtccactgcggtggaattcgttagactgttggggtgggtataaaagatggggtctgtaaaatctttctttcttagaaatttatttcctagttctgtagaaatggttgtattagatgttctctatcatttaataatatacttgtggactaaaagatataagtgctgtataaaatcagccaattatgttaaactagcatatctgcctttattgtgtttgtcattagcctgagtagaaaggcctttaaaatttttttagaaagcatttgaatgcattttgtttggtattgtatttattcaataaagtatttaattagtgctaagtgtgaactggaccctgttgctaagccccagcaagcaatcctaggtagggtttaatccccagtaaaattgccatattgcacatgtcttaatgaagtttgaatgttaaataaattgg

SEQ ID NO: 11025 - DNA, 494 bp, Homo sapiens
  misc_feature (1)...(494): n = A,T,C or G
ggagttncccnagttnnnnnnaattgaagacattagatagagcgccgtaattctgagtccctatcaccaacactagcatggcggtggaggcccttggccacccaggcctcccgccctgttgacccttccttaaacacacgtccctctcctctagccccacccctaccttttgatcacactctacctctgcctggagggctgtttctcccactccgtccacttggagaactcccgctcagtcttcaaggccaactcaaggctctgggcaggagtcagaagacccacattttactcttggccttggctttaacacactaatttgcaaactgggggagtcagagcagatcatactgcagatctttagatcttttccaactctgcctttcacaaagtcgttcattcagcaaacatttccccagcacccccactccatgcttggggagacaggggaggcccagctgagacttgaaggataaagccagccaaggttgctg

SEQ ID NO: 11026 - DNA, 496 bp, Homo sapiens
  misc_feature (1)...(496): n = A,T,C or G
aggagtnttccnaggtnnnnnnnaattgatgacatctgatagagcgccgtaantcgatcaagctgttctcgctgaagcagcagaagaaggaggaggagtcggcgggcggcaccaagggcagcagcaagaaggcgtcggcggcgcagctgcggatccagaaggacataaacgagctgaacctgcccaagacgtgtgatatcagcttctcagatccagacgacctcctcaacttcaagctggtcatctgtcctgatgagggcttctacaagagtgggaagtttgtgttcagttttaaggtgggccagggttacccgcatgatccccccaaggtgaagtgtgagacaatggtctatcaccccaacattgacctcgagggcaacgtctgcctcaacatcctcagagaggactggaagccagtccttacgataaactccataatttatggcctgcagtatctcttcttggagcccaaccccgaggacccactgaacaagga

SEQ ID NO: 11027 - DNA, 478 bp, Homo sapiens
  misc_feature (1)...(478): n = A,T,C or G
aatgagaccctattgagngccgtggaattccacgtggaacctcttaatctcagcatccggagctccaggaagggaaaatttcaagtcagatagaattctatatataccatttctttggaaccttcagccctcaagattccaacatcatgacctcagtttcaacacagttgtccttagtcctcatgtcactgcttttggtgctgcctgttgtggaagcagtagaagccggtgatgcaatcgcccttttgttaggtgtggttctcagcattacaggcatttgtgcctgcttgggggtatatgcacgaaaaagaaatggacagatgtgactttgaaaggcctactgagtcaaacctcaccctgaaaacctttgcgctttagaggctaaacctgagatttggtgtgtgaaaggttccaagaatcagtaaataagggagtttcacatttttcattgtttccatgaaatggcaacaaacatacn

SEQ ID NO: 11028 - DNA, 481 bp, Homo sapiens
  misc_feature (1)...(481): n = A,T,C or G
catcgacccctaattgagaccataggccagngcgnggaattcgggaaatggggctcagggattgctaagcaaacgcatcactggtggtctccagcgcctgcggaggcagtgcctgatggctgagaagaatcgcagaggactagaaaaggtttgagtctgaaattatctggcacagaggattaaagctcagaaataagtgattgcgaaacagttcaacttccctgttaatgacaacaacaacagcaacacgcttattaattcctagctggagcatcaagcttatgaagatttccaagactttattgttgacccttgttgaagagaactctacttggcttctttcctggctttcctaaattgttcacatacaagataaactaccgtcattcagacttacagaagtgagaagacaagctgaaccaaatgtaaaatggtagcaatttacagatgtcagaactaacatgtggatgaacttagagag

SEQ ID NO: 11029 - DNA, 418 bp, Homo sapiens
  misc_feature (1)...(418): n = A,T,C or G
ttagaggagggtaaggaggggtgaattcaaagggaaacaatgacacatcaaaatttatgaagctgtacatttttaaaatgtgcagtatattggatttcaatcacgcctcagtaacttttttaaaaaaggaaaagaaaaagagtaggcagtggcatttactaaaatgctatatatgtttagctcccacatacacactggcaatgaatgaaaagtgcttcctctctttggggagggaacaggtaaagcaggcagcaagtcaagtctcagcagctgctccaattttaactctggagatcacttgtgccaggagctggagcccttgaacagtgaaaccacctgccaagttagtgccataatttcctaaagaaagcgtgccctgctcagagaaggcaactgaggttacagtgcagacaagacn

SEQ ID NO: 11030 - DNA, 404 bp, Homo sapiens
tttttttttctgcaaactctgcctcactttaaaatgcattataacaatacctaattaaagataattttggctctgaaagttaccttattttttgttgagttagtgacttcatttttcttgccacaatataagcttttgagggatttttttaaattggggcttttaataagcaaataaatcccagggttttattttcttcagtgatacccctatagaaactcttaaatgtattggcgcatatatatatatatattttcttatgcatgctcgatgcattttcgtcctgagaaaaatgttctctacagaaactacccgtgtgtaaaaagaagattggcttaaaatggctactgtgatgggaacagtgtcttagggagatgcagcttggacttgaggtaaattgaata

SEQ ID NO: 11031 - DNA, 465 bp, Homo sapiens
  misc_feature (1)...(465): n = A,T,C or G
nttggaattgaagacctagtaggacgctctggngcaagtcctaggcaaagaaaacataatgaccattcagaggagtcagtagcacagctcacagataaagtattttattactatctgaagttttcttttgttttcatgcaggacattttaaaaacgtatatggcagcagaaacctgtttctcaatagaaaaaatacattcagaggcatttctgggatagtctatctgtgttagtatttggcgctatctatgtccagccaagttatctaccctcaaattctgactaatcatgtttgtgctttgggtatttaaaattacatacatatatattctttttgccaaaaacaaaagtcttgcttcttgtcaaatgattgctaaagtagatcttacattttttgttattatgtatgtatttatacacatccccaacacacttagtgatttctgttatttcctagggagcaca

SEQ ID NO: 11032 - DNA, 482 bp, Homo sapiens
  misc_feature (1)...(482): n = A,T,C or G
cgcccttccaattgagatccctagtcagtgaggtggaattcggaggaaggagcaggcgcgagctctcctgggaatccgtgttctgtgaatgaccctgggtgtcatggaggaaggagcaggcgtgagctcttctgggaatccgtgttctgtgaatgaccctgggtgtcaaggaggaaggagcaggcgcgagcgctcctgggaagccgtgttgtgtgaatgaccctgggtgtcgaggaaggagaaggcgcgagcactgctgggatgctgtgttgtgtgaatgaccctcggtgtcatggaggaaggaacaggcgagcgttcctgggatgctgtgttgtgtgaatgacccttggtgtcatggaggaaggaacaggcgagcgctcctgggatgctgtgttgtgtgaatgaccctgggtgtcatggaggaaggagcangcgcgagcgctcctgggaagctgtgttgtgtgaatgaccctgggtgtcan

SEQ ID NO: 11033 - DNA, 453 bp, Homo sapiens
  misc_feature (1)...(453): n = A,T,C or G
nnnnntttgaagacccactgtacagtccggtggaattctaattgtctagcagtagccacgaccaatttattaacagccacggggctatccttgcctggagctctcagtcactggatgcacaaaatcactgcgcctcattggctcacttggtgagcataggggtgactgaccaaatgtttaattcccttgctagcttgtgagaagaatgagttgatgacatgctccataccaattgctagatggagtattaaggtggagcacaaaagaagtgagaacatcttgattcccctttcttttacttgatggtgcttatgaacatgccgtagtgcctttatggacagcttgagtcctgcctactttgacttttacgttcccatttctgtgttaccaccttcctcccgatttgttcacctattttgtgctttaaatctcaatataatacttactgaggag

SEQ ID NO: 11034 - DNA, 451 bp, Homo sapiens
cgttgaggaccacttagatgatcatctagacgtcaggtggaattccagccacactaagtgaagacatgaagcactacatcctcaatggctccaaggtctggattactaatggaggactggccaatatttttactgtgtttgcaaagactgaggtcgttgattctgatggatcattgaaagacaaaatcacagcattcatagtacaaagagactttggtggagtcactaatgggaaacccgaagataaattaggcattcggggctccaacacttgtgaagaccattttgaatacaccaagatacctgtggaaaacatccttggagaggccggagatgggtttaaggtggtcatgaacatcctcaacagcggccggttcaacatgggcagcgtcttggctgggctgctcaagagattgattgaaatgactgctgagtacgcctgcacaaggaa

SEQ ID NO: 11035 - DNA, 447 bp, Homo sapiens
  misc_feature (1)...(447): n = A,T,C or G
nttcgtagtcacttgtacagcctggtggaattcggtgtatatatttatgaggtacatgagatactttcatatagtcatgtaatgtgtaataattacaccatggtaaatggggtgtctatcccctcaagcatttatcctttatgttacagacaattcaattatactcttttagttatttttgaatatataattaaattattattgacgatagtcacccatttgtgctatcaaatactaggtcctattcattcttcctattttttgtgcccattaaccatccccacttccccgccaccagtcccccaccattgcttttgctccatcctgttgatatttacactcatggagcaaataaacacgttagtattattttgagtaatggtcaaacaaatgaaaaggtactcagcttctttagtaatggtgaaattacagattaaaataacaatg

SEQ ID NO: 11036 - DNA, 466 bp, Homo sapiens
  misc_feature (1)...(466): n = A,T,C or G
ggggcccgncggnatacaattgaaacctccgnactgacanctacgnacanctgnggaattcctgcctgccaggtctaagccaggcgagggcaagctcatcttctgctcaggcctggtgctacaccggctgcagtgtgcccgtggcttcggggactggattgacagtatcctggccttctcaaggtccctgcacagcttgcttgtcgatgtccctgccttcgcctgcctctctgcccttgtcctcatcaccgaccggcatgggctgcaggagccgcggcgggtggaggagctgcagaaccgcatcgccagctgcctgaaggagcacgtggcagctgtggcgggcgagccccagccagccagctgcctgtcacgtctgttgggcaaactgcccgagctgcggaccctgtgcacccagggcctgcagcgcatcttctacctcaagctggaggacttggtgccccctcca

SEQ ID NO: 11037 - DNA, 455 bp, Homo sapiens
  misc_feature (1)...(455): n = A,T,C or G
nttcgagaccctagaccacgcggtggaattcgtcactacaaatcttaaattgcgaaatccatcggatagaaaagtgtgtttcaaagtgaagactacagcacctcgccggtactgtgtgaggcccaacagtggaattattgacccagggtcaactgtgactgtttcagtaatgctacagccctttgactatgatccgaatgaaaagagtaaacacaagtttatggtacagacaatttttgctccaccaaacacttcagatatggaagctgtgtggaaagaggcaaaacctgatgaattaatggattccaaattgagatgcgtatttgaaatgcccaatgaaaatgataaattgggtataactccaccagggaatgctccgactgtcacttcaatgagcagcatcaacgacacagttgcaacacctgccagttatcacacgaaggatgaccccaggg

SEQ ID NO: 11038 - DNA, 455 bp, Homo sapiens
  misc_feature (1)...(455): n = A,T,C or G
ncgcgaatagtagaccactagtatagagcggcggaattcgactcggccatctagagacaaggcgggagggatttccctgagaggcagggatatgtggtggttactaatcattcgaatcattgtgaggtgtctgggaatgtaatggatgggaaatctactaagaaatcaacttacgttacacttataaaagctctagttctgaggacagagacctgatggagtcaccatagtgggaatttatgacctggcatccagttcagatacctggagcttcttgactgaggggagattggatcccttgaggaagagtgaagccttcaatgctgccacaagtgtatgctgtaaatcttccttcaagccttccccagaaggccctgaagccatttatgtgggtgactgaggaaagggaaatactcacagcttctgtggcttgttggatgctggctctgaagaat

SEQ ID NO: 11039 - DNA, 477 bp, Homo sapiens
  misc_feature (1)...(477): n = A,T,C or G
nattgtagacattagcaagngcggtggaattccaattttttatctcgttgagcttgtaaaatgccagcaatttaaaactaggacttttccccccataagccaaggaggtagaattactaatacaagggttaaagaaggtagattttgttttcaatatttgggtaatattagaaagattcttcccacagggaagaactagcaagtgtcccaattttttccaaacgttggggaggggaaaattcactgtatcatgaaaccctaagggtttgttgcacttcctgctttttaggcctggataacagtatcaccatccttatttacagaagggtaaaactgactcttaatgagaaaagctttataagttcaagggctgtaaaatatgaactacttatggtcgtttgccttccatgggaacttggctagacttagaaaaagctgtttgttgtgctaatgtaaaagtgtcatacaatttagaag

SEQ ID NO: 11040 - DNA, 462 bp, Homo sapiens
  misc_feature (1)...(462): n = A,T,C or G
ggggccggngggnattaaatgaaagctccgnactgacggctactgaaannccaggnagacctgcctcttaagcttttcctggtactgagcactgaaccgcatctgcacctcagtctgacttctgcagctgcactttctgcgccgtaacctgactgttttgctagagagcgggagcctttcagtaaaactgcatctcaggggatcttctaggttttaccgtatgcctggaacatgcagtcaatacaataaatggttgttgttgtcgttttagatttcagtgaatttgctggccaggcataatgtaaccctttctgatgaagcctcgagtgtcatactgtgctgcagtggtggatgggttgatgtgaattancctctcaaagtattccggaatctaaagaaaaccttccccctctcaccaatgaccagaatggccattgggcattcctggggtacactgatgcc

SEQ ID NO: 11041 - DNA, 473 bp, Homo sapiens
  misc_feature (1)...(473): n = A,T,C or G
tggcganaagaaacaancctgagaccctaggcttggacgncgatttctgagaactcagacatatggcctgatgaactgaaatggaactttaaaaatcatctagcactatcactttccctcagataagtaaatgattatataatccagagtagcgatcttctcttggaaatctttagggttaagaatttgtgatcttcaggtttgagtgaatagcccacttggacttagttctctgtggagaaacaggcttgaagcagtgggagtctgcagctaacctcccgtcacttgcagggtcaaaggtggattcacgaacctcgagctggcagtgagttatgggcaagccaggcctcagccactcacagggcctcagttttcccatctgcacagggagaagggaaggttcagtggccctgtgagctttgctagcaggtggtgatggggtgggtcatctgaatctgagtcaggtggaatct

SEQ ID NO: 11042 - DNA, 450 bp, Homo sapiens
  misc_feature (1)...(450): n = A,T,C or G
attgaagaccttagtaccngtggtggaattccatgcctgtaatcctagcactttgggaggctgaggtgggagaatcccttgagcctaggagttcaaaaccagcctgggcaacatggtgaaaccctatctctacaaaaaaatacaaaaattagccaggtatggtggtgcatacctgtagtcctagctattcaggaggctgaggtgggatgatcgcttgagcccaggaggtcgaggctgcagtgggttgtgatcgtgcccctacactccagcctgggcaacagagcaagactgtctcaacaaagaaaacaaaaaagaaagtaaagaaagtaaataaaatcctgtttcatcttttattaaattgcagattctgggatattcatattccatgtagacattatttaatatctgccagtctttgaatctcaactatttttgagtatttatagtttc

SEQ ID NO: 11043 - DNA, 406 bp, Homo sapiens
  misc_feature (1)...(406): n = A,T,C or G
atttaccatgtctgaaatatgataaacattaaaattagtattttggaaaaatgccatattagaaactgatgatttaaaagtaacaacaatgaatccattacatgtgaacatactgtttttttgtttgtttgtttgtttgttttgagacggagtttcactcttttgcccaggctggagtgcagtggtgcgattgcagctcactgtagtcttcgcctcccaggctcaagtgattctcatgcctcagcctcctgagtagctgggattacaggtgctcaccaccacacccggctaatttttgtagagatggggtttcaccgtattggccaggctggtcttgaactccagacttcaagtgatccacccaccttggcctcccaaagtgctgggattacgggcatgagccacn

SEQ ID NO: 11044 - DNA, 464 bp, Homo sapiens
  misc_feature (1)...(464): n = A,T,C or G
aggcggggnnnctcccatagatagcctcacnagngnggnggaattcgttatagtagataattcaaaagtggcctggagatagattgtcagctgacctattgatatcaatgtatctctctagatatgtgtatatgtataatttaatatgatgcatagaacattgtagagtactggatgttagtgggtaagagactaccttttgtatctttaatgcaatttacgttttgtttaggtgagtcatgtaaattgatgtgagctctagcttaacatgccttattaaaaccaaagcccagtaggtagtttgattagtgctgtttagagtttttataaacaaagtgctcagatgactttccttattagaacttgtcagagcagtttctttgcaggtttcatggatctcccttagcaacttactaaagaggcattttgtttaagctgtttcataaatagcaggaaattccaca

SEQ ID NO: 11045 - DNA, 474 bp, Homo sapiens
  misc_feature (1)...(474): n = A,T,C or G
gaggcccccngggattaaactgagaccatngnncatgctagctccagtacagngcggnggaattctcactttgtgagctgcaatgaggaaatctgctccaggccattttcatcactactcacttttgctcgctcccctacaatgtgccacgctgccccaggcctggccagccttgcgtaagcctgccaagcactggttgatttccctccctctccccctcgccatcctaaatacaaatacccctcacatccagggctgggtagccatttaaatacaaccatcctcagggattcttcagccatcgctgatctcccgcgcagaccgttgtttcccccaaggcctcaccctgagcactgggcttctgctttctgctctggcccacatgtgactcttgatattctccaaagacaccagccaattaaaaagcgtcacctgaaaaaaaaaaaaaaaaaagcggccgttcgagtttaaagg

SEQ ID NO: 11046 - DNA, 459 bp, Homo sapiens
  misc_feature (1)...(459): n = A,T,C or G
gttcgagacccatgangcacatctgagcagngcggtggaattcgctggagcccttataggaggaggaagcgacgccagggccctctcctttctgcatgatgacagtgagaaggcggactacgacaagccaggagagccctctccaggaacccatcgtctgacaccttgatcttggacctcccagtctccagaaatgtggggaaaaaaaagttctgctgaaacctctccacttgtggccttttgctgtggctgccctagcagaaagatgcaccatacgacccagcaattccactcccaagtatgcacaagagaactgagagcggggttgtaaacaaattccgttcacgcatgttcactgagctctatgcgcaaccactaaccaggggagagaacccccgtggccctcagctgatgagtggatcaacaaagcatggaatatttgcatacaccatggaatan

SEQ ID NO: 11047 - DNA, 393 bp, Homo sapiens
  misc_feature (1)...(393): n = A,T,C or G
ctgagtttttatactttatatgtaggaagctaatataaaatagttatgtaactgtgattttggttttcagttatgtgacttgttttttccacctgaaatgtgtcagttgttgttcctgtactcggtgccctttctttttactctcacgtggtcccaggttctggagttcttgtcctggttctagctgctcacatgtacaaatcacttctaggcctcagtttctgcgactatgaaaattactagattgcactagcttgtctctaaaattgctgtgactccagatactttgcactgaagagaatctagggtgtttgatatctgtttcagttagggctaatgggaaatgtctagtaagataaatgtcaacttttgctgacttattatgagatgaan

SEQ ID NO: 11048 - DNA, 475 bp, Homo sapiens
  misc_feature (1)...(475): n = A,T,C or G
gccccccccgnnngnatttgaaaccattcgtctttacaccctaggacaagccgnggaattcgcctgttggaggctgggccaggacctgagggccgagaggcattttctctgaacagctcttcaggggagttgcgtgcgcgagtgccctttgactatgagcacacagaaagcttccggctgctggtgggggctgctgatgctgggaatctctcagcctctgtcactgtgtcggtgctaatgactggagaggatgagtatgaccctgtatttctggcaccagctttccacttccaagtgcccgaaggtgcccggcgtggccacagcttgggtcacgtgcaggccacagatgatgatgggggtgccgaaggcctgggtctgtattcccttgccacctcttccccctattttggtattaaccaaactacaggagccctgtacctgcgggtggacagtcgggcaccaggcagcggaacag

SEQ ID NO: 11049 - DNA, 452 bp, Homo sapiens
  misc_feature (1)...(452): n = A,T,C or G
attgannccccttgaggacccttagtcagtgtggtggaattcgggaaataccatgaggaagacagaagcaaaggcgttccttcatgtcctggctaaagtcatcattggactggcctttgactgcgtggacaagatggtttactggacggacatcactgagccttccattgggagagctagtctacatggtggagagccaaccaccatcattagacaagatcttggaagtccagaaggtatcgctgttgatcaccttggccgcaacatcttctggacagactctaacctggatcgaatagaagtggcgaagctggacggcacgcagcgccgggtgctctttgagactgacttggtgaatcccagaggcattgtaacggattccgtgagagggaacctttactggacagactggaacagagataaccccaagattgaaacttcctacatggacg

SEQ ID NO: 11050 - DNA, 499 bp, Homo sapiens
  misc_feature (1)...(499): n = A,T,C or G
gggggnnnnnnagggggnnnncnnagggggatttatactaaaaccatctcagctangcttcgtaaagncgnggaannngngnnatgacggggacagagtgagggaatggtagntaaggcttnttttttgcccccagatacatggtgatggttagcatatggtgcttagaaggttaaatttcaagcaaaatgcttacagggctaggcagtaccaaagtaactgaattatttcaggaaggtcttcaatcttaaaacaaattcattattctttttcagttttacctcttctctctcagttctacactgatacacttgaaggaccatttactgtttttttctgtagcaccagagaatccatccaaagttccctatgaaaaatgtgttccattgccatagctgactacaaattaaagttgaggaggtttctgcatagagtctttatgtccataagctacgggtaggtctattttcagagcatgatacaaattccacagccttct

SEQ ID NO: 11051 - DNA, 493 bp, Homo sapiens
  misc_feature (1)...(493): n = A,T,C or G
agggtgcccccgnnngttaatgaaacctantgagagtcatacgacanngcgnggaattctgcaaagccatcacaatgcctacaagaaggccgtggaaacctgtgtcaatcttccatgttacttaccttctgcgctacttccccaaagctcttacgataatgaggctgcctaaccacaacccttctatgaccatcatgtggcctggcaggactacccctgcagttcttcacatttcagaagatctgggcagcatccacgttacagcagtaggatccaggcatccacaaaagaagaccaagctttgtcctaagaggaagagatggagactgagtcagatgcagaggtagaatgtgacctgagcaatatggaaatcactgaagagctccgccagtactttgcagagaccgagaggcatagagaagaacgacggcggcagcagcagctggatgcagagcgcctggacagctatgtgaacgctgaccacgacctgtac

SEQ ID NO: 11052 - DNA, 472 bp, Homo sapiens
  misc_feature (1)...(472): n = A,T,C or G
nactgaaggaccattagaccagngcggnggaaaaactaacgacctctctggggcacgaaaggtggttgtggcaacgaacattgctgagacatcactcaccattgagggcatcatttatgtgctggatccagggttctgtaagcagaagagctacaacccccgcacaggcatggaatcgctcactgtcacaccctgcagcaaggcctcagccaatcagcgagctggcagggcaggtcgggtggctgcagggaagtgcttccgcctgtataccgcctgggcctatcagcacgagcttgaggaaaccacagtgcctgagatccagaggaccagcttgggcaatgtcgtgttgctgctcaagagcttanggatccatgacctaatgcactttgatttcctggaccctccaccatatgagacactgctgctggctttggagcagctgtatgctctgggagccctcaaccaccttggn

SEQ ID NO: 11053 - DNA, 480 bp, Homo sapiens
  misc_feature (1)...(480): n = A,T,C or G
nactgaatgacctctacccgngcgnnnnaanaactgagaatcatagcnaagngcggnggaattccacccagctaactttttgtatttttggtagagacggggtttcgccatgttgactgggctggtctcaaactcctgacctcaagtgatccacccaccttggtctcccagagtgctgggattacatgcgtgggccaccacacttggcctacattttttctttatataccagaacatctataacaggcaccttatctactcattagtgaagagataattggattacacaggcaggcttgtttactacatccagaatgtagaaactgctttcttcaacatcttggttctagctagtaataacaatataattctttggcagatattcagaataacattttaaactacattttcttataaaattgcattcttgtagtgagcagtgtatggtctcttttgttcagaatttaaaactgataaccn

SEQ ID NO: 11054 - DNA, 500 bp, Homo sapiens
  misc_feature (1)...(500): n = A,T,C or G
gggcnnnnnnnagggcggggnncnnagggagatgaattaagaaanccttgcccagcnagtctncgnanannccaccaannntaatncttttattttaatccttttacataaaataatctgaactctttgacaaattgcacagagctctttggcattaatctaattttaatgtactgataaaaacaaacatggttttcctttactttgacaaagtaatgtaatttttaccttatttatctgtatgaaattccagtagttaatttgaacatttatttatatgacgtttgtatttttaggtctttaatacagtgtttctacctctcatttgtaactgcatgcattattcttgaaactaggtaaaactcactgaattgttgtgtaatagcctttttattattgcctgtacaaatgtatattaaggtaaaataaaactgacaaagtgtttctagggtgtagctgggtacatattaagtggcttgttgagccaggtacttccttan

SEQ ID NO: 11055 - DNA, 553 bp, Homo sapiens
  misc_feature (1)...(553): n = A,T,C or G
actttacntcnntnnannnncccagcctggccacatggtgaaaccccatctctactaanaatacaaaaagttagctgggcatggtggtgcgcgcctgtggtcccagctactcgggaggctgaggtgggagaatcccttgaacccaggaggcagaagttgcagtgagctgagatcatgccattgcactccagcctgggcaacagagcgagacttcatctccaaaaaaagaaaaagaagaaaaagatttataatttctgagtcccctaagtccctttctcagtttgcaataatcttacgtccatgctattgacactaattttgaaactggaaagctaattaatgacatattcatgtgttctttcatctaataaacatttattaatggatagttctacaccaggcattctgaagggtccaaaagaaagttcctgccctctagtagcacataatcccgtatttctcagcacaccatgccatctgtttatcattcagcaagtaagaattcatcacttcatatttttaccaaagtatatttaccaagctgtttatctgc

SEQ ID NO: 11056 - DNA, 463 bp, Homo sapiens
  misc_feature (1)...(463): n = A,T,C or G
ccctgatacatctgacaggcgggaaaactgaatgcctatgagaacagnngngcanggtatggggaaaggaaggctggcttggcgagagggcaggtttgcgggctttcgcccccttttccaaagaccaacaaagagtccttccccaactcccaactcaaccccttttggaactatgtgtggtggttgggaccctgtggcgcatccttgtcgctcgtgtccttctcatgcccggcgacgcgtctttgtggtaacgccctgctgccatctcttttcttctctatgcgaggatttggactggcagtgagaataagagacaacgattcacgtctactttctaggatgacttccatgtgctccatctcgcgcgtccctgagcatgttgaatttccaaatcctaaataagccgcgcggtgtagtttgtattatgttgcgtttctctttctgctttcctcgccctttctcc

SEQ ID NO: 11057 - DNA, 468 bp, Homo sapiens
  misc_feature (1)...(468): n = A,T,C or G
acaacactgagaccttccgaannacctgagaccctaggacagngcggnggaattcgagaggaagttcatctttttaccagggagtagccaccttcttaagaattctcctgtctatataaccaaattaatagaatcctggtaaatcaactggaatgttaactgttctgattttcaactgtttttaccttcatcattaatactgaatatggactgtaggttggataactgctgttcaaggtaaggaactctgagcagcagccttgagctaccaaggcattaaataggatttttgcttaaaaatcctatatttttgcttaaaaatattaaaaatatgactgagtatatgtatatattccccccacattccaaagataaacactgttaagcatgtaaagcacattttactgtatatatatgggtggcatatgtgtgtgagtgtgtgtgtgtatacatatatacacatacacn

SEQ ID NO: 11058 - DNA, 470 bp, Homo sapiens
  misc_feature (1)...(470): n = A,T,C or G
aggcgcgggnnttttncatagaattgcctacntangncgnggaattccgccaactacttgagaggctgaggctggagaatcacttgaacccaggaggtggaggtcagtgagccaagactgtgaaactgcactctagcctgggcagagactagagactctagcctggacagaatgagactgtctcaaaaacaaacaaacaaaaaaattctgtgtatgactatgatcccttaacttgatttcatgacccacgaatggatctcaacctacaactggaaaaacccactactctggaggagctgattccgtactctgctggatcttcaattcctgaccgctggaaattggctgcaattttcctggtgagttcctccctccatgctctcctcactaatacaccctacaccagacctccagtcctaaaagccaccacctgcttcacgtcaccacacctgtgccaatcagatttcctc

SEQ ID NO: 11059 - DNA, 483 bp, Homo sapiens
  misc_feature (1)...(483): n = A,T,C or G
ngagagggnnccnnnnaattgagaaactgagaccnctcggaagngccgtggaatttgcagcttaaattttttttataatgtataagaattttgtttatcttttaagagtagtaaagtactttgagtgtttgggggttcaacacacacatgcaattttgcttaacaaaagtattttataatacagtttcatacagaattaccttaaaagggagtcttatgttttcaactacagatagttgtaagggatcatacagaagatattgatgatagttgaaatattcttagaaggggtgtgtatgtctagctgtgtctaccatgtgtatgtattcttgacaagcagtataaaatacctgtgatttttctttacattagggataatgcataaggaattaatcttcatatatattatcatccctaatgtagcagggggaagtatttaattgcccatgatatgtattttacttatactatgccagagaggan

SEQ ID NO: 11060 - DNA, 465 bp, Homo sapiens
  misc_feature (1)...(465): n = A,T,C or G
gcgcgccgngnnnntatagatagcgtccatggccgnggcnggaattccttagcttccagtactgtatgccaggtactaggaatatgtttcttttttggtttgttttgtttggtttttgttttgttttgtaagagtgtttctgtgtttatctcctggccaaagcatgaatttctgaaaaggctgccctgaagctagatattatcatcaggagtgataataaaaacaacttctcttcatcctggtgcaattttggaaggaagaatgataagtcgttaattatccagtcctctgaatattgaccaaagggaggaggaagaaggtggccgcctccaggcccagccttgatgaattctgcaatctgtctccattatttcatgcctgcgtaattttgtcaagagttgtccaatacctctgaatctttgtttttctcccctagagaataatagtgattcctgactcagaaag

SEQ ID NO: 11061 - DNA, 508 bp, Homo sapiens
  misc_feature (1)...(508): n = A,T,C or G
cggagccnggggnnnnnnnaactgagaccctagtcagtngcgggaattcgcagaaacaggtggaaggcgtgggccagagagctgaccttcccccagcaacactttcttactgtagtagccgtggaaacaacctgggagggtgccacgagggcttctcaagtgccccttgcccctggggtctcatggaaggaggaacttgtgttaacgtggtgtggtggaaaaagcaagcatggagcgcgcacaggcttggagtcccacggatctaggtttattcttattctcttgggcacttactagctccatgacttggtttctttttctttctttttttttttgggagacagggtctcattctgttatccaacctggagggcaggggcttgataacagttaactgcagccttgatttcctgggttaaagggaccctcccacctcaccctcctgagtagctggaactataggccggaaaggctaatctttaaattttttgtgaaaagaagggcctat

SEQ ID NO: 11062 - DNA, 474 bp, Homo sapiens
  misc_feature (1)...(474): n = A,T,C or G
aggcgcgggnnnttnncatagatagcctancnagngngcgaggaattcctggactctcaggacaaaacgacaccagccaaaccagcagcccctcagcatccagcagcatgagcggaggcattttccttttcttcgtggccaatgccataatccacctcttctgcttcagttgaggtgacacgtctcagccttagccctgtgccccctgaaacagctgccaccatcactcgcaagagaatcccctccatctttgggaggggttgatgccagacatcaccaggttgtagaagttgacaggcagtgccatgggggcaacagccaaaataggggggtaatgatgtaggggccaagcagtgcccagctgggggtcaataaagttacccttgtacttgcnnaananaaaannnnnnnnnnnnnnnnnnnnnnnnnnnnnnnnnnnnnnnnnnnnnnnnnnnnnnnnaaaaantnnaaana

SEQ ID NO: 11063 - DNA, 550 bp, Homo sapiens
  misc_feature (1)...(550): n = A,T,C or G
ccttctcttccgngngnnnnaagaccattcccagagaggttcccaccctataccccgngggaaggaatgctgacgttataaagctttcataaaaacccaagcggacagggttcagggagctttgggataactgaacacatcgaggttcctggagggtggtgcctgggggagggcttggaagccctgtgcccctcctcccacacctgaattgttttttctttttcccttcatgaaactcttccctgctccttgtatgtgcctccatagtcattataagattttatgataatttttacatgtctccccgctcctaagtaccttccacagtgtctagcatgtcatagggagtgattggtaaatagctgatagaaagaacaaattanactatcagccttgtgaattttctaaatagaggtctgtacttctcatgccagaatgactatgttnttttcctgcccagtaattnttttttttttttttttgagacagtgctcactctgtcgcccaggctggagggcagaggcacatctcagttactgaaatctccccn

SEQ ID NO: 11064 - DNA, 468 bp, Homo sapiens
  misc_feature (1)...(468): n = A,T,C or G
atgggcgcggnnnntatagatagcgtccctacgccgngncgnggaattcccccagtgctaggtgagggagggctcaacgggggtaatgtgtatggggtctgctgtcctttgccatcccctggaccatattaactctgggacagaccatgattaggtctgtcaccaaacttttcctaatcattttttatgtatcattcttctttctaatctgttagcagatatctcccagaagtatccctagcatcctgaagcaaacagaactgccgggcgctgtggcttatgcctgtaatctcagcaatttgggaggccgaggcgggcggatcacctgaggtcagaagttcgagaccagcctgtccaacatggtgaaaccccgtctccactaaaaacacaaaaattatctgggcgtggtggcatgtgcctgtagtcccagctactggtgaggctgaggcaggagaatcgcttgaatcc

SEQ ID NO: 11065 - DNA, 558 bp, Homo sapiens
  misc_feature (1)...(558): n = A,T,C or G
nctatatncccattnannnnnncaattccatgttccgacgcaagtagacggatgtcgactaccacaaccccgccgggttcgactgcagagatgaaactgaatttataaacttcatcgtttggcttgaagaccagaaaatcaggcactacaagattgaagacagagggaatttacgaaacatccacagcagcgactggcccaagatctttgaaaagtatctcagagatgttaactgtcctttcaagattcaagatcgacaagaagctattgactggcttcttggtttagctgttagacttgaatatggagataatgctgaaaaatacaaggatttagtacctgataattcaaaaactgctgacaatgcaactaaaaatgcagaaccattgatcaatttggatgtaaataatcctgattttaaggctggtgtgatggctttggctaacctgcttcagattcagcgtcatgatgattacctggtaatgcttaaggcaattcggattttggtcaagagcgcctgacacaggatgcagttgctaaggcaaatcaaacaaaaga

SEQ ID NO: 11066 - DNA, 479 bp, Homo sapiens
  misc_feature (1)...(479): n = A,T,C or G
ntttgagacctatccaggcgttgattaccatttgatggtgagctctgcttangtaatatgtaggacacgagcagagaggaggcacgtgaacagtcctggctgaagtaggcttcattgaggccgtgatgcttttagctggatttgaagaagtggtagtgagcatcccagtgcacaggataggaggacagtctatatattctgagcagtaactcatatatatcatactgcaagaccccaaaggagtaattttttgaagtaaatatcttatttctcctttttaatgtttctattttgggaattttttttttagtaaccttcatagggcttgagatttaaaattacctgcaaaattctactctaaaaacttgatcctacatgcttatttattttgtgataaatattggaaattttaaacctaagcaagaaaatgaactttgaactttcttaatttgggtatctattatgaataccttcactta

SEQ ID NO: 11067 - DNA, 474 bp, Homo sapiens
  misc_feature (1)...(474): n = A,T,C or G
agcgcgcgcgngnnnnntatgaatagcgntacntgngaggnggaattcgggattgaaaagggggcccggcaaacagggaaagaggtggcaggcctggtgacctttgccccaccaactcccagatttcaaaggaggtagttgcaaaagctgtgcccaaggggaggaaggaggtcacaccaatatgatgatggttttcatgactttgaatgatatatttttgtacatctagctgtatcgaggcatcaggcctgaataaacatcctttcttaaaaaaaaaaaaaaaaaaaaaaaaaaaaaaaaaaaaaaaaaagggcccttttattttaaagggcccctttaaaccccgttaaaaaccctgggggggccttttaagggcccacccttttttggttgccccccccccgggcctttttttgccctggaaggggccccccccctttgttttttcttaaaaaaaggagaaatttccttcca

SEQ ID NO: 11068 - DNA, 458 bp, Homo sapiens
  misc_feature (1)...(458): n = A,T,C or G
cttgactacctaacctaggccgnngcgnggaattctgcagggagccgagatcgcaccaccgcactccagcctgggcaacagagcaagagtccatctcaaaaaaggtgtcagcaggaccacactccctctggaggctctacgggaggacccttcctgcctgttctagcttctggggctccaggtgttccatggcctgtggccacatcactccaatccccacctccatctttattcacgtgccgccttctctctgtgtgcacatgtctcttttccttttataaggacgccagtctttggatttggggcccacccttgtccagtacaacctgatcttaactgactacatccccaaaggccttatttccaaacaaggtcacattctgaggttcgcggtaagcatgagttttggggagcacgaatgaactccccactggaaatgcctctctttgtaattntgn

SEQ ID NO: 11069 - DNA, 478 bp, Homo sapiens
  misc_feature (1)...(478): n = A,T,C or G
ccgccccccccctccctttgtagatcacttttcagtctggtggaattcgctatataaaaattaatcggtctatacagcaacggaaggcaataacaaccaaacaaagtatttatgtctgttgtatagtatggatgcttgctcttggtggattcctaactatgattattttaacacttaagaaaggagggcataattccacaatgtgtttccattacagagataagcataacgcaaaaggagaagccatttttaacttcattcttgtggtaatgttctggctaattttcttactaataatcctttcatatattaagattgggaagaatctattgaggatttctaaaaggaggtcaaaatttcctaattctggtaaatatgccactacagctcgtaactcctttattgtacttatcatttttactatatgttttgttccctatcatgcctttcgattcatctacatttcttcacagctaan

SEQ ID NO: 11070 - DNA, 462 bp, Homo sapiens
  misc_feature (1)...(462): n = A,T,C or G
aatagaactgcgtaacctacgccangncgnggaattccttatttctctcctacagagtggaacagatgtgcattcagattaaagaagttggagatcgtgtcaactacataaaaagatcattacaatcattagattctcaaattggccatttgcaagatctttcagccctgacggtagatacattaaaaacactcactgcccagaaagcgtcggaagctagcaaagttcataatgaaatcacacgagaactgagcatttccaaacacttggctcaaaaccttattgatgatggtcctgtaagaccttctgtatggaaaaagcatggtgttgtaaatacacttagctcctctcttcctcaaggtgatcttgaaagtaataatccttttcattgtaatattttaatgaaagatgacaaagatccccagtgtaatatatttggtcaagacttacctgcagtacccg

SEQ ID NO: 11071 - DNA, 448 bp, Homo sapiens
  misc_feature (1)...(448): n = A,T,C or G
atcgagttcactaccccgngcggnggaattcccaggaggcagaggtattccagagtagagattcatggagcttgggaaagggagggtcttgtccccaggggcgcaggctgctttgtgacccacctcagagtgtggttcacacctcttctccccagcagcactgggacgctggccccagggatctgggcccctccatgaccttccacactggatgcctctttccctgcaggcccttccacctgcctcgtatccctgttgctgactccgtccaccctgttcctgttagatgaggatgctgcagggtccccggcagagccctctcctccagcagcatctggcgaagcctctgagaaggtgcctccctcggggccgggccctgctgtgcgtgtcagggagcagcagccactcagcagcctgagctccgtgctgctctaccgctcagcccctg

SEQ ID NO: 11072 - DNA, 461 bp, Homo sapiens
  misc_feature (1)...(461): n = A,T,C or G
nactgagacatctgncattgcggccgatattncaacgccgccatcatgggtcgcatgcatgctcccgggaggggcctgtcccagtcggctttaccctatcgacgcagcgtccccacttgggggaagttgacatctgacgacgtgaaggagcagatttacaaactgtccaagaagggccttactccttcacagatcggtgtaatcctgagagattcacatggtgatgcacaagtacgttatgtgacaggcaataaaattttaagaattcttaagtctaagggacttgctcctgatcttcctgaagatctctaccatttaattaacaaagcaggtgctgttcgaaagcatcttgagaggaacagaaaggataaggatgctacattccgtctgattctaatagagagccggattcaccgtgtggctcgatattataagaccaagcgagacctccctcccaattg

SEQ ID NO: 11073 - DNA, 479 bp, Homo sapiens
  misc_feature (1)...(479): n = A,T,C or G
gacagaggcncnnnnaactgagaaactgagaccctcggaaaagccggggaanangaaggaggttccatctatcaaaggtctcctctgacttccttttgaaacttactgctcttctgttttattttgttttggttgaagctcagagggagatgggcaattgacagggatgcaatccagggtgggatttcttgaggaagttacaaataagcttgttacaacatcaacatagatggaattggaaggatgctaccaggagagtacttacatagtgctcatgagtttctgttcttaaaatgtttactgctgaaagatgagcacgaccagggcgttataggcagagccctagccgagaaacctgctggcctctgcctgatttcatttcccactttggttgtgtggcattactttcacaattgcactttactgcttgtcatgactttgtgacacacttgccatgacgtgtgattctgcgaacatgn

SEQ ID NO: 11074 - DNA, 462 bp, Homo sapiens
  misc_feature (1)...(462): n = A,T,C or G
attgagaccatattgaagngcggtggaantctacctaaatggggacttcgatggcggaaacttttatttcactgaactggatgccatgaccgtgacggtgagtgctcccttgtccttgtccctgggagataaaaagtctgttttctacagctgatgttcccaaagtgcagtggacaaaaataaccaactgggcttcccagtgggcggtacccttcccccatccagaggggctttgagacgtgtccatcactcctctaaccagtcaccctttctctttagttctggtcttagggaagccatactgaagagctgccctcggtcgtgagccctaatgagcccatgtctcttctgagagtggattacagtctttgtcctgtgcaacccccctccctttctgtcccccttaggcagaggtgcagcctcagtgtggaagagccgtgggattctcttcaggcactgaan

SEQ ID NO: 11075 - DNA, 496 bp, Homo sapiens
  misc_feature (1)...(496): n = A,T,C or G
tgacgggcncggcggcnnnnnattgagacccatcgtagaccctagtcagtgtggtggaattcactatatgtgactgtgactttcaaggacatttgtttgccatttgctgatttttttgggaagttaatttctaacttctttcactgataaatgaagaaaagtattgcacctttgaaatgcaccaaatgaattgagtttgtaattaaaaaaatttttttccctttcagtcattgtcttatatgcttagcatagatttgcagctcagtagtatatggtgttcctagaatgcagctgaagacctgttatgtagaggaaatacgaggggtggtgctagaagacagacatctgtggaatgattcacatcctctcaagttaggaggatggaggcctgcttcattaaaaagctgggggtagnggtggggtgggagaacacttaacaacatggggaccagtcaggggaatccccttatttctgttttgcatatgaggaacccta

SEQ ID NO: 11076 - DNA, 456 bp, Homo sapiens
  misc_feature (1)...(456): n = A,T,C or G
catagacnccccactgaggatcctcggacagngcggnggaantcangaggaagagttcaggtggaaaaggagggagctactctcaggctgcgtgcagcgacagtgcccacggctctgatgtgtctctcacagcttgaaaagcctgagacagctgtcttgtgagggactgagatgcaggatttcttcacgcctcccctttgtgacttcaagagcctctggcatctctttctgcaaaggcacctgaatgtgtctgcgtccctgttagcataatgtgaggaggtggagagacagcccacccttgtgtccactgtgacccctgttcccatgctgacctgtgtttcctccccagtcatctttcttgttccagagaggtggggctggatgtctccatctctgtctcaactttacgtgcactgagctgcaacttcttacttccctactgaaaataagaatctg

SEQ ID NO: 11077 - DNA, 471 bp, Homo sapiens
  misc_feature (1)...(471): n = A,T,C or G
attgtagacccttngnnnaattgtagatccctagtccgtgtggtggaattcgtttataatacactccagtacaaactgtaaacagattttggaattatttccaaaataattgacattcattcatctagttgacgaatgtttattgaagttctattacaagcaagattctatgccagggacttgagataccacaaaaaacaaggcagatatctttcctgccctcgatagcttaatagccactactcagattcattggtcattggcatggccaaatcaatagtgattttttttaaaacaacaaacaaaagatactttctcttcatggtccatcagactcgactttgcctaaaaacaaaaacaaggaagcagaacacaatagcctctcctatataggcttgatctccacctcacccccacacccacagcaggcactcgacaaagattttttcattgatttggtccagaatctag

SEQ ID NO: 11078 - DNA, 430 bp, Homo sapiens
cgccctcttagcaccctactacttttgcagctatggctgagcctacccagaattccagaactccaggattattttctggattcttcggacttggttattttcttttcttagctgtttttccccgcttggttctaagggcctgcgttttacaggctgagacttctattcctcaaacaggacccgagtcggcccccttttggtactcccagatgcttgcaaacaacctattcgtcctcggccttggtgccatagccgaaataccgtctcctcctgcctggggtacctgatttcactatctcgttctgcatgtttcctctccgtctttttcgggtattcttttcttaggctttggaatcagtaggctgggatgtctagtttctagatccagtaaaatcagccccttttgcaaatgagcctagtggtccttaac

SEQ ID NO: 11079 - DNA, 459 bp, Homo sapiens
  misc_feature (1)...(459): n = A,T,C or G
catgagaccattgnatgacggcgtagacangacattngacatgtgtgacctgactgagcaacagctttctttttaaaaatggttccgtttcccagattctgaagtacagtattttatacttgttatggaaaatcagagacatagaaaagtagaaagaaggccgagtgctgtggttcacacctgtaaggaggccgaggcgggtggatcactggaggtcaggagttcaagaccagcctggccaacatggtgaaaccccgtctctactgaaaatacaaaagttagccaggcacggtggcgggcgcctgtggtccctgctactcaggaggctgaggcaggagaattgcttgaacccgggaggcggaggttgcagtgagctgaaattgcgccactgcactccagcctgggtgacagagcgagactctgcttcaaaaaataaaaaacagaaaagtcgaacgaaga

SEQ ID NO: 11080 - DNA, 475 bp, Homo sapiens
  misc_feature (1)...(475): n = A,T,C or G
cggcgtncncncggcttgcngaatacggaaaatcatgctacntgctngtagaanctncgnaannnaagctnngctaaacataagaggattcatacaggtgagaaaccctttatatgtttagaatgtggtaaagcgtttactagttccacaacccttactaaacataggagaattcatactggagagaaaccctacacatgtgaagaatgtggcaaagcctttagacagtcagcaatcctttatgtacataggagaattcatactggagagaaaccctacacatgtggagaatgtggcaaaacctttagacagtctgcaaatctttatgcgcataagaaaattcatactggagagaaaccctacacgtgtggagactgtggcaaaacctttagacagtctgcaaatctttatgcacataagaaaattcatactggagataaaaccatacaagtgtaaagaatgtggcaaagccttt

SEQ ID NO: 11081 - DNA, 504 bp, Homo sapiens
  misc_feature (1)...(504): n = A,T,C or G
cggcccgcccaatgagnaactgagaccctacgccgngtcgtggaattccgacggatgaataatgtacactgacacagatcttatgcttgtcagtcctgctgagcatccaggccacttacagactccaagaagagtcctgtcagccacggctctgacttgttggccctcccggcatttatttagcacacatttaatgacagaagtctcaggctggaaacactctttttgtagaacatacaaatggacatttctaagcacattgaggcctataatgaaaaatcaaatatcccacaatgaaaactagagggaagctatctgtgataatgctttgtggtgtatggattcatctcactgactgaaacctgagttttgattcaccaggttaaaaacgctctttttgtagaacctacaaaaagacatttctgagcccattgaggcctacagtgaaaaaccaagaatcccataatacaatctagaaaacaagctatctaggaaaatgttttg

SEQ ID NO: 11082 - DNA, 507 bp, Homo sapiens
  misc_feature (1)...(507): n = A,T,C or G
ngagggtccnnncactgagaactatagtcactgtcgtggaattcgtggcgtgcgcctgtaatcccagctacttgggaggctgaggcaggggaattgcttgaacccgggaggagaaggttgcagtgagccgagatcgccccactgccctccagcctgggcgacagtctcaaaaaaaaaaaaaaaaaaaacccttccttttttaagggaaagaaataaatagggggcttaaaaattggcgggcccacccttgtaaaggcctaaaaaaaggctaacttcctttgcttaaggggtaaaaatttccaaatccttttaaaaaacaactggaaacctggtgaactactttggtcccaggcaaaaattttttttttaaaaatggcataatataaggggtccaaaagaacatcccatttttttatataaaaacaggcgtttggttttaattccaattttttggccccagaccaataaattccttaacacttcgtttttattatgccaaatactata

SEQ ID NO: 11083 - DNA, 419 bp, Homo sapiens
agtgaatacatttctggccctactgtaaacaagaaaattcaggctatcagtatgaacttaacagaatatattacaacatttattaactagatgtatggtggtttattaccaagtcaacaggtataaaaggagtaacagtggggtttgttggagaagaggcaaaaatttctgtatggtattaattgcaacttgagtagtttggaggcttcaacagtttgacaatgatttctgttccatactacatctattcctgttttacttctttgggattactacttccctcttttaaaactcctcacattccctagcttgccccttctcccaaaagatagggtgggtaaaacaagcacaaaactgttaacccttgatcctagtagcagttctaggaggcagcctccctctaaagctaatatcaatat

SEQ ID NO: 11084 - DNA, 508 bp, Homo sapiens
  misc_feature (1)...(508): n = A,T,C or G
cgagggccgnncaatgagnatcgtagaccctactccgtgtggtggaattccaaaggcatttgagtgcttcctcctctttttccaaagggcttaccttatgctaagaactgtacccaaagatcaagtctctgccctggatggacacctcacggtcaaaaagcttggtggcttctgcatcccttctcatcaggacgtggtggaaagtgaagaagtgaaggcaggactgtctacatagcttgcagggtccagtacaaaatgaaatgttccaacattagtccaggcgcggtggctcacacctgtaatctcagcactttgggaggctgagacgggtggatcgcttgaggccaggagttcaagactagctggccaacatggtgaaaccccatctctactaaaaatacaaaaattagcctggcatggtggcatacacctgtagtcccagcaacttgggaggctgaggcaggagaattgcttgaacccaagaggtggagatcgtgccactgcactt

SEQ ID NO: 11085 - DNA, 505 bp, Homo sapiens
  misc_feature (1)...(505): n = A,T,C or G
ngagggcctnnncattgagacctttaggcactgtcgtggaattccaggtctctcaggcagctgcagagcttcaacagtactgtatgcagaatgcctgcaaggatgccctgctggtgggtgttccagctggaagtaaccccttccgggagcctagatcctgtgctttactctgaagactcgagagaagtttgctgaggaatgccttcaagcacaaagtgatgaatgactgccttcaagtctcaagaaaacacttttccctaacttttagagatatttcagccctttcctgtggcctggtcctatagccaaaatcacagatattcatgagtttctacttgagtgagaaaactgggtgaaggaatagaattttaaatagtaataactgcttgttttttttgtgcaagtacttttatacataagataaacaaaaaccttaccaccaaacataccagaatgcacctctttcataagtgagttactaagatttctatacctggaatatcat

SEQ ID NO: 11086 - DNA, 503 bp, Homo sapiens
  misc_feature (1)...(503): n = A,T,C or G
cgagggccgcccaatgaaccctgagacctctagtcagtgtggtggaattcgtttggggttctgtgggttggaagctgtctgtggcccacttgggcacccacgcttctgtccacttctggttgccaggagacagcaagcaaagccagcaggacatgaagttgctattaaatggacttcgtgatttttgttttgcactaaagtttctgtgatttaacaataaaattctgttagccagaaaaaaaaaaaaaaaaaaaaaaaaaaaaaaaaaaaaaaaaaaaaaaaaaaaaaaaaaacnnnaccaaaaaaaaaaaatccccccccccccaaaaaaaaaccccaaaaaccccnctnncccccccatttttttttttttcccccccccccttttttttttcccccccgggggggttttttggggggggggggggaaacccaaccaccaatttttttttaaaaggaagggaagatgggtcttttttttgggncnnnnccccgntttttag

SEQ ID NO: 11087 - DNA, 465 bp, Homo sapiens
  misc_feature (1)...(465): n = A,T,C or G
atcgcacccctattgtagacatctgaccangcggnggaattcgatgatagtgacagctgggagacggacaatgggctggtggaggacgagcaccccatgatagaggagccccccatcccacccctggagcagccggtggcccctgaggacaagggagtggtgatcagtgaagaggcagccacagctgccgtccagggggctgtggccatggctgcccccatggccgggctgatggagaaggctggcaaggacgggccacccaagagcttccgggagttgaaagaggccatcaagatcctggagagcctcaagaacatgactgtggagcagctgctgacgggctcgcccacctctccgactgtggagcctgagaagccaactcgggagaagaagtttctggatgacatcaagaagctacaggaaaacctcaagaagaccctggacaatgtggccattgtagaggag

SEQ ID NO: 11088 - DNA, 463 bp, Homo sapiens
  misc_feature (1)...(463): n = A,T,C or G
atcgagacctctagtccagttcggtggacttcgntatagttctattttattattattgttgatctcttactgtgcctaatttataaattaaaatttatcctaggtatgtatgtataggtgaaagcatagaatacatagggtttggtactatccagttttcaggcatcactgtgggtcttggaacgcatctcccgaggataagggggggctactgtcagtgtgaacctgattagatctcaactgaaacttttttgtcacatgaggccatcagttgaatttcatgcctgcatgtaggtttagattttaattacttttttatggtgtcagcataacaaatgagagtcatacaaactgttgtttaatgacaaagtgggtcaaacccataattaaaaaaattaataatagatttttgttctacttgaggttttgtagcattacgtaaagcttgaaaacttggaaattg

SEQ ID NO: 11089 - DNA, 429 bp, Homo sapiens
  misc_feature (1)...(429): n = A,T,C or G
gatattcagttgatactgcagtattcattgaaaatacttctttcctgcatcgtaattcaggtgaacaatccattggtgttatttctgtgtccttgccaatatcacacttttaattactgtaactttataataagattttatatctgtagtagaagtccaactttgtaatccctcccaattggcttggctattcttggccttttgcatttccatataattttttatttttgttttgaaacgaagtttcgctcttgttgcccaggctggagtgcggtggcgcgatctcggctcactgcaacctccgcctcccaggttcaagtgatcctcctgcctcagactcccgagtagctgggattacaggtgcccaccaccatgcccagctaatttttgtatttttagtagagacagggtttcaccatgttggccagn

SEQ ID NO: 11090 - DNA, 505 bp, Homo sapiens
  misc_feature (1)...(505): n = A,T,C or G
agagagcccccncattgagacctgagtcncgtgtcgnggaattccagttatgttaactttaccattgcagaacgggcacagagggttgttgtatggctcggtcagaactttctgttaccagaagacactcacattcagaatgctccatttcaagtgtgtttcacatctttacggaatggcggccacctgcatataaaaataaaacttagtggagagatcactataaatactgatgatattgatttggctggtgatatcatccagtcaatggcatcattttttgctattgaagaccttcaagtagaagcggattttcctgtctattttgaggaattacgaaaggtgctagttaaggtggatgaatatcattcagtgcatcagaagctcagtgctgatatggctgatcattctaatttgatccgaagtttgctggtcggagctgaggatgctcgtctgatgagggacatgaaaacaatgaagagtcgntatatggaactctatgacn

SEQ ID NO: 11091 - DNA, 504 bp, Homo sapiens
  misc_feature (1)...(504): n = A,T,C or G
gggccggnnnnnnnnnnttactgattagcattcgttcagtgcggtggaattcaatgtttttcaatttttattattttctacagtttggaccaaattctagtttttcttggctacaagtcttcaatataacgttttcaattttttccctttcttttttctatttttcctaatttggagtcactgaaagctaagctgtgctttgtgaagccctgtgaactgaagctagacaacttaaacttcagaagaaaataacagcaacctgtttacatatataagctactttcatacctgcctactgatgtatggacttcagagtagtgtggcctatatcgattttctaggatcattattttgtttgttgtttttctcccttcctccacctattttctcttcataggacatgaggattctcaacctgataaaaatgagctttcctaataactcaagacccatctgcctaggaataaaccatcccagctgtgagagaccagacgaaacctgaga

SEQ ID NO: 11092 - DNA, 478 bp, Homo sapiens
  misc_feature (1)...(478): n = A,T,C or G
gggcgggnnngnnncnaatcgtagaccacttngaangcggtggaattcgccgtgtgtttccttctagcagctatcagttgtatcccctaccccaatcgcctttcatctaaattgttgcttctaatctgctggaggctgagagatagaaaataaaatttgtcagactgggatgtaaaatgaatcactctgaatgagccgggatcttttctgtgatccatgaagttacgtgtagatgctttaatacttggatatcatgacagctgttttgacttgaatggtattaaggatttacttgtgtgtgtatcataaaatgtgggttttctgttcctgttagttgaggctgacttcaagataagtgagatattataatatgccttaattactgtcttatgttaaatgttctcacaaatagcaagagtaaagattaggaaaagaatataggtgttaagtttatggagattttcaacttcagataatt

SEQ ID NO: 11093 - DNA, 505 bp, Homo sapiens
  misc_feature (1)...(505): n = A,T,C or G
ngagggccnnccactgancctgtgnaccactactccgtgtggtggaattccctttttactccagctgtgaaaaatatgcgggctttaattggaggaagtatgttgagcaaacctggtagggactgcaattttattaagatttgcaaaagggcgtctcagctcgaggcccactctgggactagcatgaatactaacatgtcaattgttttgtggagataagagtgaacgtttcccagggctggatggcactgtatttagtctgtatggaaatgacaatttacatatttaaagcagcgacctcgtagcaccatccctaattgaattaattgccccggaacatctaatttccttactggtcagagagaggtttaattgttataaaaacctggctcccctattagaaacggggttagcaatttcacgggttatatattttagagaacctcattaagtgctttttaaaatgaaattccagttccaggcgaaccctgactatcaaatgagt

SEQ ID NO: 11094 - DNA, 556 bp, Homo sapiens
  misc_feature (1)...(556): n = A,T,C or G
cctatccttccggtgnnnnnnaattgttagtttagtccttaaaaaacaggttggtgaagtaaaggagttttcagtctaaacactttatttcttcttccttttcatttatttatttattattattactattctcttttgtcaaagcatacggtatgaaaagcatttatgttggtctcactactgacagagcttaacctaataatccaagacttggaacttggtgtttcaataaaggaaacactgtttgaggtattttccattcaaaccagcatcaaaagtttttaattaacaccatcagaaattaatggactgaatgaatgcaagacagcgttcctacatacccctttactgggaacaagacagcaagtgggatccattgtgtatgtttgattttataatgtatttttatttacttattgaagcagagtcccagctgcacattgcgtagcagagctaccagagtgaaacctgccgagggctgcttcacttccacagtttcattttgctcacttggatgtggccctgagttctttgtgaatggaatgggtntaaaagt

SEQ ID NO: 11095 - DNA, 573 bp, Homo sapiens
  misc_feature (1)...(573): n = A,T,C or G
ttggaagacttccgcggccaannnannnnnaaattcacaaagataagaccttggaacgtgaatggaggaagagattaattatgagaaggagagaaaagagacattaacccaaggagtcacggagtggcagttttaggttgggcaagaggagcatgtctgaggaaggagccaacagagggagaaattgaacatgtgaggaaataatggaatgcagtgacaggagggcatggggcaagtgggatcaagggcattgagaaaaatggggaaataaattttgatatatagaggaagttgagaaatttcactaaatagaaaacagaaaagttaaactgatctgtaaaaatcagcacatattagccggcatggtggcgtacacctgtagtcccaactactccgcggaccacatgggtcctggaggctcagatgggaagatggcttgagcttaacagatggaggttgcagtgagatgcgatcgggccactgcacttagcctgtgcgacagagtgagaccctgtctcatagaagaataaaaaaaaaaaagccggtcgctggagtttaaagggccctgtaaaa

SEQ ID NO: 11096 - DNA, 471 bp, Homo sapiens
  misc_feature (1)...(471): n = A,T,C or G
agcgggccgntnnnaatagagnatcgaagtcattgcggnggaactcgtttcagttccccttgctgtttaaattagcaggacttgaattcctagaacaaatatgcctagcattgtggcaggactggagttcctggtttagctacttatattttaaacctccttcccttattttttggacatagaaaggtagaagatataatactatcaatttttttgaagtggtgggcattattttgtaaattaaaaatgttagatgtaatgtagttaaaggttcttatcacttgactgctgagcacaagaaaagcccaaaccaggctacttgttgtaggtcctctggtttcagaatgatttatgctcactttactagcacatatttagttgccttgaaccttctcaactgtagcttcctcttacagaacacagtgccccacaaggagactttgaatctgtgatctcctcccaggttttagn

SEQ ID NO: 11097 - DNA, 452 bp, Homo sapiens
  misc_feature (1)...(452): n = A,T,C or G
cactgagaccnnatgatagccctgtggaannccgcagaataaggccctggctgctaggcaggtgagtaatacccctgtccttggaaacttcagcagccttcagtctgtgtcggaacctgccttcttcctggttctgcacattatcaccactgccctccccatttctctggccaggccccatgtatttacaggtaacttgggtagcctccatggtgcttggagaaggctgtgactttctgagtgataccccatttcagccatttagcccctcttcatcagagaaccttgttcatgattggatgcagagatcaagatcatctgcctcctcaagtggtccagcctccctgcagtaggcccagagcaaagaagcaggtaagccaaggaactgcttatccagcttcttgaccaacttgctggttttcacagtgatgctgtgaagatgggggcctgcc

SEQ ID NO: 11098 - DNA, 558 bp, Homo sapiens
  misc_feature (1)...(558): n = A,T,C or G
nttcgagacaccattggatcactagtccgtgtggtgcaattcgcctttnttcagtgctgtaagagaggacggaggctgttatctatggcagatctatccaataaaggagagaatggaccgcatacgcctggttctcatcatatgcaataaagagtttgaccatctgcctccaagaaatggggctgactttgccatcatggagatgaagaagctgcttgaggatctgggttacagtgtggatgtagaagagaatctgacagccaggataacgtgtccaggagagacagcacaaggggctccatcttcatcacacaactcatcgcatgcttccagagatattcctggcgctgccacctagaggaagtattttggaaggttcagcaagcatttgaaagtccggaggcaacagtccaaatgcccaccatagaacgagtgtccatgacaagatatttctacctctttcctggcaattgaaaatgggtaagcattgagagttgttggtggtgatgaaataaatgaaagtgtgatattgagcaggaaaccacaagcagcccagct

SEQ ID NO: 11099 - DNA, 466 bp, Homo sapiens
  misc_feature (1)...(466): n = A,T,C or G
tgggcctnntttgatgacttcttggcgggcaataaaaattttgtcaggcaccttcatattttgtttgcatttttaaattctggctcataaagggagtagagaaaaagagaaaaaaagagaaatataggtagggatgatatatgactgatgattttatgatatagacttgattttttaaaattgtgtttgccttgttcaccacaatggcattagggcttaatagagtaacacataacaggcactcaagaaatatttgtcaattattcattgattaattagttattcattagctatcactcaactattaattaattagttgttaatctagttagggaaacaggatggatatacttaaatacaatcaaatcaaagaattcaagtcagtaaatgataaagagaaaatgagagtctgacctcacttcttggattgtaagttgtccgagaaagggtgtgagctgggtgctgg

SEQ ID NO: 11100 - DNA, 419 bp, Homo sapiens
  misc_feature (1)...(419): n = A,T,C or G
tacatttataaatctttgagaaagaagtacacacttaagtttacttttgattcatataggttctaaatcttcccaatttctgtgtcttccaccgtagatgtctccactgttagttattcctgctccttttcattggttcttcttgcaaagccaatatttccagaaatctgcaccaatttctcacagtgattgcacatttcaatggagatagatagcttggagacagtttatacattctactgataaaagttgtctctggttgcatggaagggtctcagcaaactgagaatattttggcaattcagtagatagagccagattcattattgcacataagcactcttcagtggaatattcatacatattacanattaagtttgagctgatagggaggggttctttttctcttataanctaat

SEQ ID NO: 11101 - DNA, 440 bp, Homo sapiens
  misc_feature (1)...(440): n = A,T,C or G
atagaggaccctngnntttgaggaccatagtccatgtggtggaattcgcgagagtagaagggtggaaaggggaggtgcccagtgaaatggagcctgtcccgtgcactttcgggcatttcgagcatcttgtgggctctcccaagtcgcggcccctcctctgagagccacagtcaggaacagcatctctgccttcctgttcacggtgaccttcgcttggtgtcctcctggcctcagcaacctgacaattctgtcgtgtcccgatcatctttctcaagatgttttctgtcttcatgagtcaaaatttgaagaggaaaggatggtggctgggtggttgacaaattactctcagaggctgcagtattattttaaatatcctcagtgatgaaaactcttcatcctttgggagatttagtttttggaaataactgaaattcattcag

SEQ ID NO: 11102 - DNA, 554 bp, Homo sapiens
  misc_feature (1)...(554): n = A,T,C or G
natcgaaccacattgagngncgnggaattcgcctgtccagccggccgcctgtccctgctccctccctccgtgaggtgtccgggttcccttcgcccagctcttccacccctacccgaccccggcgcccgggctcccagagggaactgcacttcggcagagttgaatgaatgaagagagacgcggagaactcctaaccatgccttgtgttcaggcgcagtatgggtcctcgcctcaaggagccagccccgcttctcagagctacagttaccactcttcgggagaatacagctccgatttcttaactccagagtttgtcaagtttagcatggacctcaccaacactgaaatcactgccaccacttctctccccagcttcagtacctttatggacaactacagcacaggctacgacgtcaagccaccttgcttgaccaaatgcccctgtccggacagcagtccttcattaaggtagaagacattcagatgcactactaccagcaacacagncaccttgcccctcagtctgaggagatgatgccgcactctccggtcgg

SEQ ID NO: 11103 - DNA, 534 bp, Homo sapiens
  misc_feature (1)...(534): n = A,T,C or G
atgacattagtacagtgcggtggaattcgaagccggtcatcacccagcctctgagagcagttactggggtcacccaacctgacttcctctgccactccctgctgtgtgactttgggcaagccaagtgccctctctgaacctcagtttcctcatctgcaaaatgggaacaatgacgtgcctacctcttagacatgttgtgaggagactatgatataacatgtgtatgtaaatcttcatggtgattgtcatgtaaggcttaacacagtgggtggtgagttctgactaaaggttacctgttgtcgtgatctgaccacgtcccggtgaaagcgtgtgtccagggaagaagtgcacagggtagcccccagtcccaaccttccatccccaacccttagggatgatggaagaatcattttcctcaccctagttccaagtcccaggaaacaccttttaaccacttccttctcatctcccactgtttcccacttctggntccacccaacaccagttcctccgagctaggctggccctgagtan

SEQ ID NO: 11104 - DNA, 456 bp, Homo sapiens
  misc_feature (1)...(456): n = A,T,C or G
catagtagatcactattgcagtgcggtggaattcctcatagccattactgtttttattgcccttctaagatcctgtcttcagctgggtcagagaaaacttcttgactaaaactggtcagaactcatcacagaaatgaaatacagtggtctctctctcccagaactggttgcagctaaaacagagagatctgactgctggctataggattttggacttaatgactgaaattgcaaattgtcctttttcttggcattacagattttgccaaaataactttttgtatcaaatattgatgtgtgaaagtgaaggagctagtctgctgaaccaggaatagtttgagatattgaactgtcatttttgcacatttgaatactttgcaggctggctttgtataaacttatcctctgcttcctatatgttgaaatatttagacccatatttcnattataataaat

SEQ ID NO: 11105 - DNA, 424 bp, Homo sapiens
cgagccactgcacctgggcaaaaggagtgagactccatctcaaaaaaaagaacttttaagtggtgtaggatgatgacatctaacaaaaatgaagagggagcagggcaggggaatggctgtgacttgggacccctgggttgtggtcagtccttggtgctggggtgtggcaggccacagagaccccagtgcctcctgatggtgcccctctcttccgacccagcatttgaagtgcaccatcacgggcctgaccttctgggaccccagctgtgaggcagaggacaggggtgacaagtttgtcttgcgcagtgcttactccagctgtggcatgcaggtgtcagcaagtatgatcagcaatgaggtaagagctggggccaaaaaggtatcaggaccagcctggttggtgccccctcaggtgccctccctg

SEQ ID NO: 11106 - DNA, 556 bp, Homo sapiens
  misc_feature (1)...(556): n = A,T,C or G
nttcgacnccatcgtacactagtcagtgtggtgcaattcccagactcaagacacacaactcataacagttgatgaaaaattggatatcactactttaactggcgttccagaagagcatataaaaactagaaaagtcaggatctttgttcctgctcgcaataacatgcagtctggagtaaacaacacaaagaaatggaagatggagtttgataccagggagcgatgggaaaatcctttgatgggttgggcatcaacggctgatcccttatccaacatggttctaaccttcagtactaaagaagatgcagtttcctttgcagaaaaaaatggatggagctatgacattgaagagaggaaggttccaaaacccaagtccaagtcttatggtgcaaacttttcttggaacaaaagaacaagagtatccacaaaataggttggcactgactatatctctgcttgactgtgaataaagtcagctgtgcagtatttatagtccatgtataatanatacatctcttaaatctctaatagatgggaccttanactacaaaaaaan

SEQ ID NO: 11107 - DNA, 452 bp, Homo sapiens
aggggggggtttcgtagaccctagtatgtgtggcgaattcttccgcgattctcctacctcagtctccctagtagctgggattacaggcatgcaccaccatgcctggctaattgttgtacttttagtagaggggggtttcaccatgctggccaggcaggtctcgaactcctgacctcaggtgatccacccaccttggcctcccatcttcctggaactttttgaaacagcaagaactcaaggtgcaacagttacaggtggatactttttcatagcacatacccccaaaaacctggggatcctgggttacataatgagctccttcttggattatttgcaagagtcttctaagtgggccttaattcaccctgtacaccactaccaaattcatgtgtctgaagtgattcctggtatctgggaggcttaaactggaggtctggtgtaattgccccact

SEQ ID NO: 11108 - DNA, 483 bp, Homo sapiens
  misc_feature (1)...(483): n = A,T,C or G
gccccccccnnagnattgannccctnnnnaattgtagatcattagnccatgcggtggaattccgtttctataagaattggcataaatctaagaagaaggcctttaccaagtactgcaagaaatggcaggatgaggatggcaagaagcagctggagaaggacttcagcagcatgaagaagtactgccaagtcatccgtgtcattgcccacacccagatgcgcctgcttcctctgcgccagaagaaggcccacctgatggagatccaggtgaacggaggcactgtggccgagaagctggactgggcccgcgagaggcttgagcagcaggtacctgtgaaccaagtgtttgggcaggatgagatgatcgacgtcatcggggtgaccaagggcaaaggctacaaaggggtcaccagtcgttggcacaccaagaagctgccccgcaagacccaccgaggcctgcgcaaggtggcctgtattggggcat

SEQ ID NO: 11109 - DNA, 478 bp, Homo sapiens
  misc_feature (1)...(478): n = A,T,C or G
tggcgggcggnccccaactgatgacatcggaattgagggcaatccgcactgcatcgagnactacatgatgaaattcttaataaacctatggaaacacttatacttgctattccatttgggatctatactcttcagaataatttactgtgtgtggcactatcaaatctagatgcagctacttatcaggtcacgtatcagttaaaaattcttacaacagcattattttctgtgtctatgcttagtaaaaaattgggtgtataccagtggctgtccctagtaattttgatgacaggagttgcttttgtacagtggccctcagattctcagcttgattctaaggaactttcagctggatctcaatttgtaggactcatggcagttctcacagcatgtttttcaagtggctttgctggggtttactttgagaaaatcttaagagaaacaaaacaatcagtgtggataagaaatattcagcttg

SEQ ID NO: 11110 - DNA, 467 bp, Homo sapiens
catcgaaatacatggccgtgtggcggaatcccattcctgcagccaaggaggggagtgtacgaaggaagaggggctgctgctgaaggtcgagtgaatgagggctgagaaacaaccattaggtttagcaaatgcaggtctttgctgtcctcaaaatatagacttggcactctgcccgctagcaggacagattccagaatagaatctggtatcaagacagataccagggagaggaggctcttcaaaatcccaggcacgtctggccccctaggagactcaggaaaaagtctccagacttggaacctaagctggactgccttatctgagaagattggtgtaatcaatggtttggtgtcaggctcccatagagaatggggtgaagctgactatggctcagcacttgcttaggatagtgggccatagggggttcccttcttggatggagggccgaaggcaagcctcttcactgg

SEQ ID NO: 11111 - DNA, 554 bp, Homo sapiens
  misc_feature (1)...(554): n = A,T,C or G
naatcgaatcanattcgagtgtcgtggaattctggntaagcagtggaatttgaacaaggaagaggagaaaagggaattttgtctttatggggtggggtgattttctcctagggttatgtccagttggggtttttaaggcagcacagactgccaagtactgttttttttaaccgactgaaatcactttgggatattttttcctgcaacactggaaagttttagttttttaagaagcactcatgcagatatatatatatatatttttcccagtcctttttttaagagacgggctttattgggtctgcacctccatccttgatcttgntagcaatgctgtttttgctgttagtcgggttagagttggctctacgcgaggtttgttaataaaagtttgttannggttnnnnnnnnnnnnnnnnnnnnnnnnnatannnnnnnnntnnaccccgcccttatataaaagggcgccttaaacaccccttgaaaaccccccattggcctttttaaagcccaacctttgttgggtgccccccccccgggctttttttggccgn

SEQ ID NO: 11112 - DNA, 402 bp, Homo sapiens
ggctagcgatttctacctgcgctactacgtagggcacaagggcaagtttgggcacgagtttctggagttcgaatttcggccggacggtgtttacgtgtaattgttcaccataggacgcatgaagagtaccaagcaagaggggagaggtaaagttccacaggagggagtcaggaagatcttcttagaggacggcactcttgagatgagtctcgaaatgagagacttggcctttgagagaaaaaaaacagacttccagagcagtatgagcagaggatgaggtgaaactgctacccaagtagtgtgcaacagtgtgttttctgacagcgctatccttagagaatgttacattgatcttgcctacctgcaacaagaaagttcatttggatatatattttttgggtt

SEQ ID NO: 11113 - DNA, 444 bp, Homo sapiens
  misc_feature (1)...(444): n = A,T,C or G
natcgaagaccctagnatgtgtggcggaattcgaccatggcaaccaagacaacaatgccaaagccactatcctgtgggacaatgccttctctgagatggaccgcgtgccctttgtggtggctgagcgggtgccctgggagaagatgtgtgaaactctgaacctgaagttcatggctgaggtggggaccaaccgggggctgctcccagagcacttcctcttcctggcccagaagatcttcaatgacaacagcctcagtatggaggccttccagcaccgttctgtgtcctggtcgcagttcaacaaggagatcctgctgggccgtggcttcaccttttggcagtggtttgatggtgtcctggacctcaccaaacgctgtctccggagctactggtctgaccggctgatcattggcttcatcagcaaacagtacgttactagccttc

SEQ ID NO: 11114 - DNA, 443 bp, Homo sapiens
  misc_feature (1)...(443): n = A,T,C or G
ataaaattagangatccctagtcctgtgtggtcgaattccttccgaactggctgtgaaacaagccaccataggcatctcttgtttctactgttgcctcaggaaataattttcagttaacatgaaattaaaagtataatcataggtgtgtatcatacttttaggattccgaaggaggcagttcctgttttgtggagactaattttatttgtgaagcctgattagagaacaaaggttaaaggtgttccagcccatgggaagcacatacttccatctaacatttttaaatgctattatttgggagagagctgatcgaaagtacttcctctgccagtgttttgcaaggcttgaagtttcaccatcatgatcatatttattaagggccttctagagatgtgtaatttacctggggttcattttggagtttgaaaaaagagccaagaaa

SEQ ID NO: 11115 - DNA, 480 bp, Homo sapiens
  misc_feature (1)...(480): n = A,T,C or G
ttttgagacactaggccagngcggtggaattcgcgtgatgtctcacagaaagttctccgctcccagacatgggtccctcggcttcctgcctcggaagcgcagcagcaggcatcgtgggaaggtgaagagcttccctaaggatgacccgtccaagccggtccacctcacagccttcctgggatacaaggctggcatgactcacatcgtgcgggaagtcgacaggccgggatccaaggtgaacaagaaggaggtggtggaggctgtgaccattgtagagacaccacccatggtggttgtgggcattgtgggctacgtggaaacccctcgaggcctccggaccttcaagactgtctttgctgagcacatcagtgatgaatgcaagaggcgtttctataagaattggcataaatctaagaagaaggcctttaccaagtactgcaagaaatggcaggatgaggatggcaagaagcagctggagan

SEQ ID NO: 11116 - DNA, 442 bp, Homo sapiens
  misc_feature (1)...(442): n = A,T,C or G
atcgagacactagtctgtgcggcggaattcgatttctttcctttcttatcaggagacaatcagcattacaacacctccttgcttgccgctgcagcagcagcagtttcagatgatcaagacctcctacactcgtctcggtttttcccgtatacctcctcacagatgtttcttgatcagttaagtgcaggaggcagtacttctctgccaaccaccaatggaagcagtagtggcagtaacagcagcctggtttcttccaacagcctaagggaaagccatagccacaccgtcacaaacaggagcagcacggacacggcatccatctttggcatcataccagacattatttcattggactgattcccaggccctgctgctcccatccccaccccagatcgaatgaacttggcagaaagaagagaactttgtgctctgttntacctta

SEQ ID NO: 11117 - DNA, 483 bp, Homo sapiens
  misc_feature (1)...(483): n = A,T,C or G
gccccccccnngnnattgagnccctnggnattgtagacattagtccangcggtggaattctgcagagtgaagaaagctggtaatagatgtctgacaaactaaagaaagacttgtgttacgaaaaaagaaaaaggaaaaagtgcccagaagtgcaattgcaagtctaagtcatattacttataactttagtggtgcaacaaagcaacttccaaacactgctccagcatccccaccttccccgcaagaggcaaggaacagcttcaagtcttcctttcttgttcactcctatgactctggaggagacagcccaaccaagagccatggaaggatgtggaggatgcggaggatgccctgactgcgcggaccagtaacggctggggcaacccgatttccccacgcccccgcaccacgctctcccttggctccatcctgccgcacaggctcgagcccagcgcggctggatcaacttgtcagtgtcgctgt

SEQ ID NO: 11118 - DNA, 483 bp, Homo sapiens
  misc_feature (1)...(483): n = A,T,C or G
tgggcggnnnnnnnnnaatcgtagacattagtcattgcggngcaattcttttcctttattttcaattgaaatagtatatagatttattttacagactatataagaagggattgatcataggttataaagtagagaaatcttcagctgggcgctgtggctcacacctgtaatcccagcactttgtgagaccaaggcagttggatcacttgaggtcacgagttcgagaccagcctggccaacatggggaaacaccgtctctactaaaaatacaaaaattagccaggcatggtggcacatgcctctaatcccagctactcaggaggctgaggcaggagaattgctttagcccgtgaggcagaggttgcagtgagccgagatcataccactgcactccagccaaaaaaaaaaaagaaagggaaaagggagagaatggctttattcatatgaaatggttctttttatgtggctagataaaactaaaag

SEQ ID NO: 11119 - DNA, 455 bp, Homo sapiens
tttgtttgtagaccattgtccagcgggtggaattcctctgccggccggggagcgaggtatggggcggggagaggtgggcagccggaccaggctggtggggaagctgtgaaagttgtgtagatttactgtttgtgagaggagctggaaactgccctgagtgtggtactccactcagaaagagcaacttcagggtacaactctttgaagatcccactgttgacaaggaggttgagatcaggaaaaaagtgctaaagatatacaataaaagggaagaagattttcctagtctaagagaatacaatgatttcttggaagaagtggaagaaattgttttcaacttgaccaacaatgtggatttggacaacaccaaaaagaaaatggagatataccaaaaggaaaacaaagatgttattcagaaaaataaattaaagctgactcgagaacaggaagaactg

SEQ ID NO: 11120 - DNA, 454 bp, Homo sapiens
  misc_feature (1)...(454): n = A,T,C or G
cggggnntttgagtccattacaccgnngcgggaattaaggtgctcagtgtttcccaactgcagtgggagggaggctgtgtcttagttcctttgagttactataaaggaataccagagactgggtaatgtagaaagaaaagaggttgatttggctcacagttctgcaggctgtacatgtagcatgatgccagcatctgcttctagggaggggttcaggctgcttctgctcatgttggaaggggaagtgggagcctgtgcatgcagagaccacctgttgagaacggagggaggtgccaggctcatttgaacagccagctctccagggacctaattgatccagaactcactcactaccttggggtgggcaccaagccattcacgtgggatcttcctcatgacccaaacatccccacattggggaccaaattccaaatgagattggaaggggacagac

SEQ ID NO: 11121 - DNA, 472 bp, Homo sapiens
ccccccccccccccccccaatagtagacactatgcagtgcggtggaattctggctttatcctctttagagttagactgttggggtgggtataaaagatggggtctgtaaaatctttctttcttagaaatttatttcctagttctgtagaaatggttgtattagatgttctctatcatttaataatatacttgtggactaaaagatataagtgctgtataaaatcagccaattatgttaaactagcatatctgcctttattgtgtttgtcattagcctgagtagaaaggcctttaaaatttttttagaaagcatttgaatgcattttgtttggcattgtatttattcaataaagtatttaattagtgctaagtgtgaactggaccctgttgctaagccccagcaagcaatcctaggtagggtttaatccccagtaaaattgccatattgcacatgtcttaatgaagtttgatg

SEQ ID NO: 11122 - DNA, 473 bp, Homo sapiens
  misc_feature (1)...(473): n = A,T,C or G
tgagtggccnnnagtngnnacactgagaccataactgatggcctgaaaacgcgcctcggaggcgttcagctgcttcaagatgaagctgaacatctccttcccagccactggctgccagaaactcattgaagtggacgatgaacgcaaacttcgtactttctatgagaagcgtatggccacagaagttgctgctgacgctctgggtgaagaatggaagggttatgtggtccgaatcagtggtgggaacgacaaacaaggtttccccatgaagcagggtgtcttgacccatggccgtgtccgcctgctactgagtaaggggcattcctgttacagaccaaggagaactggagaaagaaagagaaaatcagttcgtggttgcattgtggatgcaaatctgagcgttctcaacttggttattgtaaaaaaaggagagaaggatattcctggactgactgatactacagtgcctcgcn

SEQ ID NO: 11123 - DNA, 458 bp, Homo sapiens
  misc_feature (1)...(458): n = A,T,C or G
ctcgacaccattttgagaccctctaggacangcggnggaattcgcccaggccaggtgcagacaggcacccccgtcatcttgcgccccctgccccctcttgtttgtgtgtaagaacaacggggtcctgttcgagaaccagctgctgcagatcggagtcaagtcagagttccgacagaacctgggccgcatgtatctcttctatggcaacaagacctcggtgcagttccagaatttctcacccactgtggttcacccgggagacctccagactcatatcctctcaggcccggcccagcctcctgcctctccacgtcggccttcctcaccgtggggaagccggctgacccaggtccacacttctcttcagcctctcttgggcacgcaattagttctctgagattgagtgtctgcatctgttaagatgggggtgggattccttcccccaggacaggggatga

SEQ ID NO: 11124 - DNA, 457 bp, Homo sapiens
  misc_feature (1)...(457): n = A,T,C or G
acgggnnaatcgggtccattacactgngcggnggaantctggaggctcgccggccttcctcactgccatggagatctgaccatcctcattctgttccaatgaaaacaggatccacttccccatattccagaaagcccactgtttccatgtcagtggaatttccatctaatgctgtcattgctgctgtgatcagcccagatgtttgccagcgctgcttctttgtggtcaacagaaaagaactcagcaaaatgtaattttaaaaaagtaatgtgtattatttttcctgagttatacatgattaatgtaaaagaaattagaaaatacagagaaatttatggaagaaaccagaaagactgattctgccaccgtgaaatgatgccgtggttaacgtctgtagcagccgcgtgtgctgaggatttctgcagtgggcatgtttgcttttccatccacagcgagt

SEQ ID NO: 11125 - DNA, 451 bp, Homo sapiens
  misc_feature (1)...(451): n = A,T,C or G
gggaattgagcttanaattcgagtcattagaccgtgcggtggaattcgtggagaccaactccaggctggattcggtcttgctgctctcgtccatgaacctttctggaggagagctgaggagaagatctgcagaagatgagcttgcaatgagaggtttcttacaggaaggggaccttatcagtgctgaggtccaggcagtgttctctgacggagctgtctctttgcacacgaggagcctgaaatatggaaaagtaagtcgggctcttgatgttcctgtttgctgactgagactacaaggctatttttgaatccccatagctctctggaattctggcctaaagaaccccagtagctaagcattaatagaggctggcatcccacaaactgatcgtgttccttaaacgtaacatcaggacggtcagggttcacagggtcatgggtcagtagcctt

SEQ ID NO: 11126 - DNA, 480 bp, Homo sapiens
  misc_feature (1)...(480): n = A,T,C or G
ccccccccccccccccccccccatcgtagcccttatagtagatccctagtccatgtggtggaattcccctggatacctacagttgagaagaaaatgacagacaattatttttcctttaggtcaaaataatgtcactgctatctggataaattataagttcatatatttgaaataagatcctggaaacgaatttaaatggtgtcaaactgcagagcaacagggcttcagtatattcacatctaataggttaatatgtacatttggatgatgatttttcttgataacattaacattaattttattttttcagacatactgtaatttaaaaattaatgtgagcgtttgttttaagttcacagaaaacttaataattcaaattctcaggaattaaggactcaccataacattgtcagttctaatgaaattttgtaaaagatggcaagtttgttacctcacttgagtggagttttccttttcccn

SEQ ID NO: 11127 - DNA, 483 bp, Homo sapiens
  misc_feature (1)...(483): n = A,T,C or G
tgagggtgccnnnnaggnggnnccactgtagnccnttgactgatgacactagaacangcggnggaattcgcggctgggaccctgtacacgtatcctgaaaactggagggccttcaaggctctcatcgctgctcagtacagcggggctcaggtccgcgtgctctccgcaccaccccacttccattttggccaaaccaaccgcacccctgaatttctccgcaaatttcctgccggcaaggtcccagcatttgagggtgatgatggattctgtgtgtttgagagcaacgccattgcctactatgtgagcaatgaggagctgcggggaagtactccagaggcagcagcccaggtggtgcagcgggtgagctttgctgattccgatatagtgcccccagccagtacctgggtgttccccaccttgggcatcatgcaccacaacaaacaggccactgagaatgcaaaggaggaagtgaggcgaattctg

SEQ ID NO: 11128 - DNA, 477 bp, Homo sapiens
  misc_feature (1)...(477): n = A,T,C or G
tctcgagcacctcgnanantctagttgtaactncgnacagngcggnggaannncgaggtattaagaaattattctaggcaaatggagatgtttagtggtccttggaatgtttttcgtagctccagaaaaatttcttgtctagcataaaagccctggctcttaaaggctggcaacctttaagatgcaaatgcaagagggtccacccaacatggcgattcccaccgttgtcctcttgcccttgctccatcatgtacctaacagcatggccgcccccacataaccccgtgtgtaaaatgtcatggcatcctgcatttgtgtattaaaggactggggtgggagggccagttttcttgagggctaaatgacatgcctggtcaaaccaatcctctgagccctatgcaaataagacaccacccccttcagccgtcacataaaactggctagcattgtcagaatgtaaggtctcctctttcagct

SEQ ID NO: 11129 - DNA, 458 bp, Homo sapiens
gcggttaattcgagacactagtccagtgcggtgcaattcgcccagtctgtttcaaataaatgaactcaatctaaattaaaaaagaaagaaatttgaaaaaactttctctttgccatttcttcttcttcttttttaactgaaagctgaatccttccatttcttctgcacatctacttgcttaaattgtgggcaaaagagaaaaagaaggattgatcagagcattgtgcaatacagtttcattaactccttcccccgctcccccaaaaatttgaatttttttttcaacactcttacacctgttatggaaaatgtcaacctttgtaagaaaaccaaaataaaaattgaaaaataaaaaccataaacatttgcaccacttgtggcttttgaatatcttccacagagggaagtttaaaacccaaacttccaaaggtttaaactacctcaaaacactttcccat

SEQ ID NO: 11130 - DNA, 491 bp, Homo sapiens
  misc_feature (1)...(491): n = A,T,C or G
tggtaagcnnaatgagnccccttttgtagacattagaccacgcggtggaattaatagtttggaccagacagacatgcacggagactcagaatacaacatcatgtttggtcctgacatctgtggccctggcaccaagaaggttcatgtcatcttcaactacaagggcaagaacgtgctgatcaacaaggacatccgttgcaaggatgatgagtttacacacctgtacacactgattgtgcggccagacaacacctatgaggtgaagattgacaacagccaggtggagtccggctccttggaagacgattgggacttcctgccacccaagaagataaaggatcctgatgcttcaaaaccggaagactgggatgagcgggccaagatcgatgatcccacagactccaagcctgaggactgggacaagcccgagcatatccctgaccctgatgctaagaagcccgaggactgggatgaagagatggacggagagt

SEQ ID NO: 11131 - DNA, 448 bp, Homo sapiens
  misc_feature (1)...(448): n = A,T,C or G
nttaatttgagacctctgtacagcgggggaattcgaaaaatttagctgtgcttagctatgaaggaggagattttgaaaaagctgctgaattatacaaaagggcaatggaaataaaagaagcagaaacatcactcttgggtggaaaagctccttcacgccattcatcaagtggagacacgtttagcttaaaaacagctcattctcctaatgttttccttcagcaaggacaaaggtaatagcagcagttagaattctttgcaaatgtaccttaagacaaaataattaaacatttggaacatttgaatttgaaactttaaaaaaatgttgtacgaaattttactacgtgtgatttaactgctatttgtatgaagttgtattggattacattaagttggaattgtgattatgtctggtttagttgtttaaaagaattttcctattatatggt

SEQ ID NO: 11132 - DNA, 479 bp, Homo sapiens
  misc_feature (1)...(479): n = A,T,C or G
cccccccccccccccccaatgannccctnaacgagaccataggccanngcgtggaattccccgcctcggcctcccaaagtgctgggattacaggcgtgagccaccgcgcccggccgctacagcctttttatgctataataccataacaaatgtctattaatattttttatatcagctttaatggaatattataaatgtgtagtgacatttttagtcaaatgcttttgaatatttaatgtttggtaacaataggggaaagcaggggaggaagagagcatgccccttcatccttaattactggtcctttgcatgcaggaaatatggcttgattgttttattgtccacctcttcaatcaacaattcttaaatatggtgcatagtaagtgtatctaggcttctaagacttgcacaaatctgtaaacataagcaatataaagctatgttagcttgcatgctcatcccatctattgtaccattta

SEQ ID NO: 11133 - DNA, 482 bp, Homo sapiens
  misc_feature (1)...(482): n = A,T,C or G
ggtgannccnnnnagggggggccaactgagnccnttgactgagaccatcgaacangcggnggaattcccccgagcgccgctccggctgcaccgcgctcgctccgagtttcaggctcgtgctaagctagcgccgtcgtcgtctcccttcagtcgccgtcatgattatctaccgggacctcatcagccacgatgagatgttctccgacatctacaagatccgggagatcgcggacgggttgtgcctggaggtggaggggaagatggtcagtacgacagaaggtaacattgatgactcgctcattggtggaaatgcctccgctgaaggccccgagggcgaaggtaccgaaagcacagtaatcactggtgtcgatattgtcatgaaccatcacctgcaggaaacaagtttcacaaaagaagcctacaagaagtacatcaaagattacatgaaatcaatcaaagggaaacttgacgaacagagacca

SEQ ID NO: 11134 - DNA, 471 bp, Homo sapiens
  misc_feature (1)...(471): n = A,T,C or G
aatggactgacacatcagaaagngcggnggaangctgaggaacctgagaacngcgggntgnaccagggaatcgccatatttgaccagcatgttttaaaagctcttggtaggattagttggttctaaggatccctctagggacctcattatttcaagaggaacccaaagtccagcctcctacatagatgctgccccacgaaggacccacaaaactaacctagttcagggttctcaggcaggcaggtctgcttcagcttagagcagaacccataaaatactcaagtactgggataggcaagcatgtgtgtttactgtggattgggccctgaaggctcctttgggtgagaacatgtgaaccangcaccctggtttgtttggagcattgctgcccacaagcttctatgggataggtggtgcttgggattgatgtgttgtggccatgcagccctccctgaggattgacttctgcac

SEQ ID NO: 11135 - DNA, 483 bp, Homo sapiens
  misc_feature (1)...(483): n = A,T,C or G
ctttgactgaggnacctcagnaaangcgnnnnaanaactgagatcatgagaacaggcggnggaanncaattgacactatctgttcttctgaatataagatgaagctttgttggctttatttttagaactaacagaactagaacatagcagtttttcagtgaaacacagcagcctagagcaatatacatatatatcacatgcaggtttaggtagatatccattcagggtcttagtaatgccacagaggaggctctgtctccattcagctgcttgctgtcaattgaagtatgattattgcgcttccccactgaatcaacatacaggctgcatagagccttttcttagaaatgtcataaactctctcaggattctgatcacatttcatcagctacattggaaagcctgagtctatctgatctgtgtgtgtattcattcaacaaatacatcccatatgactaccatgtggctatttggaaacaacta

SEQ ID NO: 11136 - DNA, 475 bp, Homo sapiens
  misc_feature (1)...(475): n = A,T,C or G
gagttgcccnnnagtngnnncaactgagaccctaactgatggcgtgaaancgncgntcgntgggcggtgctggtttttcgctcgtcgactgcggctcttcctcgggcagcggaagcggcgcggcggtcggagaagtggcctaaaacttcggcgttgggtgaaagaaaatggcccgaaccaagcagactgctcgtaagtccaccggtgggaaagccccccgcaaacagctggccacgaaagccgccaggaaaagcgctccctctaccggcggggtgaagaagcctcatcgctacaggcccgggaccgtggcgcttcgagagattcgtcgttatcagaagtcgaccgagctgctcatccggaagctgcccttccagaggttggtgagggagatcgcgcaggatttcaaaaccgacctgaggtttcagagcgcagccatcggtgcgctgcaggaggctagcgaagcgtacctggtggg

SEQ ID NO: 11137 - DNA, 560 bp, Homo sapiens
  misc_feature (1)...(560): n = A,T,C or G
nnttgcggancaccagtccagngnggnggattgggagccctaatccgtgtggtggaacttcagcgagatgacgaanggaacgtcatcgtttggaaagcgtcgcaataagacgcacacgttgtgccgccgctgtggctctaaggcctaccaccttcagaagtcgacctgtggcaaatgtggctaccctgccaagcgcaagagaaagtataactggagtgccaaggctaaaagacgaaataccaccggaactggtcgaatgaggcacctaaaaattgtataccgcagattcaggcatggattccgtgaaggaacaacacctaaacccaagagggcagctgttgcagcatccagttcatcttaagaatgtcaacgattagtcatgccaataaatgttctggttttaaaaaatnnnnnnnnnnnnnnnnannnnnnnnaaaaaaaaaaaaaggggcccttcaattttaaaaggcccgttaaacccccgtgataacccccaaggggcccttatggtgccacccttttgtggtgcccttccccggggctttctttaaccctggagg

SEQ ID NO: 11138 - DNA, 471 bp, Homo sapiens
  misc_feature (1)...(471): n = A,T,C or G
natgatgaccctcgnacagngtggaggaacttccagntcctgcttggatttacactgggcaacgtggttggaatgtatctggctcataactatgatataccaaacctggctaaaaaacttgaagaaattaaaaaggacttggatgccaagaagaaaccccctagtgcatgagactgcctccagcactgccttcaggatatactgattctactgctcttgagggcctcgtttactatctgaaccaaaagcttttgttttcgtctccagcctcagcacttctcttctttgctagaccctgtgttttttgctttaaagcaagcaaaatggggccccaatttgagaactacccgacatttccaacatactcacctcttcccataatccctttccaactgcatgggaggttctaagactggaattatggtgctagattagtaaacatgacttttaatgaaaaataaaaaaaaaaat

SEQ ID NO: 11139 - DNA, 497 bp, Homo sapiens
  misc_feature (1)...(497): n = A,T,C or G
gccccccatcgagatccntagtccagngtggaggaacccttgaacaaatacttatttaaataaatttaaatagttattaaatgaatatgtatccaagctgtgccattgtttgcattgcctattaaatgaggaggctataaaatgatatttaagttgcttccagctctgaaatacaataaaatctgacatgacaggataccatacaacaggatgcagtattctttcactctatttgaacatgtgtagtcttttttacttggctgggctgctgggattttgctatagtctctttacacaatacatgccaatataagaaagagaagcaaatctttcttagatgacaaaatctaactcatgctgccagattctgattagtgataagggaagcaagactggccatatcagcaactatatgttggaccttatcactttgtttttatttttgttttcaatcaaactccagttttattagaataatcctcactgcagtaggcatg

SEQ ID NO: 11140 - DNA, 471 bp, Homo sapiens
  misc_feature (1)...(471): n = A,T,C or G
ngctgaagaccactatacangcggnggaannttgagaacctttggtcccagctgctcgggaggctgaggcaggagaatcacttgaacccgggaggtggaggttgcagtgagccgagattgtgccactgcactccagcctggtgacagagtgagactccatctctnaaaaaaaaaaaaaaaaaaaattttttccattggggaaaaacccccttaccccattttaaaatggggcaaaaaacctgaaagggtttttttaaaaaaaatttccaaaatggccccccaggttttaaaaagggggccaaacaccttccccctttattaatttttaaaccaaacccaaataaaatccccctttcccccctttgggggggcacttttaaggccaaaaaaaaaaaatggtgggggggggttaaaaaaaaaaaaaacctttgacctttgtgggtggaaatgaaaatggccccacttgttatn

SEQ ID NO: 11141 - DNA, 591 bp, Homo sapiens
  misc_feature (1)...(591): n = A,T,C or G
cattaggaagcccgntnngnnnnnnnccnnnnnaccgaatcactagntcagagtggtggaattcgttgttgtcgtccagtacccccgacatgcagggcacatggcctgagcgccagccctcagctctcccagcagaccagaggcgctcactcgggctcctcagcgggtgtgctgaaagccacaccgagactctgccagattctccatctgcctctccttccccaatcccagagtcttcttccccctttattagtgttaattaggggtaattaacactagtagagtaaactgtattgatttccctccatctcacagctggtgtctcaacatcattttttttttaaaaaaaaaaaacacactccatgctcaaagcccccctcgttcttgtctaagggaatcctacctcaggatttcttcataattaacatgcacaagagaccagccaaccctatataaagtacactctgtgacatctttgttttaacactggccacttgcctttggaggactggatgactatgctacaatgattatgacattcctaacacaggcatcttgtcttttcaggctatccttcaacagcaacatcan

SEQ ID NO: 11142 - DNA, 540 bp, Homo sapiens
  misc_feature (1)...(540): n = A,T,C or G
ntttcgaacacagtccaggggggactggattgcactgcaggcggagagacttgaggcttgcccccaggaatgggtacggaggggagtggactggctgatgcgacctaagggaggccccaacccatccagggcttcccagacaaaggagtgatcggaagcctcgtgatttaagacctcagcaggctgcacaccctccgcagggcccacggcctcggccaggcatgttaatcagtagcaagcctgtgtttccatctaggagcccttttcctttttaattatctgtgattaacatttctaaggaggataaacatatccctgcctgtaagtccatccccgaggcgaggtgggggctgggatcgtcccagcagccggtcccagggagctgagagaccatgcccccaacaagaagctggggaaggggccacagtgggggggtgggggccaggaatgagtcacggagaccgcaagcccgtgaaaggctgcgcatgcgtgtgacctgtgtgccgggtgtgcctgcactcacanggccagtgtccgtan

SEQ ID NO: 11143 - DNA, 554 bp, Homo sapiens
  misc_feature (1)...(554): n = A,T,C or G
ncctcgaancacactccagagnggngcacttgatgatcactgcaggcggagcaactagaaacgtagcgccgagatattccttccagtagtgacactgtattttgtctccaaataaaagaagcttattgtagtatgtttgcagaaaaattctaaacaaaaattatacagcttattagagtgtgggaatagggatctaaattttaaataaaattatatatatatataaatcggcgctgattttataattgcgcacggtgtttagttttttcttacttttaaattccaacttaaaattatgaggtttcagaaatatattgaaagtttaacaatgtttaaaaatagaaaagcatgagtgttcatgctttaaaatgatttttaaatttgtattttatattggtttatctatctgtctttgcaagcagccttcaggttaaagatacttctaacaggttacagtacatttcctctgtatgaaattagatgggataatagaattcataacccataatattctttgaaagctaagctttaaacctcattttatgtactttaan

SEQ ID NO: 11144 - DNA, 473 bp, Homo sapiens
  misc_feature (1)...(473): n = A,T,C or G
acttgaaaaacctcnttagnaacctacgaaagngcggnggaattcgactcagagacggaggactctgtcttggagcagagcaccaaatgatctgccctggatatgctctgggacgggtttacttgtttttgaacagggtgatgggccctatggttttctagagcaaagcaaagtagcttcgggtcttgatgcttgagtagagtgaagaggggagcacgtgccccctgcatccattctctctttctcttgatgacgcagctgtcatttggctgtgcgtgctgacagttttgcaacaggcagagctgtgtcgcacagcagtgctgtgcgtcagagccagctgaggacaggcttgcctggacttctgtaagataggattttctgtggtacctgaattttttatatggtgatttgtatttaaattttaagactttattttctcactattggggtaccttataaatgtatttgaaagt

SEQ ID NO: 11145 - DNA, 544 bp, Homo sapiens
  misc_feature (1)...(544): n = A,T,C or G
nttctgaccacagtccgtgtggggattgaactccccaagtggccttaaatatgagtagtgaattgagaacatcttgaattcttaaaagacttcttagtgactttttataaaaaggccatgtagaaaatttattaaaactactatgactgctacattcaggaatatgccagtggtaaagcatttaaatgtagcttgtcagatttaccataatcctactaatttctttgcagcttattaattttgtgaaatttgtatatatgaagaatttgcatgtatgtgtatttacaaatttttctaagtatcttgaattctcagactgcaaaaggcctattttaactattgatttttttaaaaaaaattgtctttgaatgtanttggagtagacatgcattaactgtgacattattgccactcagttnttttctttctttntttgggcaaactgatattatctataggaatattttggtaatgttgtnttttggnggaagaaacttgaaactcagggtacccttaaagtaacggatttacttggtttaaaaga

SEQ ID NO: 11146 - DNA, 481 bp, Homo sapiens
  misc_feature (1)...(481): n = A,T,C or G
agggaaaccnnnnaggcgggccattgagnccnttgactgagaccctaggacangcggnggaattccaaagatagagtcaaagacacatttccaaaatggcaattcatgccttgtgtcagttgtacccacctcacattctttaacacttaaggtttttctgggtagtaagtgcaatacattcttattataaaacaatatagacagttcagtatgtataaatgaggataaaatcaaaatcacccacaatctcaccactttgtgataataaccattaacttcaatattgatgaatttccttgaatgttttatctacaatatttctttcatatagttgatatcactctgtatgcacaaacttgtatcctttttctaaatcttaatatcataatattagcattttctaatgttagtagatgtacttcttaaatattgctttttaatgataaaggttttttttttttttttttttttaacaaaaaag

SEQ ID NO: 11147 - DNA, 455 bp, Homo sapiens
  misc_feature (1)...(455): n = A,T,C or G
ccccaattgagtgcattacatagngcggngcaattcttgctgcctgtgggtcctttttctttcatggagcctgctgggtcttgtctcacctgtgctgagctcctctggggttttgatttcttccttccttatcaggccctttggggtaagcctgctggttgtacctgacatagggaggcagttaggggcagtccctggtggggccgccctggcagcctccagctggcaccatcgtgtgcctggtttccctgcaacacctgcctctctgtccctgctgctgcttggctcangcccaacaggcagcgtgcatggaggtggttacacacagctgtttccgtgagggtgaccgtgtctgcagcacgcttccgtctccgcatgcacggctgcctctccagccacctctgatacttctctcttggggccatcagagcctcccttgggctgtcacctcccag

SEQ ID NO: 11148 - DNA, 452 bp, Homo sapiens
  misc_feature (1)...(452): n = A,T,C or G
attgacgaccatattgaagncctgtggaanacgcaaagctatgttgggagcacagccatttcccataggctttctttttccttgccccattgccttcctggaagttttccccttacccatcatcacgatttttcccatctttcacgatggtgcaattcaacaggatgaattaactgaactagaaaaggataaaaaaaatctaaccctatgaaaactctgccttcaacataactccagggagatgaatattatactactggcacctctgacccacactatcctctgtaccccgtccctgcccacatcctcctttctggacacttagacgtcaggttccccaagcggcaaggttccgtgaggagcaccaccagctccttaggagaactggcactgctctggctcctctgacaactggggctggcactgcgggcaccaccaggtgagcctctgta

SEQ ID NO: 11149 - DNA, 496 bp, Homo sapiens
  misc_feature (1)...(496): n = A,T,C or G
nattgagattcgatgttcactagtccagngaggtggtccattagaggaaggaggtcccagaatagctgggaaattacgagaacagcctcactgcacgagttggtgaatgctgtgatggcgattgtatgatggacggtgatgttgaaaccagactggggaatgaccgccccatccggagagagacggggtcttgctctgtcatccaggctggattgcagtgtcattgatcatagctcaagcggtcttcctgcctcagcctcccaaagtgctgtgattacaggtgtgagccactgcacctggcctcttcatatcttacaacgaaaagcaccaaggattctcttttgttgaatttgagttggcagaggatgttgcaccagctgtcaacaacatgtttggtcagatgaagactgggtggagaagtttgctgggaagaggataaagaggaaggtggttgagacttcccaaagcagaaagccaggaggtgagatatatcttn

SEQ ID NO: 11150 - DNA, 461 bp, Homo sapiens
  misc_feature (1)...(461): n = A,T,C or G
gcggtaaatcgagacattgnnaatttgtaggtccttagtccgtgcggtggaattcgtttggaccagaggtacttgaggtggaggagggttggggaatgtatgatggagtttctgccatccatggtgggaagaactgatgcacacctcattagcacccaggtatccaactgagacactagaatggatgtgctttaggaataagtgtcacacttttcaataaggcctattgtagaccaacctgctaaagcctaaaagcaaaccctgacaaattcacaaaggggtggattggtgattgagtcctgccaaattagagggtcttgggaaatgctgtgggctttccatgaatccgttgtaataaaacataaaccagtccacataagtccaaagtgatcagacagtaattttactgcccactagaacaaaattaattcacacaatcaatgacacatgttagccaggtc

SEQ ID NO: 11151 - DNA, 474 bp, Homo sapiens
  misc_feature (1)...(474): n = A,T,C or G
aaatgataccntcgnananncnnngnanactgngacctctgtacagacaggnggaattcggctttcagtcctgttcctcagtcttgggcacctgatgctcaatttttcattgacaaaccctgaaacatggcaccaaatatatcctttagatcaacagtttggtgtttagaattttgatgtacaactgaattgctagataccttaattattttctctgaatgtacaaacacctaaaacatacacctgttgttcagcttgaacctttgacccctaacattctgccacagaactcgtctcagagagttactcacttgagttacatctgtttcatgtctaaacgtgtgtctcattgttgcaaatacatatcagaaaagaatgggaaggggtaccggaggaagaaagaaccattttagacagcatgggtgtgataattcaaagaaagacattccactgaatttcctggaatttccaggg

SEQ ID NO: 11152 - DNA, 434 bp, Homo sapiens
  misc_feature (1)...(434): n = A,T,C or G
tgctgtgcagcaagatggcgtctgctagtagggtcgttcaggtagtcaaaccacacactccattaataagggttcctgacagaagagacaatcctaaacccaatgtatcagaagctttgagatcagcagggctaccatctcactcttctgtaatttcacaacattctaaaggaagtaaatcaccagatttgctgatgtatcagggtccaccagacactgcagaaataataaaaacattacctcagaaatacagaaggaaacttgtgtctcaagaagaaatggaatttatccaacgtggaggtcctgaataaccatggtggctgctgtttgtcatcagacaatagaattgtctttacaataaaggacttccaaaatgacagatgagaaactgtatattaaacacctttaataaatattatgaaaaaaatgaaatn

SEQ ID NO: 11153 - DNA, 465 bp, Homo sapiens
  misc_feature (1)...(465): n = A,T,C or G
agccnannnnnnnntgaactgcgtaccatctgaccangcggnggaattcaaagctaaagctgagttcataaaaagggatgatttggccgacggtcatctgccagattctgatgatgattcagaagtcagtgtggaagaagatcagagggagaggcaggcgctctttgacttatcaagctgctccctgaggcccaaaagcttcaagtgtcagacttgtaaaaagtcatatatagggaagtggggactggcccagcattttaaacttaatccaggccatggccagctggaccctgagatggtgctatctgagaaagccaatgggagcaccctccgggggtgcacagaggaaaggacgctcagcctgaccttcccggggctgtccgtgccagcggctccgcgtgagggaggggcccgctcctgcttggtgagagagtcagcacgcagtggcctgcagtctcactctgt

SEQ ID NO: 11154 - DNA, 495 bp, Homo sapiens
  misc_feature (1)...(495): n = A,T,C or G
nctcgagctcattagcactangcgnggaattcagattataaaatagaacaagatggagatttaagaaccaaaacatatagtatcttaaataaaaatttactggagatcataataggagaatagggatggcagaacatggctgggtgtggtggttcatgcttgtaatctcagcactttcagaggctgagacgggcagatcgtttgagcccaggagatgaaggctgcagtgagctatgattgtgtcactgaactctagcctgggtgacagagcaagaccctgtctcttaaaaaaataaataaaataaaataaaataaaataaaaaggaacacagtcacaggaaccagcgcagcaatatcaaaaggtctaacatatgtgtaattgaagttccaggacagtaaagagaaaatgggacataaaatttatttaaagaaataagtggacaaagtgtttcccaatttgctaaaagacatttatttacagattcaagaagaacc

SEQ ID NO: 11155 - DNA, 493 bp, Homo sapiens
  misc_feature (1)...(493): n = A,T,C or G
gcccgggncacgggggncttcccatcgagaccaatgtgaancnctcggaantctgggtgttcaactggggcatgtttgtaccagccagcatgtgttctgcccaacagtgtgtccgtgtgtgaggttaactgattcagaactcattctcttgataaactatttcttgaaagcatttattttaagtctttatttcctgctgaaatgaagtttcatgctgtcatgcccatcttatttattctagaagaaaattttcatagaagaaaatgatttatggccaaagttacagaacattcatcttttagacttagccttagaatatcattggaaattacttggcttgaatttggttcgtttttatctttatggattatgtaccagggctattaataatacttaaaccccttattttgctatggtggttagatttttttattccttttcaattagtgctattaattattacatggtcgtattcatgcttattacagatgan

SEQ ID NO: 11156 - DNA, 496 bp, Homo sapiens
  misc_feature (1)...(496): n = A,T,C or G
nctgagatcgataagcactagcccagngcggtggaatttcttttaaaacaatggaagatttttcaaattcctttcttatagttttagtatgtgcaattctaggtacagcacagcccatttgtaatgagataagagtggtaggtggtagtgagctacgcttgctcagtagtaggctgaaaagattcaaattaatgtcttatcagaattacaaattacacatctttgtaggtgtccttctatgttggtgaaaacattaaatccatggatgtcaaatgtctttatttcgatatagttaaaattaatatttgccatggtgaatctgagataggaaaaatattttacgataatttcagacttctggaaaagttccaagaatagtcaaagaatttccattttcttaaaccagattccaaatatcaacagtttatcacatttgctgtatcatttctttgctagcatactttattctctaaattatttgagactaagaacaaat

SEQ ID NO: 11157 - DNA, 468 bp, Homo sapiens
  misc_feature (1)...(468): n = A,T,C or G
actggagaccctttgaagcccttggaattngcgagttatttttattccaagccttaggcccattttgacaaagatgcacacagaccgttacatagtatactctcggtgcatatttgttggataaataaatgggtgagaatatgtttggccactcatttgttgaacgagtgaatgctgttcaagagataactcatggacctttagagaagaatctcaaactcaatgcctgatggtacctggttggcaatgttagcgaatgaagcaggctgggctggggagacgtgaaggagcagtggagtctgaggcaaactagaactgctcatctcaaaggggcagctcctgcgcagcttgactcaagtgaggtttgaaggcccaggctgctagatcctccaatttttaaagagaagttggaaatctagatttttatgtcataacggtttaaaaagacattgttggctaacacaaggn

SEQ ID NO: 11158 - DNA, 469 bp, Homo sapiens
  misc_feature (1)...(469): n = A,T,C or G
cactgagccatggaattgcgngcattccaaaagcgggtactataagagtggtttttttttagttcaggaaactaaattctgtagcttctgataaatgcatgagttgtgctccacattgctcaattgctgactgaaactgcatgattaaacataaatacagccagagctgcagaggagcatggaacctggagaaacagatgagataagcttctttagtctctatctgtgaaatgcttactttattctagtctcaattgaataaagtgttaagtgttagttctaacaactgaataagttaaatggcccctacttagagcctggaaattacaaataatcagatattcaatttcctaagttttcagagatttacgggttacacagtacagcaattcatttgattacccagatatcattcttaaatatctagtactaagcttttcttaaatttccttcaatttgttggttcttg

SEQ ID NO: 11159 - DNA, 486 bp, Homo sapiens
  misc_feature (1)...(486): n = A,T,C or G
ggaggggccccgntttnnggggaactgagattctagnccgcctgatgaaccttaggcagtctggtggaattcgcagaaattcactgccttcccctcctgtccatgaccttgggcacagagaagttctggtgtcatagatatcccgttttgtgaggtagagctgtgcattacacttgcacatgactggaacgaagtatgagtgcaactcaaatgtgttgaagatactgcagtcatttttgtaaagaccttgctgaatgtttccaatagactaaatactgtttaggccgcaggagagtttggaatccggaataaatactacctggaggtttgtcctctccatttttctctttctcctcctggcctggcctgaatattatactactctaaatagcatatttcatccaagtgcaataatgtaagctgaatcttttttggacttctgctggcctggtttatttcttttatataaatgtgaattctcacagn

SEQ ID NO: 11160 - DNA, 570 bp, Homo sapiens
  misc_feature (1)...(570): n = A,T,C or G
acctcgatcacagctcgnnnnnnctcgatcaccagtccgtgtggtgcaattctggagcttgaaaactcattgcccagtgacgttgtagagattgtaatgtggtgcaacgcattacctttcctatgtttaagtatgtttagatactggccattgtgttccaattgcctgcagcgttcagaacagtagcatgctgtacaggtttgtagcctgggagcaataggccatgccatatagcctagggcgtgtagtagtctctaccatctagggtcatggacgtacactctatgatgttcacacaatgatgaaacagcccaacggcacatttctcagagggtaaccttgtcattcagtgacacgactgtacattcatgtggcttatagccacatcctgcctgcctaggaacattttttcctgaggtgactttgcatagctatacactccccattttgtgttgatcttacacctttaactctgatgnagcagtcttggttcagttctaggagggacaccttgatgcatcccacataaattcatgggttgtacttgggaggtgtggagtcgggactcan

SEQ ID NO: 11161 - DNA, 466 bp, Homo sapiens
  misc_feature (1)...(466): n = A,T,C or G
agccacannnnnnnttgaatagcgtaccattagaccangcggnggaattctgacattttaagtatatggtttagaagtggttagtataggtctattgctttgcagtaggggttagataatttgtggcttacaaaagggggagtgaatactcattacttatgaaagaaggtagttagcttgccttaggtagataggaagagaagagtccctggaaagtccctggtcagtgcctcatccctgcataacatataaagaagcctggaaaaaatcaagctgcagacactaacaagggaactagcatatgttgctgtgcttggggacatgcccgtggctgcacagatagaaaaacctctggcccatttggataaaaacttgtagaaacctccagctcactcagatgaaggaacaagaacgacctagcatagaaatgcctttgtttggccaggcacggtggatcatgcctgta

SEQ ID NO: 11162 - DNA, 484 bp, Homo sapiens
  misc_feature (1)...(484): n = A,T,C or G
nttcgatatccctattccagngttgtggaactcgtcagttcttaaaccaagaaagtggtagtagttgattttaattagtgtaaagttgtcttcgtaacttccgtgttggttggaaataggttcattctttgttttgaaaaggagtcaagcgcagtggtgagaaggggaagaggagagcaggcggttccagtgcgacccaacggcagccagaggccgccctgccccgccggccagaagcggactcggtgcagacatgcagctctctccgtggaatgtgcatgtgcacggagagacgggatttcaccatgttagccaagatggtctccatctcctgaccttgtgatccgcccgcctcagcctcccaaagtgctggaattacaggcatgagccaccacgcccagccgtatgattacccttaagagttaactaccacactcaaaagagggaggagtgggaaggaagaggcgacgtgagggagccactt

SEQ ID NO: 11163 - DNA, 468 bp, Homo sapiens
  misc_feature (1)...(468): n = A,T,C or G
cgcccgtttganatccttatcgataccctatgcagngtgccggaattcgcaagggtttggaaagatatgcccactggccgaaatctctagctttgcctgcgggcaggctgccttttcttcaccaaatatttaactccccacaaacgagtgtgcaaaagagtgctgacctcattcctaaagaaaagtgattttggcttttgtttttgttggttgttttaaacttgtactgcagctttcgcaagtgtggccagcattctcccactctggaatgtagtggaaggtgttactaaccctcagcattcaaaggcttccctggtgtgagatcggcatcacggtgtgagcaccactgggcacctaaggcatttcgttgcgtaactctcagttattttgccactatgcttataagagaaaaacatactcaagttccaaagtaactgtcagaagcactctttccttcgtggtggagcg

SEQ ID NO: 11164 - DNA, 471 bp, Homo sapiens
  misc_feature (1)...(471): n = A,T,C or G
cttgaaaaacccctggagaacataggacagngcggnggaattcctccataaaccttggctcccctgagcagatgcccagtgaacgggaggttggaacagatgccaaaatgctgctcttggcccgggaagataagaaacttcagtgcttgggactacagagcaggcagctggtgttcctctttattggctcagacgctttcaactgctgtacttttctctctggcttcttgctattggctgggactcaagatggaaacatttatcagctggatgtgaggagtccaagggctccggtacaagtcatccacagatcaggagcaccagttctatccctgctaagtgtcagagatggattcattgctagccaaggtgatggaagctgttttattgtccagcaagacttaaactatgtcactgagctcactggggctgactgtgaccctgtgtacaaggtagccacatgggagaagt

SEQ ID NO: 11165 - DNA, 582 bp, Homo sapiens
  misc_feature (1)...(582): n = A,T,C or G
attcgaaccactagttagagaggcgcaattcgagaactgcttttacttattcatttgagttgtattttactatattttgtttgctaatgaccacatacattctaatcacaattggaactgtttcaacccacaacttttcactcatcttcagaatggaagatatgaagagaacatgagtttccagttgacaaagtctgtgctcagctccttcactgaacattgctctgagccaacgcatgtcagcgagaggacgcggtgacaccggcctgtggttgcacccagaaacaaacaagtagggagagcagccccagttctccagaatgacctctttcctccgaatcccactccaggaagagagtccagcaggggcccctgagcttggggctggccctgtgcgctgtcagcagagacccctgtccatcagcactttgcatgggtctgtcctgcttcagtggggaatgttcctcagcaaaagaactgagtgcaatgcanggatgccatcggagttggctggngacagcctggctntgtcatgttagggggcatggaggggcatgcagtgctcanggtggacaccacacn

SEQ ID NO: 11166 - DNA, 488 bp, Homo sapiens
  misc_feature (1)...(488): n = A,T,C or G
gggaggggcccnggnnttnnnggggnctactgatgaccattagtccagaatggtggacttccaggatccaaaatggcagcgctgtcgccttagctgggagagcgagccgttgtggctgtttgggagacttatggtcaccctgaagtactgcctgcctctagtgtcgcgtccctccagtatccgatgggagcgccgtccgcagggaatgtgtctctctgatcatggtgcctcgtgtccagctctggggaagaccgagacgaaatcgagtcagctggcgttgggagagggcttatttccgcttccgcttgcccactttcaggaatttgattctgagagcagggctgcggttccaggcagggtttgtacacatatttgcgttggaaggagagaggagcctangacacatatgtattaactgtgcagctggtccgactcccgacagcttcagcgcacaccagccagccttggagttgctggaacggccctgc

SEQ ID NO: 11167 - DNA, 470 bp, Homo sapiens
  misc_feature (1)...(470): n = A,T,C or G
ggcacaaagatgcctntngnnnnnaatgangatcatnagtccagtgcggtggaattcggcgtgatgtctcacagaaagttctccgctcccagacatgggtccctcggcttcctgcctcggaagcgcagcagcaggcatcgtgggaaggtgaagagcttccctaaggatgacccgtccaagccggtccacctcacagccttcctgggatacaaggctggcatgactcacatcgtgcgggaagtcgacaggccgggatccaaggtgaacaagaaggaggtggtggaggctgtgaccattgtagagacaccacccatggtggttgtgggcattgtgggctacgtggaaacccctcgaggcctccggaccttcaagactgtctttgctgagcacatcagtgatgaatgcaagaggcgtttctataagaattggcataaatctaagaagaagcctttaccaagtactggcagaaa

SEQ ID NO: 11168 - DNA, 459 bp, Homo sapiens
aacaagtagaacccttttagatggcgtaatacctttccatgctgtctttacatatatgtacctatgtgtaaacactatgtaatattgttacagttgcatacatctcatgctctatatatctttccaaaacttttgtcacttaatattgtcttttatagatttatttacatttagatataatgcatttttaactgcagaatagaatcatgaaatgcatgtaccactttctggatccatcctcccacacactaacattgagttgttttccagtgtgaaccaggctctctagactatagcccagatgtagaattgctggatcacaggctgtacatctccggctttaccagatattgtccacttgctctccagagtggtgggtccggcattaatttccatcagcattataaagagttgtcgtttgtccacattctccccaacacttggctttagcagaccttt

SEQ ID NO: 11169 - DNA, 472 bp, Homo sapiens
  misc_feature (1)...(472): n = A,T,C or G
acttgagnccccctggagaacctaggaagnngcggggaaatccgccacgcaccggttagtgagacagggctgccatggcaaccgccaagcccccctcatggtgggacagtaccccggacccatccactcactcctgagagggctccggcccagaatgggaacctcagagaagagctctaaggagaagaaaccccatagcgtcagagaggatatgtctggcttccaagagaaaggaggctccgttttgcaaagtggaggagggacgagggacaggggtttcaccagccagcaacctgggccttgtactgtctgtgtttttaaaaccactaaagtgcaagaattacattgcactgtttctccactttttattttctcttaggcttttgtttctatttcaaacatactttcttggttttctaatggagtatatagtttagtcatttcacagactctggcctcctctcctgaaatc

SEQ ID NO: 11170 - DNA, 593 bp, Homo sapiens
  misc_feature (1)...(593): n = A,T,C or G
gggccccccttttgaaaccccntttcgaatcactattccagagnggngcaattcggcagaagagcaccatctaccggcactacaccaagaacagcaagcagatccagtggttctggcaggtggtgatggagatggacaacgagaagaggatccggctgctgcagtttgtcaccggtacctgccgcctgcccgtcgggggatttgccgaactcatcggtagcaacggaccacagaagttttgcattgacaaagttggcaaggaaacctggctgcccagaagccacacctgcttcaaccgtctggatcttccaccctacaagagctacgaacagctgagagagaagctgctgtatgccattgaggagaccgaaggctttggacaggagtaaccgaggcctgccctcccacgccccccagcgcacatgtagtcctgagtcctccctgcctgagaggccactggccccgcagcccttgggaggcccccgtggatgtggccctgtgtgggaccacactgtcatctcgctgctggaaaatagcctgatcccaggaggccctgcagttcccccgacccgcggatggcagtctggaataag

SEQ ID NO: 11171 - DNA, 463 bp, Homo sapiens
  misc_feature (1)...(463): n = A,T,C or G
ggctcgttttnnactgattagcatagcatangcggngcaattctcaagttttagccaaggagtgtggagttgaaaacatcagaagagctgagtctcttaatggaaatccattgttctctaaggccctggccgacttggtgcattcacacatccagtcaaacgagctgtgttccaagcagctgaccctgagctgtccgctctgtgtcaatcctgtctgcagggagactaaatccttcttcaccagccagcagctgtgacccccgccggtggaccccgtggcgttaggcaaatgcccaacctccagatacctccgatgtggagagggtgttatttagagatcaaggaaggaagtcatccttccttgatatatatacagcctttgggtacaaattgtgtggtttcttgaggattggactcttgatggatttctatttttatataactatacagtaagcatttgtat

SEQ ID NO: 11172 - DNA, 487 bp, Homo sapiens
  misc_feature (1)...(487): n = A,T,C or G
agagagggccccccttgagactattgacggcgtgggaanncgcgacctggtaagtttgaatgtctgtctttctagtttgctccatttagtttagttactatgcatagctgacacttaatggaaggaagtcagtatgtgtagccaaagcttgaaaatggggagttgtgctccacctctgagggtggaatatttacataaattatctaattagctgtctaaatgtactattgtaacaaattaaatttggtcaattattaatgataaagaaaaagaaatacttggtttatcattataattggatggtgtccagtgacctcgtgctactaaaagcaggataggttgcttctgtttttcttttcctctcttctgtttccttgcctcatcctggcttttggccatttatactgaagagaagggtagatgagcttgttccattttgtgggaagggggaaggttatagatacattntctcagttttgatttggag

SEQ ID NO: 11173 - DNA, 478 bp, Homo sapiens
  misc_feature (1)...(478): n = A,T,C or G
nnctgagtacctctccagnggtgagaaccctttttgcatctttcacttancatgatgtgtttagggcccatgtgtattgtagcatgtatcttaattcattcattttttaaaggctgaataatattctattctaaggatataccacattttgtttatccatctgtctattgatggtcatttagatgatttctgctttttgcctgttatgagtgatgatgttatatacgtttatgtacgagtttttatgtagacataggttttcatttttcttggctatgtacctaggattgggatttctgggtcatatggtaaatctctgtttattcatctgaggaactgccagacgactttcataaccctgacagtcttgaggagtacaggctcagtctgttgcttctcttgtgatttgactgtgggtacagattttgagaaggaataccactagttccggtgcccttcttgtcgcatcatatctggn

SEQ ID NO: 11174 - DNA, 455 bp, Homo sapiens
  misc_feature (1)...(455): n = A,T,C or G
cgctcgaaatgagaccatttgantaggagacctatgtgcagngngcnggaattcggagctgagaagtgttttaagcagaaatttgactgcatgggagatgtatagagttgagttaagtagtcctctgaggcttaagatagtgtcatctagactccagttccctcatcttgggtagcatagtagtcccagcccaaaactgcaagcatgatccccgtctgggtttccttcacaagcactggagcatcttgtgctatgtgctgaactcaggtggataagaggttgaggcggttcccaaagctcctgctgcacccaggtgttgagcctaaatctgaaccttgtggagaggtcacaagaaagatccctaacagcactttggtttagtcagggctaggtgtcatcacctgtatgccctttggccaaggaaaccagaatttttcaggattttccccacctct

SEQ ID NO: 11175 - DNA, 477 bp, Homo sapiens
  misc_feature (1)...(477): n = A,T,C or G
atcgacccctnttttgagacattggccgngcggnggaantaaaatcatgaatgggtaattatgcaacatacctcaactcttgccttataaaattcaatatcatgtagtctctctttatatctgctgacttcactttcaagcttatcgactctgactgctttctctcgaagtgcatctaattcatctcggtacattctggcagagcgagcatccgaaagcaaattcatgttctaaacaaaaatttaaaattatattttaattattttctgttatcaacttgttattctttgttgcacaatttgaaattttatttatttatttatttatttatttgagatggagtttcactcttgttgcccaggctggagtgcaatggtgcaatctcagctcactgcaacctccgcctcccaggttcaagcacttctcctgcctcagcttcccaagtagctgggattacaagctccccccaccatgccn

SEQ ID NO: 11176 - DNA, 446 bp, Homo sapiens
  misc_feature (1)...(446): n = A,T,C or G
nactgaagacatctggaagngcggtggaattcacaatgtttaacattttgtgccaatttgttcctgtattcatgtatgtaagttacagatctgactcttcatttttaagttccttgttacatcatggtcattttctagttttttaccagactcccatctcacaataaaatgcatcaacaagcctgaactgctgtcattcttttcatcattatcagtattttctttggaaaactgtgaaatggggtacattgtcatcctgcatttgattcatcttgagctgaatttgggtaacactaaatgttttagacattctccactaaattatggattttcttgtggctaaatgtttctggagaggtcagagttgacaaaacctcttcacaggttgctccttcttcctgaaatccttaatcctccgcatttcatgcttcangtcatttcangga

SEQ ID NO: 11177 - DNA, 577 bp, Homo sapiens
  misc_feature (1)...(577): n = A,T,C or G
aatcgatcaccagctcgtagggcgattgncgaaacccagcctctgatggtgaacagaccacacgtgagcctgtgctcaaagccatgtttttggctgacacccatttgcttggggaattcctaggccactggctggacaaattacgaagggaatggcagatggagagagcgttccagacagctctgtggttgctgcagccggaagtcgtcttcatcctgggggatatctttgatgaagggaagtggagcacccctgaggcctgggcggatgatgtggagcggtttcagaaaatgttcagacacccaagtcatgtacagctgaaggtagttgctggaaaccatgacattggcttccattatgagatgaacacatacaaagtagaacgctttgagaaagtgttcagctctgaaagactgttttcttggaaaggcattaactttgtgatggtcaacagcgtggcgctgaacggngatggctgtggcatctgctctgaaacagaagcagagctcattgaagtttctcacagactgaactgctcccgagagcangcacgtggctccagcccggtgtgacctgg

SEQ ID NO: 11178 - DNA, 471 bp, Homo sapiens
  misc_feature (1)...(471): n = A,T,C or G
gccggnnnnnncactgatgcttctatgcgggaatcagaaataattttttttggagttggagcacatctacataagggtcacaattgccccaagacttgcccaatttgagctcatgctacacaattaaatatattccttaaatattgcgtgcttgcaacttttgattttgtaaatggggtcccacaggacaaaaatgagtcttaaacataaaattaaaccatatgaatgttagttttttagttaatttcagctgggtggtagtctatagacccagctactcgagaggctgaggcagaaggatcgcttgagcccacgagttcagggctgcagtgagctgtgatcacaccactgcactccaacctgggggaagagcaagaccctacaaacaaaaaagagttaattccattatatttatttttacatacccagagtttgactaaaatataccagacaatctcctgtcccaaatgc

SEQ ID NO: 11179 - DNA, 485 bp, Homo sapiens
  misc_feature (1)...(485): n = A,T,C or G
catggacccccctngttttgagaccattaggccagngcggnggaantcgggccagagatcccttggattctagaccctgtagttgaagatatttgttattcagcaagaaggtttggaaactgagggtcaagagactagttatgaacaatttgatgttggaaaatcctcttgatccccggatcagagtctggaagttatgaccctgttactgagatggaggaaaggggagctagccgctcatgaacagtgtccagtggccataagcatggaaccagcaggccctgatcctaagaccaggtgctgagactttttctcccagtccccagattctctggtctcattccctttccttacacacatgctggatgctgctgtanagactgggggagaacacactcgtagacagcaaagctgccaacctgtcactttggtggtccttgaggtcccctagtaaggctgattnttgagtgtagggtaagggcaaa

SEQ ID NO: 11180 - DNA, 459 bp, Homo sapiens
  misc_feature (1)...(459): n = A,T,C or G
gccaatgagacatcagaagaatgaggacctcccgnngnccaagaaaacacagaacttttctgtcatttggatccatgtctattacaaagtaaagagagtcaattactccaggaggagaattgcaggaaaaagctagaagctctgagagcagataggtttgctggactcttggaatatcttaatccaaactacaaagatgctaccaccatggaaagtatagtgaatgaatatgccttcctactgcagcaaaactcaaaaaagcccatgacaaatgagaaacaaaattccattttggccaacattattctgagttgtctaaagcccaactccaagttaattcaaccacttaccacgctaaaaaaacaactccgagaggtcttgcaatttgtaggactaagtcatcaatatccaggtccttatttcttggcctgcctcctgttctggccagaaaaataagan

SEQ ID NO: 11181 - DNA, 493 bp, Homo sapiens
  misc_feature (1)...(493): n = A,T,C or G
ggccggtcccattgaagcccctngatttgagatcctaggccangcggnggaattctaacgacaaatacgagaacgggtacattcacccggtcaacctgatgtggccctttatggtggccgggaaacccgagagtgacctgaaagaagtggtgaccgcgagccgcttatgtggaaccaccgcgtcctgaccttggaggtgcgagtctgggaaaggcgcgctcccggagggagcgggccccgggaaggcgacccctgccctcagtgctctctgtctctgcttccccctcgcaatgctcctctctctgtcccaccccgcgagaacactttacaacgacgaggagattcgtttccaaaccagaggagatcaattgtacttacaaagattcccatctatttaactttattaacttctaccgtgaatgactctgcaagccttgctggtccaagtgcaatatgtaattataaatatatacatagataagagcctatcaat

SEQ ID NO: 11182 - DNA, 481 bp, Homo sapiens
  misc_feature (1)...(481): n = A,T,C or G
ctttgacaccctagttttgaggccgttaggcgcancagcaggaactgggcagagctgtccaacaggaagccggccccctgacatgcgctcctgcagcctggtgccctgtgagagaacttggcgctggtacacagggccctggggtgagtgctcctccgaatgtggctctggcacacagcgtagagacatcatctgtgtatccaaactggggacggagttcaacgtgacttctccgagcaactgttctcacctccccaggccccctgccctgcagccctgtcaagggcaggcctgccaggaccgatggttttccacgccctggagcccatgttctcgctcctgccaagggggaacgcagacacgggaggtccagtgcctgagcaccaaccagaccctcagcacccgatgccctcctcaactgcggccctccaagaagcgcccctgtaacagccaaccctgcagccagcgccctgatgatcan

SEQ ID NO: 11183 - DNA, 485 bp, Homo sapiens
  misc_feature (1)...(485): n = A,T,C or G
catgaccccnctcgtnagtagatcatcggacangcggnggaanncggaaagggtgacattcaaggatgtggctgttgtcttcaccaaggttttagctggcactattggataaagcccagataaacctgtaccaagatgtgatgctggaaaacttcatgaacctcatgttagtgagagacgggattaaaaacaacattttgaatcttcaggctgaggggttaagttacctttcgcaagaagagcttcattgctggcagatttggaaacaaaggatccgggatttaactgtgagtcaggattatatcgtgaaccttcaagaagagtgttccccacatttagaagatgtttccctcagtgaagagagggcaggcatttctcttcagatttctgaaaatgaaaactatgtagtaaatgccattatcaaaaatcacgatatcacagcatggcaaagcctgacacaggttcttaccccagaatcgtggagg

SEQ ID NO: 11184 - DNA, 445 bp, Homo sapiens
  misc_feature (1)...(445): n = A,T,C or G
nttgatgactttagaccatgcggaggaattcgccttctcggagttcaggacagaaggttctggcctcctgtcttatccttcctgggctgtgtctggagcctgggaccttgcttgtggggtaaaagcaacagaacacttgcccttcccaaaatgaagggagaggagatggggcttctcttcctctcccctgagtgggaaaggagctctgggggctggtcctgcagcacagaggaggggtcactgaagcgttattgaccagctgctgtaccttctgcatctcactccacgctcactgcctttttctcttccttgcagttggctcctgtgcctgtgccggctcctgcaaatgcaaagagtgcaaatgcacctcctgtaagaagagtgagtgcagggccttccctgcgaatctgggggatgggccaagttagagcagggaacccagagn

SEQ ID NO: 11185 - DNA, 471 bp, Homo sapiens
  misc_feature (1)...(471): n = A,T,C or G
ntttgatcgagatcactaggccanngcgtggaattcttgacgtttgcggtcccagctactctggaggctgaggggggaggattgcttgagtctgggaggcacaagttgcagtaagccgagatcatgccactgcacaagctaggtgacagaatgagactctgtctcaaaaataattaaaaagcctctgccccaaactcgttaaaagattttataaccacaactgctgtttctgtgtagatgcatctgcatgcccaggagcagtaaatgcaataaaatcatttggttatactttgaacacaaaataaacgggtgaggcttttactttctaaatagtttgtctcttgtatcaacatagctggaaaagggagaaatccgatttttaaggccaagggaggggaaaattccaagtagaagccaggctctctgtacacgtttaccccacctacctgtgtgctcctacctgtgctgagg

SEQ ID NO: 11186 - DNA, 580 bp, Homo sapiens
  misc_feature (1)...(580): n = A,T,C or G
nttagaacccccttcgaacactattccgagtgggcgaattcatgggctttccaacattcccatcatcttttttcttgctgtgaagtatatcaatcaatcaagacctatgctgtcactttatacaaccctttgcctgaagcttctattatctgctttatgcttgtgactttgtccatggctgtaacgagtaattgactttattccatagcagatgttgtacatgattctggcctgttgggttgcaaaccaagaagccagataatattcttagtgatttttaaaatatgggtctatatacaagaattaaccatgtttcttttcagacttttctaactagaaggtaactaaatgcaggcattctaattgtaagccccaccaggaccatgtggaagggtagttttctaaaagaaatgtccagaactattagcagaagggagaaaacacaccgtgcagatcatacaattgtcccccataactctatatatttatatatttcttgagctcaggaaagttttctatatttaaacactgcttcttttccattttatgtttgtatatctggattggttggcttccatcn

SEQ ID NO: 11187 - DNA, 484 bp, Homo sapiens
  misc_feature (1)...(484): n = A,T,C or G
cgccccccccccctccctttgtggatcactattcagtgcggtggaattcggtaacagtattggggccagatccctaagccccccagctgtaaataggctgtggccagtgcctggtcatcagaagagggaggaggagcccacgcgtctgtttatgtatttatttatttatttattatacctattaataaaaaaggtgctcagcctaaaaaaaaaaaaaaaaaataaaaaggaccaaaaaaaaaaaaaaaaaaaaaaaataagattaaaaaaaaaaaaaaaaaaaaaaaaaaaaaaaaaaatnntgcccccccccttttaaaaaagggggcccaaaaacccccgtgaaaccccggggtttttttttttttgcccccccttttttgggtccccctcctccccccttttttttttggggggggggggcccccccccttttttttttttaaaaaaaaaaaaaaaattttcctccttttttgaaggggga

SEQ ID NO: 11188 - DNA, 457 bp, Homo sapiens
  misc_feature (1)...(457): n = A,T,C or G
atttgacgttgactagcactagnggaggaattcggataacgccggccttcagtgagtgcagccagggatgctgcacactgcagggctcgggactgtccccatcccccacaacagggacctccctggtccgaagcatcagcagtgccactacggagaggctgtgggttcaatcccggaatcctgctgtttttgtgggtcaaaacgataaaataccagcagtgtcataggattcgacctaatacatgttgaatcttgatcaatgttagctattattggaaaatttggctttctctttcaaaaacgtttataaataactttccctaaaaccatatgatggttctcccctttcagtgtctcctttctattcggagcggctgaaggaggctcatgtcagactgtacccatccagccgctgcacatcacaacatttacttaacagaacagtcaccgacaacan

SEQ ID NO: 11189 - DNA, 576 bp, Homo sapiens
  misc_feature (1)...(576): n = A,T,C or G
nttcgaacaccacttagagggcgaattccacacctgtggctaanaattttattttctatcctttacccgtcattatcattagttgctatgattctttctgcattttcggttaactatcatttccaaagacttgtcattcagtaatattagcagatagctgcttcgataaaggaatttggagtttaaaaatcaacttgtgaaaacaaggttgtttttgtctttatcttttgttagagttatagatttatgatttcataggcttgattctatgtgaaatatctttttacttttatgcattttaataagatttaaaaatatttagattaaagccccctttaatgagtacaagaaaaactcttggcttgttagaagaaagtatattctttctagaatttggtgcaggaatatgtgttcatatccaggcaaacgggtgtgtttttatcttcagacaatgaaaccttctcctctggngctntgttgccaggaagattagaactaaatntattnttttcatttctgtcatgaaatcattccagatacctcttttcttctttccaaatgggtttcacatgtgtn

SEQ ID NO: 11190 - DNA, 471 bp, Homo sapiens
  misc_feature (1)...(471): n = A,T,C or G
ttggggctttaatcgatagcatacgatagngcggngcaattcgataaatttaatcaaattacaatgttaaataatcgcattgtgagaaatattgtctttcagtgaattagttactttttcagattcacacatatttttgaattcttcagcatggtgttgttaccactgtaaacttttcagtggctgctttttaagaaaatgtctgaaaaatttaaaaagaccacatacaatttttaaaacaaaacaattaaagttagttatgatagcttaggcaaaattttgaatgcaaactcaaccagaattactgaaacatcttagggtatcttgaacttaacacatttgttctgttgtgtgaggatcactaaagtggtgaattattgtgctgattgtaaatctgttatagcaagaccccctagttaattttagaaaaagataactggaaccttcaggtgaaatgtatatggggaaatg

SEQ ID NO: 11191 - DNA, 470 bp, Homo sapiens
  misc_feature (1)...(470): n = A,T,C or G
atcgagaccattanccaattgtagaccctagtccgtgcggtggaattcggccggatgacctgtcctgacacctgctaacatctcagcaggacccgtagggaagggaattctgcctccttctccttcagtcatctcagaattgaacactgcgcaggactcagtgacatcctgcaaccagagatacagatattctcccaggaacacccagacctacagctgaagccaggatgtcttagtggaagggaccaagagccaaggagacttcagcctcctggttacttcctccctgcagcctgggtgcactgcagactcaggcgcagtggccattagtgctgtctcttggacccgcacctgaccgtgtcttaactacaacaaccttcaaaggcttaggtccagggagaggtcagttactcagatcatcctgaacatgtcccttctcccgagaaggacacatcataaaacatgtggcc

SEQ ID NO: 11192 - DNA, 447 bp, Homo sapiens
aataagaacttgtatgaccttagacagtgcggtggaattcggctctcagtaccctaaaataaactagattgtgttgctattttttttctttctctataaaaataacacattattttatccgttatttgaaattttacatttctggttaccaaagttcattctgatagcatgtactttgtgaattattatctttgtctataactgacagatgtttatattaaaataaaatattgtattaaaaatttaaaataggtattttggatagatatgtgtctgtagtatataatctaatgtgtccatagtattattgctaatcttttggtttactataagatgatataactattttttcattgggaatatacatttttcttaatgttccaacatctatactttgtaaagtcaaaacatttcccatgagctgtagttattcatccttctgtacaa

SEQ ID NO: 11193 - DNA, 490 bp, Homo sapiens
  misc_feature (1)...(490): n = A,T,C or G
catcgagcnccntngaaatgagtancattaggacagngcggnggaattcgtcacaattagtgaaccacagaggagcccatgggggtggcagatggtggagggggatttgcctgcactgaacaatggaggagcaatatatacacacattatatgtgaaagatgatgggggattttgggaaggaatattgcttcttgcactgtgtgtgacttctagacatagtgtgcacctcgagggaccacagttatttttagctggggagaaaatccacggggtgctgggagagtcagggcaggaggaagtttatactccccatctccagaagaaggtggactgccgctcatctctggtacgcggggtccttttgtagtcgagttattgcttggagtcagggaagagcattcacaggtctggagtaggactgtcgcaactccttagatgtccagtgaggtcacaggaaaccctccctagatactgcagttcctgccagaa

SEQ ID NO: 11194 - DNA, 483 bp, Homo sapiens
  misc_feature (1)...(483): n = A,T,C or G
gggctgccncaaactgagaccatttgaagngcggtggaantccctccccctcctcccttatcccttcgctttcgctcttttccgtcgaggccgacccctgagttgtgagtctggggtctggttggtgaaaaagagcccttgaagctggaagacgggagaggacaaaagcatgtcttcccttcctgggtgcattggtttggatgcagcaacagctacagtggagtctgaagagattgcagagctgcaacaggcagtggttgaggaactgggtatctctatggaggaacttcggcatttcatcgatgaggaactggagaagatggattgtgtacagcaacgcaagaagcagctagcagagttagagacatgggtaatacagaaagaatctgaggtggctcacgttgaccaactctttgatgatgcatccagggcagtgactaattgtgagtctttggtgaaggacttctactccaagctgggact

SEQ ID NO: 11195 - DNA, 467 bp, Homo sapiens
  misc_feature (1)...(467): n = A,T,C or G
natcgagatccctagtccagtcggtggcattcctaggttgcaggctcctcaatgcctgaggatctgaggcggaacagtttcatcccaaagccatcctaccacccactaccccgcacttcctgggtccctgcaaaaattgtcttccatgaaaccagtccctggtgccagaaaagttggggactgctggtatagataacagaccattagcattttctcctttatatgaaacatttattatttgatttatttatgtctattttgctctgtggcttggacccagaaacacttgtataataggtgaaatgaacaaagaatgagctgccagaacatctgagagctgtaaagtttaaattatttggacccaaagaagcatagtctgacgttgttcagttcacacaaaattttgtctgaaaagccaacttttttctttcccttttaaattatgctgaacatttagggccagtatg

SEQ ID NO: 11196 - DNA, 472 bp, Homo sapiens
  misc_feature (1)...(472): n = A,T,C or G
caggttaacaaacaactgagaccnctcggaagttgcgtggcactccagctactcaggactctgagatgggaggatcattttagctcaagaggttaggactgccgtgagatgtgttcgagttactgtattccagcctgggtaacagagagagagagaccctttcttaaaaacaaaaaaacagttttctaaagtcatcaggaaactttttagatgagtcattcagtgatttagttttggtggctgttctttttattttctccctattctgaaactcactttcctaacttctttagtgtgcattttaatagaactttccaaaattctgttcgtacgctatactctcctggttcttaattttctgacagttttggcatttctatctttgtctccatggtctgtaggtaccacaaagactttgtctttatcctttggcttttactggcctgagtctctttcaaaagtcacatacttn

SEQ ID NO: 11197 - DNA, 503 bp, Homo sapiens
  misc_feature (1)...(503): n = A,T,C or G
gagggcnnnnnnataaatgacactctaggaagcgncgnggaattcgagatagggtgtcaggggtagcttcctgaagttggtgatgccctatctgagctattatttctatgttagaaagaagcaggggagggactatgagggcatttggagtagaggagaccacatgagtaaagaccaaaaagtcagaatggcctagtgtaagacgtatgcaggggtatatgtagtgctttgtgtacgaagtagaaattccaaggcagtagcagcagaaagtgaatctggagaacctccctgtgtgcagtgttaacaagctgagatttacaggagagacattatgatctgattcaccctttaaagtctgtggaggatgactgggggtggaagggcagaataaatgcatctcggaggctgtgggagtagctcaagtgtggaaaaaggtggtgctttggactatgatggtgaatagtggatttggaatatattttggagttagaggcaacagggtt

SEQ ID NO: 11198 - DNA, 490 bp, Homo sapiens
  misc_feature (1)...(490): n = A,T,C or G
catcgacccccctggaatggagantcttaggccagngcggnggaattcattttgacttgtctttttaaatgctttatctttttctttaaagatttatttcaataaaactaattgggaccacccgtatttcagtaggacctgggtagggattggaagtacttggcagggcagcagcaatcttgctgtgtttgatataacatgcatccttgggcaggttgcccttaaatcttacactgtggtgaagggatgttttttttgtaatgctgcagtagagttggagtacttagttctcttgttgtccagtatatctaataagtgtttttcatattatttccacgtaagggaaataaggtagtacttttctttttatatttctatgcttaaaattctctttcctagtcaaaaattgcccaaatctgtgtttgctttctgcttgctacaatttgctcccttacttttcttgagctaaagacaggctttttccaccggg

SEQ ID NO: 11199 - DNA, 477 bp, Homo sapiens
tccccattggagacccctgtccagtgtagaggcattccttgtaggcaaaataaaaatcaagggcactacataacctctctggtaactccttgacattcttcagattaacttcaggatttatttgtatttcacatattacaatttgtcacattgttggtgtgcactttgtgggttcttcctgcatattaacttgtttgtaagaaaggaaatctgtgctgcttcagtaagacttaattgtaaaaccatataacttgagatttaagtctttgggttttgttttaataaaacagcatgttttcaggtagagcttaaactaaatgatgtgtttacttagtgcagtttctggttatgaatattatattgctatgtgtatattatatggactctttaaaatgattgacagattggcaaattcttaaatctttgtacattggtgagtcatatgttcttagagttaaatttgtctcagataagaag

SEQ ID NO: 11200 - DNA, 480 bp, Homo sapiens
  misc_feature (1)...(480): n = A,T,C or G
ctcccaatagaganccntagtcagtttggnggcattcggaatatggcagattggatttatatcaagcacctatatactttatggcagaaattatgctaaatcctaagaatgaaacaataatgaaggcaaagctattccctgccaaaaggaacttagagtttaacgaacaaagcaaacggatgaacagaccaaaataagctaaaaggacaaaagaacttaataatccagcaattgcaagcttaggacaaagtccaaccacatcccctaaatggccaagggacagtggtgataacatggagaaagacacccttaagtggaatttcaagaaactagtatctgtgattttataaagttgattccactatcatgaggagaatacaacctctggaaggctttcctacactgtggactgtattgtgctgacttgttgcctgtctcttctcagtttctcttaatgtcaataatccacgaatggcagan

SEQ ID NO: 11201 - DNA, 471 bp, Homo sapiens
  misc_feature (1)...(471): n = A,T,C or G
tggcgcctnnnttttgatgacgtcataggccangcggnggaattcgngtcgccagcgcccgcgaggccctggaccacatggtggaatatgtggcccataacacacctgtcacgtggctcgtgggaccctttgcccctggaatcactgagaaagccccggaggagaagaagtagggggagaggagaggactcagcgggccccgtctctataatgcagctgtgctctggagtcctcaacccggggctcatttcaaacttattttctagccactcctcccagctcttctgtgctgtccacttgggaagctaaggctctcaaaacgggcatcacccagttgacccatctctcagcctctctgagcttggaagaagcctgttctgagcctcaccctatcagtcagtagagagagatgtccagaaaaaatatctttcaggaaagttctcccctgcagaatttttttccttgttaaat

SEQ ID NO: 11202 - DNA, 563 bp, Homo sapiens
  misc_feature (1)...(563): n = A,T,C or G
natcgagaccattgagaggcggcaanacgngcctgtagtcccagctactctgaaggctgaggcagaatcacttgaacccaggaggcggaggttgcagtgagccaagatcacgccactgcactccagcctgggtgacagactgagactctgtctcaaaaaaatagataaataaaaataaaataataaaaggaggatggtagggtgggggcagtttagttcccaatggatatttctggtttttgcagaaaaagtaagaaagggaagtgggatggtttacctctttgtcaggaaagttaggtaactattagtaaaaaacaattatacactttaaaatcctgcaattattttacagaaagcactaaaactgcatgcatgggaagatcactccatttcagatgtatttgttacacagtatcttgtttatgctgtgcttagtaggcatggttgaattcaataaaagcacacgtgaatgcattntatttaagacactatggctaataccactgtttacataataaactggcgtatctatgtgagagactcaagtttggaaattctgtgcn

SEQ ID NO: 11203 - DNA, 504 bp, Homo sapiens
  misc_feature (1)...(504): n = A,T,C or G
gaggctcnnnnnnactaagacantcgtaagngacgngcaanncggcagcctggttttcttagtgtgcatggcttcagctgtccgtcatagttgtcatctggttatgttcacccctttccactccttcaccctggccaaaaggaaaatatttccactgtaggtgctgtaagaacactagactttagatcatcacaatctactgtatttgttaatggacagggagtgtgtccggatggagcctggtgccttcccctcggccttgcagagggctccagcccactgcctctgtggtagccgctggctctcagaagtagcacgtgggcaggagtctctcctctgatccaggagcattggcagatggagttttgcccttgttgcccaggctggagtgcaatggcatgatctcagctcactgcaacctctgcctcccgggttcaagcgattctcctgcctcagcctgctgggtagctgggattacaggcatctgccaccacgcccggctan

SEQ ID NO: 11204 - DNA, 578 bp, Homo sapiens
  misc_feature (1)...(578): n = A,T,C or G
cgccccgcgnnnnnnaatcgatcacattgcagggcggcaagncgncagattcacaggacgctaagatagacttcgagagttgtggatcaagaggaaactctgacatgatgattcctaattcagatagatttccatcattatccagtgctgccagataatctaagtcttccaatgcctgcatcaaactttctggtgctaggaaaggaaaaaaataataatttaagagtctcatatggctaagatggagaaacaggtactggacttttccctcctgcatgaaacaagcaaacaatggacaaaatatgtgaaacaacggtttgcaagccaccaaataccagggagtgaaggatagtgattcttgagagggcaaactcaggaggggagccctgtgattgtccagctcatgctccgaggagggtcccagctgcagtgtgcatgcggngggaacccaggtggagcctgccagcctccctgcagtaggaaaacaatgccagggatccagggagactaaggtggccggaactcgcggcacagtactggagagagacacacagatctaagtcggnggccagagggag

SEQ ID NO: 11205 - DNA, 450 bp, Homo sapiens
  misc_feature (1)...(450): n = A,T,C or G
natcgagttcgattacccgnngcggggaattccgaanagaaaaaccaggatcaacttgcctacacttgtttaaagcaccagatcttcttgagtgaaggtttagtggctgtagacacagccatcatcatattacactttccaggtgacttagaatgagaggccatgagaaggctgtgcagctggacacattctatacttggaatgatagaatctttgtggcctttaattaaaatatttcaattgtgatacctaaagtatttgtaacagtgcatctttgagggtgtgttctgctctctcctttgaagttttttaggcagaagcaaaatatgggatccagctattcttctaaaataacctacttttggcagggaggatgaggccggaggattgcttgaggccaggaatttgagaccaacctagacaatatagcaagaccccatctctaaaaan

SEQ ID NO: 11206 - DNA, 489 bp, Homo sapiens
  misc_feature (1)...(489): n = A,T,C or G
catgaccnccnntngaattgagatctctaggcagngcgnggaattccaatgtggaccttggaacactggaaggagatggaatgaacatagaaggagaggagctgatgccaagtctgcaggaagctttgagttctgacatccttaatgacatggagtctgttttggctgccaccaagctagataaagaaagctttcttacatggttatagagccctcaggcagactgaattctaaatctgtgaaggatctaaggagacacatgcaccggaaatttccataagccagttgcagttttcaggctaatacagaaaaagatgaacaaacgtccagcaagatactttaatcctctattttgctcttccttgtccattgctgctgttaatgtattgctgacctctttcacagttggctctaaagaatcaaaagagaaaaactttttatttcttttgctattaaaactactgttcattntgggggctggnggaagtg

SEQ ID NO: 11207 - DNA, 450 bp, Homo sapiens
  misc_feature (1)...(450): n = A,T,C or G
atcgaattcgagacactagnccangcggtggaattcgtttctttggcacttctaaataacacaattttgagacattaatcacttggattctactttaattcgatgaatgatttcaaggttaacctgatgtctcaaaattaaagctacagctcctgttctacaaacttggttttactgtagcaaaatagaactatcaacaaacaagagatgtgtgcaatgaaaagtttttaaaagaattgtctagattcagtagaggagagaaataatagggcctattttcatttcctttaccctggtctaacttgtaaaaggatttccctacctgtgtcactggtcatgattgcaagttgtccaggttcttggcgttttgaacaaagaattggacaaaacgcccagcaaagcaaagaatggagcaacaaaagaacaaaagcagggatttattgaaaatga

SEQ ID NO: 11208 - DNA, 449 bp, Homo sapiens
  misc_feature (1)...(449): n = A,T,C or G
cttcgagttcgctancncgngcggnggaattcctgagatagcatctttattatggaacctttggtcctcatacttaatgaatgggcgtatttcctttgtttttaaatgaatgggctccttccctataattgacttcatctcttaaaaaatcaagttttacaaggcagaactgggaaaaaatctctactgaaccctctaaagggtcctaggtttcgtggcaggatcactatgggtaattaagaggctgcttgtgattttatctaaccattatttacagttttcctctggtgactcatgtgacttaaataattgcacaaaatgctacttaaacagaagatactaagtagtgtgacaaatagcacactaattgagcctcctgattgttctgccatgcatgaaggaagggtgatgatctaaagtcagcacctcatttaggaatggccatgtgg

SEQ ID NO: 11209 - DNA, 465 bp, Homo sapiens
  misc_feature (1)...(465): n = A,T,C or G
attgtgcccatnagnnnattgacgaccattagaccgtgtggtggaattcggctggggcaggagaatcacttgaacccaggaggtggagttgcaggtagccaagattgtgccagtgcactccagcctgggcaacagaatgagactccgtgtcaaaaaaaaaaaaaaaaaaaaaaggggggttaatttttaagggaccaaaaaaatcacttggaaatctgcccccggttaaaaaatatttggccgggcccaaaaaaaggaaccacctcccctaggttccttttaaaatttttaatggttttttaaggggggcgggggatttatttgaaaaatttttttgaggcggggggggaagaaaaagggggggggtttttaattttttaaaaaaaccctgggtttcttttttgggggggggacctcggcctttgggtcaattggttttttttggcaaaaaaaccatcttatttg

SEQ ID NO: 11210 - DNA, 488 bp, Homo sapiens
  misc_feature (1)...(488): n = A,T,C or G
taataggacccttggaannnccctatagtagatcttggaaagngcggcggaattaccaagaaaaagtttatacgatctatcaagtcacacgttttgaactctttactcacccaatattcacctcccagcccccaccatgggttgtacatgctgaacacagaaatgtgtttaagagaggtttagacacgatggatgatggattaaaaacaggatgtgcttgaacccggaaggcggaggttgcagtgagccaagatcacgccactgcactccagcctgggcgacagggcaagattccatctcatacaaacaaacaaacaaacaaaaaacaggatgtactactattttgatgtctacaacatctaggaccgccaaaaaaaaaacacctggagctggagggagggggtcactgtgctgaacgagtacagcacttttggtgtattcacacagtcccacgattattatcatctatgtgggaaaacgagaggggg

SEQ ID NO: 11211 - DNA, 564 bp, Homo sapiens
  misc_feature (1)...(564): n = A,T,C or G
naatcgagcacatcgagngncgcggaattcgggtgagagaggtaatctggggcaatccactgccaggtgaaatctggggaccccaggtccgcgtggagggtgtcggggaggagaaggggagtgcgatggggccgatatttcgggggagagcgggaaaacggggttcgctgccagcccccgcgccgtgttaacgccgaggactgtttcccgcaggtcctggtccgcgccagagcccagcgcgcctcgtcgccatgcctcggaaaattgaggaaatcaaggacttcctgctcacagcccgacgaaaggatgccaaatctgtcaagatcaagaaaaataaggacaacgtgaagtttaaagttcgatgcagcagatacctttacaccctggtcatcactgacaaagagaaggcagagaaactgaggcagtccctgccccccggtttggcagtgaaggaactgaaatgaaccagacacactgattggaactgattatattanaatactaaaaatcctagaaaaaannnnnnnnnnnnnnnnnnnnnnnnnnaaaaaaaaaaaacggccg

SEQ ID NO: 11212 - DNA, 475 bp, Homo sapiens
  misc_feature (1)...(475): n = A,T,C or G
cccgcccccnnnnnnnttagagnatagatgaacattagcccagagcggtggaattctgggattataggcgcccgccaccactcccagctaatttttgtatttttagtagagatggggtttcaccatgttggacaggctgatcttgaactcctgacctcaggtgatccacccgcctcggtctcccaaaatgctaggattacaggtgtgagccaccatgcccagcagtttctatgtatgaaacagtatctgtcgcatagtaggcgttcggtgcatattagttgctatttgcattattgttattatcattgtcaatggacagcccaactgctttgtcacattgggacctcaaggtgttaaagttggcagggacagtcaagatctctctgttgcatttcttcacattgtgaatgagaaagctaaagcccagagtggttgggggacctgctttcggccccccagtgaagtagtgacagag

SEQ ID NO: 11213 - DNA, 564 bp, Homo sapiens
  misc_feature (1)...(564): n = A,T,C or G
nattgagcccatcgaacactatccgngnggngcaattccaggatgtgctgctggtcactttcaatcacttggataccatcaagggattcatccgagactccccaaccatcctgcagcaagtggacgagactttgcggcagctgacagaaatatatggtggtctctctgcaggggagttccagctgatccggcagacactcctcatcttcttccaagacctgcacatccgagtatccatgtttctaaaggacaaagttcagaataataacggtcgctttgtgttgccggtgtccgggcctgttccttggggaactgaagttccaggactcatcagaatgttcaacaacaaaggtgaagaagtgaagaggatagaattcaagcatggtggaaactatgtccctgcacccaaagaaggttcttttgaactttatggagaccgagtcctgaaactgggaactaacatgtacagcgtgaatcagcctgtggaaactcatgtgtctggatcatcaaagaacttagcctcatggacccaggaaagcatggctccaaaccctcttgctaaag

SEQ ID NO: 11214 - DNA, 471 bp, Homo sapiens
  misc_feature (1)...(471): n = A,T,C or G
aggnggaaatgagcccattgnnaatgaggaccttagtccatgtggtggaattcgctagaaggcaggggaccttggcatgtggctggccacaccaagcaggaagcacaaactcccccaagctgactcatcctaactaacagtcacgccgtgggatgtctctgtccacattaaactaacagcattaatgcagtcagcctctggttctttgtgccacatgagtacctgcaaattccctggaacgtctttctttccttccctccttcacatgaagtgacgagctcacagctgtggagcttgaccacactgtgccccatacgatgtgcacggaattgactcctgctacaccaaaaccagataatttaataaactttattcttgttgggggaagagggagggaaaaaaagccacctactccactcaataaattaacacatggccaattcccaggccctaaacaaaaaaaaaaaaaan

SEQ ID NO: 11215 - DNA, 468 bp, Homo sapiens
  misc_feature (1)...(468): n = A,T,C or G
gaattcnncctgagatcatattgagtgccgtggaattnancaattccggacacacttggactcgacagactctaaggtgaaagattggtttagttcatgagttggggttttgtgataactgacattgtgaaaaacgggggatttaacatagattttcacagtggctttagacatttcataaatatttcttaaatgcctcctaaatgctaggatttggcaatacaaggctaaacaaaatacaaagccaaatcctactgtaacgggagtatgtaaagtgtttctgttaatggaaaaagtgctgtgtgaggatgggggttaagtgactggactgtttgtgttctgagctttctaggactgatctgattacgctgtaaacactccgccagatactgtgtaggcccagcccttgtgcttgagggggccactgtgaggtggcgaaacagacaagagattattagaatacagaan

SEQ ID NO: 11216 - DNA, 447 bp, Homo sapiens
  misc_feature (1)...(447): n = A,T,C or G
cactgagacanatagataccgtcggaannccgagncctgagaaaaggagtcgacaaaaataattaagaacgtacaaggtctaaacatagtaaggtagatctaagcagattatactgacctctgtaccctaaaaacaaagaatgcctcattaattcaaaaaagcagtcgtataaacagtattctttgatctcaatgcattaaagcagaaataaattacaaaatcagaaaacaagctcctacatgaaaactttaaaatactaatttttgaatcaaagagcgaaatcaaaatttcagaatatttagaaaacctgcaaatactgcatatatatcagcgcctttgtactgtctttcagaaaaagctttataacctcaaatattaagcaagaaagaatgaaaataagtgaattaagaatctaactcaaggagttgaagaatgaacaataaaat

SEQ ID NO: 11217 - DNA, 560 bp, Homo sapiens
  misc_feature (1)...(560): n = A,T,C or G
naatcgatncacatccgagngncgngcaagnctgacgacctacgcacacgagaacatgcctctcgcaaaggatcatgcttcatccctctccagaacaggagaataggatacacactaagaaacgcctggagcatagccccaattcctacttcatggatgtgaaatgcccaggatgctataaaatcaccacggtctttagccatgcacaaacggtagttttgtgtgttggctgctccactgtcctctgccagcctacaggaggaaaagcaaggcttacagaaggatgttccttcaggaggaagcagcactaaaagcactctgagtcaagatgagtgggaaaccatctcaataaacacattttggataccccaagcaaacaaagcaaaaaaattttttttaaaaaaaatttggcgggggggttttatattaaaggggggttaaaaaacctttaggagaatcgccgggggttttttttaacacccaggggtgtggcccacccccgcgggtatatttgttttgggggggggcctctctccctcttaaaataaagggggggaggn

SEQ ID NO: 11218 - DNA, 477 bp, Homo sapiens
  misc_feature (1)...(477): n = A,T,C or G
natgagaccctggcagngcgggtgataacatcggaagnntatacaatttaccaggcaacaagtaaagaactctttactcacccatctgccacctcccagcccccattaggggttgtacatgctgaacacagaaatgtgtttaagagaggtttagacacgatggatgatggattaaaaacaggatgtgcttgaacccggaaggcggaggttgcagtgagccaagatcacgccactgcactccagcctgggcgacagggcaagattccatctcatacaaacaaacaaacaaacaaaaaacaggatgtactactattttgatgtctacaacatctaggaccgccaaaaaaaaaacacctggagctggagggagggtgtcactgtgctgaacgagtacagcacttctggtgtattcacacagtcccacgaatattatcatcaatgtgggaaaacgagagggggaaggctgccaccgacaca

SEQ ID NO: 11219 - DNA, 440 bp, Homo sapiens
atcgagattagtagaccatgcggtggaattcctccggaaaggcgtttgggatgccaacgatgaggctgctgtcatttgtggtgttggctctatttgctgtcactcaagcagaggaaggagccaggcttttggcttccaaatcactgctgaacagatacgccgtggagggacgagacctgaccttgcagtacaacatctacaatgttggctcaagtgctgcattagacgtggaactatctgatgattccttccctccagaagactttggcattgtgtctggaatgctcaatgtcaaatgggaccggattgcccctgctagcaatgtctcccacactgtggtcctgcgccctctcaaggctggttatttcaacttcacctcggcaacaattacttacctggcccaggaggatgggcccgttgtgattggctctaccagtgca

SEQ ID NO: 11220 - DNA, 445 bp, Homo sapiens
  misc_feature (1)...(445): n = A,T,C or G
aatagagacctcgagnacaattagtccatgcggtggaattcgaacatctgattcttccagccatgtttcccagtctgaagaacaagcacagattgatgctgaaatggactctactcctgttggctatcagtacggccaaggatctgatgtcacatccaaaagctttccagatgatctgcctcggatgcgattcaagtgcccgtactgcacacatgtggtgaagcggaaggcagacctaaagcgccaccttcgttgtcatacaggagaaaggccctatccatgtcaagcttgtggaaaaagatttagcaggctagaccatctaagtagccattttcgaacaattcaccaggcatgtaaactcatctgcagaaaatgtaaacgtcatgtgacagatctaacagggcaagcggtacaggagggaaccaggcgctacagactgtgtaat

SEQ ID NO: 11221 - DNA, 461 bp, Homo sapiens
  misc_feature (1)...(461): n = A,T,C or G
gaaaactgagacattggaannactgagaccctcgtacangcggnggaattctcattaaatactctttgtaaacaagatatttaatggttgttctaaactatgatggaattatacttcactgaatatttaagtttccaaaatttgaggttacagtgaggtgaagattttggtgaacatctatatatacttagtacctctattaagtttctagaagtaaaaaggagtgaacgtttaacatttttacaacgttgtacttgatatcccctgccaatataatactttggccttccactagaaacatgagaatgttttttccttgagtcctaacaaaccttagtcttttctgtcactattttaggtgagattaaacatttttcacagcattctgtttatgccttttcaacatttttgtcacagactatctcagattaacacttttgtacctttccatatcaataact

SEQ ID NO: 11222 - DNA, 503 bp, Homo sapiens
  misc_feature (1)...(503): n = A,T,C or G
aggggtnnnnnnaactgaggacatccgcagngncgnggaattccgaggcccgcatcgtgttcatgaccaccaaccacgttgacaggctggaccctgccctgatacgcccggggcgagtggacctgaaggagtacgtgggctactgctcacactggcagctgacccagatgttccagaggttctatccagggcaggcaccttccttagctgagaactttgcagaacatgtccttcgagctacaaaccagatcagtcctgcccaggtgcagggctacttcatgctgtataaaaatgaccctgtaggggcaattcacaatgctgagtctctgaggaggtgatcaggctgggctcagctcagctctcctcctctagctcaataaacatctgccacactannaaaaaaaaaaaaaaaaaaaaaaaaaaaaaaaaaaaaannnnnattnnnannnnnaaggccccnnnaaaccccccngaacccccagagggggccccatagacccccg

SEQ ID NO: 11223 - DNA, 481 bp, Homo sapiens
  misc_feature (1)...(481): n = A,T,C or G
atgaattgacaccntnnnnttaagtagatcctagaacanngcgnggaattcacttattagttctaaaatttaacaattatttattaaacatttgttctgtgtaaatgttggaatcaccacaacatagtcagagatactttttaagctgtcacttatattatttgactcaactaaataaataatcataacactttgaattctaaccaagttatttaattataagtttttcctataagccatttcacaaatttctgtgtttcattggattgtggacaaaataaatactgactacttagagctggaatgaggcacaagctttgctattttgacaagtcacacctaacagtactctacaatcctattttaagtgaagtgaggacaatctttttgcactcatattttttagagtgatatagataaaacaagaccagagaattaaagggaatatgtagaatttagcacatgtgacagtcaacatctt

SEQ ID NO: 11224 - DNA, 442 bp, Homo sapiens
atagtagattagtagaccattaggccgtgcggtggaattccggcgtttcaccgcgttagccaggatggtctcgatctcgtgaccttgtgatccacccgcctcggcctcccaaagtgctgggattacaggcgtgagccaccgcgcctggccgggggggggcttatttatctctagatccctaaggttttagcaagagacatttagtactcatctttctcctaaattgcttgtacttttgcttttcctgttagcttttaaatctgaggattctagccattgattcattagaggtccaggacagaatactgactgctgctgccttgcgccattttacctccattgaagggggtaagaaagcctcaggtaagactctctatttgttgtgttcttaccttttcacaacttctaatgggactacagtctctgaactttaacattctgc

SEQ ID NO: 11225 - DNA, 444 bp, Homo sapiens
atagagatttgtagaccatgcggaggaattccagtcttacactgccggagtcataggaaaggaaaggaaaggaaaggaaaggaaaggaaaggaaaggaaaggaaaggaaaggaaaggaaaaaggaaaggaaaggaaaggaaaggaaaggaaaggaaaggaaaggaaaggaaaatagaagggaatcaccaagcagatattgaagccaaaagaaccgcacggcaggacgcttcattagaaatgcttatagaaggacccctagtttgggtaatcccctcgggaaaaccaagtcccggtactcaaaagaagaaatagaatggggaacctcaggaggacatagcttcctcccctcaggatgactagccaccgaagaaggaaaaatacttttgcctgcagctaaccaatgaaaattacttaacacccttcaccaaatctttcacttaggg

SEQ ID NO: 11226 - DNA, 571 bp, Homo sapiens
  misc_feature (1)...(571): n = A,T,C or G
aattgagcnccatcgaaacactagtccgagnggngcaattcaggaagttatggatagccttanacaggaaacacaagggcttcagaaagaaaaagaaagtcgtgagaaagatcttatgggtttcagcaaatcggtaaatgaagcacgttcaaagatggatgtagcccagtcagaacttgatatctatctcagtcgtcataatactgcagtgtctcaattaactaaggctaaggaagctctaattgcagcttctgagactctcaaagaaaggaaagctgcaatcagagatatagaaggaaaactccctcaaactgaacaagaattaaaggagaaagaaaaagaacttcaaaaacttacacaagaagaaacaaactttaaaagtttggttcatgatctctttcaaaaagttgaagaagcaaagagctcattagcaatgaatcgaagtagggggaaagtccttgatgcaataattcaagaaaaaaaatctggcaggattccaggaatatatggaagattgggggacttaggagccattgatgaaaaatacgacgtggctatatcantcctgtgn

SEQ ID NO: 11227 - DNA, 473 bp, Homo sapiens
  misc_feature (1)...(473): n = A,T,C or G
ntatgagatcctggacgttcttggaaacctttaaanngccacngncatttcctctagtatcacttttgctgtgatgatgtgttcttgtgttttataactctttattttttgccataaaagtaaaggatgcttactccacttcgcttctctgctccaggttcactttggatgtgatctttcttttcccaacatatgccctcagaaaagtgacagtggtcccagaacctattccctttcttgagggagttcaaaacattcataggcagtaatgttcctcccagggtttccagggaaacaacatgaaaaacaggtgacatgaactacagactaaagattgcagcatttatgttagagaatgcttgaattanagaattttctgcattatctttgtctgttcactttctatcttatatacttatcagggccatactggtaagcttgtgtaggaggagttagagggaagttgaaagcct

SEQ ID NO: 11228 - DNA, 485 bp, Homo sapiens
  misc_feature (1)...(485): n = A,T,C or G
gggnaggcatggaaaccctnngaaactgaagaccataggacangcggnggaattcctgtttattatgtatttctcccatttttatattgagttttttaattattaattttataaattccatattgcaaacatcttattccaatttgtggcttttaattttatttgacatgtgttttgatacacgggagttttaaattttactgtaatttaatttatcaatattttcttttatgacatgctttttgtgtcttgtataaaaaatattttgcattctgaacttaaaaaaatgttctataaaatttattaacaaatttgattgtcttttctttttatacttaattctttaacaacagggaattgaattttgtgtgtagaagtgaggtaagaatccctttcattttcactgtatggataaccagtgtaccaactccaccaactccattgctttccaagtatcttcagcctgcctgtctcatatatcaatn

SEQ ID NO: 11229 - DNA, 439 bp, Homo sapiens
  misc_feature (1)...(439): n = A,T,C or G
ntagtagatcgtagtccatgtggtggaattcctctcttaagacgctggcctccttgctgactgcgctgcctcggagcagtccggccgaactgaccatctccgcgctcagcctggcgctgctcgtgccggtcaaggaattgaacgtgagattccgagaccggctacccacgccgatcccgggggaagtcgtcttggtgcttctggcctccgtgctctgcttcacctcttctgtggacacaagataccaagtccagatagtggggctgttgcctggaggatttccccaacccctcctccccaacctggctgagctgcccaggattctggctgactcgctgcccattgcactggttagttttgcggtgtctgcctccctggcctccatccatgcagacaagtatagctacactattgactccaaccaggagttcctggcacn

SEQ ID NO: 11230 - DNA, 478 bp, Homo sapiens
  misc_feature (1)...(478): n = A,T,C or G
gcccccaactgagacccntggcaatgagagccntcggcaaccacttgctgcatttacaccctctgcacctacatccactgcacctacaccctctgcacctacattcactgcacctacaccttctgcacttaccacttgctgcacttacatcctctgcacctacatccactgcatctacaccctctgcacctacattcactgcacctacaccctctgcacctacaccttctgcatctacatccactgtacctacaccctctgcacctacattcactgcacctacaccctctgcacctacaccttctgcgggaggaaattttggaggcagaagctctggcccctatggcggtggaggccaatactttgcaaaaccacgaaaccaaggtggctatggcggttccagcagcagcagtagctatggcagtggcagaagattttaattaggaaacaaagcttagcaggagaggagagccagaga

SEQ ID NO: 11231 - DNA, 472 bp, Homo sapiens
  misc_feature (1)...(472): n = A,T,C or G
agcgtaccnnncctgatccaactgagtaacctaggacangcggnggaattccaaagtaattttcctattgatgaaaactgaaataacccatatgagaagaatgttacttgatactctgccacccccaaacatattttctcttcaaaactgcatgtaaagtcaagggaatcttaaaattatctttcctagataaaatagtcaaagaaatgccttaccctgttctatgagagttcccatacaaaataaaactaataacatcagagaaatcttgggggtggaatgtattacttggtgctttactcatgtgacttcttaatgctaaagaaatttcttgaatttctgtgtgattgttattgctgtagacagaaaacaaagttgttgttacgcaaaatattttagcttaaaaggttagcacatactgtaagtggattatttacttattaactcactggaggtaaaaatatagaagaat

SEQ ID NO: 11232 - DNA, 484 bp, Homo sapiens
  misc_feature (1)...(484): n = A,T,C or G
atttgaacccctttnnnnnnnnctggagaccctagcccagngcggnggaattcggagggatgaggaacattagccgagactggctctgggccaacctgttggagacacagtggacaaacctttgccctttgggaggcagggcactgagtcctacacttgcctctgccacagtctgctgtgtgaccttgggtgtatcatttgacctctctgagttctcactttcttattataaagtgaacagatcaagtatgtatgcgtttaagcacttgtcatttctaaaaggatacatgaaagtatatttatctgtgtgctctggggagtgggaatggagggatacaatgaaggaaaggattttgtgtttttgtttttgttttactttttgcccttctgtaaagtttaagtttttattaatattatagttttattttaaaaagaaaccccaaataggatgtcatgtaaaagaaaagaaaaaacaagtaccaag

SEQ ID NO: 11233 - DNA, 441 bp, Homo sapiens
atagagattagtagaccttagtcagtgtggtggaattctgatggcatgcagtgatgatgtgctcttacacttgttaacatgtattaagtgttatttgcaaaaggtagattatgtaaccaatcaggtacgtaccaggcagtgatgtgctaatacactgatcaggtttagacaatgagctttggttgtgttcttgttagtcctaatattggttttcagtttggaattaataaagcagttgacattcactgttagttacagcaacatactgtgatttttaattagatagtaattcagatttattactctatgaaattctgtcttttgacaccatagtgccctttctatgattttttttacttaatattcttcttggccttatatttaattccctatgcaattaatattttatatctgcattttttttaaaaaaatagatgttat

SEQ ID NO: 11234 - DNA, 482 bp, Homo sapiens
  misc_feature (1)...(482): n = A,T,C or G
aatgaganccttcgaannnnctanagtagatcatcggacangcggnggaattnnaaatacctaatgtagatgacaggttgatgggtgcagcaaaccaccgtggcacgtgtatatctatgtaacaaacctgcatgttctgcacatgtactccagaacttaaagtataataataattaaaaaaaaaacacagagacatgggaaatggtagccaaccattcaaatgaaagaaactgtggagtatcatttaataactacaaaagcagttgtggcaggcgtaattctcaaaatggcctccaagatcccacaccctaatgcctagcatctgtgaattccataagatatcatgcccatgaatatgatagatggaacaggcgagcatataaaagaatatctggatggtcctagcctaataataagagccggttttaaagaagttttatctggctgactgcactattatgggtgagacatattaaaaggtg

SEQ ID NO: 11235 - DNA, 479 bp, Homo sapiens
  misc_feature (1)...(479): n = A,T,C or G
gggnggttaatgagaccattggaataatgaggcatcgcanaggctgccaagcccaaaagcctggggctgcctcttctggagagagagcanaagatataaatagtgggagttggaaaaggtacctttttttaatataccagagcactctgttcttcttaataaagtctgtcctccggagaaactagttaaccagagcctaatctactgaggttttatcagagcctaattgaccttagggaagaaaagtgttcaactccatctagctctagctttccacatgggagcagaacaatacccaactccagcccactctagctatcctgtcccacctaagaaggggaaaaaacatcctgagaatcacttggaatattcacattccagaggcataggttcactaaaagacagggaccaaatcataggacgatatagtacatttctcttccccccatacttcaccattacattactaaagcgctatt

SEQ ID NO: 11236 - DNA, 465 bp, Homo sapiens
  misc_feature (1)...(465): n = A,T,C or G
tggttanaaaactgagacctgaaagcctgnggaanncaacagatcaaactgaaaccgtgtcagttcagtcttcggtattggggaagggtgtaaaacatcgacccccaccaatcaaacttccctcaagctcaggaaatagttcctcaggtaactattttacaccacaacagacaagcagctttctcaaatctccaactcctcctccttcttctaagccatcaagtattcctcggaaatcatctgtggatctcaatcaagttagcatgctttctccagctgccctatcacctgccagctcatcacaaagaaccacggccacccaggtcatggcaaactctgctggacttaacttcatcaatgtagtgggctctgtttgtggggcccaggctttgatgagtggttcaaaccccatgctgggctgtaacactggtgccataactcctgcaggaatatacctgagcggcc

SEQ ID NO: 11237 - DNA, 490 bp, Homo sapiens
  misc_feature (1)...(490): n = A,T,C or G
ccgccacgccccnnttnnnnatagtagnccctnggnnnncnnnnnatgaagacccttagacagngcggnggaattcagctacttgggaagctgaggcaggagaattgcttgaacccgggaggcagaggatgcagtgagccgagattgcgccaccgcactccagcctgggtgacagagcaagactccatctcaaagaaacaaacaaaaccactttacttactgtattgtgacatgtttattaagcatgaacccctatcagtactcctaaactgtaaacagtaaggaactaaggtgtcaaaagaaacacattagggatcatattcatagacaaaaacctttacattttcttattgcatttatacaatcaacacacaataagcaaaactgaatcctttctaagcaaacatttttgcatatactgccttctctttatctttctgtgcctttatcttttgtttgactttcagcaattctgcctggatagctgtan

SEQ ID NO: 11238 - DNA, 441 bp, Homo sapiens
  misc_feature (1)...(441): n = A,T,C or G
ntggaggaccctgnntttgaggaccactatccatgtggtggaattcactggaataaggaagggctgatgactttcagaagatgaaggtaagtagaaaccgttgatgggactgagaaaccagagttaaaacctctttggagcttctgaggactcagctggaaccaacgggcacagttggcaacaccatcatgacatcacaacctgttcccaatgagaccatcatagtgctcccatcaaatgtcatcaacttctcccaagcagagaaacccgaacccaccaaccaggggcaggatagcctgaagaaacatctacacgcagaaatcaaagttattgggactatccagatcttgtgtggcatgatggtattgagcttggggatcattttggcatctgcttccttctctccaaattttacccaagtgacttctacactgttgaact

SEQ ID NO: 11239 - DNA, 442 bp, Homo sapiens
taaattggaagaccctagtctttgcggtcgaattcactggaataaggaagggctgatgactttcagaagatgaaggtaagtagaaaccgttgatgggactgagaaaccagagttaaaacctctttggagcttctgaggactcagctggaaccaacgggcacagttggcaacaccatcatgacatcacaacctgttcccaatgagaccatcatagtgctcccatcaaatgtcatcaacttctcccaagcagagaaacccgaacccaccaaccaggggcaggatagcctgaagaaacatctacacgcagaaatcaaagttattgggactatccaaatcttgtgtggcatgatggtattgagcttggggatcattttggcatctgcttccttctctccaaattttacccaagtgacttctacactgatgaactctgcttacccat

SEQ ID NO: 11240 - DNA, 477 bp, Homo sapiens
  misc_feature (1)...(477): n = A,T,C or G
gggagggcccggccggcccncttttgaaactaagatcatcgcccangcggnggaantccagaccctgtgcgggtggtatcagtgggggtgcccgtggcccatgcattggacccatcctcccaagccgcactgcagacctctgtggagctatgctgtgggacgtgagtcactcctttgtgctgcctggcccaggggccccggatccttgcccttcccttggtctttggagccatcagcccttaatgggagatgcacgctggcttctcccttctctactgtcatgccccgactttctgttcactccttcctcccacaggcacctgttacgtactggggctgtaggggacctggttatcatcggggaccgccagctttccaagggcactacccgcctgctggccgtcactggggagcaggcccagcaggcccgagagctaggccagagcctggcccaggaagtgaaagcggccactgagc

SEQ ID NO: 11241 - DNA, 474 bp, Homo sapiens
  misc_feature (1)...(474): n = A,T,C or G
gcgcganagananannaatcgatgaccatagnctgggtggccgatttcggctggagggtaaacccatgcaagggtcaagtttaatacagtgaaaatataagatgggagacctaccacagagaaccaacacttggcatgtttctgatgacagtgtttagattgcagtggttctaaaaattaagtgattttggaattggcattccatgtcattttaaaagataaatgataaagtaaatgttttattcagatctctctctccctccccacccacctttttccctccattcttctgtttttaatggggacgtttaaaatccaatctcacattaattttttcttaagtgtaaataatgggaaaacttcacttcgagagggggctcctcagtagacctccataatttcctggcttttactgccagttagtcatcaggaatagccatggctaagagagtaccaactgggcaagccagtgaa

SEQ ID NO: 11242 - DNA, 482 bp, Homo sapiens
  misc_feature (1)...(482): n = A,T,C or G
cccccgcgcccnnnntnnnnatagtagacctttgtccangcggnggtagaatcctgtatgtgtatatgtatataagatcaggtttcttccttagtaaacagaagcctgatgaagtgcccaacgttgtgttctaagaacttagagcaaaaggaaattatccaagtctcaaggaaagatgtaataatacatggaaatgaggtactcttggaaggcaaggcctgggagcaaaaggctcagaggaagaataaatctagcatttgtagggacctgtagggagactggctttgctggtgtagagggctcctggtaggataaaataaaaatatttgaaatgaaagctacagttaccctgtcagagactttgaatgctgtctaagactgtaggagtttggatatgatgatggacatattaattcactatatttctgaggagcaaatgaccaatttgagactattttaggaagaattatctgatagaataa

SEQ ID NO: 11243 - DNA, 433 bp, Homo sapiens
cctgccccacctgcccacagagaacacagtggtctcccctgtccgggggcggcttttttcttccttggagcgtccctgacggacaagtggaggcctcttgctgcggctgcaatggaggcaaggggctgcagagcccacgtgcactgtgtgatgatgggagggggctccgtcctgcaggctggaggtggcatccacactggacagcagggaggaggggagtgagggtaacatttccatttcccttcatgttatgcttcttacgatctttcagcatgctccttaaaaccccagaagccccaatttccccaagccccattctttcttggctttatctaatagactccatcttccgatccagacagccgagctcgctccggaacttgtcatctccaacgacaaaaggagcttttgccactgactcgaacgtgtcctg

SEQ ID NO: 11244 - DNA, 459 bp, Homo sapiens
ttgaaattgatgacatgagtaccgtgcggaggaactcttttgacattaaatttagttaaaactctagtcatattggttaggtgacaaaatatttgggtgatttattttttaacagtgatttgaacagataccttggcattttaggaactcaggtacagagagtcatggcaccaataaacactaataatttttgacgattaaaactctggttagccaagaaaaagagatgttcttcactcattaagggaataccaagtcagaattcatagcatctaactttccaagtctatatcctatctggtacagcaaagtattatttttcatgactaatgactgactacagtaagtactaaaacatatatctggcagtaaaagttgtctctctgatctcaccacatctttttattcttactatcacgaccttaacctactgtagtatcctttcaggtgggtttcctt

SEQ ID NO: 11245 - DNA, 486 bp, Homo sapiens
  misc_feature (1)...(486): n = A,T,C or G
gcaggcccccnnccctgataactacggcgtcgcgagaaccanaagncttcatcgctaaaagataccataattggctgaggcttcttaagctttctatgttataatttatattggccactttaaaaaatccatttcttttaaaaaaaattagggggataggatattcattagttaaaagggtaccgccattgctatttttttaacatcctctttaaaggaaatttttgttaccatacccaaaaattaaatggaaacaaaaggtcccacctaaaaaaatatatagagcattttatttttttttagggtggaaaaaaattaacctctgggagatcctttgtatcttaaggcattaccttaacacaaattaattcttatttcctctccttccaaagtttacatttttatatttaatttactatttcagatttttaaaatagtatagaaaaaagtgggagggatagagaacaaaaatactcttatacaggg

SEQ ID NO: 11246 - DNA, 460 bp, Homo sapiens
  misc_feature (1)...(460): n = A,T,C or G
atgagactttgccaggcggngattgacaccctttctctaatcaaaatataaaaattagcctggcatggtagcatgcgcctatagtcccagctgctcaggaggctgaggcatgagaatcgcttgaacctaggaggtggaggttgcattcaactgagatcataccacttcattccagcctgggtgacagagcaagactctgtctcaaaaaaaaaaaaaaaaggaaacctctgggagggactttggttaaaaaaaccccttaagaattaatccttcttttccccacagaatttttttttcttgtcaattaaaagggaccgggaggaaaaaaatccttttgggggggactagcccaccccacctttaaatcatctcccattttccttaaacattaaaattccagggcgggccccttctgggtacttaaaattttgaagaagttttttggttttccaaaaagccc

SEQ ID NO: 11247 - DNA, 510 bp, Homo sapiens
  misc_feature (1)...(510): n = A,T,C or G
ggggcagccagggcccngccncnncctagaaaactgagnagctntcngccagngngcgnggaattctacttgaggactagttattaggttcaacttgaaaacgtgtatagtaatgggtcgtatataccttggctatacaaaagggcaagatttctgtctttgcaatctcttagcaaattgcctgtgatgtgtatcacagtctcgtttaatgcttattcagtaataaaagtgttttgtctactaacgtttgtggagaggatttctgggttgggagattttggtttttaattatatttttccaacaatgcctatacccagaatgttgggatgacaaagttaaggaaagtagttacttcggagtttttaaattgttctctaaaatgatgggtaatgtttcatatgtatttcatagtgattgttaaatgcacaaactgtggttctgtgagtaaacttcttaaaatagaagttaattttctgtgaacatcaaatgttatagtatatgtaatgtca

SEQ ID NO: 11248 - DNA, 471 bp, Homo sapiens
  misc_feature (1)...(471): n = A,T,C or G
gctgcgggagncaccctgagaccatcgccaggcagcttcgnanagngcggnggaattcccatcttaccttccatcagaggagcctcaccgtacccaggaagaaagaaggtgaaagaggaatgtgaaacaggtggctgggacccagaaaccctcttaccctgcacctctgtcatacttctcccggggcatagggagagttattctgcttctctttgccttgttttgtaacatggggtagttgttggtgcagccatgttgtgctgagtgaacatatattaagatctttggaacctttaggagactgaaaataggtaagtatgaattagtatttctggaatggtattcagagaacttcgtaccatttttataaatgtgaaaggtaacctaattagaacagcttggcacttgtcagtacactactagatttcaaaatcagattctacttacagggagaaaaaaaaagcccaatat

SEQ ID NO: 11249 - DNA, 473 bp, Homo sapiens
  misc_feature (1)...(473): n = A,T,C or G
tgggttccnnnaactgagnnacattgagatcctaggaagngcggnggaattccccaaagtgctgggattgaacccttctaattttaaagaaccttgttattagaaaatctcagcctaatacaatctgaagttaagagttttagcagcattgtttttctaagtagatttagctatagattttcttctggccaaacaaggaagagtatatgcccttgtaaatgagtcttgttttgtttatttaaatagtcagtcaaaacgtagaaatcagtatacgtaaaataaaatgcatgagactattaaatcttttcatatactctacaaataaaatgaaatctgtgtgtggtcctggttgactgggcatctaaagggaatcagaaaagagattgtgaaaaggtatatatatatcctcttccttattttagttttgctttttcctattttccataattaagtgccgtttacaaagtggcatn

SEQ ID NO: 11250 - DNA, 415 bp, Homo sapiens
gctgaaacagaatttttcactttcaattctagaactatgccataaaaaaaaaggaaaatgtaaaaatgtctttatattagagcagatattttaaaagtattgcaaattcaatgataaattctaaggttaaaattggacacataaaaaatacaatatataaatatctccccagaaattattatctaatgaatagtaaaagctgactacaaaccatgtcattttaacaagggtttaaatagtaccaagattctcatcatatgctctgggatacccagtgatgtacaagggttctctctaaacatggggaggaaaaatttcaaatataaagatttgaatcttgtctttgccattcactagctgtgtgatcttgggtaagttacctggtttctctgagcttcagtgtcatctgtaaaac

SEQ ID NO: 11251 - DNA, 412 bp, Homo sapiens
cttggttgtcaatttttagaagttactccagacctctcaacaaaaaatttggtgaacctttcaatgatcatatatttaatatgtgattccacttagttgtcacatttgtggagtttttgtttttgtttttgttttttacctatagcccttgatatgttatgaaatcacaattaagaataaactataggcaacttttctatttcatgagtgcctactatgtgttaggcactatactgtgtgctttccatatgttgttttaaatgagataacaaactctggggatagttactattatttccactttccagataactgaggtacagaagggacagttaattggcccaaagtcacacagctactaattgtaaatgctggagctggggttcagaccaaggacttcctccaaaatttg

SEQ ID NO: 11252 - DNA, 471 bp, Homo sapiens
  misc_feature (1)...(471): n = A,T,C or G
catagaaatcgtgngcgtggcgagaancattgatagagggaaaggagttttcatcctgatccattcattttaaaacttgcttgatggtttcatcagccatttttgatcattgcctggatttgctgttgtatgtgaaactctaaatctatagtttcttctacatttattgctagcattccatatagttgactataacaaccatttggttaacctgaaatgcagtttttacagaagagacatgatatatgtgtattttctttcatttatcaattttaagaatgagttgattccctagttttttccaaagggaactcctgttttttttttaagtatcattatgaactcatgaatttttaacatttgatatgtttcactccattatagtcttttttgatgttcagattgtctcatctttaatcaataggagcctcttcatgttggcttctgctagtttttttttttttttttaat

SEQ ID NO: 11253 - DNA, 480 bp, Homo sapiens
  misc_feature (1)...(480): n = A,T,C or G
catagacctttntcgnnnatagacgactttagtcagngcggnggaattccttttgaaagtgttttaaaagatttcctttatcggacaggaccatctttatgacctgctttctgtttttcaatatcatacattggtgtatgtcaaagaataaattagtaaaattagtaaatgaaaaagactcttccgtacatcattatttccatgctaatgtgtgtctgtgatccagaataacttctcccactcatatcttcagttcacctaatgaaatgaatggatagcaagagccctttgttcccaggactttaaggcaaaatattaaaaattattgccaaaattaagaatataatgtttgtataaatgtccttgaatttgccatttaaattaactcattttcttttcactttgatttgaaagctgataagtatttctgcagcagatagaatattaaaatcaggttgtgtgtacacactgcactatgag

SEQ ID NO: 11254 - DNA, 463 bp, Homo sapiens
  misc_feature (1)...(463): n = A,T,C or G
gctgcggnganccaatgagacctccgctagcagctgcgnaaaacaacaatgataaattgggtggagaagcacgtggtgcaaagcatctccacacagcaggaaaaggagacaattgccaagtgcattgcggacctaaagctgctggcaaagaaggctcaagcacagccaggctggagagactcttctgtggcattcaaactgccatgttgtgaactgcctgtggagagaaccacaaagcagggaactgtagacagcctctaggacctgcaaacaggctccagctgacaaccagtaagaagccagggccctcagtcatgtaagtcacaaggaaatgagttcatccaacaaccagagggaatttggaagtatatcttctcctagtcaagcctgtgataagaacacaaccccagccaatacctggattacagcctggtgagaccttgaagcagagaaccttgataan

SEQ ID NO: 11255 - DNA, 472 bp, Homo sapiens
  misc_feature (1)...(472): n = A,T,C or G
aatggagaccntcgcacaatgcaggccatnctacaanctgncttgtgatgatacaggaaaactaattttgaaacctaggcctcatgttcaatgacaatcttcactcattgttatgggacttaaaatagcctttcttcgaataagtgatacagcaaaaagccataaaggattccttttgcggttggatatgtaaaggtcatagcagcaactgacaagaagtgtgcaatatttacctggattatcttgatgatggtgactcattatcagtgctttggtacttttgattacctgtgtttcagtattagtgtcactttagtacttcagatcctgcaaatatttttgcagatgaagtatgtatgtatgttactaagttaaacttagaaacagaacctcattcagtttttataatgtatttttgcaaactactgtaaatagcaaatcaatgccaatgttaaacaaagaggaaaacgtg

SEQ ID NO: 11256 - DNA, 503 bp, Homo sapiens
  misc_feature (1)...(503): n = A,T,C or G
gagggncnnnntttggttacctccgtagaacnngcgnggaanncgagatttaacagtgttggatgctggtgggaaatagccaagtaatttaataacatttagtttattggtgatcttattggcatggtgagcactgctgcatatgagccaaggaggtacaagcagatgagagagggagtgtataatgttctctagagggcaggagggctggaatctggagcactgatgaggagagtgagggaaggtttgagcgttagataaaaggaagggcaatttcatataatgtgtcttttaaaacattaaaaatgtttgcttacagtcacagattgtcacaatgacatcaatcatttgtcccctgggaattaatctataggtacctggttttgcagaacatattttatgtgattcacatgtctatatgcagtcttggcacacttgntttccttttgtgattattatcattaagacaagtgatgtattcaatcaaataacgttctagattg

SEQ ID NO: 11257 - DNA, 476 bp, Homo sapiens
  misc_feature (1)...(476): n = A,T,C or G
catagagatcgatgngcgtgngcaggaanccgncatagataatagcaataaatgtaaatgagaaaattttgtaggctgttggaaggtggtatatgattcaggaaatggggttagatgcagaaatggctgcactgttctaaatatgcttggataagaattgtgaaagaggagtgagcacattcattcctagcaggggattttccttggctgccagggaactctggaacccctgttcatggtgtgtacttggcttacagtctggctgaaatcctggactccagatttagctcatggctcattgctgagagttgtctgagtctaaacctcagggccctttccctgtgcccagctccccttgaccatcatcctgaggtctactcaactgtggatccagccgtcagccagagggtctacagagcactgaacactcatccacttctgccagattttctagtagttggagggaagatgctgcc

SEQ ID NO: 11258 - DNA, 474 bp, Homo sapiens
  misc_feature (1)...(474): n = A,T,C or G
gctgcgggggncccctgagaccatcgcctaggcanctancgnacagngcggnggaattcaaacctcggccgccgcggctatattcgccgcggcgtcactgccttcctggcttggtggtgagaggaagccgggccgcgaaagcttcctgaggagaaaatggagggcccttctctcacaccgacgagaaaagttcgagggggaaatacgagttcctttctgaagggacaggacggctgcttttccacagccgcgacgtgattgagaaatggtggctggcaagggtagccctgccttcgcccctccaaagtaaaaatcgggagttgagaccagaaaaaaaaaaaaaaaaaaaaaaaaaaaannnnngggggccccttcaaataaaagggcccctttaaaccccggggaaaacccccgggggggcttttaagtggccccccattgggggttggcccctccccggggctttttttgacc

SEQ ID NO: 11259 - DNA, 498 bp, Homo sapiens
  misc_feature (1)...(498): n = A,T,C or G
ccccagcacgccccgccccaatagaaaactganaacnntngcagngngcnggaattctcttattttaataaaaatttaaccaaaattgaataattggatacatttttattgttctatgtgtgtgtgaatgtataaaatgacacataaaggaataataatttaagccagaaaaaaagatgttagttaatatttgtaatgaataaaactggaaagtagttattatttgcagatgacatttttgtttatgtagataacaaaagcagtagaaagactattttaaaagtttattcaggtgggtaggcaacattttaagataataccctggattcccagtctgttgcgcacctgctgtgtaatactctcgagtgtaaaaaagtgtgtgactgtggtgggacatcactcatgaaattacgttactcatctgttgacttcgtgtttaccaaaatggagattatcctgattgtgctaaacttaatcagaagtgcttttaagagaaag

SEQ ID NO: 11260 - DNA, 467 bp, Homo sapiens
  misc_feature (1)...(467): n = A,T,C or G
atagacgccntnggnnnnttttgaggacccttagtccagtgcggtggaattcggaaggtatcgtccccagcgccatgtccctgtcccacggcctgccccctgtggcccacccgccccacgccccttctcctggccaaaccgtcaagcccgaggcggatagagaccacgccagtgaccagttgtagcccgggaggagctctccagcctcggcgcctgggcagagggcccggaaaccctcggaccagagtgtgtggaggaggcatctgtgtggtggccctggcactgcagagactggtccgggctgtcaggaggcgggagggggcagcgctgggcctcgtgtcgcttgtcgtcgtccgtcctgtgggcgctctgccctgtgtccttcgcgttcctcgttaagcagaagaagtcagtagttattctcccatgaacgttcttgtctgtgtacagtttttagaacattacan

SEQ ID NO: 11261 - DNA, 460 bp, Homo sapiens
  misc_feature (1)...(460): n = A,T,C or G
natagagaccattagnccagngtggaggacttctttagttacggccgtgtgctgggcctcagcagaggcgttagggggtctcactcagctgttggtggcactgagtgacagcatttcctccctgggagctgcagccctgctgtgaggttggctcagggctgacctccctgtgaagagtctctttttgcagatgatggatgccaaccagcgctgggatgtgcctgaggcggtggagtggatgtccaagctggccaagttcaagccattgtggattgaggagccaacctcccctgatgacattctggggcacgccaccatttccaagggtgtgtgagtatgttgaccacctgcatgagcatttcaagtatcccgtgatgatccagcgggcttcctacatgcctcccaaggatcccggctactcaacagaaatgaaggaggaatctgtaaagaacaccagtat

SEQ ID NO: 11262 - DNA, 491 bp, Homo sapiens
  misc_feature (1)...(491): n = A,T,C or G
natcgagatcgctagcccgtgtggnggaattcaattattaatttcttagaggatgtttttaaaggagctacttaattgggaaaatgttctttaaatatcagtaatagttcattaagtaacatagtagctaagaacatggactatattttcacagcatagttcagcttaggcacacctttagtttggattattggcattctcttacgtaggaattatatcattgtagatatgtaattatggtaataagcaattttcataaccatgctcactcagactatatcatttgaaactgccatgtttccatttttgacaattcatgttcacaaaacaacaggaacaatttcctatttggtataaagagcaaaatttacaactttgccccaaaatgccatgggtggcatattgccatatgattatatcatatatttaatcatgtatgggaaagattttggattttttttcttatttaaaaaagtgctaaatataagaga

SEQ ID NO: 11263 - DNA, 504 bp, Homo sapiens
  misc_feature (1)...(504): n = A,T,C or G
agtgcannaaaagaanaacatcgattccctattccagtttggtggacttcgcgacttgttttgctgcttggtagcactttaaaaaattttttgattaatgaagaaagtaaaaccataaacatttgccaaaaattcatgccccagtattagcaatgaattagttgcattggtttgagaaaggcacatattggagggaaatcttggtgtaacttaaatatttgaaaattacctttaatgcaatgcatatctgtttattctgggaaatgttttaatgccagggcctgctgagttgcttcttcttgtggagattttttttttaatctcctgagttgtataaaagttgtactgcatcttagtttactggataaatttaaaacacagtattgtagaaagctaatacaaaactatcctatgccttcaaatagtatagaaaatggaaaatatacaagtaaattctgttgaaccncnnnnaaaaaaataaaaaaaaaaaaaaaaaaaaaaaaa

SEQ ID NO: 11264 - DNA, 460 bp, Homo sapiens
  misc_feature (1)...(460): n = A,T,C or G
nggtggaaactgagacattagnaattgatggccatatgcggccttcttggctgatccatctgcctttgtggctgctgcccctgtggctgctgccaccacagctgctcctgctgctgctgcagccccagctaaggttgaagccaaggaagagtcggaggagtcggacgaggatatgggatttggtctctttgactaatcaccaaaaagcaaccaacttagccagttttatttgcaaaacaaggaaataaaggcttacttctttaaaaagttannaaaaaaaaaaaaaaaaaaaaataagaaaaaaaaaaaaaaaaaanannannnnaannnnannnnnannnnnnnnggaannnnggggnnnaagnagnnnnngnannttannnnnntttaaanngggggggggggggaagaaaaggnnccccntaaaggnttggaaaggtggacgcgctagtttaaaaaa

SEQ ID NO: 11265 - DNA, 212 bp, Homo sapiens
acttgggaagctgaggcaggagaattgcttgcactcaaaagatcaaggctgcagcgagctgcaattgtgccactgcactccaacctgggtgacggagagagatcctgcctctaaaaaatatattacagtggggaccctagtatttgaataaaaaccagtctaacttcagtgtgtgctgccctttccattatacccagtgctctcagtcacaa

SEQ ID NO: 11266 - DNA, 466 bp, Homo sapiens
  misc_feature (1)...(466): n = A,T,C or G
gttcgaaacccnctcgatgnaccattagtccagngcggtggaattcctgatgcctctgccgagggcctcaacccctacggcctcgttgccccccgtttccagcgaaagttcaaggccaagcagctcaccccacggatcctggaagcccaccagaatgtggcccagttgtcgctggcagaggcccagctgcgcttcatccaggcctggcagtccctgcccgacttcggcatctcctatgtcatggtcaggttcaagggcagcaggaaagacgagatcctgggcatcgccaacaaccgactgatccgcatcgacttggccgtgggcgacgtggtcaagacctggcgtttcagcaacatgcgccagtggaatgtcaactgggacatccggcaggtggccatcgagtttgatgaacacatcaatgtggccttcagctgcgtgtctgccagctgccgaattgtacacgagg

SEQ ID NO: 11267 - DNA, 413 bp, Homo sapiens
  misc_feature (1)...(413): n = A,T,C or G
tttttttttctgcaaactctgcctcactttaaaatgcattataacaatacctaattaaagataattttggctctgaaagttaccttattttttgttgagttagtgacttcatttttcttgccacaatataagcttttgagggatttttttaaattggggcttttaataagcaaataaatcccagggttttattttcttcagtgatacccctatagaaactcttaaatgtatttgcgcatatatatatatatattttcttatgcatgctcgatgcattttcgtcctgagaaaaatgttctctacagaaactacccgtgtgtaaaaagaagattggcttaaaatggctactgtgatgggaacagtgtcttagggagatgcagcttggacttgaggtaaattgaatactttacaan

SEQ ID NO: 11268 - DNA, 462 bp, Homo sapiens
  misc_feature (1)...(462): n = A,T,C or G
aatcgaagaccactaggccagtggagtgccattcgntacttctggggggttttgagtataactctatttggccaacttttagaaaatcttttaatttccctaaaaaagataccagtagtatctgggaaactctaaattggagaagaaaccagggatgaaactctccttgatatgatgctggtaaaagctttgcatgaagttattggccaactatatgactgctcccgggtattcttgaattcacggagacaggctagctggagaagtaaatcaaatctatagggtccagcatactatgcaaacctcaaatttcttggcccagaaaagtcagtataagtacactgcaattttttttctcaaggaccatttcatttataataaaacagatacatacttgttgatgacagggacaaaataccttaatgtatgtatgtaatatatatatatgtcacttatattttt

SEQ ID NO: 11269 - DNA, 465 bp, Homo sapiens
  misc_feature (1)...(465): n = A,T,C or G
ggcgggccggggggttattgatagagtccctaggcagngnggnggaattcctggaggcggtggaaggggccgctttctttgtgtcactggatgctgagcccgcggggctcaccagggaggacccggcagcgtcgttggatgcctacgcccatgctctgctggccggccggggccatgatcgctggtttgacaaatccttcaccctaatcgtcttctctaacgggaagctgggcctcagcgtggagcactcctgggccgactgccccatctcaggacacatgtgggagttcactctggctacagaatgctttcagctgggctactcaacagacggccactgcaaggggcacccggaccccacactaccccagccccagcggctgcaatgggaccttccagaccagatccactcctccatctctctagccctgaggggagccaagatcttgtctgagaatgtcgact

SEQ ID NO: 11270 - DNA, 458 bp, Homo sapiens
  misc_feature (1)...(458): n = A,T,C or G
gggagaaatgagaccctagaaactgagaccgatagaccgngcggtggaagtcggcctagagaaatggccccttggaaagggacagttaatgagaggcagagatggatgagaccctggtactggctgctcagcactgcacttctacacattatacttttctgtttctctcacaggtcaacagtgaccttgagactcctgtatgtagctaattataattgttatttggaattgatatcatttttctattttgagaaaatgttcacgtttctctttttttctgagacaggatctcgctctgtcccttaggctggagtgcagtggtgcaatcttagctcaccgcagccttgacctcctgggctcaagcagtcctcccaccttagcctccctggagctggcactacaggtgttgaaaagtctcctctagagctttggaaggctgaatgcactaaacatgaaga

SEQ ID NO: 11271 - DNA, 485 bp, Homo sapiens
  misc_feature (1)...(485): n = A,T,C or G
tgtgatgaaagaattttgaaaccctnnnattgatgacattagtccagtgcggtggaattcacagtcttcattgataagggcaatagaaaggccagtcagacattctactctgaaggcttaatccaacagatctgattccagagcctggtacatggagtttcccagataactttatctgcccttgccgtcgtctaatctaacctaggtagaaggagtcactttgtctcctttagactcaccttgtcattcagcacacactgcccagagcatgcagacagacttttgcacccgcatgggcacagagtcagttttcccaacaaaagtcctgatttggcactgcttttcagacagtaggagcttatggggtacccagttggcagagcctcattatgtaataagagggaaaacttttcaccctggcagtcctaaagagatgaataataattccctgtgttacttcctcatcaactccagcaggcaaatta

SEQ ID NO: 11272 - DNA, 478 bp, Homo sapiens
  misc_feature (1)...(478): n = A,T,C or G
tgtgagtnagaacctgagaccttaggactgatggccgtacgacaagacactggattctcctagttaagataaagagctttgggtgcctgacagtgaaatttgtgttatctgctttaacagttcacagcttgaaggcatgacaattaaagaacacacatggacttgtggcacatggaaatgtgcgcacagaaaaaggaaatctataattcttttaaagtaggaaggcattcttccttgccaaaatgggtacattctgttcggttatcaagtttgaaaatctacaagaattaaagagactgtgtcactggggtcccatcatagcccttggtgttatagcaatatgttctaccatggccatgattgactctgtgttgtggtattggcccttacatacaactggaggaagagtgaatttcatcatgtagataaattggactgtcatgattctttataattacttcaatgccatgtttgtcgg

SEQ ID NO: 11273 - DNA, 456 bp, Homo sapiens
  misc_feature (1)...(456): n = A,T,C or G
gggatggnccagggagctccgctagnanctactgannnncgagaagagnctactctgtgccaggctggaatgcagtggcacaatctcagcttactgcaacctccgctcctgggttcaagcaattctcccggtcagcctcccaaatagcttggattacaggcaccggccaccacgcccagctaatttttgtatttttagtagagatggggtttcaccgtgttggcctggctggtctcgaactcctgacctcagatgatccacccgtctccgcctcccaaagtgcacccggcctttccattctttcagagcaaactttgtgcctaaatttaagtccctaaatcaatttctctctgtctttctctttatatatcatattttgtgtgtctgtgtgtgtaagtagttttgaatactaatcttgtatggagcaactttgttgtcctatgtgatttagcttag

SEQ ID NO: 11274 - DNA, 471 bp, Homo sapiens
  misc_feature (1)...(471): n = A,T,C or G
ataacnccagggangcancgcctagcncnnctaggnagngngcnggaattcgactcgcgcacctgcaaggccgcctccgggctgtggcgtgggagatgatagccagaaaccaggctgagacgcagactagcattccacttagcccaaggaccagtgaggaagctgggcatcctagcgcgtagccgctaaaggaatgggcaggtagatccggaagccctgcctccatcagccacctgacgccccctcccccgccccgcagaaagccctgagatggctccgggaggccacggctgtaggtgtgttggttaaatccgagctggaggtcatcggacccgaaatgaaggtcattggaaaatcatgaggaaatcagggcctctggttatggaacaggctttttaaactagctgcctaagttagaagtactaacccttcacctcagttaaggctgggtttggcctcaggtgtaaataa

SEQ ID NO: 11275 - DNA, 505 bp, Homo sapiens
  misc_feature (1)...(505): n = A,T,C or G
nccatcggagaccactaggnaagngncgnggnnnattgtagatcactagtccgtgtggtggaattccaaagccagttgatgcggaaggaacttttttggcatgtgttaaattgtgctttaaaagacatataaagaattgggaaacatttcaggagacgatcatagcctgtataaataccagattagaacatacggatttaccatgaagttctgtcttcaacatccattctaaagggctactgtcccaaatcctgtgtgtccttttgacttgtctgatcacccaatggaagtggatacttgtaaagtctacaccactgtacttggcgttaaatcttgctgaattcgtggtaagctgttaccatgtctacattttgtagaatgattttggtctgcagcaaaattcgatttcacttctcatacccctttccttccacttgaaatgcaatttagacagaggccctgtggtgaaagttgcaatattaagtttacctttagaagatccctt

SEQ ID NO: 11276 - DNA, 491 bp, Homo sapiens
  misc_feature (1)...(491): n = A,T,C or G
naatcggagaccctagtccatgcggtggaacctgagttccatcatataaaattttttttaatttgcaaaagtaaatatttttaatgcattatgggaatatgctatttaaggaaaccttattagcatatgtgacaatagcaatctgtagtttcctcaaggagcttctctgttttggttatcttttctcagatacggcatttattgatgataatctttgggtttttctttttcttttaatttttgatgctttcagaagtgaccaaagttcgaagaaatcttttcaaccaggaattgctttccccttcaaagagatcactaaagcgggggttgcctagaagccattctgtgtcagctgtggatggtctagaggataaacttgacaacttcaagaagaacaaaggtaccacatttcagaatagctgttggagcttttcactacgtatttttgcaagaaggcagggaaattttttattggggagtgtcttttctga

SEQ ID NO: 11277 - DNA, 477 bp, Homo sapiens
  misc_feature (1)...(477): n = A,T,C or G
catcgagttcccatggccagagnggaggaattcgcataaaagaagctaattaattgtgatctggtgttatttataagacaactgattatcatcaggtactggtgtctttctggntatgtttagcacacccagatggtttaggagacatttttcttctagccacttggagtttgttttggcactcttgtatttcattttaattactatttccaaagcattgtccagatgcctgggttacagaggtgaactggacacagttccatcactctagaagcacacagttaaggaaggaagaaattgcatatgcaaatattaatgactataggaagggatgagaagttctataatgttatcagaactacaacgtagctcagacaacctagtagagtacctagcacataataggtgcttgttcagtatttgatgaatgaatgaataaattctgacttgtngaattgggaagatttgagggaagat

SEQ ID NO: 11278 - DNA, 455 bp, Homo sapiens
  misc_feature (1)...(455): n = A,T,C or G
ctcgtcatcgtagaccattagnccgngcggtggaattcatgggatgacgtcggaggaaggaaaagactgtcttgcattcatagagagcactttatgcttttcctcgcccttgcagagtctgggtggtctcagtgggggctcaggacagtcagctcaagacagccaagtcaggtattattatgatcatttttatcatcatcatctgtataagacaaatgacacagccagttagtgagagggccaggactggaagccagggtatcggttttcccagctcccctgtcagaggccagatctggagtagtgggaagaggacgcagggggcaggtcttgccccttgccaggcctctgccccttgccaggcctctgccccctgtatctctgcttctgcctcagctgtcctgggtgaggtgggaggcacctagcatttagcaggtgattctcccaccctgccc

SEQ ID NO: 11279 - DNA, 590 bp, Homo sapiens
  misc_feature (1)...(590): n = A,T,C or G
ggggaacccccttttgannncccctttcgtatcacctattcagagtggtgcaattccgcttcaggacttaaggtctaagcgtcagagaagtgccgtattttcaaggtggaaagtctgttaagcttgctgttgtccaatcatccgtttttagagatggggaaactaaaactcaaaaagatgtgcctgaggtcatatggcattatcagaaccaacctctggccctcttgacctgtctagcattctttctttctgacctataggatgactctaattcagtctaaatcggctgccctcagattcttgagaacttaaaattgagcagaaattcccaaggccaacctagctctcagggaccaacctgcagaactcaagattgagcgaaatgtttaggccagttgagttttgcaaaatgagtggtaagggaaaacagatctagcctgttatttaaaaccagggttcanaagccctattgggagaggtagtattggcctagcatttaaattctcatgaaatgtgcttggtctgtgatctcttggtcagatatctgccttccaggcgatcctttggaggtgtgaattcagctggccctg

SEQ ID NO: 11280 - DNA, 473 bp, Homo sapiens
  misc_feature (1)...(473): n = A,T,C or G
gggtggcccgnnttgggggaaatgagaccatagatttgagatctattagaccangcggtggaattcctggatcagggcagtctttgcacatcattcgtggggaccctgcagtacctggccccagagctactggagcagcagaagtacacagtgaccgtcgactactggagcttcggcaccctggcctttgagtgcatcacgggcttccggcccttcctccccaactggcagcccgtgcagtggcattcaaaagtgcggcagaagagtgaggtggacattgttgttagcgaagacttgaatggaacggtgaagttttcaagctctttaccctaccccaataatcttaacagtgtcctggctgagcgactggagaagtggctgcaactgatgctgatgtggcacccccgacagaggggcacggatcccacgtatgggcccaatggctgcttcaaggccctggatgacatcttaan

SEQ ID NO: 11281 - DNA, 573 bp, Homo sapiens
  misc_feature (1)...(573): n = A,T,C or G
natctgaccacaggttagagtggcggaattcaacatccatagtgaaagatagctctgcagccagaaatggtcttctcacggaacataacatctgtgaaatcaatggacagaatgtcattggattgaaggactctcaaattgcagacatactgtcaacatctgggactgtagttactattacaatcatgcctgcttttatctttgaacatattattaagcggatggcaccaagcattatgaaaagcctaatggaccacaccattcctgaggtttaaaattcacggcaccatggaaatgtagctgaacgtctccagtttccttctttggcaacttctgtattatgcacgagaagccttcccggagccagcgagcatatgctgcatgaggacctttctatcttacattatggctgggaatcttactctttcatctgataccttgctcagatttcaaaatagttgtagccttatcctggttttacagatgtgaaactttcaagagatttactgacttttctagaatagtttctctactggaaacctgatgctttataaccatttggataggatgacg

SEQ ID NO: 11282 - DNA, 497 bp, Homo sapiens
  misc_feature (1)...(497): n = A,T,C or G
nttcgatacccctttccaggtcgatgtacactaccgcttgtggagcataatccacgacgatgagctgagcctgcgggccctgcaggccaccggtggggacatccaagcagccctggagctcatctttgctggaggagccccatgaactccctgcttcccctgaacccccagcaagttgcacaggctactgcccttgggaggcactcatgaaggtgcctccatctctcccttccccaatatacctgatggtcaactctcaaaaaaaaaaaaaaaaaaaaaaaaaaaaaaaaaaaaaaaaaaaaaaaaaaaaaaaaaaaaaaaaaataaggggggggccccccctttttttaaaggggccccttaaaaccccgggattcccccgggggggtccttttttttcccccccctttttttttgcccccccccccggccttttttttgggggggggggggcccccccccctttttttttataaaaaaaagagagaagggccccg

SEQ ID NO: 11283 - DNA, 485 bp, Homo sapiens
  misc_feature (1)...(485): n = A,T,C or G
attcgataccccttnccagtttgatgtacctcccgcttcgaaagcatcatccacgagttcgacccgtggtttaactattgatcaacacatcatcttgcatctcatgggttctatgaatttttaaattggggagacgaaagagcatggtatccactatgaagaatagtaggtggtactgtttacccagggttgatgataaccgctggccttattcattggattttaaatacattgaacataactgttcacataagagacgtatgtgtgttccttgcaccaacttttagcggccttacatctatatctactttcctgcttacaagagaactttggaaccaaggagcaggacttttagctgcttgttttattgctattgtaccaggctacatatctcggtcagtagctggatcctttgataatgaaggcattgctatttttgcacttcagttcacatactatttatgggtaaaatctgtaaaaactgg

SEQ ID NO: 11284 - DNA, 478 bp, Homo sapiens
  misc_feature (1)...(478): n = A,T,C or G
tggaggccccgnnntnaggggaaatcgagactctaganattgacgactacttagaccgngcggtggaattccattgatcctctaaaataaaagagcatgtatctgtgagagtgagatataagggaggtgaattgtgattggtaagcagggtgccagcatgctgttatagagacagaaacaatttcttaggacttgccacccatatccatccaaaaaaaaaaaaagggggataaacccttacccttttttttggcttaaaaattttttcaaaacaggtttaatatttttttttcttgggcccaaagtgggccaggttaaagggggaacctttgatttggtacctacaatggaaacaaaacggacataggtttttgatttttcatacaagcgaaacccaaatcaaggggcggaattccacactctcttaaggttaatccaactggagggacgggagaggattactataaaattggctaca

SEQ ID NO: 11285 - DNA, 456 bp, Homo sapiens
  misc_feature (1)...(456): n = A,T,C or G
ntttgtagatcactagcccagtgcggnggaattcatcagagcccttaacacaagcccaatatattttggaacctcaataaatagtggttttgctgattgtctttttaacaatttctaaaatattgaatactggttattataattaaatgtattctaaacatctattctttctgtctcatgccttgatctagcctgttccttccacctagaatgccttttccttccttttctcacatagcaatctttgacatatccttgaagactgagctctcccatcagcctgggaggcctggcctgatctggaagacggttcagcacgtctttctctgttgccatagtgcgggatttttgtctattttcagcaggtcgttccagactgcaagcctctggagggcagtgactcgatcccattcagctccatatccccactaccagcatggcatgcattgngggtgt

SEQ ID NO: 11286 - DNA, 484 bp, Homo sapiens
  misc_feature (1)...(484): n = A,T,C or G
gagcaggaaaaatttgagaccctagaactgatgacactagtacagngcggnggaattcccgccatcgtggtgtgttcttgactccgctgctcgccatgtcttctcacaagactttcttgattaagcgattcctggccaagaaacaaaagcaaaatcgtcccattccccagtggattcggatgaaaactggaaataaaatcaggtacaactccaaaaggagacattggagaagaaccaagctgggtctataaggaattgcacatgagatggcacacatatttatgctgtctgaaggtcacgatcatgttaccatatcaagctgaaaatgtcaccactatctggagatttcgacgtgttttcctctctgaatctgttatgaacacgttggttggctggattcagtaataaatatgtaaggcctttctttttttgaaaaanncactgnggaagaaaagaaaaaaataaaaatcccggggggccgcgg

SEQ ID NO: 11287 - DNA, 550 bp, Homo sapiens
  misc_feature (1)...(550): n = A,T,C or G
ctatacagnccgnnngnnnnnaattcttaacatatggnggaagcagtaaaagaaaaagcacttcaccacgtagaagagaaagtgatcattttaattaagataatttcaattcattatcaacatttaatcctctgcaaacaagggaacacttactagcagtacttgaagacttgtgagttggaattgcatgttacttgaaagatctaattaagctaaattttggtgcacagcaggttgtacatgatttcatgtttatgtagcaaaatgcattgaaatgtattagtgttgaaacatacatgtaaaggtagttgtggaaattgttatattttccttgtgtgtcatttatttagagcataaaggttttttttattcagcctaactgaataaggctaaatgaatactgtaattgaaaatatattttaaatctttgtcatgagtttttttaaaaaaaactattgcaaattgtatcattcctgattacacagaactntgtgggtggtttaaataaatntatacttctattttgacctgaaaaaaaaaaaaaaaaaaa

SEQ ID NO: 11288 - DNA, 442 bp, Homo sapiens
  misc_feature (1)...(442): n = A,T,C or G
ggggtattaacctacnagcatgatatctgngaaancncagaaacaccttagtctgcttgacactgagggcctgggagatgtaaagaagggtgacaaccagaatgactcctggatcttcaccctggccgtcctcctgagcagcactctcgtgtacaatagcatgggaaccatcaaccagcaggctatggaccaactgtactatgtgacagagctgacacatcgaatccgatcaaaatcctcacctgatgagaatgagaatgaggattcagctgactttgtgagcttcttcccagattttgtgtggacactgagagatttctccctggacttggaagcagatggacaacccctcacaccagatgagtacctggagtattccctgaagctaacgcaaggtaccagtcaaaaagataaaaattttaatctgccccgactctgtatg

SEQ ID NO: 11289 - DNA, 481 bp, Homo sapiens
  misc_feature (1)...(481): n = A,T,C or G
gagcaggggnnnnnatcgtagaccctagnactgatggccgtattcgaagaaatgggggacagatgaggtgaaatttctaactgttctctgttcccggaaccgaaatcacctgttgcatgtgtttgatgaatacaaaaggatatcacagaaggatattgaacagagtattaaatctgaaacatctggtagctttgaagatgctctgctggctatagtaaagtgcatgaggaacaaatctgcatattttgctgaaaagctctataaatcgatgaagggcttgggcaccgatgataacaccctcatcagagtgatggtttctcgagcagaaattgacatgttggatatccgggcacacttcaagagactctatggaaagtctctgtactcgttcatcaagggtgacacatctggagactacaggaaagtactgcttgttctctgtggaggagatgattaaaataaaaatcccagaaggacaggn

SEQ ID NO: 11290 - DNA, 458 bp, Homo sapiens
  misc_feature (1)...(458): n = A,T,C or G
nattgagncccattgaagacccttagacagtgcggtggaattcgggagccagtgtagggagcgtgtgcggattcgaatagcagatactccgccgtggtgacaggagatgtaaaactaccacttgccctgtttcaaggtttacatgcattatcccacttaatcttcaaaccactccatgatgtaggaagtatcattacctctgttttgcagctgatgaaacagaggcccagaaaacttaaatagggttggaccacgagtatcacagccaggatcggaccccaggcagccaactcccaacactgccgaagccaactgcgaactaaggctcagtggagaatttgcaacctgggatatatttgttggaagtgattgctccctccttttgaactttgcagcaattattgtctgtagaattcatctggcaattaatcatgtactcccggtgacaaggctcttat

SEQ ID NO: 11291 - DNA, 453 bp, Homo sapiens
  misc_feature (1)...(453): n = A,T,C or G
nctgatgaccattagaccangcggnggaattcgtcacaatgagggaatgtactttgagatttctgctatttcaaatattattttaacattatccctaagcagctcccttaaaaaacaacttaatggtgctattgttgtaaacattgtcactcatttccgttttccttggcactgtagttgctaatttgaagtgaaaacaggaaggttaagaaagcttaacctgggttaacagataagcttagatattaacatcatccacaaagtgtggtttcagtttaggatgctgggagaagaccccataaggacacagccattgcaaaggacgctcaagcccttcctcagcccatttgttctggaggtggtccaggaggaaggctgttacaataggctggaaagtcatccagctggtggtaacaggacttgctgaatactcggaaatctcagctctctcaa

SEQ ID NO: 11292 - DNA, 445 bp, Homo sapiens
  misc_feature (1)...(445): n = A,T,C or G
gtcgccttaaaatgagaaaatgatggccatgaaggcggggaattnacataagaaattatgctggagagaaaccttacaaatgtgaagaatgtggcaaagctttttaccgattctcataccttactaaacataagataattcatactggagagaaattctacaaatgtgaagaatgtggcaaaggctttaattggtcctcgacccttactaaacataaaagaattcatactggagagaaaccctacaaatgtgaacaatgtggcaaagcttttaatgagtcctcaaaccttactgcacataagataattcatactggagagaaaccctacaaatgtgaagaatgtggcaaagcctttaaccggtccccaaaacttactgcacataaggtaattcattctggagagaaaccctacaaatgtgaagaatgtggcaaagcttttaaccc

SEQ ID NO: 11293 - DNA, 450 bp, Homo sapiens
  misc_feature (1)...(450): n = A,T,C or G
nttagangcccgttagcccatacaggaggaannnagcacgcagagctgtgttgaaggacatacttttcaggttcctgacagtcactgagctatacgcaataataaagtgcgtgattcgcgtgtggaaaccagtgtcgtgtccttaccagcttccttttctgtccaccttccctctctcttctacctccgtttcgcttttcttcagtgcatgttagcggtttgctggatttcccttctccctcgctgttcaactgctagcatgatttgttacattttccacagctgtttattcttgtttgactttttgtacaaagtcactttaaatctgctgcagaaagaataaagcacctagccctttggatggactcctgcaggcgtgtggctgtccctggcccacttttaattctttggagatggctcttctgtgtaaatcagctgctgggtgcgttn

SEQ ID NO: 11294 - DNA, 494 bp, Homo sapiens
  misc_feature (1)...(494): n = A,T,C or G
agagggccgggnnnnnnnttttgactcgcgntncactaggccagngnggnggaattccacctctgagtcttaggcgatgcgtgaccacgcagccccttccaggagtctggtttagggctgggtcttcccatcttcacctctgagtcttaggcggtgcatgaccacgcagccccttcccggagtctggtttagggctgcgtgctcaagagtctggtttggggctgggtcttcccatcgccctggaggaggcttttgtctcatctcatgattcacattaaactctgtgccatgaagcttanaaaaaaaaaaaaaaaaaaaaaaaaagaaaaaaagataagaataaccaatagaatntctacttatttangttttggaatcaccttacagattccagggcccttttgggtatattctttattcttttgctttttttaaaaaaaacttccggttggtatttaaagcacttggattagacaatgcttcttgttttgaat

SEQ ID NO: 11295 - DNA, 447 bp, Homo sapiens
  misc_feature (1)...(447): n = A,T,C or G
ncttatnttcattagaccgngcggngnnnnnaaattcttcaggttctcttgtgatcctgggaaatgctagaccgtgagcatcttgatggaggatgtgaactgccacttcctcacaggcagcaggcaggtgctgaataagtgcttgctgaatgaatgaatgaatcacgccaaggggcatgttacctgttccgccaaaatctgctgctgctgctgctgctgctgcctttgctcccgcaggaactgttgcttctgctgctctatcaactgggcccgctgatcaatgagcatctgcttcatgatggctgcttggggctggctgcccaggaagccggggcctgcgggactggctcctgagaccatgccacctgagcctgggggcacggaggactgcatggggcctgtggttcggngaagtccaactggatgctgctcctgggaagacaagag

SEQ ID NO: 11296 - DNA, 449 bp, Homo sapiens
aatagagatctgattacgtcggaggaactcggtatgaacacttggttagaagaatacctgagcaatgcgcaaacctgatctttttgtctttcagctggagaggggtggcacaatctcggctcactgcaacctccgcctcccaggttcaagcaattctcctgcctcagcttcctgagtagctggaactacaggtggtgccaccatacctagctaatttttcctctttttagtagagatacagggctgcgtggggattacatgaaatactccaagtaaagccctaaatgaatacttgacccacagcaaatataattaatattaggaattatcattgttttagtagatgtgaaagaaaggctgttatcaaactataagtaatgtatacatgctagttaccactgtgaacacaggacatgaaataagtatccaattagtgataatatacaatg

SEQ ID NO: 11297 - DNA, 488 bp, Homo sapiens
  misc_feature (1)...(488): n = A,T,C or G
tgagtnncccnnnnnagtngnnnccccttgatgnccnttgatagatgaccatcggacagngcggtggaattcatctatgtcttccgggaccgatataaaaagggggatgccaacacctacaagcttgaccctgccacttcagccgtaactgtcacaagaggtattaaggtgctgcttaccaatttgcagtttgtgttggcctaaggctgtggggaggggaggagaactgctcactccttttccctccccatacaaactcaaagtcccctgggccccaattcagagttatgttttttttggcacatactagaaaggcagtgcctcagcccttccctgaatccatggaggtgttctgtttggggctttttagactgctgctgctcagctggttgcttgaactgacagtaggccagcctgttctctgccattccctagtcatcctgtgcctcaccacagcttgcttagagcaagccttttctcagacctta

SEQ ID NO: 11298 - DNA, 447 bp, Homo sapiens
  misc_feature (1)...(447): n = A,T,C or G
actgagaccctgncttgtagaccttagtccatgcggtggaattccacccactacatggcagaggctgaggccgtgtgtgaccgagtggccatcatggtatctgggaggttgagatgtatcggttccatccaacacctgaaaagcaaatttggcaaagattacctgctggagatgaaggtgaagaacctggcacaagtggagcccctccatgcagagatcctgaggcttttcccccaggctgctcggcaggaaaggtactcctctctgatggtttataagttgccagtggaagatgtgcaacctttagcccaagctttcttcaaattagagaaggttaaacagagctttgacctagaggagtacagcctctcacagtctaccctggagcaggttttcctggagctctccaaggagcaggagctgggtgattttgaggaggattttgat

SEQ ID NO: 11299 - DNA, 450 bp, Homo sapiens
  misc_feature (1)...(450): n = A,T,C or G
nggcgccttaancctgggctaactancctttcgcanaanncnnngganggncgnggnccagctcttggcccctgtgtgagttgattctcctctctgtgactgcttagtaggggcagagatggttgccaggacgaattgagataatatctgtgaggtgctgatgagcgaatgacacacagcactctctaaatcttccttgtgaggattatgggtcctgcaattctacagtttcttactgttttgtatcaaaatcactatctttctgataacagaattgccaaggcagcgggatctcgtatctttaaaaagcagtcctcttattcctaaggtaatcctattaaaacacagctttacaacttccaatatnaaaaaaaaaaaaaaaaaaaaaaaaaaaaaatgcaggaaaaaaaattaaaaattagttttgtttgtggtgtttctcctgccctg

SEQ ID NO: 11300 - DNA, 453 bp, Homo sapiens
  misc_feature (1)...(453): n = A,T,C or G
gctggcctnaaaactgaganncctgnngngttagcacaagcggnggaattnaaggactttaacctactcaacagtatttcatatccattgtggttagttactcagttatgttgagaagaatctggagctaaaagcagagatgtttgaggtgacggtaggaatgtgagcaggatggtgatgggggtttttgttaaaatgcatctgagcaagtcagccagccccgaagtcccctcagtgtgtgtgtctcgagtggctacctgttgggcttgtgggcagtgattgtacagagcctgtccattgggtgcagtcatgtagatctgaagccctgaaaagcctcatgtctgcatcccctttccaaggctgcttccctggtgtgtctgttctctcctctgtcccaggtgctgggagcgtcctcttcagcgtcttttcctagagctggtcaccactaggctg

SEQ ID NO: 11301 - DNA, 409 bp, Homo sapiens
cacagcagtgcataggccatataatgttagctggaaggtcaatttcagtgtatgatatactttattaagatgtataaaacatcctgaagtttttatttagttttgggaataggcatcaatgggtggtatttgctttgtaactccccccaggtacgatagggactgaatatggaccctgctgaaagcagtgtattgacgcatatttaactcgccctctatccgtagagtagtcatgacactatacagatggttcgtgttcatactgcagcttaaaacaagcaaaatacacagatgataatatgctaaattttcctctatcctgtacatttcacaaaaaggcatatgcaatatttacatttttaatttagtttacagaatggaaccaaaatgtataaatgttatgtttgct

SEQ ID NO: 11302 - DNA, 475 bp, Homo sapiens
  misc_feature (1)...(475): n = A,T,C or G
aggcgctcnnnnnnactgaaanaacatcgagagtctgcgantngcggaaanntccnattgaaataaatgtctgccatgtcagcaccgtttgttccttttgttttaatataacggaccatatattaaacataattaaacatatatttaaatgtggtgtttgcctgtgtctctagcaggatcttgaaattttaaaaatttgcttctggttcctgtttcagagaaaacattgtccccagaaatttcataggattgaaagtgttccctaagcagtgtgaacaatggaggaaaatatagtttagagaaaagtcagggaaaggtagggccagaggactgacaccaagaaatcattgaatctcaacataagacttcttggaatttagttaatcatattggaataaattccttcaagaatcttgtcccttggtaatcaaagtttgaaaccccgcactgaaaagcaccaacttggtggaaatat

SEQ ID NO: 11303 - DNA, 472 bp, Homo sapiens
  misc_feature (1)...(472): n = A,T,C or G
ggagcagcccggttgccnattccaggggtcctgatcgtgcctgtagnanctncgnaanangnngnangggcccattacccaaggaatatcagaagataggaaaggccttgcagagtttggccacagtgttcagttccagtggctatcaaggtgaaacagatctcaatgatgcaataacagaagcaggaaagacttatgaagaaattgccagtctcgtggcagaacagccaaagaaagatctccatttcctgatggaatgtaatcacgagtataaaggttttcttggctgcttccctgacatcattggcactcacaagggagcaatagaaaaagtgaaagaaagtgacaaactagttgcaacaagtaaaatcaccctacaagacaaacagaacatggtgaagagagtcagcatcatgtcttacgcgttgcaagctgagatgaatcactttcacagtaaccggatctatgattg

SEQ ID NO: 11304 - DNA, 498 bp, Homo sapiens
  misc_feature (1)...(498): n = A,T,C or G
ggagaggggnnnnncctttgaaaccctatggatgantctttcggaanngcggnggaantcgggaatgtggactctggctgtccttgggtggcttccatgagcgtggtttagactgggttcatactcagaaaatctacaattgtcacgtgctgctgaacagcaaaggggcagtagtggccacttacaggaagacacatctgtgtgacgtatagattccagggcaggggcctatgtgtgaaagcaactctaccatgcctgggcccagtcttgagtcacctgtcagcacaccagcaggcaagattggtctagctgtctgctatgacatgcggntccctgaactctctctggcattggctcaagctggagcagagatacttacctatccttcagcttttggatccattacaggcccagcccactgggaggtgttgctgcgggcccgtgctatcgaaacccagtgctatgtattggcagcaacacagtgtggacgccaccatg

SEQ ID NO: 11305 - DNA, 451 bp, Homo sapiens
  misc_feature (1)...(451): n = A,T,C or G
ntaaatccgtaagacccttgaantacgtagatccntcgaagngncgnggaantcgcccagagagacaccagagaacccaccatggccccctttgagtccctggcttctggcttcctgttgttgctgtgggtgatagcccccagcagggcctgcacctgtgtaccaccccacccacagacagccttctgcgattccgacctcgtcatcagggccaagttcgtggggacaccttaagtcaaccagaccaccttataccagcgttatgagatcaagatgaccaagatgtataaagggttccaagccttaggggatgccgctgacatccggttcgtctacacccccgccatggagagtgtctgcggatacttccacaggtcccacaaccgcagcgaggagtttctcattgctggaaaactgcaggatggactcttgcacatcactacctgcagtn

SEQ ID NO: 11306 - DNA, 440 bp, Homo sapiens
  misc_feature (1)...(440): n = A,T,C or G
ntaaaatgataacctcgaagnctgaggaccntccttagctnccgnnnntatttgcagtgataaagatagcctctttttatttccctgtagtgattagatcgacgtgtttacaatattaacacacaggttttctcttcttcaggctctgagtcatcgagttcacaatgccatgtctagtcagtacttctatgtgtgtatagcgcccattgtggccgagtagagataaggtcactggggaagaaaataaatcgctaaaatctgttagaatacgtcagcttccaggtttgtctgaggatgcagtggaaaccacgttctgtggccagcatgtcagtagcttttgatgatcagagccttccattttgatactttaaaataatgtaatctaagttcacatcaactgaatccagacagtttcaccatccaccacattattaattcca

SEQ ID NO: 11307 - DNA, 477 bp, Homo sapiens
  misc_feature (1)...(477): n = A,T,C or G
aatggagaccaatcgtagactctaggacangcggnggaattcctaacagcagagctgaaaagtcttgaggacaaagcagcagaggtcgtatataatacaaatgctgcagaggaatccttaccagagatccagaaagaacatcgcaatctgcttcaagaattaaaagttattcaagaaaatgaacatgctcttcaaaaagatgcacttagtattaagttgaaacttgaacaaatagatggtcacattgctgaacataattctaaaataaaatattggcacaaagagatttcaaaaatatcactgcatcctatagaagataatcctattgaagagatttcggttctaagcccagaggatcttgaagcgatcaagaatccagattctataacaaatcaaattgcacttttggaagcccggtgtcatgaaatgaaaccaaacctcggtgccatcgcagagtataaaaagaaggaagaattg

SEQ ID NO: 11308 - DNA, 455 bp, Homo sapiens
atagaagactagaggacctctagacagagcggaggaattcctgctattaggccagcaagcggggatgtccctgggagggacatgcttagcagtccccttccctccaagaaggatgtgggccggcataacccaaggtaccatcctaggctgacacctaactcttctttcatttcttctacaactcatacactcgtatgatacttcgacactgttcttagctcaatgagcatgtttagactttaacataagctatttttctaactacaaaggtttaaatgaacaagagaagcattctcattggaaatttagcattgtagtgctttgagagagaaaggactcctgaaaaaaaacctgagatttattaaagaaaaaaatgtattttatgttatatataaatatattattacttgtaaatataaagacgctttataagcatcattatttatgtattgcgc

SEQ ID NO: 11309 - DNA, 454 bp, Homo sapiens
  misc_feature (1)...(454): n = A,T,C or G
aatagaagactcgtaggacgtgcggnggaattccaccatcagctctgtggagaagaagctgatggcattccagccagcccccaaagtgattcgctgcatgaccaacacacctgtggtagtgcaggaaggcgctacagtgtacgccacgggcacccatgccctggtggaggatgggcagctcctggagcagctcatgagcagcgtgggcttctgcactgaggtggaagaggacctcatcgatgccgtcacggggctcagtggcagcgggcctgcctatgcattcatggctctggacgcattggctgatggtggggtgaagatgggtttgccacggcgcctggcaatccaactcggggcccaggctttgctgggagctgccaagatgctgctggactcggagcagcatccatgccagcttaaggacaatgtctgctcccctggaggagccaccatn

SEQ ID NO: 11310 - DNA, 455 bp, Homo sapiens
  misc_feature (1)...(455): n = A,T,C or G
atacgagactagtaggaccttagncagtgcggtggaattcgtcctgaggggtaagtaaaagctcgctcttgtccggaatgctttcagaaattaacggataaatctccacctccaccaattttagtgtcccattgccaaattttcttgagttgttttaatcatctaatgaagtcaggtgccagaaggcaactggatctcgccaggcggccttgaagtttgttaaaaagtagggaccagagcatcaggaaaaatacaaaattctgagtaaaatgctgaaatcccgtacctctgagcttgccggtgtaaggatggtaggatttaaggaagacgatttccttaaggtagaagttcgtttttatgaatatgtttttaagaaaattccatcttatcgcccttctctaaccagttttctccaagtttggcaagcaagtttgagaaagagaggacgcattaat

SEQ ID NO: 11311 - DNA, 457 bp, Homo sapiens
  misc_feature (1)...(457): n = A,T,C or G
natggangacccttgaagacccactatcagtgtggtggaattcgcttggttaagtaaaccatagttcacctatattgagacatgaaaacaaataagacaggcatgttcattgaattacataaaaatgtaaaaataatatgcagaatataaacattcttataaacaaggggaaaatcgctcttagtacatgtacagaaaaaagtagaggaattttactctataaggatgaaattatagaatgctttcattttctaggttaaatatatctgtaaggtttaaattaattgtaatgattatgcattggttttgtaattttaataagttattttaatattatggaaaactggtactgccggcccggcacagtggctcatacctgtaatcccagcactttgggaggctgaggcaggcagatcaccaggtcaagagatcgagaccatcctggccaacatggtga

SEQ ID NO: 11312 - DNA, 421 bp, Homo sapiens
cacagtgctgagatgacaggaatgaaccatcgtgccagcgagacgcccaggctctaagctctacatggtctaacttcccccacaccaggagcagcaggtgactcagtttcccctcttgtaccaccagcctcagatccgatcctgcaggaaaaggatcgagaaagccccactcggattctccatggtgagaacctgactcagaggggcaggggctcctctgtgagacgggcatggaccctaatcctcatcgcagccctgagaagaagcagagactacaatttccaccatacagttggggaaactgaggcccagagatggacaaggaacaaggatgttaagtccagcattcgcgtgtctctggacgctgccagggggaccaaagggaggtccttcaggaagtgccaggatgtggcacacccca

SEQ ID NO: 11313 - DNA, 419 bp, Homo sapiens
aattcggcccggctaattttttgtgtttttggtagagatggggtttcgctgtgttggccaggatggtctccatctcctgacctcatgatccacccacctcggcctcccagagtgctgggattacagcacctggcatatatatttttttttaggttttagttagacttagaacactgtgtcatttcttaccaaagaaattactgtcttgatttcctctcaggatttgagaagcccaaaataataatggtcttactaggccttggtttaaaaaatctaagccagcagactcaaaaaaaaaaaaaaagggggttaaaattttcccaaaccttttggctttggttaacccctttgttttttaaaaggaaaaaaaaggggcctcccttttggttctggcggaaactggacagggcacaaattta

SEQ ID NO: 11314 - DNA, 465 bp, Homo sapiens
  misc_feature (1)...(465): n = A,T,C or G
catcgagacccctagatggaggctgtaagncatccttactattatctcaagaatgaagcactgaaaagcgaagaaggctgcattccgaatatcgccccagacatctgcatagcatacaaactgcacctagagtgtagcaggctcatcaacctcgtggactggtcagaggcttttgcaacagttgtgacagctgctgaaaaaatggatgcaaattctgcaacctcagaagaaatgaatgaaattatccatgctcggtttattagagctgtttctgaactagaacttttaggatttataaaacctaccaaacagaagactgaccatgtggcaagactaacatggggaggctgctagaaagcaaataagcaaagccagaactatcacatttagcttaagagaaaaaggtgaccagtcatatttacatatattagaggagcctgttttgttgagaagataaatgtgtaa

SEQ ID NO: 11315 - DNA, 480 bp, Homo sapiens
  misc_feature (1)...(480): n = A,T,C or G
cgaggcccgnnnccttgagacccatgagacccgtcgcaagagccgcggaanttgcaggcaatcccctgggtgtggaccgagagctgctccgagcagaactcaactttggggtcatcactctcaacagcatggatgccactagtgagcgggactttgtggccgagttcctgttctgggcttcgctgtgcatgacccatctcagcaggatggccgaggacctcatcctctactgcaccaaggaattcagcttcgtgcagctctcagatgcctacagcacgggaagcagcctgatgccccacaagaaaaaccccgacagtttggagctgatccggagcaaggctgggcgtgtgtttgggcggtgtgccgggctcctgatgaccctcaagggacttcccagcacctacaacaaagacttacaggaggacaaggaagctgtgtttgaagtgtcagacactatgagtgccgtgctccaggtggccn

SEQ ID NO: 11316 - DNA, 459 bp, Homo sapiens
  misc_feature (1)...(459): n = A,T,C or G
ntttgaagaccctagtagacccactatcagtgtggtggaattcagggaagaggcttgaatgtcagtggtaccagaataacagcctcaaagaatcattacttatagagaagaattagccaagtctggaaacttgatttagaagcaagagaagaaaattaaggatcatgtcaaaatgaaagggaaacaagacgtgccaacctctctttttcccctccctccacctccatcattctcatccattaaagaaactatactttgctaaactaagtgcttcaattaagccctattcacaaaatgaataggaatgtaaaaaagcaggccacttccataaaaaaatgactataagaaaaaaacagaagcatgaatcaaaatatttcagccagtgaaaattctgccccctacaacaaaccatgaagtaaaccgtttacagtgggtagacgctaaatagaattaaggccg

SEQ ID NO: 11317 - DNA, 454 bp, Homo sapiens
  misc_feature (1)...(454): n = A,T,C or G
nttgaagaccatgagtgcaccgtggnggaattcgttctggctctatcggccaggctgtaatgcagggacctgatcttggttcactgcagcctcagcctccccggggtttaagccatcctcccgcatcagactcctaagtagctgggactacaggcatgtgtcagcacatctggctaatttttgtatctgttgtagagatggggtttcgccagattgcccagactggtctcgatctcctaagttcaagtgatctgcccaccttccaaagtgctgggattataggtgtgagccactgtgcccggcctttcttctttttaaatgtaggcatttttcactatgaacttcctgtttaatactgcttttgctgcatcccataagttttgacatgttgtgttttcatttttgtctcaaggtatttttaaatttcctttntgatttcttttttgacagagtt

SEQ ID NO: 11318 - DNA, 482 bp, Homo sapiens
  misc_feature (1)...(482): n = A,T,C or G
tgggtaaaacaaanaaccggggnnnnnnnnntttcgtagaccctagtccgtgcggcggaattccaagaaatcctacactgtccactggagacatccatgtttttacttggctctgcccctttagtggtccctgtgaaccttacctcaaaccatgcatctggggcagagatccttacttgcttggtggttacaaatgcaaatacagtgaagaatgtcatctttgtgattgttcctgaaatagttcacgagaaatccatgaccgtaaagtactgtgatagtgatgtctaccactgtgagctttcagtactaggtgattggtctgcattcacagtgaccaaaatcagctatgtggccaggtaattcactgctgagggctttggattttcctttatgaactactgaaatgaggtcaacttgactattactaagggacattttgctacaaagaatgttagttttgccaattccctttccaaatctan

SEQ ID NO: 11319 - DNA, 470 bp, Homo sapiens
  misc_feature (1)...(470): n = A,T,C or G
gcgcccaatgagcccctaattgagaccctaggcagnngcgnggaattcagatgatgtatgtcagtccgaaatggtaggtaaccacagctgcagacctcaatctacagtacatttcaagtagttcaactttttcctgtaatgtcattacttttctctgcttcttgggagcacttccagcattactagtggcacttcatatgggtcccatggtgttattcaagttttatggttattacagtaaacatgacttgcttactgtgtatgttattggtatcacagggtgttataagtgggtaattgtagtgtctgagcccagtgtaatagcaataggaggtgacttcagaattattacggcagtacagtatataccgcagttaattttatgtagttgtgatttgatatatctttatgtttgcttacaattctctcaaatttgaatgatgctatttatgttctgtgtgtgtgttagn

SEQ ID NO: 11320 - DNA, 475 bp, Homo sapiens
  misc_feature (1)...(475): n = A,T,C or G
gcggggcttttnatcgatgacattactccagtgcggtggaattccagaaaataaatttcaatgtgttcaatgaattgtcttgaacctgaaacctgcatttagatatcagtcccctgccaatagctaatattaacagaatttgaacaatcatacaattatgtctcaaatgtgaagactttgtacagtaatattttcactttctaaatgacccatataacattcaggaattatagatgtgtatgtatattttttaagtacagaaagttcagccagtcttcagagaagtaaaagtgatgtctattgtgcattgaagtaaatattacaaacattccagtttcgcaatacaatacttgagctttcgaacacctcagacactagaatgtgtaatgcgagtcaaaaaagctgacatacaaaacaattcctatttggctcagggttcctaaatgtcacaatatcttgggtaaaatatactttt

SEQ ID NO: 11321 - DNA, 443 bp, Homo sapiens
  misc_feature (1)...(443): n = A,T,C or G
gagggcgntttganncccattgtagaccttagtccatgcggtggaattccccaaactttcaaaagcaaataaacagcatataaaacgttaattatctttccattgtaattgtgatgatctactctgtatgggtaccaaaatcaccttctctcttcaagtcaaagttgaatttagaactttgaatacaggtcaaaaaatgtagaaaatatcattttatattccctaatctatatagctgaaaaagggttgtattttcttagctgaatatgaatacctcttaaacataaattagttcctctccagtgaagtatcttattttaccaatccatttcaggaaagaggttctgctgccgtaaaggcagaaattttatttttatcccttttatttgaatgagagatttgaaaatcgaattatgtaaatatttcaatgcatctgctattat

SEQ ID NO: 11322 - DNA, 488 bp, Homo sapiens
  misc_feature (1)...(488): n = A,T,C or G
agggtaaacaaaaaaaggggaaaaaataaantttgagnaccattagncttggatggccgctatttcggacaggaggaagaagaagaaaaagaaggaaaagaaaaaacacaagaaacataaaatgcataagaagcataagaaacatgcaggcactgaagtggaattggaaaaaagccaaaaacacaaacacaagaaaaagaagtcaaagaagaacaaagataaagagaaggagaaggagaaagatgaccaaaaagagaaatctgtcactgtgtaaaaagacagattttttaaattgacttaattactaagtcatctgtattaaattttgttataatgtaaagagattcaagccttgtaaataatgacatggaagaccctgtgctgcacttaaaatattgctgcttgattatttgatttttacatcagagctttataacacgaacttttgtacagaattgtgagttgtgaccatgtaacatgagaggttn

SEQ ID NO: 11323 - DNA, 489 bp, Homo sapiens
  misc_feature (1)...(489): n = A,T,C or G
cgccccccccccccgcccccccaattgannnccntnatcgagacctctagtcagngnggtggaattcccgactcgcaagatggcgccgcagaaagacaggaagcccaagaggtcaacctggaggtttaatttggaccttactcatccagtagaagatggaatttttgattctggaaattttgagcaatttctacgggagaaggttaaagtcaatggcaaaactggaaatctcgggaatgttgttcacattgaacgcttcaagaataaaatcacagttgtttctgagaaacagttctctaaaaggtatttgaaataccttaccaagaaataccttaagaagaacaatcttcgtgattggcttcgagtggttgcatctgacaaggagacctacgaacttcgttacttccagattagtcaagatgaagatgaatcagagtcggaggactaggcaaaggctccccttacagggctttgcttattaataaaata

SEQ ID NO: 11324 - DNA, 480 bp, Homo sapiens
  misc_feature (1)...(480): n = A,T,C or G
gccccccaactgagaccataggacattgagngccattcctaaagncaaaggatcaataatgtttgtagcattaatgaaatattttcaagaaatgtgtccaggggtagcactggctatgttgacgaggcctttggtaactcagagagctcttggccctgatggggacttgcccttacgctttctttatcaggctctgagttcacacggagcctctggcacttccctgctgtcttgggagaaaggaaactggttgccgcggcaggttgtggaatctgttgctggaaccaggctggaagcccacctggtagtgaacagggcccagtggggcaggctgggcatgttgtggtctatgggtttgtttcctggagaatgttcaggaatgtcttcccagctgctttggtgctgagctctattatctcacagcacgtccagaaggctaacccaggtggggaggatgctgacaccagctccaggtggagt

SEQ ID NO: 11325 - DNA, 469 bp, Homo sapiens
  misc_feature (1)...(469): n = A,T,C or G
ncctgaggacatctgaccagngcggnggaannttantaccctttgactgcagaagctttataggagggagactattttgaagccataccattaaaagcctcaaaatttaacagcgacctaatagattttgcttctaccagccaggctttcaacaaagttccttcacctcatgagacaaaacctgacgaggatgctgaggcttttgagaatcatgctgaaaaactaggtaaaaggagtattaaatctgctcacaaaaagaaggattcgccagagcctcaagttaagatggacaaacatgaacctcatcaggactccggagaagaagctgaaggctgtccttcagccccagaagagacaccagtggataaaaagccagaggtgcatgaaaaggccaagagaaagtccacccgtcctcattatgaggaagagggagaagacgatgacctccagggtgtgggcgaggaattat

SEQ ID NO: 11326 - DNA, 477 bp, Homo sapiens
  misc_feature (1)...(477): n = A,T,C or G
tggtatccccgccccaaatgagaccataattggnggctgtaannncgacaactaaaagcacagaatggtgggaaaggggctataatgtggttcattaataatgttagcagcttttttctaaccatcctgtctaatggttaagacaccagtaacaaaaacacatgatttggaaatactttggctttttcatatacctagtggtgccttatcataatagcactgttacatgaaataagcccctaccttcttactttctggtttgttgaaaaaatacactggtgctctttgaagtgataaaatgagtgtttatgaatgggtgtaattaggaaatacttctcatctgacagctacaaataactaagtttggaggtattttcactctatatgaataaatatttttccataaaatagntgngattatatttttgttttatataggtcccaaattataattgtcaaatatatattttaaattaa

SEQ ID NO: 11327 - DNA, 478 bp, Homo sapiens
  misc_feature (1)...(478): n = A,T,C or G
ccccccccccgnnnannaatgagaccctaattgagngccgtagntcaacacaaataataaaatttgaaaaactgaataaagtaaataaaacaaaacctatttaaatatgaatcgatccaaactattcttaccgtgatcctggcacagtttctggaaaagcagagttgtcttttgtttctttgctttattgccgtaagtatctgattagaaagaaaccaggaaagcagataaaaaattataggattgtatcctctcctttaataaacaaatattttattcacatatagaaaatgttttcaataaatatgtatgtaagttggatttaataagtattatagaatatgtcccaaatcagtagtatcagtagaaaaggatatttttctcttagtaaaaaattgtttaaagtaatctcagcactttgggaggctgaggcaggtggatcacttgagcgcaggagtttgaggccaacctaagcaac

SEQ ID NO: 11328 - DNA, 458 bp, Homo sapiens
  misc_feature (1)...(458): n = A,T,C or G
naagcggccgtctgnccccnaaagtttccaangaanncnntnnntnaggnaaaagcggactgatgcgccttattaattttgtagcaaattatattgtgatattatgtagnttctggataaggagggtgtgtgtgaagttgctttgtaaagtgcatgtggaattaatgggacagtgtgccctttgtgttagatgttagagcaaaagaaagggcttatagtgttagtattggagcactttgaagatagatattttcagaaaagatgtaggatttaaaagttaaattttaaattttagaaaaagatatgatggcaattggaaatagtcacaatgaagttcttcatccagtaggtgtttaacagtgttattttgccactggtaatgtgtaaactgtgagtgatttacaataaatgattatgaattcaaaancaaaaaaaacatacattaatttaaaaaatca

SEQ ID NO: 11329 - DNA, 478 bp, Homo sapiens
  misc_feature (1)...(478): n = A,T,C or G
nggagcgggcccgnctgnnaaccccggattttcaganagtccgnccgccngnaantncantgatatccactcccagagcactttcatctcgtcaaaaggaaacgtcatgcctgttaagcactcactcctattccccacaccgctcagcccttggcaacaactaatctgctttctgtcactatagatttgcttattctgaatgtgtcatataaatgggatcatgcagtttttttttttttttttttttgaaaaggaatttttttttttccccccagcccgaattgggaatggaaggggccaaatttgggttaattgaaacccccttttccgggttaaacccttttttcttccttaacccccccaaaaactggaaataaagggcccccccccccgccccgggttatttttttgttttttaaaaaaaaagggggttcccctttttaacccggaagggccccaatccccgaccctaaggaag

SEQ ID NO: 11330 - DNA, 478 bp, Homo sapiens
  misc_feature (1)...(478): n = A,T,C or G
naatagatgatctntcggacnatggagngccatncgaagctcacaccgtccctaacatccctgctgcgagacccgcaggctgtggaatctcgcacgtcacctggccccagcagggcggccagctgaggggttgattttattttatttttttgaagtaaaggctgaatctcggcttcagggcttttgccaacgtctccactgacaggaaccagcaaacttcaggacccaaatgagcatcttaatttattgatgctaaacagagtttcactcttgttgcccaggctagagtgcaatgacacaatcttggctcactacaacctccgcctcccgggttcaagcaattctccagactcagccttccaagtagctgggattacagaaagcttcacatgtgagataaatgcactcaaagattcctcacaagtagctctttggagcttcagatgtgaaatggatcattcctcaatctgtaatagaa

SEQ ID NO: 11331 - DNA, 500 bp, Homo sapiens
  misc_feature (1)...(500): n = A,T,C or G
cccccatcgagacccttnccagatagaagacccntgtccagagacgtggaattcggtgtagctgcgcagcgtcgcgcgcgctaccgcacccaggttcggcccgtaggcgtctggcagcccggcgccatcttcatcgagcgccatggccgcagcctgcgggccgggagcggccgggtactgcttgctcctcggcttgcatttgtttctgctgaccgcgggccctgccctgggctggaacgaccctgacagaatgttgctgcgggatgtaaaagctcttaccctccactatgaccgctataccacctcccgcaggctggatcccatcccacagttgaaatgtgttggaggcacagctggttgtgattcttataccccaaaagtcatacagtgtcagaacaaaggctgggatgggtatgatgtacagtgggaatgtaagacggacttagatattgcatacaaatttggaaaaactgtggtgagctgtgaaggctatgagtcct

SEQ ID NO: 11332 - DNA, 493 bp, Homo sapiens
  misc_feature (1)...(493): n = A,T,C or G
cccccccccccannnnnaatggagaccnattgagancactcggaagnngcgnggaattcgccttggctggacagtcagtacgaatctgtaaaggccccagggctgtgttttcccgcatcttgctactgttttcgttgaccgactcaatggaagatgaagacgccgcttgtggaggtcagggacagctttcaacagtcctgttggtcaacctcggccgaatggagtttcctagttacaccatcaatcggaaaacccacatcttccaagacagagatgatcttatcagatatgcagcagccacgcacatgctgagtgacatttcttccgcaatggccaatgggaactgggaagaagctaaggagctcgctcagtgtgcaaaaagggattggaacagactgaaaaaccacccttctctgagatgccacgaagatttaccactcttcctgcggngtttcactgttgggtggatttatacaaggattttgtctcggtt

SEQ ID NO: 11333 - DNA, 461 bp, Homo sapiens
  misc_feature (1)...(461): n = A,T,C or G
aactgagacattagncatggcggcctatttcaaacaagctctagttagatgggaactaaccagaaaagtaaaaaagtaaatctctggattttgcaaatagagattcattgttggctgggcacagttgctcacgccagtaatcccaacactttgggaggccggggcctgaggatcacttgagcccaggagtcctaagccaacctgggcaacatattgaaactctgtctctacagaaaatacaaaaatgggccaggcgtgctggtgcatgcctgtagtcccagctacttaggaggctgaggtggaaggatcactggagccaggaggtcaaggctgcagtgagctgtgatcacacaactgaattccaacctgagtgatacggcgagacctcatctcaaaacaaaacaaaaacaaacaagatgtattgttgatctagcaaaagcggaatctgtgaagcaaagacg

SEQ ID NO: 11334 - DNA, 485 bp, Homo sapiens
  misc_feature (1)...(485): n = A,T,C or G
cgcccccccccagagaccnatcgagnccctnaacgtagaccctaggccanngcgnggaattcaagccagcatctaatggagaagtaatgtcgcctacactaacatacgatacaaatattgataaaactgttgccctcctaccaaatgggaaattaattactggatacatacagctatgaaaaaactggacatcaagattgtccatctctacctctgtgccaaactctagactttcattaataagaatgtatcaatattatttcagtcattgtaacatttaccacactcatgtaagatgtgattacaaaaaggatgctgaggtgggggaagggtgtatgagaactttctgtactacttcatcagtttttatgttaattcaaaacagtttcatataatgtccattaatttaaaaaatatggcagcattgttcaggaagtgtttcattttagttaatgtttaacaagcagctaaatatctaaatacta

SEQ ID NO: 11335 - DNA, 466 bp, Homo sapiens
  misc_feature (1)...(466): n = A,T,C or G
nggagcgcgccncttttnnnaagccttangaaggcgngcaattnnantaanngncnngattatttagggaatcatgacaacaaaaaagtctacattttcagtacaaatacaactgtcattcattgtcctgggtgcgtgtacatgtcagcaacaatgtcacgatctatggagtttgcgagtataagatctttaagtgttgaaggtttcatctccataattgcagctgctttagctacaaatattataggaagctgttccttctttttctttacatcaccaaaccttccagtgggtataggcattttgatatccttcaagtgacctggagcctttgttgcatgacaggattgtacctgaatatcacattctttaacaatcggacctactgaatctgtaaaactactacaagaaaacatattgaaaatacttcatgacattggcttatgcaaagattttatggctaata

SEQ ID NO: 11336 - DNA, 456 bp, Homo sapiens
  misc_feature (1)...(456): n = A,T,C or G
attcgaggacatctgntttgatgacccttagtccagtgtgggggaattcccccaagaaaggaaagccgccgcgaatatgctcatggccctttcacaagatgaccatgatgacatccacctaaaagtagaggatataattcaaatgactgactgcatgaaggccgaatgctttgagtccttgtcggccatggagctggcagaacagatcaccctcctggaccatgtcattttcagaagcattccctacgaggagtttcttgggcaggggtggatgaagctggataaaaacgagagaactccttacattatgaaaaccagccaacacttcaatgacatgagtaacctggtggcctcccagataatgaactatgctgatgtcagctcccgtgccaacgccatcgagaaatgggtggcagtggcggacatctgacgatgcctgcacaactacaacggcgt

SEQ ID NO: 11337 - DNA, 475 bp, Homo sapiens
  misc_feature (1)...(475): n = A,T,C or G
cccccccccagagnnnaatgagaccctaattgatggctgtagaacgccacgactacaggcacacgccatcacacctggcttatttttaccttttttttgtagagtcagggttttgccatgttggccaggctcgtcttaaactcctgacctcaaatgattcacccgccttggcctctcaaagtgctgggattacaggcgtgagccaccgcgcctggccaaataaagtatttttaacatacaagttaagcattctagttgtattccaaagtaaatacagtatgctcaacaaacatatccttgggttccagtccagattcaaccaacctagattaaaaattttaaatcaaaaatttaaaaccaataaaaaacagtgaccaggtatgatggctcacacctgtaatcccaacacttggggaggccgaggcaggacagcttgagcctgggaggttaaaggtgcagtgagctgtgatcactg

SEQ ID NO: 11338 - DNA, 473 bp, Homo sapiens
  misc_feature (1)...(473): n = A,T,C or G
taatgaaaacatcgacaatgcaggccatncggaccctccctgcttcagatttaccaacagcatgaatcaagaaaagttagccaaactttaggctcacgtccggatagggggcaagggtacagctcgcagaaagaagaaggtggtacatagaacagccacagctgatgacaaaaagcttcagagttctctaaaaaaactggctgtgaataatatagctggtattgaagaggtgaacatgattaaagatgatgggacagttattcatttcaacaatcccaaaggccaagcttccctttctgctaatacctttgcaattactgggcatgcagaagccaaaccaatcacagaaatgcttcctggaatattaagtcagcttggtgctgacagtttaacaagccttaggaagttagctgaacagttcccacggcaagtcttggacagtaaagcaccaaaaccagaagacattgatgagg

SEQ ID NO: 11339 - DNA, 478 bp, Homo sapiens
  misc_feature (1)...(478): n = A,T,C or G
ccccccccnnnnnaaatgagacaattgaggctctcggaacacnnatgctcctaggaggaactggaggctcaattggggcctcctgttggggtgcagaaggttccacctcctctggaaactgaattggggtctcctgctgggtttgggaagattctgtctcattggtaggctctgaaggtatggtaacctccacatctgcaggtttaactgtaatgttgggcaagtgataataagcttgatcctcacctggaggttgaactgacacctcatgattcggtagagttagactctccatagaggactctggaggcagagctggggcctcctgctgcattgaagaaggttcttcctcaaggagctgtggaagctgtgctggggcttcttgttggagtgaagaggactggatgtcttcaagggtctctggattttgagtttcgggctctagatggaattgagaaggcccaacttgctcagaggg

SEQ ID NO: 11340 - DNA, 486 bp, Homo sapiens
  misc_feature (1)...(486): n = A,T,C or G
ggggagctttgagaccttgggaataagatgaccactagnacagngcggnggaattcatcgtaaaaccttcagaaggaaaggaggctgttttgtggaccactttggggtttttttgtttcgttttgcatgtggcgattattcgtttttaaaatctatagtttttaatggaaacaacttgaccaaaaatctgtcacagaattttgagtcccatgaaaacaaagtttaatgaggaaaaagatgggggacagtccctttttggggaccaatgcagtcataggaccaacataggtgtactttcagggtggtagggaaagcagaggtggctggaagaaaattccatctcttagggacatggataagggtgttgaagctaatgatgtgtatgccatggtatggggctgagagactgatgtcattaaaagaacaagtagactggcttgaagtactaggagaaaagaaatggaaaacccacaaaagtaaattaaa

SEQ ID NO: 11341 - DNA, 482 bp, Homo sapiens
  misc_feature (1)...(482): n = A,T,C or G
cgccccccccccgnnnnnnaatgagaccctgttcagggcgggaattccagcacttatagaaataagctgttcttttgaagttgaaatacccagtaaaatgttgaagaaggatggaggatttcttcatatctgacgtttctgaaaccctttgtgtctgctgttgtgtgaagattgacatttaccatgattttccttagttactgcagaacatagagaaaaataaaagcctaacgaatagtanaaaaaaaaaaaaaaaaaaaaaaaaaaaaaaaaaaaaaaaaaaaaaaaaaggcgccccttttaattaaaggggcccttaaaaaccccggggaccccccttgtggggtttttttattccccccccttttggggtgccccccccccccggtttttttttgccggggggggggcccccccccctttttttttttaaaaaaaaaggaaaaattccccccatttttcgggaaggggtgtttttttcg

SEQ ID NO: 11342 - DNA, 447 bp, Homo sapiens
  misc_feature (1)...(447): n = A,T,C or G
naagtagaccatagtccacgtggtggaattcctacagttgttaagagatcacggtccttaatgaatgaatacatggtgtcacggaaagattttgttccaaatctcttttgaagaaaacactaaggaatggcaggaggggcaagaaaatgccatggggatataagtaagacctgagttttgtgttagcatgtaggttaaagcatgtgggtgtacattaccttatagttctgtaatgcttagactcaggaaagcagatggtgcttctgaaaagaacaccaggttgcttattctttgggtttggccacagggatcaccctgagaaagctggtacggggcgccaccctggacatcgtggatggcatggctcagctcatggaagtactttccgtcactccaactcagaggtagtgatgccacagtttaggttaccagttattggggttcctt

SEQ ID NO: 11343 - DNA, 444 bp, Homo sapiens
aattgtagacactagttcgagcgccgtaattcccacagagcgcccaagaagaaaatggccataagtggagtccctgtgctaggatttttcatcatagctgtgctgatgagcgctcaggaatcatgggctatcaaagaagaacatgtgatcatccaggccgagttctatctgaatcctgaccaatcaggcgagtttatgtttgactttgatggtgatgagattttccatgtggatatggcaaagaaggagacggtctggcggcttgaagaatttggacgatttgccagctttgaggctcaaggtgcattggccaacatagctgtggacaaagccaacctggaaatcatgacaaagcgctccaactatactccgatcaccaatgtacctccagaggtaactgtgctcacgaacagccctgtggaactgagagagcccaacgtcctt

SEQ ID NO: 11344 - DNA, 498 bp, Homo sapiens
  misc_feature (1)...(498): n = A,T,C or G
cccccctttggagaccctatnccagattggaggactttcgcagacagccggcagggtcgtggccagaacgccggccgggaccatctgcacaggcgctcgacagctccaagacgctgcggccaagcagaaagtggaacagaacgcggctcccagccacaccaagatcagcatttaccctcccattccaggagaggagagctctctgaggtgggcaggaaagaaatttgaggagatcccaattgcacacattaaagcatcccacaacaacacacagatccaggtagtctctgctagtaatgagccccttgcctttgcttcctgtggcacagagggatttcggaatgccaagaagggcacaggcatcgcagcacagacagcaggcatagccgcagcggcgagagctaaacaaaagggcgtgatccacatccgagttgtggagaaaggcctggggccaggacgcttgtctgccatgcacggactgatcatgggcggnctgga

SEQ ID NO: 11345 - DNA, 478 bp, Homo sapiens
  misc_feature (1)...(478): n = A,T,C or G
gatgaaaccctggaagnggcgctgattatcctctttaagancagaaaaattgatctctgtctgagctctgaagggtccgaagtgattttagctacatcaagtgatgaaaaacacccacctgaaaatatcattgatgggaatccagaaacgttttggaccaccacaggaatgtttccccaggaattcattatttgtttccacaaacatgtaaggattgaaaggcttgtaatccaaagttactttgtacagaccttgaagattgaaaaaagcacgtctaaagagccagttgattttgagcaatggattgaaaaagatttggtacacacagaggggcagcttcaaaatgaagaaattgtggcacatgatggctccgctacttacttgagattcattattgtatcagcctttgatcattttgcatctgtgcatagcgtttctgcagaaggaacagtagtctcaaatctttcctcataatgan

SEQ ID NO: 11346 - DNA, 465 bp, Homo sapiens
  misc_feature (1)...(465): n = A,T,C or G
natcgagaccatcatcagngngcnggaattcgcgacggtagctctagccgggcctgagctgtgctagcacctcccccaggagaccgttgcagtcggccagcccccttctccacggtaaccatgtgcgaccgaaaggccgtgatcaaaaatgcggacatgtcggaagagatgcaacaggactcggtggagtgcgctactcaggcgctggagaaatacaacatagagaaggacattgcggctcatatcaagaaggaatttgacaagaagtacaatcccacctggcattgcatcgtggggaggaacttcggtagttatgtgacacatgaaaccaaacacttcatctacttctacctgggccaagtggccattcttctgttcaaatctggttaaaagcatggactgtgccacacacccagtgatccatccaaaaacaaggactgcagcctaaattccaaataccagagn

SEQ ID NO: 11347 - DNA, 491 bp, Homo sapiens
  misc_feature (1)...(491): n = A,T,C or G
ccccccccccccgccccgccaattgagnnccntnattgtagacctctagtccangnggtggaattcacagagtgaggctctatctcaaaaataaataaataaagtatcccacagaggcgtgtgtgcagcgagtccctcgcctgagtcacactttttcttaggggagcccactaggtataaagttctgaccatcctgaccctgatggtggcctctgcagggcagttccagcctcagaagtctctgaagtctcagctgacgctggggttggtctgtgtctcagctcgtttctccctgtgccccacttgcttccttctcctccactctaaagggttttttttttctttttccagatttttgaggcataactgaaagataaaaattgagtatatttaccatgaaaaaaaaaaaaaaaaaaaaaaaaaaaaaaaaaaaaaaaaaaaaannnncccccccctttaaaaaaaaggggccctttaaaccccctttttcg

SEQ ID NO: 11348 - DNA, 504 bp, Homo sapiens
  misc_feature (1)...(504): n = A,T,C or G
agaggggcnnncactgagaccatagtcactgtggnggaattctggaggagtaccggngaagaatcacctttgtgagcaaagacatcaacaggggcagcgtggccctggtcatacataacgtcacagcccaggagaatgggatctaccgctgttacttccaagaaggcaggtcctacgatgaggccatcctacgcctcgtggtggcaggccttgggtctaagcccctcattgaaatcaaggcccaagaggatgggagcatctggctggagtgcatatctggagggtggtacccagagcccctcacagtgtggagggacccctacggtgaggttgtgcccgccctgaaggaggtttccatcgctgatgctgacggcctcttcatggtcaccacagctgtgatcatcacagacaagtatgtgaggaatgtgtcctgctctgtcaacaacaccctgctcggccaggagaaggaaactgtcatttttattccagaatcctttatgcccn

SEQ ID NO: 11349 - DNA, 474 bp, Homo sapiens
  misc_feature (1)...(474): n = A,T,C or G
gtctaacncaggnntgcccgaaccgaaatttctcgaaaaccttagcacangctgnggaantcctcaccacccacttgatttttttcattttgccaaaaaggggtatgtctttatcaaaggagagtcacagaacaaatgtttgtttgtaaagcgttccaagtattttgccacgttctggactgtcttctccctgcacaagccagggtgtgtctcggtagctgtgcgtggtgtggagtgtgtgtctttcctccctgaagctgtgcggagcgaactggcgcctccgagggacgcggctcccggggcagggcagccgtcacccctgcctcccgcccccttggctgggacgtctggggtcctgtggggcccccacaatggtcccaaacagctgcctctgccactgactgcagggacacgggcagcctggctcccaggacacgacttgtaatgaaagtttggggacatgtgattgattga

SEQ ID NO: 11350 - DNA, 409 bp, Homo sapiens
  misc_feature (1)...(409): n = A,T,C or G
acagactggctgtcctggcagggctttcaactgcacatgttttttatactttccttttttttttttttttaaaaatttttaacaaaaaaaaaaattttatccagccaatatatatagggatttttataacccctcgaggggaaacagaaaaaaaatgctagggttggttggtaaaaaacaaataccccccagttccggccttggggggaaactccaaagacctgaattctttgggggccgggggggcccagggcgggggcggggggcattcccatccttgaaaacctttaatagaactcagccctgtatcgctaaaaaaacatggcttttacttaaaaaaaaaaaaataataaaaaaaaaaaaaaaaaaaaaaaaaanggacccccggcagtccgatgtggcctcctcg

SEQ ID NO: 11351 - DNA, 441 bp, Homo sapiens
  misc_feature (1)...(441): n = A,T,C or G
nttgaagatcattagcccangcggnggaattccacacttaaagctgcgttttgactttcctactttttcttctttattcatacctgcttcccataaaaagagctaagtatgtaatactgattataaaactggatccacattatcactgttttcaaagcatcatatccctgcactggctaatgtaagtacttccttttcagtaggttaatctaaatgcagaatagaaggctgtttattctcacaatcatttctatcacttcgtcataaccactactgttcttccctgtgtaaatggcatcactattcacctttttacttggccaaaactttgatctccctgatgcttcactttctttctacctttcatcacatccatttgcaagcccggtcaactctatcctcaaaatatatttaagtagagccaaatccactgataactgg

SEQ ID NO: 11352 - DNA, 465 bp, Homo sapiens
  misc_feature (1)...(465): n = A,T,C or G
cacgggccaggnttgcnnaactgtaacttcactgaacgtcngcaaanncaaaaanannngaaactgatttctcaactccaacaccaagaaggaaaaccccatttaacacagacttaggagaaaactctggtattggaaaacttgtcactaatgctgtggaatctttagatgaagaagagaaagattattatttttcgaactctgattctgcatagcaaaatgagaaaatatgattcctgggatttttaccataaagcagacagtgtttgtattttcaactggagtacatgtattttctttgtaaagtagcttcctatgaaaatgtggacttttttgaaggtttcatatgtttgtgctcaaagtaaaatatcctcattgctgcagcttactaaaaatgtaaagaaaattgtttttgctcgtgtagatatctgtaaatttgtttttgcatattaaaatatatataga

SEQ ID NO: 11353 - DNA, 460 bp, Homo sapiens
aggaaaaaattcgagactcgtagaccatagtgcgagtggtggaattcacctggcggcggtgttagagtacctgaccgccgagatcctggagctggccggcaacgcggctcgcgacaacaagaagactcgcatcatcccgcgccacttgcagctggccatccgcaacgacgaggagctcaacaaactgctaggccgggtgaccattgctcagggcggcgtccttcctaacatccaggccgtgcttctgcctaagaagaccgagagtcaccacaaggccaagggcaagtgatttgacaggttgcaaaagcttctcatttcagagagatgccaggatcctaagtgcctgccaaacttaccaattctaaggaataagtggatggatggcattactgattcctacattactgattgattctgcatccgcaaattgttttattaaaaacattctacatcatgtgtg

SEQ ID NO: 11354 - DNA, 466 bp, Homo sapiens
  misc_feature (1)...(466): n = A,T,C or G
ggtggcccgggtgcnnaaacgtagctgtcccgatgcgtcnngaanancannnnangaagggnccatgcacatccctgacacctcacaccttatctaagtctgaagctggggagaaaggagttcatttagacttcatggatttccggtacgactttagtatctctccagagccatattttctcagtccgaattaattccccctccctaggtgcctgtaggctatggtacttcttcctcattgttttctaggtaaacttcactactggtaattaaggggaaggatatgaggaagcagtttaaatagccctgttctcattactctgaccacatacatcatagggtgctaaagttgatgaacacattaatccgttaagtaaaatggactttgtaattgtacagcatacctaagaaactcagaaggtgcatttaagagagagacctgaaagaaatagtatggatttttaag

SEQ ID NO: 11355 - DNA, 494 bp, Homo sapiens
  misc_feature (1)...(494): n = A,T,C or G
ggagaggagnnnnncctttgagaccccatgaggagcgtcggaanncncggagaaaagattgncgggcaaccgcttattttttattgtattttatttgcgtgatgtatttttttataaacagttatacttgaggcatactttaaaatgactaactgccatcacctgctggggtcctttgttaggtcattttcagtgactaatagggataatccaggtaactttgaagagatgagcagtgagtgaccaggcagtttttctgcctttagctttgacaggtcttaattaagatcattgaagaccacctttctcataaatttctctttttgaaaaaaagaaagcatttgtactaagctcctctgtgagacaacatcttaaatcttataagtgttgttatcatgactggcgagagaaaaaaacattttgtttttattagatggagcattatttacaaaaagccattgttgagaattagatcccacatcgtataaatatct

SEQ ID NO: 11356 - DNA, 447 bp, Homo sapiens
  misc_feature (1)...(447): n = A,T,C or G
attgangaccctagtccacgtggtggaattccctcacttgccatctgagcaattggcaaggatgtgccaggcctaggttaaacttggaaacatgcttgaccattctattccctggtcctttaagatcagtttggctgcaattttggctccttggaccctcaagcatagctggtaaatcaagttagagatgtaactgccttaaaacatgccagcttaggctgggcacggtggctcacgcctgtaatctcaacacttcgggaggctgaggcaggcagatcacttgaggtcaggagttcgagaccggcctgaccaacatggagaaattctgtccctactgaaaatacaaaattggccggatgtggtggtgcatgcctgtaatcccagctgcttgggaggctgaggcaagagaattgcttgaacccagggaggcggaggttgcagtgagcn

SEQ ID NO: 11357 - DNA, 454 bp, Homo sapiens
  misc_feature (1)...(454): n = A,T,C or G
attggagncccattgaggacccttagtccagngcggtggaattcggtgaaggcgcgggataagtaccggcaccctgagtgcttcgtgtgtgccgactgcaacctcaacctcaagcaaaagggctacttcttcatagaaggggagctgtactgcgaaacccacgcaagagcccgcacaaagcccccagagggctatgacacggtcactctgtatcccaaagcttaagtctctgcaggcgtggcacgcacgcacgcacccacccacgcgcacttacacgagaagacattcatggctttgggcagaaggattgtgcagattgtcaactccaaatctaaagtcaaggctttagacctttatcctattgtttattgaggaaaaggaatgggaggcaaatgcctgctatgtgaaaaaaacatacacttagctatgttttgcaactctttttggggctagg

SEQ ID NO: 11358 - DNA, 547 bp, Homo sapiens
  misc_feature (1)...(547): n = A,T,C or G
ggaacaaantttgaanaacccttcgaaccacanttcgtgtggnggaattcggngcttctccaggatccgaggcccggaccacgggtgacatatcggtggagaagctgaacctcggcactgactcggacagctcacctcagaagagctcgcgggatcctccttccagcccatcgagcctgagctcccccatccaggaatccactgctcccgagctgccttcggagacccaggagaccccaggccccgccctgtgcagccctctgaggaagtcacctctgaccctcgaagatttcaagttcctggcggtgctgggccggggtcattttgggaaggtgctcctctccgaattccggcccagtggggagctgttcgccatcaaggctctgaagaaaggggacattgtggcccgagacgaggtggagagcctgatgtgtgagaagcggatattggcggcagtgaccagtgcgggacaccccttcctggtgaacctcttcggctgtttccagacaccggagcacgtgtgcttcgtgatggagtactcggccgg

SEQ ID NO: 11359 - DNA, 444 bp, Homo sapiens
aatcgtagacatctgttcgagcgccgtgaattcgaactcatgatctgtatgtagaattggtcacaagtatgttgttgcataggctgtacagttgggaagtataaaccaaatgctacccagagacctaacccaattaagctctttgtatttctccttcaagaaataaatcttccttccttctttcttcctctttcttttaattttaaaaaaattcatcctgatttttttattttctatcttatttaaaaaataaaaataggccaggcgcggtggctcacacctttaatcccaacactttgggaggcgggtggatcacttgatatcaggagtttgagaccagcctggccaacatagggaaaccctgtctctactaaaaatacaaaaattagccaggcctggtggcacgcgcctgtaatcccagctacttgggaggctgaggcaaga

SEQ ID NO: 11360 - DNA, 467 bp, Homo sapiens
  misc_feature (1)...(467): n = A,T,C or G
ggagggcccaggtagcnaaaacgtgactcactcgaagcgtccgnaanancncnnannannngaaaacagggatgcctaccttatggggttggtgtgaggattaactgagatcacacttgaaagtgccttgcatgggcttggcatgtgggtgctcattacatagtcttcttgttttcttgcctctgggttgaggattcacagcactgcactacaagggtagcccctctccattctggataccttgctaggagagagtctgggcttccacctgcggccagggtgaagggaaaattcttgccatgtcagagatggatcaatgactatgaaaaaactagcctgtgattttttttcactctaagcattaagagctcctaaagccttttgtcttgttacttttttccccctcttgcatgctagaggtggaaggtagtcatttagaattcccccctcttccctcttcattggtg

SEQ ID NO: 11361 - DNA, 464 bp, Homo sapiens
  misc_feature (1)...(464): n = A,T,C or G
cgagggcccccnnnnataaaccttgaaacctttgnccatccnggcttagtanaagcganggaattnnnncganggcagcngattcgggaaggtggaggaagccgagggtcggggcaatgctcaggacccagggtttcccggagctgctgaccagatttccaggcttgtgggccacctcaacctggccactgtgcagggagctgttgctgctgcctggagatcctatggctccctgccagcccaggtcagtgggattttatgttaaattccttttcccctggtaactatgccaggacagccagttgggggattcatgtcaccatcccccatccccaggatctctgcaggggcccgtcagggccctgtgggccttcacctgacagctttatgctgattggccacgctcaacccaggtatccagaaagccacttccagtcctcactataccactgtccttctcttcg

SEQ ID NO: 11362 - DNA, 481 bp, Homo sapiens
  misc_feature (1)...(481): n = A,T,C or G
ctgcccatgaaaacgagagcatcggacanngcgnggaantcaacttgacaaactggagaactctgcagcccccaagaagaagggatttgaagaggagcacaaggacagtgatgatgacagcagtgatgacgagcaggaaaagaagccagaagcccccaagctgtccaagaagaagttgcgccgaatgaaccgcttcactgtggctgaactcaagcagctggtggctcggcccgatgtcgtggagatgcacgatgtgacagcgcaggaccctaagctcttggttcacctcaaggccactcggaactctgtgcctgtgccacgccactggtgttttaagcgcaaatacctgcagggcaaacggggcattgagaagccccccttcgagctgccagacttcatcaaacgcacaggcatccaggagatgcgagaggccctgcaggagaaggaagaacagaagaccatgaagtcaaaaatgcgagag

SEQ ID NO: 11363 - DNA, 512 bp, Homo sapiens
  misc_feature (1)...(512): n = A,T,C or G
agggaagccaggccggnnnnntttgaaaatgatgtcactagtcagtgtggtggaattccaggccttcctgagctggccaaagctcccccaaaactcctgcctgcaaacattaagccaggtgctgtggggacacagatattgtgtcatcccacccactcccagtggtggcattaacctaagaagctgcttagaaattgtcttgatgagcttcgagtcagtgacaagaaaaaaaagaaaggaaaacaaattgtcctgaagtggactccagcgtttccaagagcttccagtgctttcttctgatgatcacactgctggggcttggaggacagatagggagaaaggccccctggggaagataactcaaatcagggttgggaagtggggctatgccttctgccagcctccttctccctccgtccctaagcgaaccccaccaacagcgagggaggagggcaactccacctgctgttagctcggaagtcactgccctggggagcagcgtgtaactcacc

SEQ ID NO: 11364 - DNA, 495 bp, Homo sapiens
  misc_feature (1)...(495): n = A,T,C or G
gctgaggcactcgaannnnnctagncngatcgnacanncnngaannnannaanaataatttttattcttgggatagaaaaatagtatgtgctatctctaatacgctacttcgatatttattaaagaagtatttttaatgtagtgtccacaggctcatttcattgaaaacaactgactatgatgatagacagctcctgattggcaaaagttcgatggtatattcagaattaaattttgcctgcacacctaaacactgacaacatttagcttaaaggttttccatggagaagagtggtaagagctgtagttagcaaaattggcatcctctttagggtgtcaattctgtgctgctttgcaaattgatgaaacttttgattttctgtttggcaatgctagtcagtgttcacttcttacagattagccaagaattgttatctaaatgccgaaacttattaatggaatccatttaaactaacacaacatttttgggaggcg

SEQ ID NO: 11365 - DNA, 458 bp, Homo sapiens
caacacagaactagcacataagaaagctaaaaggccaggcactgtggctcacacctgtaatcccagcacttttggaggccaaggcaggcagatcacttgaggtcaggagtttgaaatcagcctggccaacatggtgaaacccgtctctactaaaaatacaaaaattatctgggcatggtggcacgtgtctctaatcccagctactcgggaggctgaggcaggagaattgcttgaacccaggaggtggaggttgaagtgagccgagatcacgccattgcactccagactgggcaacagagccagactctgtctcaagaataaattaaaaagcagccagacaaccctatcattcaaattcaattgtaaagaagaaaagaagatattaattaaggtgccatgctaaattttttgacccatgtagttctatggattctaccagtaacattgcatgcttaggt

SEQ ID NO: 11366 - DNA, 462 bp, Homo sapiens
  misc_feature (1)...(462): n = A,T,C or G
gacgggccagggtgnnnaatcaagacttactcgagcgtcnggaanaccnaagnnanntncngnctagcctcccagtcgctgggaccacaggcgcacgccaccacgccggctaattgttgtattttttgtagagacagggtttcgctgtgttgcccggctggtcgtctggggttttcgggacagcgcgcgtcagtgaggtgcgtgaggatcgagtgcatctggcaggttttgatgcagaaagttgccttgggccgccagcatgagcattgtaggctgtagactttggtgtacaggttgagcgtctctaatctgaaaccccaaatccaaaatgccaccaagtccaaagctgagtgctgacaggaagctccaggaaaatgctcgtcgcagtgttttctgtttggggttttcaggtgagggctgttgaactggtgaatatgatgcagacgttccaaaacaacctga

SEQ ID NO: 11367 - DNA, 462 bp, Homo sapiens
  misc_feature (1)...(462): n = A,T,C or G
ntggggcnnnnttcgagactcgtagtacgtgcggtggaattccttccctgaacgttttcttctttccctggacaggcagcctcctttgtgtgtattcagaggcagtgatgacttgctgtccaggcagctccctcctgcacacagaatgctcagggtcactgaaccactgcttctcttttgaaagtagagctagctgccactttcacgtggcctccgcagtgtctccacctacacccctgtgctcccctgccacactgatggctcaagacaaggctggcaaaccctcccagaaacatctctggcccagaaagcctctctctccctccctctctcatgaggcacagccaagccaagcgctcatgttgagccagtgggccagccacagagcaaaagagggtttattttcagtcccctctctctgggtcagaaccagagggcatgctgaatgccccctgcttactt

SEQ ID NO: 11368 - DNA, 487 bp, Homo sapiens
  misc_feature (1)...(487): n = A,T,C or G
tcacgatctactgtgannntcacgaactagcagannnncannnnnnnnggggaatggaagaccgcaagtatgagtatctcatgacccttcatggagtggtatatgagagcacagtgtgcctgatgggacatgaaggaagacagactttaaaccttatcaccatgctggctatccgggagttagctgaccaaaatgtcattcctaatgtggctaatgtcacttgctattaccagccagccccctatgtagcagatgccaactttagcaattactacattgcacaggttcagccagtattcacgtgccagcaacagacctactccacttggctaccctgcaattaagaatcatttaaaaatgtcctgtggggaagccatttcagacaagaccggagagactatattaatttcttataatattggggccgcttctatctaaaggggccgtttaaacccgtgtgaaactcccgaggtggcttttatggccc

SEQ ID NO: 11369 - DNA, 490 bp, Homo sapiens
  misc_feature (1)...(490): n = A,T,C or G
natcgagatcgatatcagtgtggaggaactccgcctaccctctcactggctgaaaagcaaaggggcccacaccaccatggcagatgccctctggcgccttcgagatttagatgctccgggacaccctcaacattcgccaagcatacaacctagaaaatgttgaatcacatcattacgtttcttttatatagaagcataaagagttgtggatcagtagccattttagttactgggggtggggggaaggaacaaaggaggataatttttattgcattttactgtacatcacaaggccatttttatatacggacacttttaataagctatttcaatttgtttgttatattaagttgactttatcaaatacacaaagatttttttgcatatgtttccttcgtttaaaaccagtttcataattggttgtatatgtagacttggagttttatctttttacttgttgccatggaactgaaaccattagaggtttttg

SEQ ID NO: 11370 - DNA, 472 bp, Homo sapiens
  misc_feature (1)...(472): n = A,T,C or G
ctaaacgttganaccctnnnnattgagtgcctactccatgtggtggaattcgaacctcaaagaagaaaataaatatatttgaatggtcatctatacatgcattcttcagagtgctagaagcaattatttcttgacaatgtacaaaacgattattgaacagagagcgagaactcatgaaaaaaagttttctgaaaagtagatgatgcatttatggaataaaaaaagattaaacatctggtgatcattattattttagaaattcacattagaaaagagagttattaatggctactttgaaaattatgtatgaaaccttgtctttttaatagtttgtttacttacataatttgactttgaaataatataagtaagtatgatcaagttgataaactgattagggaagcaatctttttttgtggcacattagtttctgtgcagatttactaaagtaattttctacctgaggaaaata

SEQ ID NO: 11371 - DNA, 448 bp, Homo sapiens
  misc_feature (1)...(448): n = A,T,C or G
nactgagtacactagcccgngcggnggaattcgagatctgtgtcataacgtgcgtgtgagcggatacataacccgagagaggcgtgagcagcgctgtgtttgcgagcgggagcaaggggcgccggctggggtgtgtgctcctgagctcttcagaaaccaggctgatttcacgaacattgctgtggattcccacggcctattccgatcgaagcgagatggctgaactcaatactcatgtgaatgtcaaggaaaagatctatgcagatagatcagttgttcccaacaaaagccataatgaaatagtcctggcgctccaacagtttgattttaatgtggataaagccgcgcaagcctttgtggatggcagtgcaattcacgttctataagaatggaatatgacaggaaaatggaagaacaataaaaaaaacaaaaagggggcggttggatg

SEQ ID NO: 11372 - DNA, 470 bp, Homo sapiens
  misc_feature (1)...(470): n = A,T,C or G
ggncgtcccaatggagaccatagatagagcgctctagncgaacccgtttcgggcctcagagcgtctggtgagatgctgttgccgctgctgctgctgctacccatgtgctgggccgtggaggtcaagaggccccggggcgtctccctcaccaatcatcacttctacgatgagtccaagcctttcacctgcctggacggttcggccaccatcccatttgatcaggtcaacgatgactattgcgactgcaaagatggctctgacgagccaggcacggctgcctgtcctaatggcagcttccactgcaccaacactggctataagcccctgtatatcccctccaaccgggtcaacgatggtgtttgtgactgctgcgatggaacagacgagtacaacagcggcgtcatctgtgagaacacctgcaaagagaagggccgtaaggagagagagtccctgcagcagatggccgaggg

SEQ ID NO: 11373 - DNA, 552 bp, Homo sapiens
  misc_feature (1)...(552): n = A,T,C or G
cggancgcanntttgatnncccccctcgaaccacagttcgtgtggnggaattcagtgtttgaagatgctgcggagatcagattagtcagcaaggatgggaaaagtaaagggattgcttatattgaatttaagacagaagctgatgcagagaaaacctttgaagaaaagcagggaacagagatcgatgggcgatctatttccctgtactatactggagagaaaggtcaaaatcaagactatagaggtggaaagaatagcacttggagtggtgaatcaaaaactctggttttaagcaacctctcctacagtgcaacagaagaaactcttcaggaagtatttgagaaagcaacttttatcaaagtaccccagaaccaaaatggcaaatctaaagggtatgcatttatagagtttgcttcattcgaagacgctaaagaagctttaaattcctgtaataaaagggaaattgagggcagagcaatcaggctggagttgcaaggacccaggggatcacctaatgccagaagccagccatccaaaactctgtttgtcaaa

SEQ ID NO: 11374 - DNA, 524 bp, Homo sapiens
actccctggagcctgggaagttgaggctgcagtgagccgtgatcatgccactgcattccagcctgtgtgatggagagagaccctgtctcaaaaaaaataaagatgtttgttgggtgaatgcacaaataagtgagctttgttcccccatccccaccctggaactgcactttcttaaccctttagaagttaaagtctgacacggctgctgcagctgtgcgccaaatgaatccacatatccgggtgacaagccaccagaaccgtgtgggtcctgacacggagcgcatctatgatgacgattttttccaaaacctagatggcgtggccaatgccctggacaacgtggatgcccgtgagtttggaggcgggtgaggtggtcacgggcaaagttgtgtgtgtttcggtgtgtatataccaagaggggtggccgtctttctgtcctctcctgatgtttctttcctagctctcgctttgtgctccccacaggcatgtacatggaccgccgctggtctactaccggaagcact

SEQ ID NO: 11375 - DNA, 505 bp, Homo sapiens
  misc_feature (1)...(505): n = A,T,C or G
ctcgagacccctttccagngtcgtagaccctcatccatgtggtggaattcgtcgaagcgaggacgtggtgggtcctctggtgcgaaattccggatttccttgggtcttccggtaggagctgtaatcagttgggctgacaacacaggagccagaaacctgtatatcatctccgtgaaggggatcaagggacggctgaacagacttcccgctgctggtgtgggtgacatggtgatggccacagtcaagaaaggcaaaccagagctcagaaaaatggtacatccagcagtggtcattcgacaacgaaagtcataccgtagaaaagatggcgtgtttctttattttgaagataatgcaggagtcatagtgaacaatacaggcgagatgaaaggttctgccattacaggaccagtagcaaaggagtgtgcagacttgtggccccggattgcatccaatgctggcagcattgcatgattctccagtatatttgtaaaaaataaaaaaaaag

SEQ ID NO: 11376 - DNA, 453 bp, Homo sapiens
ctcccatctgcatgtggcattatcagtttgcccaggcacgaaagcacccagcccccgtaggtctctctctaggtcctggattcttggccttttaaggtcaccccctacattctctaggccaggccatgggttgaagacatacttatttacagaacatatcaggttgataggacaatgcagacataatcattacagttgatcttactgaggtacctatgctatgcgaggcaccattaacttcaatgtttattacaagggtaatgactattatgggtaaggagtgttatgagctctaatttagtgacagggaaactgaggcacgggagatggaatgaagcgaggttacctagtgaaaaagtgataagtcacaagccagaggctgatgccaggcagtctagctccagagccccggctcccagccactgctgactgcaaagctgaagggtacatttt

SEQ ID NO: 11377 - DNA, 452 bp, Homo sapiens
  misc_feature (1)...(452): n = A,T,C or G
ntttggagatcgatagcaattgcggaggaattctgaatatattgatggtgatgaaaagaacctgatgagagaaagaattgccaaaaaattaaaaaaggacacaagtgcgaatgttaaatcagctggagaaggagaagtggagaagaaatcagtcagccgcagtgaagagctcagaaaagaagcaagacaattaaaacgggaactcttagcagcaaaacaaaaaaagtagaaaatgcagcaaaacaagcagaaaaaagaagtgaagaggaagaagcccctccagatggtgctgttgccgaatacagaagagaaaagcaaaagtatgaagctctgaggaagcaacagtcaaagaagggaacttcccgggaagatcagacccttgcactgctgaaccagtttaaatctaaactcactcaagcaattgctgaaacgcctgaaaatgacattcctgn

SEQ ID NO: 11378 - DNA, 551 bp, Homo sapiens
  misc_feature (1)...(551): n = A,T,C or G
gggaaaccannttttgatnaccannctcgaaccacagtccatgtggtggaattcacggctcctctctaacctcctttaccctcatctgtctggaggggagctctgtctgtccgtgttatttattgctacttcctgcctggtctcctgcccccacacctggccctggggcctgtacaaaagggacatgaaataaatgccccaaagccaaatgccagtctagatcctgatgctttctgacccgcctttgggcagcctgccatcccaccgtctacagaacgatgacagaatttctccttgccctcggctgagcctggtatgcaggcaagggcccagggattttagccttgaacccagggccagtggccactaagttgctcccactctgagctggtagctgcgagctgggtctggtttgacttatggatgatttcacataaaaatcctcatgctggtttttgccgcagtcagatcagctgacagcaccaggcttgcacttgtacgtggacatgacttgctgaaagggagggtcctgtgcactggccgcagtcccc

SEQ ID NO: 11379 - DNA, 480 bp, Homo sapiens
  misc_feature (1)...(480): n = A,T,C or G
cggacgcaccaattgagnnccnctngatcgagcaccactagtccangnggnggaattctgtgattagtgtctcatgtggaaccatggcatggttattgatgagtttcttaaccctttccagagtcctcctttgcctgatcctccaacagctgtcacagcttgtgttgagcaagcagtagcatttgcttcctcccaacaagcagctgggttaggaaaaccatgggtaaggacggactcacttctctttttagttgaggccttctagttaccacattactctgcctctgtatataggtggttttctttaagtggggtgggaaggggagcacaatttcccttcatactccttttaagcagtgagttatggtggtggtctcatgaagaaaagaccttttggcccaatctctgccatatcagtgaacctttagaaactcaaaaactgagaaatttactacagtagttagaattatatcacttcan

SEQ ID NO: 11380 - DNA, 491 bp, Homo sapiens
  misc_feature (1)...(491): n = A,T,C or G
nctcgagatcgctaggccgtgtggaggaattccccacagaaatgtgattgataacagtaaagccacactactcaagtgcctgaaatacccctcattgtcttcttcaggtggcaagggctctggaacagccacataaagcccttgaagataaggatggtcaaacaaaataatatcatacctggagaaactcagatcttggtaagatttactggttgggaatccaaagttaatgccaagaagcagccgccagttgggatcaaatgtgagcctatggatcaagacggttacctggcacgctggccacaatctacctcactcttatcagagtctgcgctactgacagtgctttcagctctgagttgaggcacctcgaaccttgtttttgtggtgaaggatcctaaagtgctgtggggagtgatcacatttttgacaacatccctgactccacctcttctgccacaaacgtcagcatggtggtatcagccggcccn

SEQ ID NO: 11381 - DNA, 488 bp, Homo sapiens
  misc_feature (1)...(488): n = A,T,C or G
gtagtgccnnaggtnngnnttactgatatctctcntagngcgtcgnaanncnnngnaatnaanggaacaagtgatctagaggccttttataatgaaatcactttttgtggcacttttgaagtacgacataatgtggggcaggcttcggatagtgtaactggggaccaagtttgaggtagcggaaatgagacattgctgaacaaaagagaactgggtttacctgaccctctaaagcgctaagtactgtcagcctgaaaaaaatcttctatacagaaactcttccaaatactatatcagtaatgtctgaatgatttcagatgtgaaaattgacatattttagttgaaatacctttctggactacagacttacatatcatgtgaatacttacctatttctacccgagttgcagcatgtattctgaaagcttaatgcaaataaatcccactttagatcttacagctaactgtgtgccttagaaaccaggtaa

SEQ ID NO: 11382 - DNA, 445 bp, Homo sapiens
  misc_feature (1)...(445): n = A,T,C or G
nttcgacgattgggaccattgcggagggcggnggaattctccaaatgggagatgataatgtctctttagttttttggtatttggcctcttttaaagcctgtcggatgtatgggagaaaacaatgaacgtgctttgatttcctatcagtcactcttaagaacatacatattgtttaagtaactcggtcttttttatctgattcttgaggcactatgggtagcaaataaccacttacaaatttaaatgtaatatacactccttttctgtgtgtcaagtccttatttttaggtgcatattgacatttaaatgttaattattgtttggcatataatatcaaaaatctattatttattttatgctgttacagttaaaagatgtgatttatgacatactgaatcaacttgccttccaatttagtgtgtaatatggtaagcatttatacttt

SEQ ID NO: 11383 - DNA, 468 bp, Homo sapiens
  misc_feature (1)...(468): n = A,T,C or G
nttagaggcccctngnnnnaaactgatgacatnagtccagtgcggtggaattcccggcgcggcagctgtctgggctgctgcgcgccgcctaggtgtctgggcgatctatgggcaagagcaagggccacgatgacagattacggcgaggagcagcgcaacgagctggaggccctggagtccatctaccctgactccttcacagtattatcagaaaatccacccagcttcaccattactgtgacgtctgaggctggagaaaatgatgaaactgtccagactaccctcaagtttacatacagtgaaaaatacccagatgaagctcccctttatgaaatattctcccaggaaaatctagaagataatgatgtctcagacattttaaaattactagcattacaggctgaagaaaatcttggtatggtgatgatttttactctagtgacagctggtgcagaaaaaataaatgan

SEQ ID NO: 11384 - DNA, 450 bp, Homo sapiens
  misc_feature (1)...(450): n = A,T,C or G
ncctgangaacactagtccagngcggnggaattcgggccccaggctacagagccatccactccctcggggccggagagtggccctacaccagccagcgctgagcagaatgagtagctaggtaggggcaggtgggtgatctctaagctgcaaaaactgtgctgtccttgtgaggtcactgcctggacctggtgccctggctgccttcctgtgcccagaaaggaaggggctattgcctcctcccagccacgttccctttcctcctctccctcctgtggattctcccatcagccatctggttctcctcttaaggccagttgaagatggtcccttacagcttcccaagttaggttagtgatgtgaaatgctcctgtgcctggccctacctccttccctgtccccacccctgcataaggcagttgttggttttcttccccaattcttttccaaga

SEQ ID NO: 11385 - DNA, 550 bp, Homo sapiens
  misc_feature (1)...(550): n = A,T,C or G
aagaaaaaaaaccttcgacncaccatttgtgtggngcaattcgggagnccgccggcgcagcagtttctaggtccccactgtccccgccgtcccgccccttcgcgtgccgggaaccggctggcttccgagccgcactcgccgatcctccaggcatgccccgctacgagctggctttaatcctgaaagccatgcagcggccagagactgctgctactttgaaacgtacgatagaggccctgatggacagaggagcaatagtgagggacttggaaaacctgggtgaacgagcgcttccttataggatctctgcccacagtcagcagcacaacagaggcgggtatttcttggtggatttttatgcacccaccgcagctgttgaaagcatggtggagcacttgtctcgagatatagatgtgattagagggaatattgtcaaacaccctctgacccaggaactaaaagaatgtgaagggattgtcccagtcccactcgcagaacaattatattccacaaagaagaggaagaagtgagatgattcgccagattctan

SEQ ID NO: 11386 - DNA, 493 bp, Homo sapiens
  misc_feature (1)...(493): n = A,T,C or G
nctcgagttcgataagcactagtccagngacgtggaattcaaaccattaccttacaatttttttctttcgaagtgtggtgtcttttatatttgaattagtaactgtatgaagtcatagataatagtacatgtcaccttaggtagtaggaagaattacaatttctttaaatcatttatctggatttttatgttttattagcattttcaagaagacggattatctagagaataatcatatatatgcatacgtaaaaatggaccacagtgacttatttgtagttgttagttgccctgctacctagtttgttagtgcatttgagcacacattttaattttcctctaattaaaatgtgcagtattttcagtgtcaaatatatttaactatttagagaatgatttccacctttatgttttaatatcctaggcatctgctgtaataatattttagaaaatgtttggaatttaagacataacttgtgttactaatttgtat

SEQ ID NO: 11387 - DNA, 444 bp, Homo sapiens
  misc_feature (1)...(444): n = A,T,C or G
nttgagatcgatancaattgcggaggaattccagctgagcctctacatgaaatctgtcgcaggcattggacaaactgggaagattgagcctgtggtcctgccgctgctctggtttgcagagagcggggccatggagggggagactcttcacacattctacactcagctggtgttgatgcccaaggtgatgcactatgcccagtacgtcctcctggcgctgggctgcgtcctgctgctggtccctgtcatctgccaaatccggagccaagagaaatgctatttattttggagtagtagtaaaaagggctcaaaggataaggaggccattcaggcctattctgaatccctgatgacatcagctcccaagggctctgtgctgcaggaagcaaaactgtagggtcctgaggacaccgtgagccagccaggcctggccgctgggcctga

SEQ ID NO: 11388 - DNA, 497 bp, Homo sapiens
  misc_feature (1)...(497): n = A,T,C or G
gtagtgaacgtgtgtacagaagttttcaatcttaactatatagtgttagtgtgatgctatactattggaaaaatagcagcttttttctattttataagttgtatgcataaacataagatttgtaatgtttcatttataaactgccttcttcaacacatgttaatagtgttttctcaaagtattgatagtatgtcttccagaatttcacaatatgcttacagtaaatatttcctagcttgttgaaatgttcaattctttgttggctttcttcttgattctgtgggggtgtataacaagcctgaaggacattgtaatcatttcttacaaggtgaaaattaagaaagattgtgtatgagagcctatatagttgttttatccattatcatctttgattaagactttaaaaaaatgctatttccagttaatgcatttggccctattgaattttcagggaccagaaaacanttaaaagttctgcatcttataatggtaaccan

SEQ ID NO: 11389 - DNA, 406 bp, Homo sapiens
gtgcagcttccccatccccactcttagggcacaaatgcaggagcagctttcccatccccactctttacgcacaaatgcaggtgcagcttccccatccccactcttagggcacaaatgcaggtgcagcttccccatccccactctttatgcacaaatgcaggtgctgtgagcgctttagaatcctctgctgcaggtgactttgcttcagcgaaccacagaatggtcacatggttttatgcatatgttatttcagggaaaagcaaggataaagatgccttcagaaattgtatttttgggctgggcgcggtggctcacgcctgtaatcccagcacttttggaggctgaggcgggcggatcacggggtcaggagatcgagaccatcctggctaacacggcggggctccgt

SEQ ID NO: 11390 - DNA, 471 bp, Homo sapiens
  misc_feature (1)...(471): n = A,T,C or G
gccacccnaatggagaccatangtagaagcgcggtattcctgnggggtaggggctgagttacaaatgggctgagaaaaggaccctcatatagggtgctggaaaacaggagaaagggaaggaaagtgaagttatccgaagtttgttaagcacctttttactgacctttttggggtttttttggtgtagagggtgtgtagaaatagaaaagtaaactccagttctgttggatttagcgcgactggtgcccaggctgcccagctcacacaagctcttctctgggaaaaggagagcttgtcctttgtttgtttgtttgttttaactgatggtttcgttttgtttttttttaagatggagtctcactctgtcgccaggctggagtgcagtggcgcaatctcggctcactgcaacctccgactccctggttcaagcgattctcctgcctcagcctcctgagtagctgggattacagg

SEQ ID NO: 11391 - DNA, 472 bp, Homo sapiens
  misc_feature (1)...(472): n = A,T,C or G
agggnnagggcccggnnnnnnnnncctgatgaccctttgatgaccttagaaagcgcgggggaattatgctggaggaagtcagccctgagctggtgtgcagcatgctgcacctctgctctggcacgcggctgcctgcactgaccgttcacgtgactcacccaaaggacggtggcttctgcgaagtgtgcaagaagctggtgggttatttggatcgcaacctggagaaaaacagcaccaagcaggagatcctggctgctcttgagaaaggctgcagcttcctgccagacccttaccagaagcagtgtgatcagtttgtggcagagtacgagcccgtgctgatcgagatcctggtggaggtgatggatccttccttcgtgtgcttgaaaattggagcctgcccctcggcccataagcccttgttgggaactgagaagtgtatatggggcccaagctactggtgccagaacacagn

SEQ ID NO: 11392 - DNA, 446 bp, Homo sapiens
  misc_feature (1)...(446): n = A,T,C or G
ntttgaagatcgataacaattgcggaggaattcctttcagtaatcattcaaccaacgcttccatgtctctactctgtcgtaacaaaggctgtgggcagcactttgaccctaataccaaccttcctgattcctgttgccatcaccctggggtcccaatcttccatgatgcacttaagggttggtcctgctgccgaaagcgaactgtagatttctctgagttcttaaacatcaagggctgtactatgggaccacactgtgctgagaagcttcctgaggcccctcaacctgaaggccctgctacaagcagttcacttcaggagcaaaaacctctgaatgtgattccaaagtcagcagagaccttgcgccgggagaggcccaagtcagagttgcctctgaagctgctgccgctaaatatatcccaagccctggaaatggcattggaacag

SEQ ID NO: 11393 - DNA, 445 bp, Homo sapiens
  misc_feature (1)...(445): n = A,T,C or G
ntagaaaactgggaccattacaacaggcggnggaattcgtggagttaattttccaaagcaaaaggccattagggtttctacatttcatttcatttcattcttttctttcacaagaaatacattctctgtgtgtctttttgttgctctgtcactctatgccctttctctccgactgaacaaatagcttatccatgtgcagtggttttaatacccaaacaatctagacaccaagcagctattttttccggtcctgtgatatcagaattgaccaaggaatacgtatattgtaattgacacgtggtggtatcttccaggtacaaattctctaaattttgtggttagcagaatgggacttgtgataagaatagcttggttttagcataactagggtttaaaataattgtttaattatagagactgaccgggctttggccatctaaactgg

SEQ ID NO: 11394 - DNA, 469 bp, Homo sapiens
  misc_feature (1)...(469): n = A,T,C or G
nttttgatgacactagtccagngcggnggaanttgaataccctgggattataggcgngagccaccaggcccggcctgtcttttgtttttcttaagacactgatagaaataacaacattataacttttttaaggacatgtaacggtttgtgggaaggtgggtaaaggtttggctatgccctgaataagttttgttatgcttaagaatgaggaagaagtgtgatgattttggtctcagcagcattagtctgaaccgaaactcaatgataatttcacccccaaagctacatagcaagaaacctaactgagtatgtatggctgagtctctactgccggttgcctagagagcctgagtactgagcctgggtcagccccaggaaccctgaacatagtcattgtctatagattttgtagcttactaacatgaatgcgttttcttccagaaacaaatagaatactattttaagtagg

SEQ ID NO: 11395 - DNA, 449 bp, Homo sapiens
  misc_feature (1)...(449): n = A,T,C or G
nttcgagtgcactagcccagtgcggtggaattcggaggttgcagtgagcacgatcgtgccattgcactccagcctgagcaacaagagtgaaactctgtctcaaagaaaaaacaacaacaaaactgtgattctccatctaactttttacaattatcctttcacaattcaagaaagtgtgaatgcaagtcattactaacagtatctcagtaaaagtagtccaggagcaaatattttctttttaactgggttcccagctagttccattcccttgaattcagtggcaaagtcactgtcaataaaaggtttttactcttcttcctttttgaattgtaacttgcttactgaattcaggaattgggtgatcaaaagataactgcttattatagtaagataaccttggaacagaactgtgattaaaaacctgaataataaaaaacacacaagacccn

SEQ ID NO: 11396 - DNA, 467 bp, Homo sapiens
  misc_feature (1)...(467): n = A,T,C or G
catcggcnccntnnatttgagaccctaggccagngcggnggaattcgcaaggggctagaagttcacctcctgacagtattattaatactatgcaaatatggaataggagaccatttgattttctaggctttgtggtagagaggtgaaggtatgagaattaatagcgtgtgaacaaagtaaagaacaggattccagaatgatcattaaatttgtttctatttattcttttttgcccccctagagattaagtccagaaatgtactttctggcacataaagaaatcttgaggactttgtttaaaccttccataaaaaaacaattttcggtttctcgggttctctctctctctctctctctctctctgtncttctgactctctgnctctctgtctctctctctctctctctttctttctttgggnattttattcaagatgagttggacccattgccagtgagtctgaatgt

SEQ ID NO: 11397 - DNA, 489 bp, Homo sapiens
  misc_feature (1)...(489): n = A,T,C or G
tcacgacctttcgnanngtancgaagccatttgtaganaccnnnnnnngaanannatttgattaactttaaaattaagtatatgtgtgtatatatacatatgtatgtttatatacacacatgtatctgtatagctggatatatacatatatacacatagacatacagagaaccactactttgtaatagtgtacagtttggtttatatctctttactttttttgttactattttatctggccagcgtaatagttttatttagattttttaaaattctgtagattaaagcaaatgacagttattgaactatcacaaaactattaaactgtggtacatttaatgtgtatttaatgtgtggaatctcattatggtaggcagaataatgccctatgctccccaaagatgtttgtgtctgaattctcaaagtcgtaaagggctaaatgggttaaatgggaaaggagaattaaggttgccgggggactgagatgct

SEQ ID NO: 11398 - DNA, 445 bp, Homo sapiens
  misc_feature (1)...(445): n = A,T,C or G
ntttgaagatcgatagcaatgtgcggggaattccatagatttatatattaatttgtagaaaatattttctttatatatttccttaccatacaaggtgccttgttcatcaggaaaacttttgttttgtattttgacaagaaaggcaccttcagagtttctttttaagtatagttgacaagtgtataaatgttacacttactttcagagttctttttagatctaaagaagtcagttcaaaaatggaaatcaacaatgttaggagaaatctgaattctgttaagttagtaagtattatgtatagcatctgtttttaaccatttccattcttatccctagtgtatcagttgatcacactaagaaagcttaaagattgagcatttgaaataaatgctctttataaatgattagatttttgaagggatattgaaatcattgcgctgtgatt

SEQ ID NO: 11399 - DNA, 468 bp, Homo sapiens
  misc_feature (1)...(468): n = A,T,C or G
ggagcgggnnnnntnnncatagatnatcgtagtccatgcggnggaattccgcctggcctgtagccagctcccacctcccctcccaccttctaaaatgcttgcggatctcacgtggccgaccctaaccagatacacatggggaaaggaatcaggtggcacacataccgcctttactccatagagaacttccaattgtgggtaagaacaaagccccacctctgcctaatagatgcagttttccacctgcagccaaaaagacaacctgttattagcttttttcccagaggacaggcatctctatgaaactgccattgcaaaatttgccgacagtgagataaccagctccattttgcttctaacctccatgccctccttgtttactgctgcacgcaggttgaactgtgggaggaacttattttaaaacaaagatgataacagccctttcccaaaggaaacctttcctggaga

SEQ ID NO: 11400 - DNA, 469 bp, Homo sapiens
  misc_feature (1)...(469): n = A,T,C or G
attcgtagaccctagtccagngtggnggaatnttaaggtccctggaacacaatagcttcttattgaatttaactactaaattaccacaaatattcatgacaacaaattataaccatatattgggaaaatgccaacataatcaagccaaaaatatccatatctattaatcaaagactgtattctacagatttgcaaggattttgtcttttttagcttcaagttattatagagtgctattattaacatagaactacatttttgcccacttacttcagtatggcagtgttaggctgaaatatcttactctaaatatttatatgttgaagtcatagcccccagtatctcaaaatatgactgtatttggagacaggatctttacacatgtaactaagttaaaatgaggtgattccggtaggtcctaattcactatgacttatgtccttattagaggagagtgacaaatggggag
